United States Patent Application Publication US 2023/0272434 A1 - sequence listing, part 10

SEQ ID NO: 15898 - protein, 1387 aa, Carterocephalus mandan
MEAVRKRKLPQAGTSADCEGESRPQPDRLGSSTYSGGSNVTQSFYSLRPRSTRGKVLQRTQNQKSPSSSSSVGSLFSSLPSSNSFIDRKSSTITSNSILQEDVALEENLLSDSVPTTCSSRTRNKWSSEMNEFILRTYLHLTLMETDIRAYLPSLHLKFIERFPERRNISRQRIGDQRRAIIHKKLLPQEDIDRIYKEVQSEIQNIHNTPQNFIQPHMISTIHTQNTQLTQQKNQRMSWSIQLNESVMRCYYKVTNIGTQLTAYRKNLHTEFINTHPELSHLSEQRIADQRRVIIQNNYISNDRLKNLQEEVAAEINIISIDEIPNVNPSNQTNNTHASSPHLCSSQTLQHLHHTDQTNSSLCRLQDISNNQNITLDIQKIEKTFDETWQSFNNSNPTSRPFIPKQKTSRRFSQIVEHINSNILPKRVTQNDSFDVTHTLIYCAAYTATVCNGSRVRPHNSVTQQTRIFKIPAWQNRLQNKIEKLRRDVARMLQYIHGNRSSRLIKHIDQIKNTHRIHSKHEDPNLTNEQFLDTLTQKLNAASTRLKRYLSCTLRKKQNTQFKNNERQFYRTLTTQSQNRHISANSNNAPQPNALHNFWANIWTNPVQHSHNADWITKDCEKYVSVPEMEFNTVTIDIFTKALTKTHNWKAPGSDNIHNFWYKKLSTMHPSLHNHINDFIKTPSTMPNFITQGTTHLIPKGIDYQNPANYRPITCLQTFYKILTSCIAEHIDEHITDNNILAEEQKGCRKRSQGCKEQLVIDSVAIKQTLKNKSDVSTMYIDYQKAFDSVPHSWLKYILHHYKIHPSLITFLEYSMRHWRTKLKIRLDNSITETDEIPIRRGIFQGDALSPLWFCLALNPLSNMLNVSNSGLIISNNEQTRISLTHLMYMDDIKLYSNSTQSLHHLADITHTFSQDIKMEFGIDKCKTCTLKNGNIVQNNYTLTPGTQIESLDQESSYKYLGFQQTGQINQKQTKADLRKKFIHRLNAILRSQLNSRNIVQAINTYAIPVLTYSFGIISWSQSELKALQRIINTSMTRQRKHHPRSCVQRLTLPREEGGRGIVDINNLHNRQITSLRTYFYNHAAHSLLHKAIVNCDKRLTPLNLHNKHTQKNERIVDEKEKIAAWEHKSLHGRHRQDLLQPHVDKTASNAWLRYGDLFPETEGFMLAIQDQVIETRNYQKYICHIPNLVTDMCRRCHSASESIQHITGACKSIVQTDYKHRHDQVAAILHQHLAFKHKLITEKVPYYKYTPETSLENNNFKIYWDRTIITDKTIHFNRPDIVILNKLEKTVHIIDIAVCNTHNLQNTHTEKIAKYIDLQIELKSQWKVNQVKTIPIIISTTGVIPKTINTSLNMLNINPKSIVPLFQKATILNTCRIVRKFLSLDM

SEQ ID NO: 15899 - protein, 1374 aa, Hesperia comma
MEAKRNRKLPQAGTSAKCEGESRPNPTGLGSSTYSGGSNVARTSYRLRPRSTSGKVLQTVHNSISPTSLSTQSLFSSLPSTNSFSPPKSTASITSSILQEDVALEENFDSNSVPTPCSSRTRNKWSSEMNKFILRTYLHLTLMETDTKSYLPALHLKFVEQFPERQNVSRQRIGDQRRAIVNKKLIPQGEIDKIYREVQAELQNIHNITQNTTIHSTIPHIKATQSVNQRMSWTIELNESVMRCYYKVTKIETNLTAYRKSLHAEFIDKHPNLAHLSEQRIADQRRIIIQRKFISSERIKHTVRTIQDEVAAEFNISIEDNIANRNSNNETEDLGGRSPSLNTPHIPQNQFNQTHNIQETQQSTSHSHNKLHLDTQKIEEQFQESWTLFFNSHPTTRPYIPKQKTSRKFSQIVDYINSSILTKRAKKDDSFEVTHTLIYCAAYTAAICNGANLNRINFTSQNRRCRIPAWQMRLQNKIANLRRDIARMYQYIQGNKSLRLIHHIDQIKNTYKIHSKHEEPNMTDNQFLDTLKQKLSTSSSRLKRYLNCSKRKGQNTQFKNNEGQFYRTLTKHSQNTQISPETAPSSTALHQFWANIWANPVQHTRNADWIRRDSEKYSSISEMEFDSITANTLMKVLKKIHNWKAPGNDHIHNFWYKKFTTLHPMLHNHINNFIKTPSTMPHFITQGTTFMIPKNSDTQNPANYRPITCLQTFYKILTSCIAVHIDEHLTKNKILAEEQKGCRKMSKGCKEQLIIDSVAIKQALKKKGDVATMYIDYQKAFDSVPHSWLIHILNHYKIHPALIGFLKHSMQHWRTRLKLMNCYTESDEIPIRRGIFQGDALSPLWFCLALNPLSNMLNYTDYGLTLLHEHSSTSLTHLMYMDDIKLYSNTTQSLHRLADITYTFSQDIHMQFGIDKCKTFTVKNGTIVQNNYTMVDGVQIESLDQRSSYKYLGFQQTGKINQKQTKTDLKKKFGHRLNAILRTQLNSRNIIKAINTYAIPILTYSFSIISWSQSELKAFQRTINTSLTGQRKHHPRACIQRQTLPRVEGGRGIIDINNLHNKQITSLRTYFHMYAEQSSLHKTIVNLDTRLTPLNLHNYNTQRNEQLKSEKEKIADWEHKSLHGRHRQDLLQPYVDKKASNAWLRYGELFPETEGFMIAIQDQVIETRNYQKFICHLPNITDTCRRCHSASETIQHVTGACKAIAQTDYKHRHDQVAAIIHQHLAFKYKLIDQKLPYYKYTPETILENENFKVYWDRTIITDKTIHFNRPDITVLDKNKKMVYLIDIAVCNSHNLLKTHTEKLAKTDLQIELKAQWGVNIVKTVPIIVSSTGIIPKTLNISLNSLDIHPSIATLLQKATILNTCRTVRKFLSLE

SEQ ID NO: 15900 - protein, 1119 aa, Anoncus sp.
MTLLRVPGVDVCLGTTKVTGGVVFPENGSLSSRPYWSLRVGSDPWWVMRIYSLSLTSQANLPDGGTRQDPPSQEVGSSELASGVLRDLWVASPLVSKIIGPFTQTQPRNARNGRGPAGPRVPVNQGGPDDEADQEPEMFECEYPGCERVFTTANGRGQHHRRGHRDWYDERANVGARRARWTEEEWHVMARREAQLTLEGVRFMNQELLSAFPERTLEAIKGFRRKQEYKDRVTLIIEELEEIERARNLAGTPPPQPVQHDEEVLRDSILDAILELPPIGSEAFEATRLQNICNTMRESNPQAVREETSIYLDLIFPAPPQRVEEGRPVGIPSRRKLRRAEYARTQDLWRQNPGKCLRGILKDVSTANPPAEDVMVPFWRAIMTQDGEQRPGVGERRDVQLGLWAPITLEEARRTLPDRNTAPGPDGVSARLLRSMPIGVLTRILNILMWCGSLPSRLLESRTTLIPKKESADAPGDFRPITVSSVITRTLHKILAARAMAAIEIDGRQSAFQSFDGCAENIFLIDLVLNYHHKKHRPLFMASLDVAKAFDSVTHGAIADTLNTMGFPSPMVEYITNVYERSTTRLACQGWTSDAIHPTCGVKQGDPLSPMIFNLVIDGMLRSIPGDVGARVGGEVINAIAFADDLILCASTPRGLQTLIDRCTAYLASCGLKANANKCLTVALRTVPREKKTVVDAQTIFMCDGNPLPAMRRTDQWNYLGVPFTPEGRSTSNVAGQLQEAIDKLTRAPLKPQQRLFGLRVMVIPGLYHKLTLGATQLSILTKLDTMSRQACRKWLNLPHDCVNAYFHADVKDGGLGIPSLRWLMPLRRLERLSKLRFMREDGSDADTYLTSEKRKAELRSEDHGRQICSTRLIRERWATLLYKSADGLALKASSEVPQQHLWVQEGTRFLSGRDFINLNKLRINALPVKSRTSRGRLRERACRAGCQTTETLNHVLQVCHRTHGARIERHNAVVKYVARGLRNTGYIVNEEPHFNTDAGLRKPDLIAVKGSTALTIDGQIIGEQADLQRAHNNKIRYYEQLRRSINERYGTEEVHFTSITLTYRGIWGKHSAQSLLELGVIRKRDLKVISTRTMIGGIHAHRQFNRTTALGHRRQGIG

SEQ ID NO: 15901 - protein, 1261 aa, Euura saliciscinereae
MATWTQSEIDIVIGYFNGRAGATTAEDHLALQEQLPRRSIPAIKKKVIELRARGDRPARAVPANRAWAPDDLRRLEEAYTEAVGNNITQKLKNIAELFPGKTVKALAQQLRTKSPGIYYGVPGQPPIGEHRAVIPETGDSPHHREDHERPRERADEAGPSQPPTDPHDDNVDRLQQQARPQPTAADQRRREEGDNSAPQRAPNEPVSERPIPAVSTEPAPANNAGMEDLRRKFKRMWLRVAGAGRNAGRIRGRVNQAVAAKLSAILQEALDEVAAGGGTANAKRENSKKAIRAAGLVLAQETRTRKPVGKPRHVAVSLIIRKLEAKTALAEQLRAWKAGKLEPRLKAFARTLRRTRQTPTQYIATTRDRIETLTKSREYQKERDAAQRLRQRFAEKPAMATIRDRPARADLDAASVEKFYTALYSAVDAHERLPTPRFNDWLKRLRNHRETLNPQRLEPDDLDQLTREALKNAAAWKAPGDDGIPNGYYKLLPSAQQYLVQYVRGVLSGNNVCSEKDTRGKVVLLHKSGDKTDPANYRPIALLNADYKILTAVIAATVKRHLPEWAIPEEQLAREGVWGTVHGLLQDKAASLVARKNRAAHTTAWIDFTKAYDSISHWQLRRLMRALPVHDSVIDVLTAVSRTWSIRVCVGKTTTNPIYVKRGVYQGDTISPLLFILMTAFIVHEVKTDPVVNAAARGKQEIIAYMDDIKIHAATEKGTRAAVRCVERGAKEIGLAMNRKKCGIYTRDTDAEDADGGEEPGNITVEEAAFLPRVREGYKYLGITQLELDTEINVDLVTEKTLTKVQEILQSKLAAAQMIQLINSTVATAATYVLGNMFSEKRRSTIIKTCRELDTGVRKLLVEFKLKTYSTSTASVHLDRERGGLGLRAIADEVELQYVRKGLYLEEHPDLEVTRARYAALEKRGWKNPKTDLDAILAKYGVERELRANGVTINTHIRRSVTKVRNEQQQRWAENWGEHMAYGRLVATERTKVFHAYTSRNMDSWRIAMLHAAAEDQVQGLGAIPTERIMCPRGCNKQLTAYHVSSMCLTPEFNTRHDIIVARILRTMLLSQGAPERVLSKCHFASATLVDQYSWRERTVKIRAGVPVRTSVELKHNKPDILVLLSNPDEVFVIEVAVSHLQNIRVQEKIKRARYETNSMAEVDHRNVNRIRRDNNIISELRHLYRCPVELGVFVVGVYGEALATKETRRMATILGKLGIPPQGCANLVKAACYSAAVSTTNLLANRLDHQRRSVQPTGHT

SEQ ID NO: 15902 - protein, 1277 aa, Ephestia elutella
MPEDVVQEAVNAIDPVPTSSTSGTRKSWSMEMNTFIMRTYLLLTNLETDLSTYLGPLHTKFIEKFPSMDVSRQRIGDQRRAIIRRKLIPQETLDEIYEDVKSELATIESLRQLNSQHLSLNTHPNSTFSQISSLPTPSASQTRQRMRWPTEVNEAIMRHYYKITQLETNLTAYRPLLHKAIIEQYPELQHVSEQRISDQRRVIINNKYFTIEKLNDIKEQVARELEQQPPNNEESVNIDRTNVTLHNTTDHEELTEPILTQAPPNDNQINDNELVNTLKNLLDNNLIKYKDIHPTQRPRLPKINTSKQISNIIHLFNKFIIPPKLESLLDITDTHTLIYCTAITIIEFLKYKINTSFHNRRNSKPKWQIRIKKSIEQLRKDIARLIHFKNGARSRRLITNVQKITEAHQVHNRHESNNRDIEDFIDTLKQKLSVKSNRLSRYKKAQERKDNNKMFSKNEKQFYRNLKGTTAITDLPSETALTDFWSGIWSHEIEHDKNAEWILNEQGRVDHIDSMEFEEIDSYELQQVINKTHNWKAAGVDGIHNFWLKKLVSLNDIMAKQITDLIKGNAPIPEFLTKCLTFMLPKSSRTQDPSQFRPITCLPTLYKVITSCLTNRINRHIESNNIMAEEQKGCKKFHMGCKEQLTIDAVILKHVQVGKKDLFAAYIDYKKAFDSVPHSWLIQVLQIYKVNPFIINFLQKAMQHWCTTIKLQSNETVVSTTEIPIKRGIFQGDSLSPLWFCLALNPLSRELNDSHLGFTIEQNDTLSQITHLLYMDDLKLYADTDTNMTELLNITKNYSCSIKMDFGLDKCRKINIKKGRIIGGNYDINDEEQIIAMNKEEFYKYLGYNQGKLIAHKNMKEQLKTNFFTRIHKLCKKQLLSKNLFKAINTYAIPVLTYSFGILKWSKSELKNLEVKLRTLLTRYRFHHPKSAIERVTLARKEGGRGLIDISYLHNKQIVNLKTFFFSKKSSSLLHSDICKIDAHYTPLNLADETEQTDMTHYLTEKRNRWYNKELHGRHPKDLNQDHIDREASNKWLCSAGLFPETEGFISAIQDQVIATKNYRKFIMKDATINSDLCRKCNNKPETIQHITGACMALAQNDYTHRHNQLVHIIHQKLAIKYKLITDTDTPYYKYTPQTVLENTSHKLYFDRTILTDHTIYNNRPDITLVDKINKQTYIIDIAIPNTHNLQATITEKIRKYTELQEEIRKMWRMDSVTIVPIIISTTGVIPKDIFKQLNRLDLPKYTYITLQIAAILNTCRIVRKFLQLESDNSPNN

SEQ ID NO: 15903 - protein, 1210 aa, Ephestia elutella
MDVSRQRIGDQRRAIIRRKLIPQETLDEIYEDVKSELASIESLRQLNSQDLSLNTRPNSTFSQISSLPPPSASQTRQRMRWPTEVNEAIMRHYYKITQLETNLTAYRPLLHKAIIEQYPEFQHVSEQRISDQRRVIINNKYFTMEKLNDIKEQVSRELEQQTPNNEESVNINLTNVTLHNTTDHEELTEPILTHAPLNDNQINDNELVNTLKNLLDNNFIKYKDIHPTQRPRLPKINTSKQISNIIHLFNKFIIPPKIESLHDITDTHTLIYCTAITIIEFLKYKINTSFHNRRNSKPKWQIRIEKSIEQLRKDIGRLTHFKNGARSRKLIINVQKIMEAYQVHNRHESNNRNIEDFIDTLKQKLLVKSNRLSRYKKAQERKDNNKMFSKNEKQFYRNLKGTTVVTDLPSETALTDFWSGIWSHEIEHDKNAEWILNEQCRVDHIDSMEFEEIDSYELQQVINKTHNWKAAGVDGIHNFWLKKLVSLNDIMAKQITDLIKGNTPMPEFLTKGLTFMLPKSSRTQDPSQFRPLTCLPTLYKVITSCITNRINRHIESNNIMAEEQKGCKKFHMGCKEQLTIDAVILKHVQAGKKDLFAAYIDYKKAFDSVPHSWLIQVLQIYKVNPFIINFLQKAMQHWSTTIKLQSNETVVSTTEIPIKRGIFQGDSLSPLWFCLALNPLSRELNDSHLGFTIEQNATLSQITHLLYMDDLKLYADTDTNMTELLNITKNFSCSIKMDFGLDKCRKINIKKGKIVDGNYDINDEEQIIAMSKEEFYKYLGYNQGKLIAHRNMKEQLKTNFFTRIHKLCKKQLVSKNLFKAINTYAIPVLTYSFGILKWSKSELKNLEVKLRTLLTRYRFHHPKSAIERVTLARKEGGRGLIDISYLHNKQIVNLKTFFFNKKSSSLLHSDICKIDAHYTPLNLADETEQTDMTHYLNEKRNRWYNKELHGRHPKDLNQDHIDREASNKWLCSAGLFPETEGFIIAIQDQVIATKNYRKYIIKDATINSDLCRKCNNKPETIQHITGACMSLAQNDYTHRHNQLVHIIHQKLAIKYKLITDTDTPYYKYTPQTILENTSHKLYFDRTILTDHTIYNNRPDITLVDKRNKQTYIIDIAVPNTHNLQSTITEKIRKYTELQEEIKKMWRMDSVTIVPIIVSTTGVIPKDIFKQLNQLGLPKYTYLTLQKAAILNTCRIVRKFLQLESDNSLNL

SEQ ID NO: 15904 - protein, 1248 aa, Ephestia elutella
MEMNTFIMRTYLLLTNLETDLSTYLGPLHTKFIEKFPSMDVSRQRIGDQRRAIIRRKLIPQETLDEIYEDVKSELATIESLRQLNSQHLSLNTHPNSTFSQISSLPTPSASQTRQRMRWPTEVNEAIMRHYYKITQLETNLTAYRPLLHKAIIEQYPELQHVSEQRISDQRRVIINNKYFTIEKLNDIKEQVARELEQQPPNNEESVNIDRTNVTLHNTTDHEELTEPILTQAPPNDNQINDNELVNTLKNLLDNNLIKYKDIHPTQRPRLPKINTSKQISNIIHLFNKFIIPPKLESLLDITDTHTLIYCTAITIIEFLKYKINTSFHNRRNSKPKWQIRIEKSIEQLRKDIARLIHFKNGARSRRLITNVQKITEAHQVHNRHESNNRDIEDFIDTLKQKLSVKSNRLSRYKKAQERKDNNKMFSKNEKQFYRNLKGTTAITDLPSETALTDFWSGIWSHEIEHDKNAEWILNEQGRVDHIDSMEFEEIDSYELQQVINKTHNWKAAGVDGIHNFWLKKLVSLNDIMAKQITDLIKGNAPIPEFLTKGLTFMLPKSSRTQDPSQFRPITCLPTLYKVITSCLTNRINRHIESNNIMAEEQKGCKKFHMGCKEQLTIDAVILKHVQVGKKDLFAAYIDYKKAFDSVPHSWLIQVLQIYKVNPFIINFLQKAMQHWCTTIKLQSNETVVSTTEIPIKRGIFQGDSLSPLWFCLALNPLSRELNDSHLGFTIEQNDTLSQITHLLYMDDLKLYADTDTNMTELLNITKNYSCSIKMDFGLDKCRKINIKKGRIIGGNYDINDEEQIIAMNKEEFYKYLGYNQGKLIAHKNMKEQLKTNFFTRIHKLCKKQLLSKNLFKAINTYAIPVLTYSFGILKWSKSELKNLEVKLRTLLTRYRFHHPKSAIERVTLARKEGGRGLIDISYLHNKQIVNLKTFFFSKKSSSLLHSDICKIDAHYTPLNLADETEQTDMTHYLTEKRNRWYNKELHGRHPKDLNQDHIDREASNKWLCSAGLFPETEGFISAIQDQVIATKNYRKFIMKDATINSDLCRKCNNKPETIQHITGACMALAQNDYTHRHNQLVHIIHQKLAIKYKLITDTDTPYYKYTPQTVLENTSHKLYFDRTILTDHTIYNNRPDITLVDKINKQTYIIDIAIPNTHNLQATITEKIRKYTELQEEIRKMWRMDSVTIVPIIISTTGVIPKDIFKQLNRLDLPKYTYITLQKAAILNTCRIVRKFLQLESDNSPNN

SEQ ID NO: 15905 - protein, 1096 aa, Ephestia elutella
MRVIVRNKLLSEDKLTQIKQNVSDEINQLQSNESTVTLFTTQDTLPRTMTTSDMTISASNTDDLPNNTPNNVSTDNNSHNVPDTTLIESLKERLNNNLVKYNNSDPTSRPKLPKLHSSKSLSNLITIFNKFILPTKFCVLETLTDTHTLIYCTALTIAEYLKVKINSPNNTTNVQNNRSKPRWLTRLEKNIEKLRQAIGRLTQYKNGNRSQRLVNEVEKIIRNNTIHNRHEDNNKTVEDYLDTLKQKLLVKNSRLKRYKKAQTRRENNALFTKNEKQFYRKLKGSTQIDQLPSEATITDFWSQIWSSDVRHNEGAEWISREKMRVNEVGEMEFEDIDAIELHNIIKKTHNWKAAGIDGIHNFWLKRLVSLHDVLAKQITSIIKGQTTLPTFLTKGITFLLPKSDRTQDPSQFRPITCLPTLYKVITACIANRINRHIDINNIMAEEQKGCRKFHMGCKEQLTIDSVILKYTQSGKKDLYASYIDYKKAFDSIPHSWLLDILNIYKINPLIINFLKSAMLNWTTSLMLRAGDTSINSPEIPIKRGIFQGDSLSPLWFCLALNPLSKELNDTNYGFNLINTRNLPSQITHLLYMDDLKLYANTEENITKLLDITHNFSVAINMDFGLDKCKRLNVRNGKVVEGNYRLNEEDQITAMTSDEVYKYLGFKQAKLIEQRLVKEQLKKEFFQRIHKLCKAQLNSKKFFKSINTYAIPILTYSFGIIKWSKSEIQKLEMKIRTLLTYYRYHHPKSAIERITIPRKQGGRGLIDVSHLCAKQIYSLKRFFSYKKTSSQLHDIICSLDKNFTPLNLAEEIEHLDTRKYLEDKFNKWKQKELHGRHIEDLGQPHINKEASNKWLSTGYLFPETEGFLTAIQDQVITTRNYRRYIIKDRTMTDDNCRKCHNKPETIQHITGACITLTKNDYTHRHNQLANIIHQKLAIKHNLLNDTSTPYYKYIPQSVLENHSHKLYYDRTILTDHTIHNNRPDITLLDKHNKHAYIIDIAVPNTHNIQSTIEEKIRKYTELQEEIKRMWKINSVSIVPIVISTTGVIPSDIFNRLNQLCLPKFTYMTLQKAAILNTCRIVRKFLQLDSENSLISSS

SEQ ID NO: 15906 - protein, 1151 aa, Ephestia elutella
MRWPDEINEAIMRHYYRITHLETDRTAYRPLLHHAVIEQFPHLSHVSEQRISDQMRVIVRNKLLSEDKLTQIKQNVSDEINQLQSNESTVTLFTTQDTLPRTMTISDMTISASNTDDLPNNTLNNVSTDNNSHNVPDTTLIESLKELLNNNLVKYNNSDPTSRPKLPKLHSSKSLSNLITIFNTFILPTKFCVLETLTDTHTLIYCTALTIVEYLKVKINSPNNTTNVQNNRSKPRWLTRLEKNIEKLRQAIGRLTQYKNGNRSQRLVNEVEKIIRNNTIHNRHEDNNKTVEDYLDTLKQKLLVKNSRLKRYKKAQTRRENNALFTKNEKQFYRKLKGSTQIDQLPSEATITDFWSQIWSSDVRHNEDAEWISREKMRVNEVGEMEFEDIDAIELHNIIKKTHNWKAAGIDGIHNFWLKRLVSLHDVLAKQITSIIKGQTTLPTFLTKGITFLLPKSDRTQDPSQFRPITCLPTLYKVITACIANRINRHIDINNIMAEEQKGCRKFHMGCKEQLTIDSVILKYTQSGKKDLYASYIDYKKAFDSVPHSWLLDILSIYKINPLIINFLKSAMLNWTTSLMLRAGDTSINSPEIPIKRGIFQGDSLSPLWFCLALNPLSKELNDTNYGFNLINTRNLPSQITHLLYMDDLKLYSNTEENITKLLDITHNFSVAINMDFGLDKCKRLNVRNGKVVEGNYRLNEEDQITAMTSDEVYKYLGFKQAKLIEQRQVKEQLKKEFFQRIHKLCKAQLNSKNLFKSINTYAIPILTYSFGIIKWSKSEIQKLEMKIRTLLTYYRYHHPKSAIERITIPRKQGGRGLIDVSHLCAKQIYNLKRFFSYKKTSSQLHDIICSLDKNFTPLNLAEEEIEHLDTRKYLEDKFNKWKQKELHGRHIKDLGQPHINKEASNKWLSTGYLFPETEGFLTAIQDQVITTRNYRRYIIKDRTMTNDNCRKCHNKPETIQHITGACITLTKNDYTHRHNQLANIIHQKLAIKHNLLNDTSTPYYKYIPQSVLENHSHKLYYDRTILTDHTIHNNRPDITLLDKHNKHAYIIDIAVPNTHNIQSTIEEKIRKYTELQEEIKRMWKINSVSIVPIVISTTGVIPSDIFNRLNQLCLPKFTYMTLQKAAILNTCRIVRKFLQLDSENSLISSS

SEQ ID NO: 15907 - protein, 1081 aa, Ephestia elutella
MRVIIRNKLIKSDRIKQIREEVSSELVIENVLDLTPPLNDHTTVSIGTRSPENQENAESISIPIGPECNENDEVTNTLRKLLEDNLTKYGTIDPTIRPKLPKLHTTKILNKLISIYNKHIIPSKIGLLENITDTHTLIYCIAFSIVEYLKIKIGTSNLTTRRNKQKWQIRLEKQIEQLRKAIGRLTQYNNGNRSRNLVKQVENILKNNAIHNKHEDNNISPQDYLDTLKQKLSVKSNRLARYKKAQERRQNNSLFTKNQKQFYRKLKTSIATNQAPSKEVLTDFWSNIWSHEIQHEEDADWIPREEARTENIENMEFEDIDSIELQSIIQKTQNWKAAGIDSIHNFWLKRLVSLHDILAKQITEIVKGDAPLPVFLSKGITYLLPKSDNTQDPSQFRPITCLPTIYKVITSCITNRINIHIENNHILAEEQKGCKRFHMGCKEQLTIDSVILKHVHTGNKDLYAAYIDYKKAFDSVPHSWLIKILEIYKVNKFIINFLKATMSNWTTVLNLQTNDKVLTTSEIPVKRGIFQGDSLSPLWFCLALNPLSHELNESQLGFNIKVNSDTLSQITHLLYMDDLKLYSNTECNLTELLNITHKFSSNIKMDFGLNKCRKVNIRKGKMIRGNYNINDQDQILAMSSEELYKYLGYKQAKQIDQKYAKEQLKKEFFSRIHKLCKSQLNSKNLFKSINTYAIPVLTYSFGIIKWSKSDLKGIEIKVRTILTFYRYHHPKSALERITIPRKDGGRGMIDISLLHAKQIQRLYRFFSNKKSSSSLHNAICTIDTNYTPLNLAVERTENLDISKYILDKHQTWSNKELHGRHLKDLGQLHVDKAASNKWLDVGELFPETEGFLIAIQDQIIATKNYRKYILKDPNTSNDLCRQCNNKPEIIQHITGACSKLAQNDYSHRHNQIAFIIHQKLALKYKLITDRNTPYYKYTPQTVLENNSYKLYYDRTILTDHTVHNNRPDITLVDKNNKHTYLIDIAIPNTHNLQSSISEKLRKYTELQEEVKLMWKMNVVSIIPIVISTTGVIPNDIFRRLIQLDLPKFTYLTMQKAAILNTCRIVRKFLQLESGNSVNISG

SEQ ID NO: 15908 - protein, 1364 aa, Drosophila pruinosa
MEHKYVYPFVGKHECAICLARDSRGNAIKGEYGRYLAANQHMTRVHPTVTVRWFCRICDIECKGMRVLKAHVKKEHPHVDVDDNDMLRIPRPRTSRGSLGTVLNRSGTADRSLPLALRVPAAAARTTRATAARNAPPSTRLSVVGAPTPVSRPPVAPSSRPAAVPPSRPAAVPPSRPAGGIDRRIRAAVTTASARAAPTSAAGRSTASNGSIATRSSAAAGDIISHPHPSAPNTIITACGPITANAVTMTAAPLPSHLPVANGLWGAWPTSSGAATLTTNTLSQSSGGSPTMTPAVTFDRRRSVNPSPLPENTATGNLLEAHDQPPTAVSATRRPPSPPPAQLVTPQVSTLVSPPNRTTPEPASEHVALAMEDEWRLVRRGRRRTSLTAASPTNAAGNAPATVARAPPPRRALTTDRPVQSQNRSGANSSSGGARGTLVDRANRVTNASELGALAAELAGLFQSTSRPQNERAGNVQGRERRDGARPALGRIEEASRIQKLYREKRPRAMQQVLAGPSPHCEVGVEATTQYFLGVYGHSNEELVEPFEWPRWDGESEAVIGEALMRPFTSEEVNSRLKRTHNSAPGPDGVTYSDVKRVDPGCKTITAVFNACLRAKSIPASWKNSNTVLIHKKGDKNDLSNWRPLALGDSVPKLFAAVVADRLMAFTVNGNRLSHPQKGFLRHEGCHEHNFLLGQILEDSRRGGRDVVLGWLDLSNAFGSIPHRVIQDAIAGMGVPRAAQVLLECMTTGSTTRVRTSSGYTDPIPLNAGVKQGCPASPILFNFAMERILRDIEQQSAGYDLHGKTHRALAYADDIVLVASTREEMVRLLEVAEEAARKAGLTFNPGKCATLHLSGKAARRTALQTQFELREGPLKTMGAGDAYDYLGIPIGLDVDQTPLNSVESMVNDANKIDASLLAPWQKIDALRTFIMPRLEFILRGGLVKRAPLAFLDKHVKKLVKKWMSLPQRASAEVVFLPSWRGGAGILPTADLADILTVAHALRMLTCKDARVADTARESLRENVKSRTKDEPTLGQIAEYLSGSFEGPFGKDRGGNPGFWTDVRKASRRQAVHLGLKWKAVPGSGDLALECRGKGARRVSMRASTRSHVIRLLRQAAQYSYLDALTAKPDQGKVFQLSGSSAASNSFVRDGSFTRFAEWRFIHRARLGVLPVNGAMRWRRDGDKRCRVCGYRNETIPHVLCHCMPHSAAMQLRHNAIAARISKAANVRGTLRENCRVEGVAGDLEALRPDIVWRDEATRKIIIVDVTVPFENGSGALDSARAAKIEKYRPLAEALRRQGYRVHVDAIVVGALGTWDPINERVLKLLHVSSRYASLMRRLIVSETVHWSRDIYVEHVSGTRQYSHP

SEQ ID NO: 15909 - protein, 1023 aa, Graphium evemon
MDHRQYVALTVQKKAIVGLIAHLAILSPNAVTVLIPNSKKSTTMLSTGIVQLKLGPTEDSLNVQSGKWTLLHPIMDPENNNIPAPAAATLLSADRVNFRAEAICLSNCDNLLLCHHYRVLTLFPKPKHQGRRPSQWKCLRCNINPQSCEALTNHMIEAHDVKISLTCPLCHKDNLCNMKKAARHMFNCNRSPVIAPIDLDRLDFSLDISTPLLPILPNLLNDIDKLTPSTFKSLTLETLQGNDQLNAMCDHLSSLCRPSKPSRRKRKKKSSNLTNLEQIFNRNQYLWRTSKTKLYSLIMKGEKQSNLDIFEAETFFSNLFAARGSCEGDMIQTQPSESISMKHYVSTEEIATYLRIKSHSAPGIDGLMSRDILPRTLEWTILVNCCLILNRIPHAWHTSRTTLVPKCDSDLAADHRPISLSPLIYRALTSTLSKRLYSVSNLHPAQRGFIDDDGIHQSITLVRFLADRKTPLASIDLSKAFDSVPHSTLIRACRANGLDNDSIAFISDIYTDASTILHVNGSKSNPIMLNRGVRQGDPLSPLLFNFVIDQVLRNIDNCNIGTRMGIHRLSAVAYADDLVLCADSQEDLHNLLAITNQCLNNLGLKINLNKSFTCNANIGLPIKSTFKYLGSIIDPTGDSRLQTKELLESIQKLDRAVLRGNQKLYYLRYHLLPSIYHRLIHERATGTTLEEMTSKVRVTVRKWSRLSSSTCNAFLHLPIREGGLGIPDLRRDIVSMTRDRLTRLQHCQVWFINFIAKSNWYRAELDRVTKLCTQNSTKQWHKDDIRDISSAHVLFAEGGARFLNRHLSGAGYLEGQRFYRFTQLRAFTDDYNATKHRLNPICTNCSTGAEATLQHALMKCNGNSEIINRRHNTVVDILANFLESTGHHVRREHRLPCGLRPDIIVRTPDRRTFALDVTIAFELTAQSLDLAYQKKIDKYSPHIDEIQTAADAGTLSFAPSRCALAYGIVFGARGSVHRQSITILERHLHLPRHLIERMLSEITRHSIDLFIHSPAATRNPSFN

SEQ ID NO: 15910 - protein, 955 aa, Ophraella communa
MVNKALERITLRRELNITEINNLLYAASITVAGEEKSRPNNIGNKEEPRWKRRIKNDIENLRKEIAISTEYKKGVPTKKVLNKLKDIQKKYRHQNSIHELQAKLEMKLQAKAQRLRRYTKRNDQFRQNKMFNEDMKKFYRSINNSNTDQITEPPDKEQVGKFWRGIFENEVEHNTNATWIEQEKRDHKNILEDEWINLTVEEVVKAIKKTQNWKSPGPDRIQNFWIKQFTALHAPITKAYNLLLSDPENVPEWLTTGNTILLSKGKNTRDPKNYRPITCLSTLYKIMTQTLSNRIYEHLERNNILPPEQKGCRKESRGCKDQLLLSKIIMNSAKKRKKNLSMSWIDYKKAFDSLPHTWILEALKIYKICPTINKFIQNSMKTWKTNLKLYHTDGEINVKDIAIKRGIFQGDSLSPLLFCISLVPLTNLLNKENMGYQLDRGIKINHLLYLDDLKIFTSTEDEIEKTLDLIKTFSRDIRMEFGLDKCATVTLKRGKITKTKNITLGEETEIRNLEPEETYKYLGLEEADGIDNKNMKDKIKEEYYRRIRKVTGTELCAKNKIKAINTIAVPLVMYSFGIIDWLREEIKQIDRKTRKLLTMGKIHHPKDDVDRLYIKRQDGGRGLLELEAAFDSAIIGLDEYLRTEKDKFVKAIKTQEAGESKYSIVKEAAKIKTKYNIDGIGSNTKDIKTKIQRQRMERLKEKPLHGQFMKHLEKSYVNKEKSIEWLNSAGLKGETESLIMAAQNQALNTRYHQKKILKQNVDSRCRMCHESEEHISHIIAGCTTLAKTEYIQRHNKVASYIHWNICKSYGLEVKGKYYEHTPEPITNISRDDIEVTIMWDFPIITDRQINANRPDIVVYDRKARTCRLIDVSVPDDPNVQLKEAEKINKYKNLEIEISRMWNVKTCVIPVVVGALGTINHSVEKYLQRIPGKSYIKEAQKIVLLGTAHILRKVLG

SEQ ID NO: 15911 - protein, 1132 aa, Pecten maximus
MADNTATTKLVQRTLTGEKTKETKCKCGKVCKNLRGLRIHQAKARCQPEEIQQQRTGRRPDETQEVPSQESHHSAEDLSADVSSQRDTPNSLGGEASQGAQVDNDHTERRERVKWPKIVDRSRWKQLDEDLDSILEATLQGGVEKKIKSLTMIVYKVSCERFGVEGKKAEVVHQPNRRQQEVAKLRKELKVLRRLFREANEQEKFGLQQLRSDIRGKLTTLQKAERSRKRRRETTRKRAAFIANPYKFTTSLLGGERSGKLETSKQEIEQHLEETHCDAERNNPLGECDRIPSEEEPTIPLDEKEPTWKEVVEVVKKARSGSAPGPSGIPYKVYKMCPKLLRRLWRLLKVIWRKGKIPECWQTAEGIFVPKEKNSASLNQFRTISLLSVEGKIFFAILARRMTTYMTSNEYIDSSVQKGGIPGFPGCIEHTSAITQLIREAKINHGDLTVVWLDLANAYGSVPHQLIFKALEHYHIPDHIQTIVKSYFSNIRLRFTVGEITTSWQALEKGIVTGCTISVILFVMGMNLIIKAADRETRGPKTSSGVRLPPNRGFMDDLTITTTTHVQARWIISALEATVGWARMKFKPGKSRCLILKRGKVTRRFKLSIQQEEIPTIVDNPIKCLGKWFDASLNDSRNIKRLQTQVEEGLRKIDKTGLPGKFKSWIYQHGLLPRLTWPLTLYEVTTTTVEALERKINKCLRRWLGVPPSFTSVGLYSTTAKLQLPISSLVEEFKVAKARLVMTVRDSKDEKIRNAGIETRTGRKWSASSAVQEAESRLRHSDIVGTTCIGRQGLGTTQVQRWGTADTASRRKMVQDNIRKMEEEIRKAKMVEMGAQGAWTRWETTERRLTWSDIWKLEPCRIQFLLRSVYDVLPTPTNLHRWGMTETPNCSLCDRPGNLAHVLSSCNTALTQGRYTWRHNKVLRELADTLEKERQKKRRCMKQQPYINFVRSGEAGSKATAHQRGILDGAQNWEMRVDLGQRLAFPEVVQTNLRPDILLWSQQGKRMIMIELTVPWEERCQEAYERKREKYANLADDVRAKGWCVWVMPVEMGCRGFPCTVHVEDVCCCRHPGERPKGSCTTTGNNSREVVQLALVEKGGQELEAIHRRTVIWPITVDSPPLGRPRMSRNAQ

SEQ ID NO: 15912 - protein, 1110 aa, Pecten maximus
MADNTATTKLVQRTLTGEKTKETKCKCGKVCKNLRGLRIHQAKARCQPEEIQQQRTGRRPDETQEVPSQESHHSAEDLSADVSSQRDTPNSLGGEASQGAQVDNDHTERRERVKWPKIVDRSRWKQLDEDLDSILEATLQGGVEKKIKSLTMIVYKVSCERFGVEGEKAEVVHQPNRRQQEVAKLRKELKVLRRLFREANEQEKFGLQQLRSDIRGKLTTLQKAERSRKRRRETTRKRAAFIANPYKFTTSLLGGERSGKLETSEQEIEQHLEETHCDAERNNPLGECDRIPSEEEPTIPLDEKEPTWKEVVEVVKKARSGSAPGPSGIPYKVYKMCPKLLRRLWRLLKVIWRKGKIPECWQTAEGIFVPKEKNSASLNQFRTISLLSVEGKIFFAILARRMTTYMTSNEYIDSSVQKGGIPGFPGCIEHTSAITQLIREAKINYGDLTVVWLDLANAYGSVPHQLIFKALEHYHIPEHIQTIVRSYFSNIRLRFTVGEITTSWQALEKGIVTGCTISVILFVMGMNLIIKAADRETRGPKTSSGVRLPPNRGFMDDLTITTTTHVQARWIISALEATVGWARMKFKPGKSRCLILKRGKVTRRFKLSIQQEEIPTIVDNPIKCLGKWFDASLNDSRNIKRLQTQVEEGLRKIDKTGLPGKFKSWIYQHGLLPRLTWPLTLYEVTTTTVEALERKINKYLRRWLGVPPSFTSVGLYSTTAKLQLPISSLVEEFKVAKARLVMTVRDSKDEKIRNAGIETRTGRKWSASSAVQEAESRLRHSDIVGTTCIGRQGLGTTQVQRWGTADTVSRRKMVQDNIRKMEEEIRKAKMVEMGAQGAWTRWETTERRLTWSDIWKLEPCRIQFLLRSVYDVLPTPTNLHRWGMTETPNCSLCDRPGNLAHVLSSCNTALTQGRYTWRHNKVLRELADTLEKERQKKRRCMKQQPYINFVRSGEAGSKVTAHQRGILDGAQNWEMRVDLGQRLAFPEVVQTNLRPDILLWSQQGKKMIMIELIVPWEERCQEAYERKREKYANLADDVRAKGWCVWVMPVEMGCRGFPAQSMWRMFAAVGIRGKDRRAAVQRLATTAEKSSSWLWWRREDKSWKPSIDGQ

SEQ ID NO: 15913 - protein, 971 aa, Listronotus oregonensis
MRHAHIQQYNDAIPLAKKSAWSREELLLLATAEVRALGDQVRFINQHLSGRFPNRTLDAIKKARQRPDYRQMVQEKLQDVHDPSSEDDDDDDAEPPEQQPEVPQLENIQWKEPFLHEIRCLLQIIRNINGWHTDLLARMARAVLEGEQLTPHELDVWLTTVFPPAPPTNRQQHPIDHIQPKSRKQKRKEQYNWLQKTYRRNMSRAVNHILADQEDINLQITEEAIFDFWGEFVQQPSVPVDPVPPLPIPENSKTTSIMLPFTTEDAISTRLPNNTASGPDGITSRQWFSVPASIRALYFNLVIITGGFTQKRLRSRTVLIPKKSEIAAPGDLRPISVTSVVVRNLHKGWAERIKKMKLVDTRQRCLQDGCADNVATLATAISHARKNIRELHIMSLDMAKAYDSVSHQALKNALRKRMMPEPFINTILQAYHNSTTSFQHMGRTSDQYRVTRGIRQGDPLSTLFFCFLIDDIMEKLSEDVGYNVNGTNINTIAFADDIILFASTSIGMQSNLTKLEDEARKIGLHLNTTKCAALSIMPAGKLKKTKIQTNNLFTARDGTPIPQMNTATHLRYLGVDFGFTGPGKPASDVGNFIEKLSKAPLKPQQRIKILRAFILPKTYHGLILAGTTMKMLRKIDLDVRAAVRKWLRLPKDVPNSFIHTSVKQGGLGIPAMVTEIPSQIYQRFRRQPTDPQLRTVFEMDWVQTRLRWATKALTKNGTFLNSTEKVQKWWSRQLYEAADGRDLKEASKHSSNTWWVDAGHIAIPGKDYVQYVHTRINCLPTRMRMTRGQRRQAQDVGCRAGCNAQETAAHIIQGCFRTHGGRVKRHDAIVKTIANILKAKGLYTKIEPHYRTREGLRKPDLIVKTDRLATIIDVQVVKSSGNLNELHLQKLNYYQNNDSLRDQIKTDLDADELKFTTFTITWRGIISEDSAIDLKALGIPKAVINGLVTRALQGSHTNFSRWNKMTGTRRR

SEQ ID NO: 15914 - protein, 938 aa, Paramacrobiotus metropolitanus
MRLMWKSCQTAHGLSMHRDSLVCKKARVKALRQGPSADPNPAQSAASSSLQDRIIESRKLHAVLRHVPTGARRACAEALRKILDDCVEKNDEDAWSKLLLFALDNLHAPPSKSGRGSTLAASVKANLQGTSVTTKAKKSKKKRSSDEALRKAVNAKLQDGDISGAVKVLTSDDAVAAVTNEVLAALKEKHPDPPADLNFPSAPTVGAPPEFSSEEVHAALKAFPAGSSAGPDGLRAQHLKELIKVPGECGELMLTALTKLVNHIVFKPIPDSIRTVLFGATLIPLNKKTGGIRPIAVGCTIRRLCGKLISRRVQSEMGSLLRPVQLGYGTPGGAEAVVHATRKFLRAHPASPTVLLKLDFRNAFNTIRRDIVLEEAAEKLPQYFHFISQCYRNSSTLFCGDTTMPSAHGVQQGDPLGPLLFCLASIKLSKRLQSDLNAWYLDDGTAGGDPEVVLEDFIRVCNDAPKLGLELNFAKCELYVYGGSEAEQQAIYDRFAAVAPGIQRVTPETLELLGAPLTDWSIGRCLDGKIDQIRKLTDSLSVLPAQQALFLLRNSLSLPRLMYTLRAAPCNKYPEKLKDFDHAIRSKAEEITNVKMDDCAYVQASLPVKSGGLGLPRAEEIATPAYLSSLYSTDELVRTIVPEDCPDDRSEVELYWEERTGKCAPAMEDRSNQRLWSDMLTAGKLEALRETADVIASARLLAISTRESSAWLFALPVASLGTLLDDAGLRIAVALRMGAPVCKEHKCRCGEMVDAFGLHGLSCIRSQGRFKRHASLNSVIQRSLGSAKVPTILEPPGLSRLDGKRPDGLSLFPWKNGLPLIWDVTVVDTFATSYVAGTSEAAGSAADDAETRKRNLYSELTDRHFFEPIALETMGSCGGSTRHFISEVGRRITEQTGEARATEFLWQRLSVEIQRGNAASVLGTVGCSKQLEELFFLF

SEQ ID NO: 15915 - protein, 1257 aa, Vandiemenella viatica
MEPSLPEHPAACPPTSVSASPRTPAGGADAAGSPTAAEWTAEIPAGRLHRVEQVLVCFYPLPASISCTEVGCHAVYKAVQWTAMRRSLERHLESIHDIRIISTANFCSRCRRNVGGKPKQHRCPVPRTSASPPVAEHLHKCPHCGDTFPSKRGLYNHVQAAHVMKERRAQQQQRAPLPAKEPVRRRRVERRTPEEVLPDQPLEAVGALRPASPLEVGAVETVGPDGHPPPSQQLRDQLEQTAETSPSGSSEPLSVPVDDDHGGDPAPEMLIEEENNINDPPVPLASSSHRSSPGARVASESEGETSVGEGVEELAADLSAGSGGASGVEGMEEQRAGLLEEAEVGVGGGGLDEALLINPEDESPVHEFVPRLKELLTAESSGENWDSFEGLLEQITACAADAVRLPPPPEQSGRRQVVDTEDPKAIQKLYRRNRRRVVRLIVDGESRRCGLGVGEVEAHFRSVWSRRPCDLSIYGQPGQHAERPPFSLHQFVPGEVAGRIRKCENTSPGADRLTYRHWRSVDPACTVLTLIFNICLKYNDIPSSWKESTTVLIFKKGDPLAVGNWRPIAMTRTIYKVFTGCLAKRLTTWLTANSVLSACQKGFLPFDGVFEHNFVLQKRMDEARTGRGDFCAAWLDFSNAFGSVPHEAIVCALRTAGAGERFAHLVANIYNGGSSRVAVGSALTGNIPVESGIRQGCPLSGLLFNVAIDPILRNIQGDHTEHCSLAYADDVTVMGRTVEQVQASIDTVVALAGRIGIHVNAAKCYSIHLSGVTPVGTRPTVFHVAGVPISHLNDGDQGTFLGKPVGSRFASDRGELKGVCEMGLKLLRSKLAPWQRIDAIKTFLFPACNFAMRMGKYSKGEWRYVDELLRPEIKKTFNLPAEASNDFLYGSREAGNCAIPEVAEDADMAVVDGAFKLLTSRDPLTLELARCEAWDTTSRRLGRPVGDADVAAFLSGVNEGEFRQRANALSNAWTCARVASGRLGVSWAIANKIPTLHGDGLVIHPSKRHTVMRALRYKMRKGHDQRLLGLRSQGKVAECVGLHPASSHFLTAGTYTRFADWRFIHRARLGLVPLNAVKRGRVEGDKSCRRCGYPSETLPHVLCHCMRYSDLYTRRHNSVVDRVKKAAQARYAVAFENQAVGDTGLRPDLVLTKGTQALVLDIAVTFDNRKVALEEIRQHKLQKYEPVARVLGDRYKSVEVEAVVVGALGSWDAANDRILHKICSRRYLGLMRKLCVSEVIRWSRDIYIEHLTGHRQC

SEQ ID NO: 15916 - protein, 1171 aa, Vandiemenella viatica
MRRSLERHLENVHNIRTTGSSNFCSRCRQNVGGKPKNHNCAAPRMSTTPPAAAHLHKCGVCGMSFPSKRGLSNHLKAAHVVPERRDQLQVCLPPRDPQRRRRGDHREPATAAPAHHQIPAGGPSPPATADIPVVGPPPDAAAQPSPATPSQSVTTPADPQGTVESPARLLVVRAPPLEEVPAPPVASPPPDQLGGVEDARNVTSQEGPPADGADASCDLASGGSQLRERPGVEDALSVGSGGMADVDDVEDLPAGDIDGAEGDVGGDHLIINPESESPVHRFVPSLRELLRSNCSPANWGSFEGLCEAITSCAADTVKLPPSPRRSGRRTPIDVEDPRTIQMLYRRNRRRAVRLVVDGESRPCGLDVGGVESHFRSVWARKPCDLTIYGQPGRHAERPPMPMNPFVPGEVAARLRKCENTSPGADCLTYRHWRSVDPACTALSLIFNICLKYNNIPSTWKDSTTVLIYKKGDPSAVGNWRPIAMSRTIYKIFTGCLAKRLTTWLQSNSVLSKCQKGFMPFDGVFENNYILQQRMDKARTGRGDFCAAWLDFSNAFGSVPHEAITCALGAAGAGARFAELVSNIYVGSTSRVAVGTSLTDPIPVEGGIRQGCPLSGLLFNIAIDPILHNIQEDHPEHCALAYADDVTIMGRTVEEVQRSIDTVVALAAQIGIQVNAAKCYTIHLSGVTPVGTRPSVFQVAGVPIKHLNDGDQGISLGKPVGFQFASDQGELKGVCEMGLKLLRSKLAPWQRLDAIKTFLSPALNFAMRMGKYSKGEWRYLDDLLRPEIKRTLNLPPEGSNDYLYGSREAGNCGIPEAAEDSDIALVDSAFKLLTTGDPLTLELARGEGWTTTSRRLGRPVKDGDVAAYLSGENEGEFRQRSNALSNTWTRARVASSRLSVSWAITDKIPTLNSDELAIRPVQRHAVMRSIRQKTRRAHDVRFLGLRSQGKVAECVGMHRASSHFISTGSYTRFADWRFIHRARLRLVPLNAARRGVVEGDKSCRRCGYASKTLPHVLCHCMRYSDLYTRRHNSVVERVKKAAQPRWQVLHENQAVAGTALRLDLVLARAGSILVADVTIAFDNRKVAIKEARSKKLEKYAPLVQALGEHHKSVEVVAIVVGALGSWDPENDTTLRRLCSTKYLGLMRKLCVSDVIRFSRDIYVEHLTGHRQC

SEQ ID NO: 15917 - protein, 1295 aa, Vandiemenella viatica
MADSNSGGLVADATLASPEQTTQRPTQQPLNGTSIRDVPPEQQQQQQQHPQLQHGVVATPPASAPAVVEEDRPSPNAATWTAAIPRQKICRIGQTLVCFYPLPESIRCTEEDCHVAYKSVQWTSMRRSLERHLENVHNIRTTGSSNFCSRCRQNVGGKPKNHKCAAPRMSTTPPAAAHLHKCGVCDMSFPSKRGLSNHLKAAHVVPERRDQLQVCLPPRDPQRRRRGDHREPATAAPAHHPIPAGGPSPPATADIPVVGPPPDAATQPSPATPSQRVTTPADPQGTVESPARLLVVRAPPLEEVPAPPVASPPPDQLGGVEDARNVTSQEGPPANGADASFDLASGGSQLGERPGVDDALSVGSGGMADVDDVEDLPAGDIDGAEGDVGGDHLIISPEDESPVHRFVPSLRELLRSNCSPANWGSFEGLCEAITSCAADTVKLPPSPRRSGRRTPIDVEDPRTIQMLYRRNRRRAVRLIVDGESRPCGLEVGGVESHFRSVWARKPCDLTIYGQPGRHAERPPMPMNPFVPGEVAARLRKCENTSPGADRLTYRHWRSVDPACTALSLIFNICLKYNNIPSTWKDSTTVLIYKKGDPSAVGNWRPIAMSRTIYKIFTGCLAKRLTTWLQSNSVLSKCQKGFMPFDGVFENNYILQQRMDEARTGRGDFCAAWLDFSNAFGSVPHEAITCALGAAGAGAWFAQLVSNIYVGSTSRVAVGTSLTDPIPVESGIRQGCPLSGLLFNIAIDPILHNIQEDHPEHCALAYADDVTIMGRTVEEVQRRIDTVVALAAQIGILVNAAKCYTIHLSGVTPVGTRPSVFQVAGVPIKHLNDGDQGISLGKPVGFQFASDQGELKGVCEMGLKLLRSKLAPWQRLDAIKTFLFPALNFAMRMGKYSKGEWRYLDDLLRPEIKRTLNLPPEGSNDYLYGSREAGNCGIPEAAEDSDVALVDSAFKLLTTGDPLTLELARGEAWTTTSRRLGRPVEDGDVAAYLSGENEGEFRQRSNALSNTWTRARVASSRLGVSWAITDKIPTLNSDELAIRPVQRHAVMRSIRQKTRRAHDVRLLGLRSQGKVAECVGMHRASSHFISTGSYTRFADWRFIHRARLGLVPLNAARRGGVEGDKSCRRCGYASETLPHVLCHCMRYSDLYTRRHNSVVERVKKAAQPRWQVLHENQAVAGTALRPDLVLARAGSILVADVTIAFDNRKVAFKEARSKKLEKYAPLVQALGEHHKSVEVVAIVVGALGSWDPENDTTLRRLCSTKYLGLMRKLCVSDVIRFSRDIYVEHLTGHRQC

SEQ ID NO: 15918 - protein, 968 aa, unidentified
MMEIVYSVGVERFGEKPVGKSRRQAGHPNRRERERKQIRKELKVLRKRWLKATEMEKEALEGLRKELRSRLCTLGRAERARRKRKDRERRRAEFVANPFKFTKQMLGAKTSGKLTASVEEVEIHLRATHGDQHRDSPIEDIEGMEEPAPVYPMDCSEIKLSEVKEVVQKARAGSAPGPSGITYKVYKKCPKLVRRLWKLLKVLWRKEKIPESWKKAEGVFCPKQENSLKIDQFRTISLLSVECKIYFAILAKRLLHFMLRNNYIDTSVQKGGVPGFSGCLEHTSILTQLIQEAKTEKKDLSVVWLDLENAYGSVPHQLIKMALNKCHVPQQACRVISQYLDGLQIRFTVNGNTTAWQSLQRGIITGCTISVILFVAAMNLVMKPAMRQSRGPKTSSGVRQPPLKAFMDDLTITTESVLSSRWMLKSLEEAATWARMKFKARKCRRLVLRKGRLTNTIRLEIQGERIPSVTEQPIKSLGKKFDKSLGDQNNIKEFRQQVNQGLKAIEESKLPGKFKVWCYQYGLLPRITWPMTMYDMSLTTVEEVERKISRHLRKWLGLPPSFTRLGLYSRTARLQLPFTSVVEEFNFKVCKTRALMTLEGSKDEKVSQAGVELRSGRKWSVAKAVQEAKSSLRHRDIVGVVAQGRLGLGAGKTDHQSWCTAGPRERREMVQRETRRKEEEVRRAQAVSQGSQGAWTRWEGVKDRKVMWKELNRWEPLRLQFLLKSVYNLLPTPANKKMWGMQEEENCGLCGKRGSLSHILSGCPVALSQGRYRWRHDKVLRVLAAVLEEERTRNKQQVRKGPQFIGFLREGEVWKGKKERGKDVGILNTAKDWVLQVDLDKKLIFPEEVVTTSLRPDVILKSSQTKQVVLLELTVPWEERLEEAHERKALKYQELVQNCKDQGWKTQCFPVEVGTRGFIGQSVWKTLGAVGVNGKRRRDATRRLSEEAERSSRWIWIRSNERDWKGHD

SEQ ID NO: 15919 - protein, 1001 aa, unidentified
MAPSNAEKEWQQLDEDLEGILESVLAGAAERKIEAMMEIVYSVGVERFGEKPVGKSRRQAGHPNRRERERKQIRKELKVLRKRWLKATEMEKEALEGLRKELRSRLCTLGRAERARRKRKDRERRRAEFVANPFKFTKQMLGAKTSGKLTASVEEVEIHLRATHGDQHRDSPIEDIEGMEEPAPVYPMDCSEIKLSEVKEVVQKARAGSAPGPSGITYKVYKKCPKLVRRLWKLLKVLWRKEKIPESWKKAEGVFCPKQENSLKIDQFRTISLLSVECKIYFAILAKRLLHFMLRNNYIDTSVQKGGVPGFSGCLEHTSILTQLIQEAKTEKKDLSVVWLDLENAYGSVPHQLIKMALNKCHVPQQACRVISQYLDGLQIRFTVNGNTTAWQSLQRGIITGCTISVILFVAAMNLVMKPAMRQSRGPKTSSGVRQPPLKAFMDDLTITTESVLSSRWMLKSLEEAATWARMKFKARKCRRLVLRKGRLTNTIQLEIQGERIPSVTEQPIKSLGKKFDKSLGDQNNIKEFRQQVNQGLKAIEESKLPGKFKVWCYQYGLLPRITWPMTMYDMSLTTVEEVERKISRHLRKWLGLPPSFTRLGLYSRTARLQLPFTSVVEEFKVCKTRALMTLEGSKDEKVSQAGVELRSGRKWSVAKAVQEAKSSLRHHDIVGVVAQGRLGLGAGKTDHQSWCTAGPRERREMVQRETRRKEEEVRRAQAVSQGSQGAWTRWEGVKDRKVMWKELNGWEPLRLQFLLKSVYNLLPTPANKKMWGMQEEENCGLCGKRGSLSHILSGCPVALSQGRYRWRHDKVLRVLAAVLEEERTRNKQQVRKGPQFIGFLREGEVRKGKKERGKDVGILNTAKDWVLQVDLDKKLIFPEEVVTTSLRPDVILKSSQTKQLVLLELTVPWEERLEEAHERKALKYQELVQNCKDQGWKTQCFPVEVGTRGFIGQSVWKTLGAVGVNGKRRRDATRRLTEEAERSSRWIWIRSNERDWKGHD

SEQ ID NO: 15920 - protein, 1101 aa, unidentified
MGCLRQHPEQRSRILGETAEVRRQEETHSSQDLHVSGEQQTANPSSDPDPATSQQAVRRNEELTETAEKERPHDSQGEAGDQEVLPEGNRLAEPRKSQVKWPPSNAEKEWQQLDEDLEGILESVLAGAAERKIEAMMEIVYSVGVERFGEKPVGKSRRQAGHPNRRERERKQIRKELKVLRKRWLKATEMEKEALEGLRKELRSRLCTLGRAERARRKRKDRERRRAEFVANPFKFTKQMLGAKTSGKLTASVEEVEIHLRATHGDQHRDSPIEDIEGMEEPAPVYPMDCSEIKLSEVKEVVQKARAGSAPGPSGITYKVYKKCPKLVRRLWKLLKVLWRKEKIPESWKKAEGVVCPKQENSLKIDQFRTISLLSVECKIYFAILAKRLLHFMLRNNYIDTSVQKGGVPGFSGCLEHTSILTQLIQEAKTEKKDLSVVWLDLENAYGSVPHQLIKMALNKCHVPQQACRVISQYLDGLQIRFTVNGNTTAWQSLQRGIITGCTISVILFVAAMNLVMKPAMRQSRGPKTSSGVRQPPLKAFMDDLTITTESVLSSRWMLKSLEEAATWARMKFKARKCRRLVLRKGRLTNTIQLEIQGERIPSVTEQPIKSLGKKFDKSLGDQNNIKEFRQQVNQGLKAIEESKLPGKLKVWCYQYGLLPRITWPMTMYDMSLTTVEEVERKISRHLRKWLGLPPSFTRLGLYSRTARLQLPFTSVVEEFKVCKTRALMTLEGSKDEKVSQAGVELRSGRKWSVAKAVQEAKSSLRHRDIVGVVAQGRLGLGAGKTDHQSWCTAGPRERREMVQRETRRKEEEVRRAQAVSQGSQGAWTRWEGVKDRKVMWKELNRWEPLRLQFLLKSVYNLLPTPANKKMWGMQEEENCGLCGKRGSLSHILSGCPVALSQGRYRWRHDKVLRVLAAVLEEERTRNKQQVRKGPQFIGFLREGEVRKGKKERGKDVGILNTAKDWVLQVDLDKKLIFPEEVVTTSLRPDVILKSSQTKQLVLLELTVPWEERLEEAHERKALKYQELVQNCKDQGWKTQCFPVEVGTRGFIGQSVWKTLGAVGVNGKRRRDATRRLTEEAERSSRWIWIRSNERDWKGHD

SEQ ID NO: 15921 - protein, 1126 aa, unidentified
MVTTRQRLRPRPEHPIERTREAERCRCGKLCKNMRGLKIHQTKMGCLRQNLEQRMRQTVLGETEEVMRQVRNHSSQDLHVRGEQQVDSHSSDPEPAAMSEAPEVAEGPDPSVDKEEDKARKSQVKWPPSNAEKDWRQLDEDLEGILENVLAGTAERKIEALTEIVHNVGSERFGEKPTGKRTQRKEQPNRRERERKQIRKELRALRKRWKRANQTEREGLQALREELRVRLQSLGRAERARRNRKERERRRAAFLANPYKFTKKMLGSKTSGKLTASMEDIETHLRVTHGDQNRDRPLAEEDTIPEPEPTKEMDCSEIKLAEVEEVIRKARAGSAPGPSGITYKVYKKCPKLRRRLWKLLKVLWRKGKIPESWKRAEGVFCPKQENAERIDQFRTISLLSVECKIFFAVLAKRLVNYKLVNRYIDTTVQKGGVPGFSGCLEHTSIITKLIQEAKAERKDLTVVWLDLENAYGSVPHQLIKMALRKYHVPQQVRSVITQYLDGLQIRFTVNGNTTAWQRLQRGIITGCTISVMLFVAAMNVIMEPATRQSRGPTTRTGVRQKPLKAFMDDLTITTESVLSARWMLKSLDEAASGARMKFKAKKCRKLVLRKGKVSDRLQLEIQGERIPSVTEQPIKSLGKKFDMSLGDSNNIKEFKQQVEKGLKAIEESRLPGKFKAWCYQYGLLPRISWPMTMYDIPLTTVDEIERKISRHLRKWLGLPPSFTKLGLYCRTSRLQLPLTSAVEEFKVCKTRALLTLEGSSDRNVRQAGVVLRTGRKWRAEKAVEEARSSLRHRDIVGVVAQGRLGLGAGKPESQRWSTAGPKERRELVQKEVRRKEEESRWSQAVSQGTQGAWTRWEGVRDRRVMWSELYRWEPLRIQFLLKAVYDLLPTPVNKKRWGMQEDENCGLCGKRGTLSHVLSACPVALSQGRYRWRHDKVLRVMASVLEEERTRKRQPARNCPQFIRFLKEGEARKGRKEKAEEGGLFTEASDWVLQVDLDKKLVFPGEIAATNLRPDVVLWSKQLKKVELIELTVPWEERVEEAHERKALKYHELVQSCKDRGWRARCFPVEVGTRGFICQSTWSMLGAVGVKGRRRKETTKRIAEEAEKASRWLWLRSTEKEWKILG

SEQ ID NO: 15922 - protein, 1129 aa, Branchiostoma lanceolatum
MVMTRQRLRLRPEQPTCTRVAEVCRCGKVCKNKRGLKIHQTKMGCLRQNLDQRMRQTILGETEEVMRQDENHSSQDLHGRGEHQTDSQNSAPEPEPRTPVRQAIEDEPRAPVVEAEKEKSEPRKSQVKWPPSNAEKVWNQLDDDLEGILENVLAGTAERKIEAMMSIVHSVGTERFGEKPIGKGRQRVEQPNRRERERKRIRKELRTLRKRWRRAEEAEREALQELRDGLRKRLISLGRAERTRRKRKNKERRRAAFVANPFKFTKQMLGAKTSGRLTCSIEEVEEHLRVTHGDQDRDRPLGEGEETAEPEPEHLMDCSEIKLAEVKDVIQKARAGSAPGPSGVTYKVYKKCPKLTRRLWKLLRVLWRKGAIPESWKRAEGVFCPKQEKAEKVDQFRTISLLSVECKIFFAVLAKRLLNYMLANKYIDTSIQKGGVPGFSGCLEHTSIITQLIQEAKAGKKDLSVVWLDLENAYGSVPHQLIKMALEKYHVPQQAREIIFQYLDGLQIRFTVNGSTTAWQRLQRGIITGCTISVILFVAAMNLVMKPAIGQSRGPRGKSGVRQQPLKAFMDDLTLTTESVLSTRWMLRSLEKSATWARMRFKAKKCRKLVLRKGKVSDRIQLEIQGETIPSVTEQPIKSLGKKFDKSLGDQNNIEEFRQQVKKGLQAIEESKLPGKFKVWCYQYGLLPRITWPMTMYDIPLTTIEAVERKISKQLRKWMGLPPSLSKIGLYCRTSRLQLPLTSVVEEYKVCKARAVMSLEGSRDERVSQAGIEMRTGRKWAVGTAVEEAKSNLRHRDIIGVVAQGRLGLGASRTVNQRWCTAGPKERRDMVQSEIRRKEEECRRAQAVSQGSQGAWTRWEGIKDRRVMWSELYRWEPLRIQFLIKAVYDLLPTPANKKRWGMQEEENCGLCGKRGTLSHILSGCPVALSQGRYRWRHDKVLRVLAVALEEERVKKRQRSRKGPQFIGFVKEGEAKNGPKRKIEEGGIFATATDWVMQVDLDRKLVFPEEIVATRLRPDVVLWSKHTKQVILIELTVPWEERAEEAYERKALKYQELLNMCKERGWKASCYPVEIGTRGFICQSMWRALGVTGVKGKRRREVTKKLAEEAEKASRWLWFRSGDKQWKNLG

SEQ ID NO: 15923 - protein, 1129 aa, Branchiostoma lanceolatum
MVMTRQRLRLRPEQPTCTRVAEVCRCGKVCKNKRGLKIHQTKMGCLRQNLDQRMRQTILGETEEGMRQDENHSSQDLHGRGEHQTDSQNSAPEPEPRTPVRQAIEDEPRAPVAETEKEKSEPRKSQVKWPPSNAEKVWNQLDDDLEGILENVLAGTAERKIEAMMSIVHSVGTERFGEKPIGKGRQRVEQPNRRERERNRIRKELRTLRKRWRRAEEAEREALQELRDGLRKRLISLGRAERTRRKRKNKERRRAAFVANPFKFTKQMLGAKTSGRLTCSIEEVEEHLRVTHGDQDRDRPLGEGEETAEPEPEHLMDCSEIKLAEVKDVIQKARAGSAPGPSGVTYKVYKKCPKLTRRLWKLLRVLWRKGAIPESWKRAEGVFCPKQEKAEKVDQFRTISLLSVECKIFFAVLAKRLLNYMLANKYIDTSIQKGGVPGFSGCLEHTSIITQLIQEAKAGKKDLSVVWLDLENAYGSVPHQLIKMALEKYHVPQQAREIIFQYLDGLQIRFTVNGSTTAWQRLQRGIITGCTISVILFVAAMNLVMKPAIGQSRGPRGKSGVRQQPLKAFMDDLTLTTESVLSTRWMLRSLEKSATWARMRFKAKKCRKLVLRKGKVSDRIQLEIQGETIPSVTEQPIKSLGKKFDKSLGDQNNIEEFRQQVKKGLQAIEESKLPGKFKVWCYQYGLLPRITWPMTMYDIPLTTIEAVERKISKQLRKWMGLPPSLSKIGLYCRTSRLQLPLTSVVEEYKVCKARAVMSLEGSRDERVSQAGIEMRTGRKWAVGTAVEEAKSNLRHRDIIGVVAQGRLGLGASRTVNQRWCTAGPKERRDMVQSEIRRKEEECRRAQAVSQGSQGAWTRWEGIKDRRVMWSELYRWEPLRIQFLIKAVYDLLPTPANKKRWGMQEEENCGLCGKRGTLSHILSGCPVALSQGRYRWRHDKVLRVLAVALEEERVKKRQRSRKGPQFIGFVKEGEAKNGPKRKIEEGGIFATATDWVMQVDLDRKLVFPEEIVATRLRPDVVLWSKHTKQVILIELTVPWEERAEEAYERKALKYQELLNMCKERGWKASCYPVEIGTRGFICQSMWRALGVTGVKGKRRREVTKKLAEEAEKASRWLWFRSGDKQWKNLG

SEQ ID NO: 15924 - protein, 1126 aa, unidentified
MVTTRQRLRPRPEHPIERTREAERCRCGKLCKNMRGLKIHQTKMGCLRQNLEQRMRQTVLGETEEVMRQVRNHSSQDLHVRGEQQVDSHSSDPEPAAMSETPEVAEGPDPSVDKEEVKARKSQVKWPPSNAEKDWRQLDEDLEGILENVLAGTAERKIEALTEIVHNVGSERFGEKPTGKRTQRKEQPNRRERERKQIRKELRALRKRWKRANQTEREGLQALREELRVRLQSLGRAERARRNRKERERRRAAFLANPFKFTKKMLGSKTSGKLTASMEDIETHLRVTHGDQNRDRPLAEEDTIPEPEPTQEMDCSEIKLAEVEEVIRKARAGSAPGPSGITYKVYKKCPKLRRRLWKLLKVLWRKGKIPESWKRAEGVFCPKQENAERIDQFRTISLLSVECKIFFAVLAKRLVNYMLVNRYIDTTVQKGGVPGFSGCLEHTSIITKLIQEAKAERKDLTVVWLDLENAYGSVPHQLIKMALRKYHVPQQVRSVITQYLDGLQIRFTVNGNTTAWQRLQRGIITGCTISVMLFVAAMNVIMEPATRQSRGPTTRTGVRQKPLKAFMDDLTITTESVLSARWMLKSLDEAASGARMKFKAKKCRKLVLRKGKVSDKLQLEIQGERIPSVTEQPIKSLGKKFDMSLGDSNNIKEFKQQVEKGLKAIEESRLPGKFKAWCYQYGLLPRISWPMTMYDIPLTTVDEIERKISRHLRKWLGLPPSFTKLGLYCRTSRLQLPLTSAVEEFKVCKTRALLTLEGSSDRNVRQAGVVLRTGRKWRAEKAVEEARSSLRHRDIVGVVAQGRLGLGAGKPESQRWSTAGPKERRELVQKEVRRKEEESRWSQAVSQGTQGAWTRWEGVRDRRVMWSELYRWEPLRIQFLLKAVYDLLPTPVNKKRWGMQEEENCGLCGKRGTLSHVLSACPVALSQGRYRWRHDKVLRVMASVLEEERTRKRPPARNCPQFIRFLKEGEARKGRKEKAEEGGLFTEASDWVLQVDLDKKLVFPGEIAATNLRPDVVLWSKQLKKVELIELTVPWEERVEEAHERKALKYHELVQSCKDRGWRARCFPVEVGTRGFICQSTWSMLGAVGVKGRRRKETTKRIAEEAEKASRWLWLRSTEKEWKILG

SEQ ID NO: 15925 - protein, 1087 aa, unidentified
MKTYKIHQTKMGCPKDPEHRTSMLGKTTVGQRQEENHSPQEHQARGHLRAETQDEDPNPAMINPVEEVRGGAEGENEPRKSQVKWPASNAEKEWEQLDEDLEGILESVLAGNAEKKLDAMVGILYNVSAERFGKKEVGKKGQQKERTNRRERERRQIRKDLRTLKKRWKKADQAEREALGKLREDLRGRLKSLSKAERSRAKRRERQRKRSAFISNPFGFTKKLLGAKTSGKLTCSKEDIEVHLRKTHGDDNREKPLGDLDGLPDPEEPSYEMDCSEIRLAEVKEVIKKARAGSAPGPSGIPYKVYKKCPKLARRLWKLLKVVWRKKKIPESWKKAEGLFCAKQENAERIEQFRTISLLSVESKIFFAILARRLQDFMLKNAYIDTAVQKGGVPGYSGCLEHTAVITQLIQEAKSGKGDLAVVWLDLENAYGSVPHQLIKTALEKYHVPEHPRQIINQYMNGLKLRFTVNGTTTDWQRLERGIVTGCTISVTLFIAAMNLVIKPATEQSRGPMTRAGLRQPPLKAFMDDLTITTESVLSARWMLRSLDKTATWARLKFKARKCRKLVMRKGKLSDRLQLKIQGEDIPSVSEQPIKSLGKKFDALLGDRENCKDFKQQVVKGLQAIEDSDLPGKFKVWIYQYGLLPRIAWPMMMYEIPLSAVEEMERKVNSRLRKWLGMPPSFTSVGLYSTSAKLQLPITAMTEEFKVGKARALLTLEGSRDPRVSQAGIQLRSGRKWAVDKAVDEAKSRLRHSDIVGVVAQGRLGLGAGKVASQRWGTAGPKERRDMVQREVRRKEEEGRKSLAVSQGVQGAWTKWEGVRSRCVKWSDLWKCEPLRIQFLLRSVYDLLPTPVNLKRWGKEKEEKCQLCEKRGTLSHVLSSCPIALGQGRYRWRHDQVLRVLAGTLEEERTKKRGKNRKGPKFIGFVREGEREKRKTGTQDRERGILPTASDWNLRVDLDRGLSFPEDIVSTNLKPDVVLWSTQTKQVVLVELTVPWEERIEEAYERKAGKYQNLLQDCVEKGWRSWCFPVEIGCRGFVAQSAWRALGALGIVGKQRRDTVSKMAETAEVASRWVWRNRASTWKPTTP

SEQ ID NO: 15926 - protein, 1190 aa, unidentified
MTTLNSGVTMGETVDNQERLVRGKKVGSLPLQPCQSDGTHYIATSKQRGKHPQGLPRGGAEESPERTDLTVTNRQQPRPIRIRSGLEGGVKTETCSCGKVCKNLRGLKIHQTKMGCPKDPEHRTSMLGKTTVGQRQEENHSPQEHQARGHLRAETQDEDPNPAMINPVEEVRGGAEGENEPRKSQVKWPASNAEKEWEQLDEDLEGILESVLAGNAEKKLDAMVGIVYNVSAERFGKKEVGKKGQQKERTNQRERERRQIRKDLRTLKKRWKKADQAEREALGKLREDLRGRLKSLSKAERSRAKRRERQRKRSAFISNPFGFTKKLLGAKTSGKLTCSKEDIEVHLRKTHGDDNREKPLGDLDGLPDPEEPSYEMDCSEIRLAEVKEVIKKARAGSAPGPSGIPYKVYKKCPKLARRLWKLLKVVWRKKKIPESWKKAEGLFCAKQENAERIEQFRTISLLSVESKIFFAILARRLQDFMLKNAYIDTAVQKGGVPGYSGCLEHTAVITQLIQEAKSGKGDLAVVWLDLENAYGSVPHQLIKTALEKYHVPEHPRQIINQYMNGLKLRFTVNGTTTDWQRLERGIVTGCTISVTLFIAAMNLVIKPATEQSRGPMTRAGLRQPPLKAFMDDLTITTESVLSARWMLRSLDKTATWARLKFKARKCRKLVMRKGKLSDRLQLKIQGEDIPSVSEQPIKSLGKKFDALLGDRENCKDFKQQVVKGLQAIEDSDLPGKFKVWIYQYGLLPRIAWPMMMYEIPLSAVEEMERKVNSRLRKWLGMPPSFTSVGLYSTSAKLQLPITAMTEEFKVGKARALLTLEGSRDPRVSQAGIQLRSGRKWAVDKAVDEAKSRLRHSDIVGVVAQGRLGLGAGKVASQRWGTAGPKERRDMVQREVRRKEEEGRKSLAVSQGVQGAWTKWEGVRSRCVKWSDLWKCEPLRIQFLLRSVYDLLPTPVNLKRWGKEKEEKCQLCEKRGTLSHVLSSCPIALGQGRYRWRHDQVLRVLAGTLEEERTKKRGKNRKGPKFIGFVREGEREKRKTGTQDRERGILPTASDWNLRVDLDRGLSFPEDIVSTNLKPDVVLWSTQTKQVVLVELTVPWEERIEEAYERKAGKYQNLLQDCVEKGWRSWCFPVEIGCRGFVAQSAWRALGALGIVGKQRRDTVSKMAETAEVASRWVWRNRASTWKPTTP

SEQ ID NO: 15927 - protein, 1090 aa, Branchiostoma belcheri
MTIRKDWYEARRLAAYPCSQNDGTHYIATSTQRGKHPQGLPRGGAEESPERTDLTVTNRQQPRPLRIRSGLEGGAKTETCSCGKVCKNLRGLKIHQTKMGCPKDPEHRTSMLGKTTVGQRQEENHSPQEHQARGQLRAETQVEDPNPAMINPVEEVRGGAENEPRKSQVKWPASNAEKDWEQLDDDLEGILESVLAGNAEKKLDAMVGIVYNVGAERFGKKEAGKKGQQKERTNRRERERQQIRKDLRTLRKRWKEADQTEREALKKLREDLRGRLKSLSKAERSRAKRRERQRKRSAFISNPFGFTKKLLGAKTSGKLTCSKEDIEAHLRKTHGDDNREKPLGDLDGLPDPEQPTHEMDCSEIRLAEVKEVIKKARAGSAPGPSGIPYKVYKKCPKLARRLWKLLKVVWRKKKIPESWKKAEGLFCAKQENAERIEQFRTISLLSVESKIFFAILARRLQDFMLKNAYIDTAVQKGGVPGYSGCLEHTAVITQLIQEAKSGKGDLAVVWLDLENAYGSVPHQLIKTALEKYHVPEHPRQIINQYMNGLKLRFTVNGTTTDWQRLERGIVTGCTISVTLFIAAMNLVIKPATEQSRGPMTRAGLRQPPLKAFMDDLTITTESVLSARWMLKSLDKTATWARLKFKARKCRKLVMRKGKLSDRLQLKIQGEDIPSVSEQPIKSLGKKFDASLGDRENCKDFKQQVVKGLQAIEDSDLPGKFKVWIYQYGLLPRIAWPMMMYEIPLSTVEEMERKVNSRLRKWLGVPPSFTSVGLYSTSAKLQLPITAMTEEFKVGKARALLTLEGSRDPRVSQAGIQLRSGRKWAVDKAVDEAKSRLRHSDIVGVVAQGRLGLGAGKVASQRWGTAGPKERRDMVQREVRRKEEEGRKSLAVSQGVQGAWTKWEGVRSRCVKWSDLWKCEPLRIQFLLRSVYDLLPTPVNLKRWGKEKEEKCQLCERRGTLSHVLSSCPIALGQGRYRWRHDQVLRVLACTLEEERTKKRGKNRKGPKFIGFVREGEGEKRKTGTKDRERGILPTASDWNLRVDLDRRLVFPEEISSTNLKPDVVLWSTQTKQIVLVELTVPWEERIRGGV

SEQ ID NO: 15928 - protein, 1102 aa, Brachystomella parvula
MLSMMDVERFCTCNQPSYGQMIACDGNECLIEWFHLGCVGLTTAPSEEWFCPECLPHSKRLKKRGRPRKAQSHRLSDDFLDLADSDHPVSVSSHSQGSLPRLHYSLAGANKTTTLDLTAMWITKNIKISPSSSLKKSEVHSSYSNDICLESHPLNLAEFGKQMKIFFPGIITRRLGTRAEGSQYCYVGIQWASVVDEAVPPTTAEEDLGVLLAKLKRKIPTLRRCPKGARIEVGQALTSLLNEISNSPSNESLWKKLLLFPFSTLAVPSKSEGVKNLTKWVKDRVSCWLKDSSIHAPSPTTAHPLKDDGKNLAKKVEAKLSDGDIRGAIRLVTSDDSIAPYNSETLASLLEKHPDHPEPAFFPEDPSQVGIGSFENKEVLGAVKSFPPGSAGGLDGLRPQILKDIISSAVGEKFLDSLLRFSNTILRGQVPKEICPIFFGGSLTALKKKSGGIRPIAVGITWRRLVSKMVIWRMTPDLVKSFAPHQLGVGVKGGAEAGAHTASRYFSSHHDEPKAFLKIDFKNAFNEVRRDCLLQLVTEKFPQYYQFFFQAYRNDSILYHGSSKIFSKRGVQQGDPAGPALFAMVIHPIVLAMCSELNIWFLDDGTLAGDPSTVLHDFKKIKQMANEVGLSLNESKCELTVLSCDSGTQREILRDFQSFAPEVQFMPPENSILLGAPLTSESTEVVLREKIMQFSKMTTRLFDLSSHSAFFLLRASISIPRLNFFLRVAPTWNHRERLEEYDEMLKTSLEKILNCKLNAESWAQSSLPAKKGGMGISHSVDLAVPCYLASVYSVAPLISSLLPANIDPFSQDVSDGMKVWCDRTLLDPPPTEKRGLQSAWSSPLHALTIKRLVDDKTDPAAKARLLAYTQPEASSWLSALPSPQLGTLMDNESFRVSCSFRLGTDICEVHRCSCGAEVTTAGLHGLSCKKSAGRHSRHGSCNDILARALRSAEVPSIREPLGCSRADGKRPDGLTLLPWARGKCLVWDFTCRDTFAASYLPSTMHYVGAAAEKAEAEKHAKYEFLKGKYIFKVVAAETSGVWGNEALQLIRSIGERISMVTGEKRSTSYLFQRLGIAIQRGNVASILGSLPRGQDLGEIHLL

SEQ ID NO: 15929 - protein, 1271 aa, Amphibalanus amphitrite
MKTARPCPSPSRYKFDIWQPVFAALLASHVLSLTARVPLSSMACDWNASPLSSKSSPSIDWIPSGALTGHIQPLYANPLLLQQKRLPRTGTVRIRYFRSRAAYSANSDASRQRGRLAYVPPILLAGDVELNPGPNFGSQNTLETSVCRRSPAPSQYSCAACPSLSTRKNSINCDSCGQRWHTTCARITVAQASALNIWHCSDCRHSSASSRSLRASQEVRSQSHLLSPTPTTLSDRLAELRRTHTVIKRIPKAARAATADSLSKLIEGAITNPSTETWEHFLSFAFRALRAPCKVPGEKHKTAASVIKKQIADLESNVPLVARQREPHSPTSDRQNSVARRVMSKCADGDIKAALRALTSNEEFIQPTSDTVTALRRKHPAAPPDENIPPPLQSQEAPPLRVQTAQVRSAIESMPTGSAAGLDGMRPLHLRQLISAEASEPGRRLLGSLTSLANKALEGDIPECARSAFFGATLCALRKKDGGLRPIAVGSVYRRLPCRIAARHAADLLGPEFRPVQLGVGTRLGCEAAVHAAREYISSVTDVPSPNVILKLDVRNAFNTVRRDKMLNNIKKRCPEVYRLAHQSYSAPTPLHIGEDVISSSCGVQQGDPLGPVGFSVAIDDCARSLKSPINIWYLDDATIAGPVDTVTDDLVNLQKMLPDLGLELNSSKCEFTLLGATSENARTSIAGRLKTALPEITETPLASLTLLGSPLAEDGIQASTDIASGTIHTLCDRIRELDTHTATFFLAHFISAPRLQYLLRSSPIYTKEAALQEIDDTVKSTLTDVCNVQLDSASWTQASLPMRYGGLGVRSVARLALPCYIASLNAAAPLIASIVPFMDSSAPSALQPALDFFRTSVNSTIVPELTEAGKQRTWDDIASEAYRDQLLTGADQTHRARLMAASQPHTAAWLQAIPVPNLGLLLDPESVRIAVALRLGAPICDPHKCLLCGRYVGPLGLHALSCKKSAGRFPRHAQLNDLVKRSLSAAGVPSLLEPVGLDRGDGKRPDGITTFPFASGKCLAWDATCTDTFSESAVVACALKPGSAARAAESRKIEKYASISTQYLFAPIAVETTGVIGPAASRFFRELGRRMVLATGDRREAAWLWQRVSMAIVRGNATSIRGSVVLSDSSIKHNHLCKEDVHAKSPDTQLAPRAAAPQTPRDPRQYASEVVVPESVGMAAVLHSVQPSRDPMDDPELARYLQPRSTVRSIEPVPTTQELNDELLRITPSDSSDQTGSPRPNLLAGYAELLAELKAVSRCDESDDGERPSD

SEQ ID NO: 15930 - protein, 1265 aa, Amphibalanus amphitrite
MRHTISTRMRRLMLFSAFLLVLAEHVALDVIWQTPILGACFATPPVTQDLRKCSDDVFPLILPRERNRELPTIPLFHQKQVTRTGKVKTRYFRRRVAYSANSDATRQMGRLAYVPPVLLAGDIELNPGPTYATEDSRDCSEYSVSTSSHGSSQLSCAGCPSLSTRKASITCNNCALRWHTSCARLTLAQARVLNVWHCSKCRHSQTTLSESRCTPGKITPVTAPTTTTPLSERLAELRNNCTVIKRIPKAARASAADCLSKLIDKAVCDSSSEAWERFMLFAYLALRAPVKTPGRKNQSAASTIKQQVASMDNLTSIQPISIQRTVTKTRSENHIAHRVASKCADGDIKGALRALTSKEEYTQPSCDIVSALRSKHPPAPPDEALPSPPEPHESGPLQVNNEQVRAAIETMPTGSSAGLDGVRPLHLRQLISAEASEPGRRLLRSLTSLTNMALDGRIPECARPAFFGAALCALRKKDGGLRPIAVGSVYRRLPSRIAAHHAADLLAPDFRPVQLGVGTRLGCEAAVHAAREFISDALKNPSPTAFVKVDMRNAFNTVRRDKLLKSIQARCPEIFRLAYQAYSAPTPLHIGSSIISSCSGVQQGDPLGPIAFSLAIDDCARSMKSPLNIWYLDDATVAGPVCTVVNDLVKLQDLLPDLGLELNGSKCEFAVFGTALDSVHASIVGEIKAALHGISETSPAGLTLLGSPLTETGIQIATETATDTVSTLCDRIRGLDTHTAIFFLAHYISAPRLQYLLRSSPMYTNKAGLQAIDNAVKSALTDVCNVSLTEGAWTQASLPVRHGGLGVRSVERLALPCYISSITAATPLITSIIPFILDNTVPSALQPALECFVKATASTEVPEPMLACKQRTWDDMASKALRDHLLSDADQMHRARLLAASQDHTAAWLQAIPVPSLGLHLDPETVRIAVALRLGVPICEPHTCRLCGRQVGRLGHHALSCQKSAGRFPRHAHINDLIKRSLSVSGVPSVLEPVGLDRGDGKRPDGLTTFPFASGKCLAWDATCTDTFSETAMVACAINPGSAASAAEKRKIQRYSSISEQYLFVPVAVETSGVVGPAACRFFKELGRRISQSTGDRRETAWLWQRLSMAIIRGNAAAIIGSTTHFPMSSDTVQHQVQSWTPGLRQTQKRQTQNGTCYNHATPDHIHLPTHQANNAITDITQPSSAPSMNSDTTPSPITADSHTNSRSPPSPAVDNPSISARLARYRELFQQIKSEFRAQGLEVETSRDYMDDPELAYYFTRGAN

SEQ ID NO: 15931 - protein, 1265 aa, Amphibalanus amphitrite
MRHTISTRMRRLMLFSAFLLVLAEHVALDVIWQTPILGACFATPPVTQDLRKCSDDVFPLILPRERNRELPTIPLFHQKQVTRTGKVKTRYFRRRVAYSANSDATRQMGRLAYVPPVLLAGDIELNPGPTYATEDSRDCSEYSVSTSSHGSSQLSCAGCPSLSTRKASITCNNCALRWHTSCARLTLAQARVLNVWHCSKCRHSQTTLSESRCTPGKITPVTAPTTTTPLSERLAELRNNCTVIKRIPKAARASAADCLSKLIDKAVCDSSSEAWERFMLFAYLALRAPVKTPGRKNQSAASTIKQQVASMDNLTSIQPISSQRTVTKTRSENHIAHRVASKCADGDIKGALRALTSKEEYTQPSCDIVSALRSKHPPAPPDEALPSPPEPHESGPLQVNNEQVRAAIETMPTGSSAGLDGVRPLHLRQLISAEASEPGRRLLRSLTSLTNMALDGRIPECARPAFFGAALCALRKKDGGLRPIAVGSVYRRLPSRIAAHHAADLLAPDFRPVQLGVGTRLGCEAAVHAAREFISDALKNPSPTAFVKVDMRNAFNTVRRDKLLKSIQARCPEIFRLAYQAYSAPTPLHIGSSIISSCSGVQQGDPLGPIAFSLAIDDCARSMKSPLNIWYLDDATVAGPVCTVVNDLVKLQDLLPDLGLELNGSKCEFAVFGTALDSVHASIVGEIKAALHGISETSPAGLTLLGSPLTETGIQIATETATDTVSTLCDRIRGLDTHTAIFFLAHYISAPRLQYLLRSSPMYTNKAGLQAIDNAVKSALTDVCNVSLTEGAWTQASLPVRHGGLGVRSVEKLALPCYISSITAATPLITSIIPFILDNTVPSALQPALECFVKATASTEVPEPMLACKQRTWDDMASKALRDHLLSDADQMHRARLLAASQDHTAAWLQAIPVPSLGLHLDPETVRIAVALRLGVPICEPHTCRLCGRQVGRLGHHALSCQKSAGRFPRHAHINDLIKRSLSVSGVPSVLEPVGLDRGDGKRPDGLTTFPFASGKCLAWDATCTDTFSETAMVACAINPGSAASAAEKRKIQRYSSISEQYLFVPVAVETSGVVGPAACRFFKELGRRISQSTGDRRETAWLWQRLSMAIIRGNAAAIIGSTTHFPMSSDTVQHQVQSWTPGLRQTQKRQTQNGTCYNHATPDHIHLPTHQANNAITDITQPSSAPSMNSDTTPSPITADSHTNSRSPPSPAVDNPNISARLARYRELFQQIKSEFRAQGFEVETSRDYMDDPELAYYFTRGAN

SEQ ID NO: 15932 - protein, 987 aa, Amphibalanus amphitrite
MLFAYLALRAPVKTPGRKNQSAASTIKQQVASMDNLTSIQPISSQRTVTKTRSENHIAHRVASKCADGDIKGALRALTSKEEYTQPSCDIVSALRSKHPPAPPDEALPSPPEPHESGPLQVNNEQVRAAIETMPTGSSAGLDGVRPLHLRQLISAEASEPGRRLLRSLTSLTNMALDGRIPECARPAFFGAALCALRKKDGGLRPIAVGSVYRRLPSRIAAHHAADLLAPDFRPVQLGVGTRLGCEAAVHAAREFISDALKNPSPTAFVKVDMRNAFNTVRRDKLLKSIQARCPEIFRLAYQAYSAPTPLHIGSSIISSCSGVQQGDPLGPIAFSLAIDDCARSMKSPLNIWYLDDATVAGPVCTVVNDLVKLQDLLPDLGLELNGSKCEFAVFGTALDSVHASIVGEIKAALHGISETSPAGLTLLGSPLTETGIQIATETATDTVSTLCDRIRGLDTHTAIFFLAHYISAPRLQYLLRSSPMYTNKAGLQAIDNAVKSALTDVCNVSLTEGAWTQASLPVRHGGLGVRSVERLALPCYISSITAATPLITSIIPFILDNTVPSALQPALECFVKATASTEVPEPMLACKQRTWDDMASKALRDHLLSDADQMHRARLLAASQDHTAAWLQAIPVPSLGLHLDPETVRIAVALRLGVPICEPHTCRLCGRQVGRLGHHALSCQKSAGRFPRHAHINDLIKRSLSVSGVPSVLEPVGLDRGDGKRPDGLTTFPFASGKCLAWDATCTDTFSETAMVACAINPGSAASAAEKRKIQRYSSISEQYLFVPVAVETSGVVGPSACRFFKELGRRISQSTGDRRETAWLWQRLSMAIIRGNAAAIIGSTTHFPMSSDTVQHQVQSWTPGLRQTQKRQTQNGTCYNHATPDHIHLPTHQANNAITDITQPSSAPSMNSDTTPSPITADSHTYSRSPPSPAVDNPSISARLARYRELFQQIKSEFRAQGLEVGTSRDYMDDPELAYYFTRGAN

SEQ ID NO: 15933 - protein, 1237 aa, Amphibalanus amphitrite
MQRPRPDPISASYSLRLLVVILLPLTCLCLRQNLSPADRDYTSCFLPSQGTHALKVGKIKTVFFRRRASYSANSVATRQHGRITFSCSVLLAGDIELNPGPKTQKSTSQDQSATTDLTCAACPSKSTRKAAIICRACGDRWHTSCAKLTLTQARALRIWHCRTCLGAATLTHADPLQCCNGSATRCSAQSNASPAGTEPADLAEYLAELRRATVVIKQIPKAARIAAADCLAKLIDEAISERNFSTWRRLLSFAFGALRAPAKATGERRQSAATTIKLQISRFETRADLSPTNDRRSNHQHSSDDRLAHRVLSKCADGDIKAALRALTSTDDFVKPSYDVLQSLKEKHPSAPLDEALPPAPQDDRFPPLQVTSEQVRSAINTMPTGSAGGLDGVRSLHLRQLISTHAAEPGRRLLTSLTALTNLALAGRIPECAHGAFYGAALFALRKKDGGLRPIAVGSVFRRLACRIAAHHMSSALGPELRPIQLGVGTRLGCEAAVHAVRECIYRAQDASAPSVLVKVDVRNAFNTIRRDVMLKSVADRCPETYRILYQSYSTPTPLYIEGDVIMSHAGVQQGDPLGPIGFALAVDSCARRLQSPLNIWYLDDATLAGSASVVASDLRLLRQELPCLGLELNSSKCELTLLGDRLADKRAPAIDDLKSYLPGIVETPLHSLTLLGSPLHESSIVTATDAAHDMIKLLCSRIRSLDTHTALFFLAHYIAAPRLQYLLRSSPMYLNSTGLQAIDALMRSALTDTCNVSLGDEAWKQASLPVRYGGLGVRSVERLAIPCHLASLTEASSLVSSILSNQGNRYDAILARKPALERLLPLIGEATLPDPSTPGQQRAWDDLASEASCKQLLRETNQVHRARLLAACQPHTAAWLQAVPVPSLGLFLDPESVRIAVALRLGAPICEPHVCRLCSCPVDRLGHHALSCSKSAGRFPRHAELNDLVKRSLAASGIPSVLEPTGLDRGDGKRPDGLTTFPFKGGKCLAWDATCTDTFADSSLAKSAIKPGSAARAAEDRKVQRYASLSAQYLFVPLAVETSGVAGPSAIRLVQELGRRITSVTGERRETAWLWQKISIAIIRGNAVAIRGSAYLSSTVSSAHSALPPRVPAFHYAQKQHTKHDTRNISLTPPLTLSPAPPNPASAPSPSESQDTLTAYHTPTGHHDIAPSPPKSIRPISTRLAKYRKMYEEMRANFETQDLSLSRNPLADPELASYLVRGVTQCSAISCLAEP

SEQ ID NO: 15934 - protein, 1226 aa, Amphibalanus amphitrite
MQRPRPDPISASYSLRLIVVILLPLTCLCLRQNLSPTDRDYTSCFLPFQGAHALKVGKIKTVFFRRRASYSANSVATRQHGRITFSCSVLLAGDIELNPGPKTQKSTSQDQSATTDLTCAACPSKSTRKAAIICRACGDRWHTSCAKLTLTQARALRIWHCRTCLGAATLTHADPLQQSNASPAGTEPADLAEYLAELRRATVVIKQIPKAARIAAADCLAKLIDEAISERNFSTWHRLLSFAFGALRAPAKATGERRQSAATTIKLQISRFETGADPSPTNDRRSNHQPSSDDRLAHRVLSKCADGDIKAALRALTSTDDFVKPSYDVLQSLKEKHPSAPLDEALPPAPQDDRFPPLQVTTEQVRSAINTMPTGSAGGLDGVRPLHLRQLISTHAAEPGRRLLTSLTALTNLALAGRIPECAHGAFYGAALFALRKKDGGLRPIAVGSVFRRLACRIAAHHMSSVLGPELRPIQLGVGTRLGCEAAVHAVRECIYRAQDASAPSVLVKVDVRNAFNTIRRDVMLKSVADRCPETYRILYQSYSTPTPLYIEGDVIMSNAGVQQGDPLGPIGFALAVDSCARRLQSPLNIWYLDDATLAGSASVVASDLRLLRQELPCLGLELNSSKCELTLLGDRLADKRAPAIDDLKSYFPGIVETPLHSLTLLGSPLHESSIVTATDAAHDMIKTLCSRIRSLDTHTALFFLAHYIAAPRLQYLLRSSPMYLNSTGLQAIDALMRSALTDTCNVSLGDQAWKQASLPVRYGGLGVRSVERLAIPCHLASLTEASSLVSSILSNQGNRYDAILARKPALERLLPLIGEATLPDPSAPGQQRAWDDLASEASCKQLLRETNQVHRARLLAACQPHTAAWLQAVPVPSLGLFLDPESVRIAVALRLGAPICEPHVCRLCSCPVDRLGHHALSCSKSAGRFPRHAELNDLVKRSLAASGIPSVLEPTGLDRGDGKRPDGLTTFPFKGGKCLAWDATCTDTFADSSLAKSAIKPGSAARAAEDRKVQRYASLSAQYLFVPLAVETSGVAGPSAIRLVQELGRRITSVTGERRETAWLWQKISIAIIRGNAVAIRGSAYLSSTVSSAHSALPSRAPAFHYAQKQHTKHDTRNFSLTPPLTLSPAPPNPASAPSPSESHDTLTAYHTPTGHHDIAPSPPKSISPISTRLAKYRKMYEEMRANFETQDLALSRNPLADPELAPYLVRGVTQCSAILCLAEP

SEQ ID NO: 15935 - protein, 1095 aa, Amphibalanus amphitrite
MTCRACGDRWHTSCAKLTLTQARALRIWHCRTCLGAATLTHADPLQQSNASPAGTEPADLAEYLAELRRATVVIKQIPKAARIAAADCLAKLIDEAISERNFSTWRRLLSFAFGALRAPAKATGERRQSAATTIKLQISRFETGVDLSPINDRRSNHQHSSDDRLAHRVLSKCADGDIKAALRALTSTDDFVKPSYDVLQSLKEKHPSAPLDEALPPAPQDDRFPPLQVTTEQVRSAINTMPTGSAGGLDGVRPLHLRQLISTHAAEPGRRLLTSLTALTNLALAGRIPECAHGAFYGAALFALRKKDGGLRPIAVGSVFRRLACRIAAHHMSSVLGPELRPIQLGVGTRLGCEAAVHAVRECIYRAQDASAPSVLVKVDVRNAFNTIRRDVMLKSVADRSPETYRILYQSYSTPTPLYIEGDVIMSHAGVQQGDPLGPIGFALAVDSCARRLQSPLNIWYLDDATLAGSASVVASDLRLLRQELPCLGLELNSSKCELTFLGDRLADKRAPAIDDLKSYLPGIVETPLHSLTLLGSPLHESSIVTATDAAHDMIKTLCSRIRSLDTHTALFFLAHYIAAPRLQYLLRSSPMYLNSTGLQAIDALMRSALTDTCNVSLEDEAWKQASLPVRYGGLGVRSVERLAIPCHLASLTEASSLVSSILSNQGDRYDAILARKPALERLLPLIGEATLPDPSTPGQQRAWDDLASEASCKQLLRETNQVHRARLLAACQPHTAAWLQAVPVPSLGLFLDPESVRIAVALRLGAPICEPHVCRLCSCPVDRLGHHALSCSKSAGRFPRHAELNDLVKRSLAASGIPSVLEPTGLDRGDGKRPDGLTTFPFKGGKCLAWDATCTDTFADSSLAKSAIKPGSAARAAEDRKVQRYASLSAQYLFVPFAVETSGVAGPSAIRLVQELGRRITSVTGERRETAWLWQKISIAIIRGNAVAIRGSAYFSSTVSPAHSALPPRVPAFLYTQKQQTKHDTRNISLTPPLTLSPAPPNSASAPSPLESHDTLTAYHTPTGHHDIAPSPPKSISPISTRLAKYRKMYEEMKANFETQDLALSRDPLADPELAPYLVRGVTQCSAISCLAEL

SEQ ID NO: 15936 - protein, 1226 aa, Amphibalanus amphitrite
MQRPRPDPISASYSLWLLVVILLPLTCLCLRQNLSPTDRDYTSCFLPFQGTHALKVGKIKTVFFRRRASYSANSVATRQHGRITFSCSVLLAGDIELNPGPKTQKSTSQDQSATTDLTCAACPSKSTRKAAIICRACGDRWHTSCAKLTLTQARALRIWHCRTCLGAATLTHADPLQQSNASPAGTEPADLAEYLAELRRATVVIKQIPKAARIAAADCLAKLIDEAISERNFSTWRRLLSFAFGALRAPAKATGERRQSAATKIKLQISRFETGADLSPTNDRRSNHQHSSDDRLAHRVLSKCADGDIKAALRALTSTDDFVKPSYDVLQSLKEKHPSAPLDEALPPAPQDDRFPPLQVTTEQVRSAINTMPTGSAGGLDGVRPLHLRQLISTHAAEPGRRLLTSLTALTNLALAGRIPECAHSAFYGAALFALRKKDGGLRPIAVGSVFRRLACRIAAHHMSSVLGPELRPIQLGVGTRLGCEAAVHAVRECIYRAQDASAPSVLVKVDVRNAFNTIRRDVMLKSVADRCPETYRILYQSYSTPTPLYIEGDVIMSHAGVQQGDPLGPIGFALAVDSCARRLQSPLNIWYLDDATLAGSASVVASDLRLLRQELPCLGLELNSSKCELTLLGDRLADKRAPAIDDLKSYLPGIVETPLHSLTLLGSPLHESSIVTATDAAHDMIKTLCSRIRSLDTHTALFFLAHYIAAPRLQYLLRSSPMYLNSTGLQAIDALMRSALTDTCNVSLGDEAWKQASLPVRYGGLGVRSVERLAIPCHLASLTETSSLVSSILSNQGNRYDAILARKPALERLLPLIGEATLPDPSTPGQQRAWDDLASEACCKQLLRETNQVHRARLLAACQPHTAAWLQAVPVPSLGLFLDPESVRIAVALRLGAPICEPHVCRLCSCPVDRLGHHALSCSKSAGRFPRHAELNDLVKRSLAASGIPSVLEPTGLDRGDGKRPDGLTTFPFNGGKCLAWDATCTDTFADSSLAKSAIKPGSAARAAEDRKVQRYASLSAQYLFVPLAVETSGVAGPSAIRLVQELGRRITSVTGERRETAWLWQKISIAIIRGNAVAIRGSAYLSCTVSPAHSALPPRVPAFHHTQKQQTKHDTRNISLTPPLTLSPAPPNSASAPSPSESHDTLTAYHTPTGHHDIVPSPPKSISPISTRLAKYRKMYEEMRANFETQDLALSRDPLADPELAPYLVRGVTQCSAISCLAEP

SEQ ID NO: 15937 - protein, 1266 aa, Amphibalanus amphitrite
MWCLKDETLKSFLPWAARRFTLTLPASGSQVHRGRTTTGVMQRPRPDPTSASYSLWLLVVILLPLTCLCLGQNLSPTDRDFTSCFLPFQGTHALKVGKIKTVFFRRRASYSANSVATRQHGRITFSCSVLLAGDIELNPGPKTQKSSSQDQSATTDLTCAACPSKSTRKAAIICRACGDRWHTSCAKLTLTQARALRIWHCRTCLGAATLTHADPLQQSNASPAGTEPADLAEYLAELRRATVVIKQIPKAARIAAADCLAKLIDEAISERNFSTWRRLLSFAFGALRAPAKATGERRQSAATTIKLQISRFETGADLSPINDRRSNHQHSSDDRLAHRVLSKCADGDIKAALRALTSTDDFVKPSYDVLQSLKEKHPSAPLDEALPPAPQDDRFPPLQVTTEQVRSAINTMPTGSAGGLDGVRPLYLRQLISTHAAEPGRRLLTSLTALTNLALAGRIPECAHGAFYGAALFALRKKDGGLRPIAVGSVFRRLACRIAAHHMSSVLGPELRPIQLGMGTRLGCEAAVHAVRECIYRAQDASAPSVLVKVDVRNAFNTIRRDVMLKSVADRCPETYRILYQSYSTPTPLYIEGDVIMSHAGVQQGDPLGPIGFALAVDSCARRLQSPLNIWYLDDATLAGSASVVASDLRLLRQELPCLGLELNSSKCELTLLGDRLADKRAPAIDDLKSYLPGIVETPLHSLTLLGSPLHESSIVTATDAAHDMIKTLCSRIRSLDAHTALFFLAHYIAAPRLQYLLRSSPMYLNSTGLQAIDALMRSALTDTCNVSLGDEAWKQASLPVRYGGLGVRSVERLAIPCHLASLTEASSLVSSILSNQGNRYDAILARKPALERLLPLIGEATLPDPSTPGQQRAWDDLASEASYKQLLRETNQIHRARLLAATQPHTAAWLQAVPVPSLGLFLDPESVRIAVALRLGAPICEPHVCRLCSCPVDRLGHHALSCSKSAGRFPRHAELNDLVKRSLAASGIPSVLEPTGLDRGDGKRPDGLTTFPFKGGKCLAWDATCTDTFADSSLAKSAIKPGSAARAAEDRKVQRYASLSAQYLFVPLAVETSGVAGPSAIRLVQELGRRITSVTGERRETAWLWQKISIAIIRGNAVAIRGSAYLSSTVSPAHSALPPRVPAFHHTQKQQTKHDTRNISLTPPLTLSPAPPNSASAPSPSESHDTLTAYHTPTGHHDIAPSPPKSISPISTRLAKYRKMYEEMRANFETQDLALSRDPLADPELAPYLVRGVTQCSAISCLAEP

SEQ ID NO: 15938 - protein, 1113 aa, Amphibalanus amphitrite
MQRPRPDPISASYSLWLLVVILLPLTCLCLRQNLSPTDRDYTSCFLPFQGTHALKVGKIKTVFFRRRASYSANSVATRQHGRITFSCSVLLAGDIELNPGPKTQKSTSQDQSATTDLTCAACPSKSTRKAAIICRACGDRWHTSCAKLTLTQARALRIWHCRTCLGAATLTHADPLQQSNASPAGTEPADLAEYLAELRRGTVVIKQIPKAARIAAADCLAKLIDEAISERNFSTWRRLLSFAFGALRAPAKATGERRQSAATTIKLQISRFETGADLSPTNDRRPNHQHSSDDRLAHRVLSKCADGDIKAALRALTSTDDFVKPSYDVLQSLKEKHPSAPLDEALPPAPQDDRYPPLQVTTEQVRSAINTMPTGSAGGLDGVRPLHLRQLISTHAAEPGRRLLTSLTALTNLALAGRIPECAHGAFYGAALFALRKKDGGLRPIAVGSVFRRLACRIAAHHMSSVLGPELRPIQLGVGTRLGCEAAVHAVRECIYRAQDASAPSVLVKVDARNAFNTIRRDVMLKSVADRCPETYRILYQSYSTPTPLYIEGDVIMSHAGVQQGDPLGPIGFALAVDSCARRLQSPLNIWYLDDATLAGSASVVASDLRLLRQELPCLGLELNSSKCELTLLGDRLADKRAPAIDDLKSYLPGIVETPLHSLTLLGSPLHESSIVTATDAAHDMIKTLCRRIRSLDAHTALFFLAHYIAAPRLQYLLRSSPMYLNSTGLQAIDALMRSALTDTCNVSLGDEAWKQASLPVRYGGLGVRSVERLAIPCHLASLTEASTLVSSILSNQGNRYDAILARKPALERLLPSIGEATLPDPSTPGQQRAWDDLASEASCKQLLRETNQVHRARLLAACQPHTAAWLQAVPVPSLGLFLDPESVRIAVALRLGAPICEPHVCRLCSCPVDRLGHHALSCSKSAGRFPRHAELNDLVKRSLAASGIPSVLEPTGLDRGDGKRPDGLTTFPFKGGKCLAWDATCTDTFADSSLAKSAIKPGSAARAAEDRKVQRYASLSAQYLFVPLAVETSGVAGPSAIRLVQELGRRITSVTGERRETAWLWQKNLYCHHSRKRSGNQRLCLSFLHCEPRPLRLTTPCTSFPSHTETTD

SEQ ID NO: 15939 - protein, 1235 aa, Amphibalanus amphitrite
MRPSRTDSGWTVFPLRLLAAIVLFLTYLSLRHISSCPTVGVVNYTPYILPNQGNRTLKVGKTKTVFFRRRASYSANSVATRQYGRITFVRPVLLAGDIELNPGPKTRKCTSQDQSAKAENTCAACPNKSTRKAAIICRACGDRWHTSCAKLTLTQARALRIWHCRTCLGASALAPADSLQQSNVSSAGTQSTNLAEYLAELRRAGLVVKQIPKAARITAADCLAKLIDEAISDQNISTWRRLLSFAFLALRAPTKVTGERRQSSATTIKRQIARFETGVDLSPINDRRPNHQHSSNDRLAHRVRSKCADGDIKAALRALTSTDDFLKPTREVLQTLQEKHPAAPHDEALPPAPTDDGFPPLQVTTEQVRSAINTMPTGSAGGLDGLRPLHLRQLISTHAAEPGRRLLTSLTALTNLALAGRIPECAHGAFYGAALFALRKKDGGIRPIAVGSVFRRLACRIAAHHMSCVLGPELRPIQLGVGTRLGCEAAVHAVRECIYRAQDTSAPSVLVKVDVRNAFNTIRRDVMLTSVADRSPETYRILYQAYSTPTPLCIEGDVIMSCAGVQQGDPLGPIGFALAVDSCARRLQSPLNIWYLDDATLAGSASVVASDLRLLCQELPELGLELNSSKCEFSFLGNRSSDKCATTIDEVISALPGITETPLHNLTLLGSPLHDSSIATATNNAKDVIKTLCKRILSLDTHTALFFLTHYLAAPRLQYLLRSSPMYLDSTGLQAIDAITRSALTDICNVSIRDEAWTQASLPVRYGGLGVRSVERLALPCHLASLTEASSLVSSILCNLGNMYDVTLARKPALDRLLPLIGEATLPDPSMPGQQRAWDDLASEASYKQLLRETNQIHRARLLAATQPHTAAWLQAVPVPSLGLLLDPESVRIAVALRLGAAISEPHACRLCSRPVDRLGHHALSCSKSAGRFPRHAELNDLVKRSLAASGVPSVLEPTGLDRGDGKRPDGLTTFPFKGGKCLIWDATCTDTFAESSLTKSAIKPGSAARAAEDRKVQRYASLSSQYIFVPLAVETSGVVGPSAINLVQELGRRITAVTGERRETAWLWQKISIAVIRGNAVAIRGSADLSSSMSPANQTSPPRAAPHHTPKQQTYHDTRNTQAHFSHTLPQPRSPAQSNPTAPPSPALETHDYDTPSASHSFAGHQDIPSSPSKSISSISTRLIMYRKIYEEMRASFVLQGVDLSRDPLADPDLAPYLMRGVTQCPDLSCLAQP

SEQ ID NO: 15940 - protein, 995 aa, Leptopilina boulardi
MPNLHQCEFPGCSRSFASKIGLGVHRRAKHPQFVDERVQVDRIKACWTEEEVRLLARREIELMNTGVRFINVELAKDFPNRTVEAIKSQRKAVAYRNLVIELQNQAEDEESSTSTLSTEEESTLELADNSQNPFLEFFSSLEEPDNDNTDIYKHHQIKLFDICQQALTKSKELILDLLSLYLIEITPKIKPRPPRKITPNTDVTSNRKKRRQEYAKTQAMYLKSRSRCIENILTGASDIKQPDRNIMEPFWKNVLTQKSNMSPVFTLPDHKKKKKRLSSIWLPISIEEIKLNMVEKKTSAGPDGLTGKDYHNIPLIVLQCIFNLLLWIEKLPSSLLASRTIFIPKKGFEQDPSKYRPITIPSVLVRGLHRILARRIEVAIPIDERQKGFRTWIDGCRDNVFLLDTILKQQHRGLKPLYMASLDVAKAFPSVSHEALISALQSFGVPPECVNYIRSVYKEGYTILHGQGWRSDKIIPERGVRQGDPLSSPLFNIITHRALETLPNDIGVKIGHKNINAMAFVDDLNLYASTPKGLQVLIDRISHFFSECGLSINTEKSFTLGFKPSGKHKMNTVDIKTEFKINNRPLQKIGRESTWTYLGIQFTWAGRKNVAIKDSLSIDIETLTKAPLKPQQRLFAFRTMVIPKHYHQLALGSVLLGTLKCADKTSRAAIRRWIKLPPDTPNAYFHAPISEGGLGIPSFRWVAPSIRLKRLQSLTSDENHELQPYLQTEINTCRRRLVDNAHQFDSNQKINDMWAHKLHQSIDGMGLKDSGKTPGQNTWVGDGTKFLSGRDFINSCRLRISAMPTRSRTSRGRAKDRSCRAGCDAPETLNHVLQVCFRTHVKRVDRHNAVAKYISQKFKNKGYQVLDEPRIQTEAGLRKPDIIIIRNDAALVLDAQVVSEQSDLKAVHRRKSMYYQDPATEDYVKEKSPVVRTISYSSATLNWKGIWSRDSAECLKKWGLNTNDVKILSSRVLIGSIAGFRMFNNTTSRVRTSTQ

SEQ ID NO: 15941 - protein, 929 aa, Cardiocondyla obscurior
MARREAQLTIEEQPRFMNQELQQYFPQRTIEAIKGKRKQQEYKTMVLNLIAEMTNQAEETLEEDEEENENDELGNKILDFLESFRTPRAEDFKEKKLHKIAMEARTAGKEVTTQKVALYLKEIFPPPPNQKQSREGATPPIAQSKKRKRRREYGWTQTMWKKDRRRCITSILEQTGAIKQPPREIMEPYWKQIIKTEGNQAPERNMEPSRDEIWNPIQKDELRTARIPYTTAPGPDGVSARLYRSIPTNVILRLYNLFMWCETPPTDILLSRTMFIPKKKEAREPGDFRPITIPPVLLRGLHKILAKRLEETLDIDPRQRAFRSTDGCADNTLLLDTLLRYHRKKYKSMYMASIDVSKAFDTVTHPAIKNTLESLGIPKPMLKYLENIYGKAKTRIEGTTWTSKPIHPARGVRQGDPLSPILFNAITHRLLQNLPKEIGVELGETRINAAAFADDLLLFAKTPGGLQTLIDTTTKYLDSCGMSINVEKSMTVAITASAHIKKTKIDDTQVFTDKGRPIPTMARSNTWRYLGVTFSPEGRTNYNPTEATKPLLDSLTKAPLKPQQRIYALRTVVIPKLYYHLALGATRITTLNKTDKLIRTAVRKWLALPHDVPIAYFHATVKDGGLGIPATRWVAPLTRRGRLIAAIRNTQHQELKEYINKEIEECDRRLTDHGILYSNPDMVANRWAQRLYEKIDGIGLRESRRTPHQHHWITDGTRLLSGKDYIQCNRLRIGAIPTKSRTTRGRHQDRRCRAGCLAQETINHVLQQCHRTHEARIRRHDAITKYLARKIPKSGYQVFQEPKYQTTVGLRKPDLVAVLGETAVVIDAQVVSEQTLLTEAHRRKVRYYEDEAITKKIKETHGVRRIITTSATLSWKGVWSPESAEDLKRLGFIRANELKILATRTLIGGMMAFKIFNATTSVNFRAGVG

SEQ ID NO: 15942 - protein, 864 aa, Diaphorina citri
MKKLKEILHNKEYLEDKILYMDTLKQKLAAYSARLKRYRTSAQRKEDNRNFQNNEKGFYRNLNDRTEINIVDYPSAEEISEFWKGIWSQDEKHNEEAEWIKKETDKYTNTPQQSNINITETDLKETIAKTHNWKAPGADKIHNYWYKYFPSIHKQLAKCIEHIINNPEEVPKFITEGTTYIIPKNEETSNPANYRPITCLSTLYKIITSVITTKIYTHLDENQIMTEEQKGCRKHSQGCKEQLTIDTIILKQAEHNQRNLHMCYIDYQKAFDSIPHSWLIQVLQIYKIHPRLIRFLSQTMKTWRTKIILSTSKTKIETEEINITTGIYQGDSLSALWFCLALNPLSNALNNSQIGFQLKHQKEVLNTISHLFYVDDLKLYAPSKPKLEQLIHTVEEISNDIHMKFGLNKCKTLHMEKGKWIASENIEIGTQGIIESMTVTETYKYLGVKQNTRIDMKNVKAHLTETFKNRITDILKTHLNSKNITKAINTYAIPTLTYSFGIINWTKTDLEKLNRTLRILLTKHCNHHPKACVQRVTIPRQQGGRGFLDIEELHYNQIERLRKHFIDKTENPFFRAIVRIDTKHTPLQLAKPPSPEINFLNQKHREWESKEIHGRYKNTINQEHIDKQKTFEWLKKGQLFPETEGFVIAIQDQTVPTRNYRKYIIKEQDIGSDKCRKCNQQPETIEHIICGCPILAGKEYTDRHNNMAKIIHSELTKIHNITKTTEPYFIYKPQSVLENNDCKIYWDNPIITDKTIIANRPDITLTDKRNSITYLIDIAIPGDHNIEKKYKEKMEKYAPLAEEIKRIWNQEKVIIIPLIIGATGTTPKTLTSHLQDLNIPSYILHNIQKATIINTCSIVRRFLQ

SEQ ID NO: 15943 - protein, 1229 aa, Botryllus schlosseri
MPAKRSGYIAPGRTRRGTKRMTPEDSSTPTTQEHQREDISQHGACATTNCGSQNSSAAKEKKKRHRWSKEEYKEIMRCYFLAKFENSAGVTEGTFQKWKERTNNSPTMTANTLATMRRCVIKNKKLSEQELAEIEGEMCNKNIENSEAMELQFGQDDLNPQQSLDDPNIAEVELQNTTGHPNESTTPNDGDIDTELELEIKNQIIDRMKSTLNVNDRVQLPDLQITKKLKTDIAAANKILTETILPATLNDTQGERPQCPLTTINNLIYSTAAVISERHCKIPRTVNKKRGRHTPAWQRRIENKIAKLRCDVAILSELKKGNVSRKVKNKVKRIELEHQTKLQSTEKVTMLQEELKMRICAKAQRLKRYKKRETQYRQNLLFARKPGQFFRMMKQKSNQKITSSKIPATADVESFWKKIWETKKLHNSNANWIQDLHTDHLQTPEQQWSEITKQEIKEALKSSLNWKAAGPDQIKNFWLKKLTATHNYLAVTYNELLSSTSSHEIPAWFTQGITYLIPKNENTRDPKNYRPITCLTTMYKTLTKILAKRSYKHLENLLPPEQKGCKEGALGCKDHLLLDKTILENCKRRHTNLSMAWIDYKKAFDSVPHTWILKTMRMYKMNPIIIRFIENSMKNWHTKLLIKHDQGETETCTIQICNGIFQGDSFSPLLFCLSLAPLSELLRKNETGYVMKKAANSEGQKIHHLLFMDDLKLYAKSDTDLNNQMKIVHEFSEDIKMKFGLDKCSKLTIRRGRATSTGDMNFKMDETITELNAEGHYRYLGICESDNIKHAAMKSSLKKEYISRLKSILKTELNSKNKINAINSLAVPVLRYSFGVVNWRKDEIKKLDTKTRKLMTMHHMHHPKSDTQRLYIPRKKGGRGLQEIEQTFKTEIIGLSQYINNSDNIYCKLIAQEDKQRKTKSLSYRHDKYAREVVSETANLHTAENTVAKPTTIAKAARVRYKNAMLKMRETIWESMPLHGQHKKLTSQPHVDELSWTWLSSSGLKPASEGFIFAAQDQSLPTKYYRKRILKQNTDGKCRMCHNQNETVAHLMSGCGALAATEYTWRHNRIGHYIHLELCKHFNITTSTKNWYDYSPAPVTENEQVKILWDVPVITDREIRSNRPDIIVKLKKKRECLFIELAVPADHNLLQKESEKYSKYADLKMECEKMWRCKINIVPIVIGATGVVSKKLMRHIQQIPGNVRFDMIQKITLLGTVHILRKALNAPLD

SEQ ID NO: 15944 - protein, 978 aa, Cephus cinctus
MGVKWVEVYNSSIHILSNLVDNPDGNTTQIRVTTVPRIVPPVPEVTPLEQPIEQGNERTPIDIEYPIRTTLTPRWEISVLEDATALHQNELEQIPAAMIETRERLLNVIHRIKSLNESIDQVTLDDIYEDLISHIRTRASQPAHDRTQNKIDDNKRGKNRQNNNDRHKNKNKTSNKKNNNRNRMRYRYARTQDLYRKNPKLLAKYLRVGYDMCDNDRTNIPDSAVVSEFYINLWDNKHEVNPSLICMDRDMPRRAITSISSNDILLRIKQKKAGAAGPDGFNKNDIKDKHIKTLLMLFFNVILVCKKQPNAWRMNRTTLILKEGKPPHRIENYRPLAISSYLCRIYWGILDKKIREIITLKDHQKGFVNKNGCFNNINILNEILNLSKKRKGMVFIQLDVAKAFDTLPHEILAPILRRKGMQEQLIEVIQDAYKDIFTKINFNRTECQVQLKRGVKQGDPLSPLLFNIAMESLLTQLETMPGFRINEDTNISCLAFADDLVLVSETIEQAAELLRVTGNYMSSLGMALATPKCTTAQIVPTRDCYYIQDPKILYEGLPIPYAGPDSEIRYLGASFNTWRGIDVSKAIIEFNQTLPRIKSASLKPYQKIEILSSYIVPHYVYTLSLGKISVTAVRELDNNLRMAYKEILHLPTSTSDGFLYSRKRDGGLGLPKLENISTAATMRSSVKFLQSRDPVIQALAVESSLESRVTRTAHSVGLEWPTDLRTINNWKKGQKNKDLSHWSRTAQGKGVPAYKDDQIGNTWLYHPALLKSGRYLTALRLRTDMGGTRVAMNRAVKQHNINCRKCGAVPETLAHILGQCTFTKRHRIHRHNEILNIIIQNVHRTMPQCIVIKEPRFELESDTLKPDLVIKIPDKAYVIDPTIRHEDSNYLENGRLEKLEKYNILKNYIQREFGVSVCEVLPIVVGTRGAMPPATISALNKLNIKRKDTLITISMTALRNSIEIYNNFIDYDRDKLLH

SEQ ID NO: 15945 - protein, 1053 aa, Piezodorus guildinii
MGCQPGLSIITGPNHKKGYNLRSGPQAAPSSESLRPEVDAEAPCAAPAEGQRCSECARTFKNKIGLGVHMRARHPLVANEKIKPAPHKHRWGEEELKVMANREAELRGASVLKLNQALLPMFPGRTLESVKGVRRRPDYKAWVEQAAARLRAESPHTTPPPGTEEATDTSSGRELAQGKEWSDEIKNHIIDQISSIDTVAYEAEMLREIAMESIEGADVTQRLDGWLAKVFPRPNPAKRAQNPKRVVRSPPKNKRTRRREEYAKAQSLWRRNRSVVARLVLEGNPRKGAHSLEDMEDFWAPIFESCQSPGNPPPLRREGEPIGISSILSPITTEDVVYFKVATTSSGGPDEVTASHWNSVLPIIKALFFNVFLLNGKIPESLRDTRTIFIPKEDCPKTAGDYRPISIASVIVRHLHKIIATRLTKLGILDDRQRAFIPTDGVAENIVLLDTILTEARSSLKQVHMVTLDIRKAFDSLDHGAIVRVLEARGFPREFIKYITDVYANSGTYLAMDGRKSRRVEVRRGVRQGDPLSPFIFNLCIDELIKSIPEEVGFPMEGSRASCLAFADDLVIITSSIAGMNLTLNGIVESASGLGLTFNHAKCHALSLVPDGHNKKIKVLSEETLFDIQGNPIPQSNAVSCWRYLGVDFSVKGAKTVELDVAEALRNITKAPLKPQQRLAILRGYLLPRFMHGLVLGRVTDGRLVNLDRQVRKAVRSWLRLPKDVSLGYFHARGKSGGLGIPCFRTMVPMVLHNRMKAMEHSSSPLVRAVQRHCRVQRRITWAIRSLRKQGIPVDSSSAYESYWDKKLHSSTDGVDLREAERVRASTQWITAGSTGIPGRDFVQYLHVQSGSLPTRVRTSRGARRDNMNILCRAGCQVQETAAHVIQQCHRTHGGRILRHNATYKIIGGALATKGWNVEYEPHVHSTSGLRKLDIVATKCDEAIVVDAQIVSGRPTLDSAHEAKIRYYADNESLMVGVADRLKIQRDNVTVSAVTISWKGVWCARSYSDLISFGVPPGILRGVTTRVLQGSSTNWHRFNWMTNLRSQRRQPRS

SEQ ID NO: 15946 - protein, 974 aa, Cimex lectularius
MESNFECLYCGRNFGTNTGRRLHIRRAHPREFNQTIEVFEARVNWSEEELRLMANLECELRRNNVKNVNQRILLSFPGRTINSIKGARKKPVYISLLREISVADQQQHAVQNDALDSQSQRMVSHAVSPDDALLVLKRALLDFLAHSGDLAVKWNPHIIADFCNAALNGVLDEDVFWLWLELTFPPDLEEWDEVAVRPGSVGGRNCYGGTVRRRNRRSEYAYIQRLWTKDRKAVVDRILEGTYSRGSVGLQELDEYWGRVICAQSREWNESLLAVTNPLLVELVNVVAPDEVKRYEPEMRSAAGPDHLSVREWRGVPYAIKAALFNCFLLLSKVPKGLCVARLTLIPKKESPVGAADYRPIAVASVILRHYHRLLAGRMSAVVRFHRSQRGFIAGTDGIAQSVVSLDGILKDSIKKKRELRVAILDVTKAFDSVSHRALVGILRARGFPEKFVGYIEFLYNHSRVFVEGLDAPRRLHKVGRGVRQGDPLSPLLFNLMMDFVLERLSANIGYWYRGARVTSLAYADDLVLVGSSKIGLQMLLDSAMVNLRKLGLEINHSKSMTLSLCPVGRTRQLKIVTDNCMTIGDAPIRSLDIDEEFHYLGIPMMYSGMTSAPIDLDPLLANVDGAPLKPSQKLDVVRTFLLPKFYHSLVFSSHGVVQLKRLDIRVRHYIRKWLHLPHDVPNGFIHAACRFGGLGVCSLAYWIPYWRSVRIGRARNELYGDEGQEQVLQTRTERRKAVADLLYGMVDGKELRHASDVPSSTNWLRTGTAVSEREFVQFCRLWIGAIPTRIRLSRGRRAAMAHMCRYGCGATETLAHIVQDCLRTDGGKSLRHNACVSLLVSAFTSGGFNVMQEPLIEVDARIYKPDLVIGKNNMAYVIDLQVVSGAVGLERENQNKTLKYSGPELLYEVALLMGVPRCNVQVLGVTLTWRGVWCRSSYLGLLGLGVRKNVCDWVTERILRGSHISWSVFSRRS

SEQ ID NO: 15947 - protein, 1194 aa, Centruroides sculpturatus
MEATTILVPLQPPHGCRQRLPIPRDYADHAGLVRHLKQIHNTALHFECRACGYIHEKLKMVKLHQARSDDCRASIKAATPPPPPPANRKKTRILYGPIKRRTKNGAKTTSTSTAANDSQSSGASLTPLPSTTPARLRTRRTMRSLRGPSRRRSTAQPNPVQSQPAPTTDHLVPSQESPTRSLPAPNSDQLEVDGSPTPTGRPTPHLSPSRIATPDPPVRSQTPAQLATPPSPPRQHQPVTPVAPPPAPQTSQPPQAPMNNSSSGPPEWALAWASRFESAIDEDILEGVLSDFIHLTYSICDIQGPRQPRSTTNNHTQDHRAEASEVQRLYRANRKRAVDRILGGNSRFCQVETEKVYRHFKSINEQCAPSTAAPVPVVQDPAPATDNPLNIPFTPEEVAIRIAKGHNTAPGPDRIRYLHWRRVDPTGTILAALFNTVLKIGYIPLSWRESTTVLIYKKGDCNNLNNWRPICLSNTLGKLYTACLADRLLRWCYANDRISTSQKGFLHYQGCMEHNFLLKTVIQDARRTRKECHVAWLDIANAFGSVPHTAIWKSLNWHGLHPDAILTLQRLYEGSTTRVRTSSGFTDPISMLSGVRQGCPISPLLFILTIEPAIRRLQRLDKGYYIHNHPISALAYADDIALISSSHQGLQDLLDSISEWADWANIRFNHSKCGTLSVLGKSHTTGTNDFFIKQNSLPRLGNDDAYKHLGVPTGFSRCDTEAATTDGVIQDINKLDASHLAPWQKVDALNTFILPRLSFCLATGTTPKKTLDKIDRTLKRHVKKWLGLPQRASAEILHLSYKQGGTNITPASLIADIAQVCHAVYLFNSRDEHITDIALGALRDVVTARIMRTPSDEELCHYLDGSMDGDLGNPSKDITSMWTRLRMATRRLKKKINIHWAVGPNDTPTLAIGDIFVRVKGCQSVLVSLMRDHHLRKLLAKPDQGKVFQVTASNKASNHFMNNGRFTRFTDWRFIHKARLSVVALTGHKRFGNESKTCRRCGFARETLSHVLCHCPPNFRLITQRHNAVLNRIVAAFQPRGATVLVNQRVPGFEENCRPDLTVIHKESKTDSVIDVTTPFENGQQAFDAAREEKERKYSNLVHLRNRGYNTHFATFIIGALGGYDSLNEATLQRLGIGRRYSALMKKLMVSDVIRISNDIYRQHLGARQQQHYQPPTRTSNNHSRSPMHNQDNM

SEQ ID NO: 15948 - protein, 1053 aa, Centruroides sculpturatus
MHLGARHPYLHQPGKWCHAQGEPPGPSSSTTNTPRLYSQVAASPIVPATSTTSQHPATTTTATRQRKNGRSTRRNPEPPPPCSVSQLEPSSPTRSAMPQAGGTPLPPPGRTNLSNLTPTQTSTATENDTTALPARPTPPQHQDPRPSPGALSAEQPPTAIQPPLDSNDSPPQWVTAWADRFNAVLDEDMLESVLHDFMRLTYNICDIQGPRRNPNNTSGRNPPLQLEASNIQCLYRTNRKRAFDRIIGGKSRFCQGNPETIYRHFKDINKNCLLRDATPVPIDPDPAPATTTDPINIPFMPEKVAVRIAKGHNTALGPDKIRYLHWRRVDPRGIILAALFNSVQRIGYIPQDWQESTTVLIHKKGDQADLRNWRPISLSNTLDKLYTACLADRLLRWCDTNSRISTAQKGFLHYQGCVEHNFLLKSIIQDARHTRNECYIAWLDIANAFGSIPHSIIWESLKWHGLHPDAIATIQLLYDKSTTRIRTHTGLTKPVAMLSGVRQECPISPLLFILTVKPALRRLQALAKGYTIHGHTDDALAYADDVALVSNSSKELQDQLDSIAAWAKWAGIKFNHAKCGTLAILGKLHTARTNVFSLDQADLPKLGNNDAYKHLGVPTRFSRCDTEASTTDDIIQNINKIDASHLAPWQKLDALNTFIILRLSFSLTTGTTPKKMLDKIDRILKHVVKRWLSVPQRASAEIVYLAHKQGGANVTPSSLLSDISQVSHAMHLFHSKDNNFVNVALGALGDVVSHRIKRTPTTEDICQYLDGSTEGDLANPSKDTTSIWTRLRMATRRLRNNINITWTKGPDVVPTIAVDNNCIQVRGCQHTLDKLLKFHHLQRLTVKPDQGKAFKITASSKVSNHFLSNGQYTRFSDWRFIHRARLSVVALRGHKRFGNEAETCRRCGFIRETLSHVLCHCPPNFRLITHRHNAILNRLVNAFQSWGATVQVNQRVPGFHENCRPDLVILHEETKTATVVNVTTPFENKQPAFNAAREEKGHKYHNLIQHLRSQGYDKFFGAFIIGALGGYDPINESNLQRLGIGRRYANMMK

SEQ ID NO: 15949 - protein, 1210 aa, Centruroides sculpturatus
MTELTVLVPLCPPHGCQLCLPIPRDYADHAGLVKHLKHVHGTVLRFECRACGYMHDKLKVIKAHQLRAEECRVRIEALSPPQPLPADRRKTHIPTRPRKPYARRKPRPATTSPASSNASWSSGSPSPVARQTTPRPRRITRSLQPISEVNEPHPTAQTPPATASSQSCSQPTTQETGPATRPPQRPPAASKKPQKRTRRSTRHNPEPSPQQEVSHAPTTPHTSESSPSPPGRNNHPSPVSNQTFPIAENQQSATTPTVCPSPALQAAQSTPTTAVPVQPPPSTPSVATDEHSPPQWTIAWADQFNAVQDEDMLEGVLSDFIKLTYDICDIQEPRRTPGPTSNHNQQHQLEASEIQRLYRTNRKRAFDRIVGGDTRFCQIDPEQIYQHFRDVNGSCVRTDATPVPIDPDPAPSTTDPINVPFTPKEVAIWIAKGHNTAPGPDKIRYLHWRRVDPSGTILSAIFNTVQKIGYIPLGWRESTTVLLHKKGDHSKLRNWRPICLSNTMGKLYTACLADRLLRWCYANDRISKSQKGFLHYQGCIEHNFLLKSVIQDARRTRKECFIAWLDIANAFGSVPHANIWESLKWHGLHPDAIATIQLLYNDSTTRIRTRSGYTDPIAMLSGVRQGCPISPLLFILTVEPALRCLQALGKGYTIHDQTVDALAYADDIALVSNSSKGLQDQLDSIAEWAEWAGIHFNHVKCGTLAVLGKSHTAGNNVFSINQTDLPHLNNKDAYKHLGVPTGFSRCDTEATTTDSVIQDITKLDTSRLAPWQKIDALNTFIMPRLTFCLTTGTTAKKTLDKMDRILKRHVKRWLSVPQRASTEIVYLSYKQGGANVTPTSILADMAQIGHAMHLFHSKDDNITRVALGALNDVVTSRIKRQATIEDVCHYLDGSMERDLGNPSKDITSMWTRLRMATRRIRKKINVNWIEGPNNTPTIAFDNNIIPIKGCQRTLDRLLKFHHLQKLMTKPDQGKAFKVTATSEVSNHFLNNGQYTRFSDWRFIHRARLSVVALRGHKRFGNEAKTCQRCGFVRETLSHVLCHCPPNYRLITQRHNAVLNRIVNAIQPRGATIRVNQQVPGFNDNCRPDLVVVHEESKSATIVDVTTPFENGPAAREEKERKYHNLTQHFRRNGYDTFFGAFIVGALGGFDPLNEAVLQRLGIGRRYAAMMKRLMVSDAIRWSNDIYRQHLGDCSRRPPPPHPSQSYNHLA

SEQ ID NO: 15950 - protein, 968 aa, Euglossa dilemma
MVAAAEARANVQGGVRFMNEHLLAVFENKFSLDRLKGLRKKASYKDLVAQKTSALGHQSATVSRPSYAGVAQHSDTRRWSADLTAPAQEQATAHQQPCPYINAIRELIVPAEGVKTHEAEVLIGLARDILGGEQVMSDACCRWLQKVFPVPSKAAPRTSEHQPSGPALGKPVPRWRLRRRQYAAMQELWKKDMSRAAKLVLDGPVHAQTPSVREMEEFWTPMFNSPSAPVEHQHPVREEENLRWIAEPVRGHEIQASEIPLSSAAGLDNISSRQWRSVPAILRALFYNIVLANGAFSPELLTSRTVFIPKKDGSSTPSEFRPISVASVVVRQLHKIFAMRLAKANLIDERQRGLHDGCAENVLVLSTALHDARDSLKQLHVVSLDVAKAFDSISHHAITSALRGLGLPELFVRYITSTYRSSRTVLQVRGQTSSPIEVRRGVRQGDPLSSLLFSIVMDQVIRSLPEEVGYTLREHRVNALAYADDIILFASSAAGMRSVLRTAEEEARKYGLEFNSNKCLAMSIQIAGKEKKYKVLSSSRFEVNGRLIKQLGPTEGFRYLGIKISPLGVEKPGGRLDKELANITKAPLKPQQRLKILRCFLIPRFYHQLVLTRCPLKTLRALGKQTRLAIRRWLRLPKDVPLGYFHAGCKEGGLGIPAFRTSIPGMIHARLSSMARSTCAAARDASLHPTVLAAFRRAECALTIQGKELLRPEDRTRYWASLLHQSIDGAELREAAKVTDSSSWVDAGSAGIPGKDYVQYHHVRINALPTRIRTSRGRRGGGAPVMCRAGCAVAETAAHIIQGCHRTHGGRILRHDAICRIVASGLRQSGWAVRENPHYVLQSGLQKPDIVAFRDGDVKVIDTQVVSGAAQLNDAHARKVAKYDTPQLKHRVAQEFGVLAEHVKVTSVTVSWRGVWSSLSAEAVSSLGLRGLLKAITTRVLQGSHTNWTRWNKMTNTIGHPGGREGVG

SEQ ID NO: 15951 - protein, 1186 aa, Harmonia axyridis
MVLPFQQHICQRCVELRKGNFLLLNLKDAMEHNAKKHPLAIVTYRCRKCRVNTSESHRSVLGHIARCKGPPQEKVGDFVCRGCSTRYQSSAALSLHMRTRHPDLRNEDILQQKQQIKPRARIEGKHWTEEEEKLLKDLLRKYKGRDDIYTLIADVIKTKDVKQIRDKRAYYKRRAKEGKISAIESSPEEQLKSKAVTRSVQKPIKDFRIISSPGTHPKPVNVVTRSMCKQTSSQAGHFAPAASSPTVSHKKSYKIINDGSIPGTSSVCGHFEPDEHLSEGSVDPVIVNTLELERKSLIEDNIEQLGALMLWITEDDSLNKFPLALKGSTLLSKIIKGKSPVSSGDVDSFYSEILGCLRSQNVGTSARDRTLPRTAIENKPTPPNKKKKKSYKKFIYAHSQELFKKSPTTLAKYVIENINFHEEKNIQPPKESIKQAFEELWGREAKVQNINDLYGVSVDHASVKLGVIGLVDVEGRIKMCKDGAVGVDGIGKKHVNNKISKVLLTLLFNIISFSGIIPSLWGANRTVLLLKKEKDPSIVKSFRPITISSFIERLYWGLIDKQIRSQITLFCRQKGFVKENGCYANIHLINELMNRAKQSGKNLIAVFLDMCQAFDMVPHEAIGPALRAKGVSEPVISLIINSYARQTTSIGTRNGMINIQIKRGVKQGDPLSPLIFNLIIEPLLIKLSSMEGCRIGSERVSCVAFADDLTILAETTEAATKLVQTTELYLKDLSMMISSSKSTSFQISPTKDSFCMVDPQIPCINGDKIPAIKPSQCVKYLGTKIFPWKDSLAPGLKKEFYAVFGRVKKLKLKPHQKIQLLCTNILPHYIHTLISQPPSMTTLKELDRIIRVAVKDILHQELSRSDCSLYASNKDGGLGIPRMESIVAAAALKNGLNFLNSDDPLIKALREGSGLEKRLKTIANSVRINWPCTLSDIKKYKKQLKQQNILTWQEQKFQGRAVAAFADDRIGNRWLQDPTLLKPSRYLTALRMRSNQVGLRVPMNIVKPQADINCRKCKYQPETLGHVIGQCTFTKPGRIKRHDEILDFIISGIQRADPSALIAKEPSIELNRRLLKPDLVMKNQSRVLVVDLSVRLEDGQYLENGRKEKLNKYSDLLEHLKLTHNIKEGAVIPIIVGSRGAMPRFTVENLKKIGIRAYGDMLTISLMALRSSIEIYHAFIDYDRMT

SEQ ID NO: 15952 - protein, 1186 aa, Harmonia axyridis
MVLPFQQHICQRCVELRKGNFLLLNLKDAMEHNAKKHPLTTVTYRCRKCRVNTSESHRSVLGHIARCKGPPQEKVGDFVCRGCSTRYQSSAALSLHMRTRHPDLRNEDILQQKQQIKPRARIEGKHWTEEEEKLLKDLLRKHKGRDDIYTLIADVITTKDVKQIRDKRAYYKRRAKEGKIAAIESSPEEQLKSKAVTRSVQKPIKEFRIISSPGTHPKPVNVVTRSMCKQTSSQAGHFAPAASSPTISHKKSYKIINDGSIPGTSSVCGHFEPDEHLSEGSVDPVIVNTLELERKSLIEDNIEQLGALMLWIAEDDSLNKFPLALKGSTLLSKIIKGKSPVSSGDVDSFYSEILGCLRSQNVSTSARDRTLPRTAIENQRTPPNKKKKKSYKKFIYAHSQELFKKSPTTLAKYVIDNINFHEEKNIQPPKESIKQAFEELWGREAKVQNINDLYGVSVDHASVKLGVIGLVDVEGRIKMCKDGAVGVDGIGKKHVNNKISKVLLTLLFNIISFSGIIPSLWGSNRTVLLLKKEKDPSIVKSFRPITISSFIERLYWGLIDKQIRSQITLFCRQKGFVKENGCYANIHLINELMNRAKQSGKNLIAVFLDMCQAFDMVPHEAIGPALRAKGVSEPVISLIINSYARQTTSIGTRNGMINIQIKRGVKQGDPLSPLIFNLIIEPLLIKLSSMEGCRIGSEKVSCVAFADDLTILAETTEAATKLVQTTELYLKDLSMMISSSKSTSFQISPTKDSFCMVDPQIPCINGDKIPAIKPSQCVKYLGTKIFPWKDSLAPGLKKEFYAVFGRVKKLKLKPHQKIQLLCTNILPHYIHTLISQPPSMTTLKELDRIIRVAVKDILHQELSRSDCSLYASNKDGGLGIPRMESIVAAAALKNGLNFLNSDDPLIKALREGSGLEKRLKTIANSVRINWPCTLSDIKKYKKQLKQQNILTWQEQKFQGRAVAAFADDRIGNRWLQDPTLLKPSRYLTALRMRSNQVGLRVPMNIVKPQADINCRKCKYQPETLGHVIGQCTFTKPGRIKRHDEILDFIISGIQRADPSALIAKEPSIELNRRLLKPDLVMKNQSRVLVVDLSVRLEDGQYLENGRKEKLNKYSDLLEHLKLTNNIKEGAVIPIIVGSRGAMPRFTVENLKKIGIRAYGDMLTISLMALRSSIEIYHAFIDYDRMT

SEQ ID NO: 15953 - protein, 1234 aa, Anoplius nigerrimus
METRRKNRCLGKMPPPGDRQGVSGADAGHDSMQAIGDSNPNRRDTVGEPENNTADNRRTNTDQYNTTNPAENVLQVQPATTKAGKQRQRMQWTDDMNRTVMRCYYTASKIETIASGYRPEMRRLFISEYPQLQYNVTEQRLMDQKRSIIKNNRLSPQEIQSIKEAVATELNRQIEQNTHTNTNNTNEDTEHTQQSVPQPIPRDNIQNEIYPTTVTNIPQQQTPQQIQDKQGITQTDKPHIETTEIQAKLDTNIIIWSGTDPTKRNRIPRLIYKKDTPKIINIINNTLTHYIDDNTTLQQIHTVIYAAAITTIQCNRQKIPDNKQNSKYKHIKPHWKIRLERKIETLRKEIGRLTQATKGNTSRNITKHTEIIINRFNNNHTISQILDTLKQKLSVYAARLKRYNESNHRKEENRLFTHNEKLFYQKLQSKPETDTKEPTKEQITQFWTKTWSTVSKHNNNATWIADEEENHSHIAEQHEYQITEDELTQTIRNTLNWKCPGVDQIHNYWYKQFTNTHPYLTQQINRTIENPHEFPKFLTEGTTYIKPKNQETEDPANYRPITCLPTLYKIITGTICRKIEKHLTQYNIIAEEQKGCKRNSLGCKEQLIIDSTIMKQATKQQRNLHTCYIDYKKAFDSIPHTWLQKILQIYKINRQIREFMYTIMETWRTKIHLKTVIDTTQTDEIKINRGIFQGDALSALWFNMCLNPLSNLLNQTKYGHNIRHQKQKQYTLNHLIYMDDIKLYAATKTQLEGLLKTTEKFTTDINMEFGIKKCKTTHIEKGHWTTDNSQRTLQNETLHNLDKYETYKYLGFEQNTRINHTDIKQHLQKLYKSRLIKILKTKLNAKNLTKAINTYAISILTYSFGIINWTTTDLENLDRITRTQMTKFRKLHPKSCKERITISRNEGGRGQIDIQSLHNRQIKKLRHYFHNNEHELHKAIVKADRNYTPLNLGTRIQTIDNYNDKENTQMKMDTWATKQLHGKHYYITRNENISKTDTYRWLQKGSIFPETEGFLMAIQDQVIATRNYSKHILKDSNIQDDRCRKCKQTPETIDHITGGCKLLASTEYTERHNMAAKIIHKEIANRYNLEQSKTPYYKYTPTTIIENETHKLYWDVTIHTDKTMKYNRPDITLTDKKEKITYLIDISIPNDTNLANKYNNKIEKYHPLAQEIQRIWNQKRVFIIPLIISATGVTPHSFKKQLQQLKLEQHIHEQVQKAVILKTCNITRKFLNLT

SEQ ID NO: 15954 - protein, 1215 aa, Anoplius nigerrimus
METRRKNRCLGKMPPPGDRQGVSGADAGHDSMQAIGDSNPNRRDTVGEPENNTADNRRTNTDQYNTTNPAENVLQVQPATTKAGKQRQRMQWTDDMNRTVMRCYYTASKIETIASGYRPEMRRLFISEYPQLQYNVTEQRLMDQKRSIIKNNRLSPQEIQSIKEAVATELNRQIEQNTHTNTNNTNEDTEHTQQSVPQPIPRDNIQNEIYPTTVTNIPQQQTPQQIQDKQGITQTDKPHIETTEIQAKLDTNIIIWSGTDPTKRNRIPRLIYKKDTPKIINIINNTLTHYIDDNTTLQQIHTVIYAAAITTIQCNRQKIPDNKQNSKYKYIKPHWKIRLERKIETLRKEIGRLTQATKGNTSRNITKHTEIIINRFNNNHTISQILDTLKQKLSAYAARLKRYNESNHRKEENRLFTHNEKLFYQKLQSKPETDTKEPTKEQITQFWTKTWSTVSKHNNSATWIADEEENHSHIAEQHEYQITEDELTQTIRNTLNWKCPGVDQIHNYWYKQFTNTHPYLTQQINRTIENPHEFPKFLTEGTTYIKPKNQETEDPANYRPITCLPTLYKIITGTICRKIEKHLTQYNIIAEEQKGCKRNSLGCKEQLIIDSTIMKQATKQQRNLHTCYIDYKKAFDSIPHTWLQKILQIYKINRQIREFMYTIMETWRTKIHLKTVIDTTQTDEIKINRGIFQGDALSALWFNMCLNPLSNLLNQTKYGHNIRHQKQKQYTLNHLIYMDDIKLYAATKTQLEGLLKTTEKFTTDINMEFGIKKCKTTHIEKGHWTTDNSQRTLQNETLHNLDKYETYKYLGFEQNTRINHTDIKQHLQKLYKSRLIKILKTKLNAKNLTKAINTYAISILTYSFGIINWTTTDLENLDRITRTQMTKFRKLHPKSCKERITISRNEGGRGQIDIQSLHNRQIKKLRHYFHNNEHELHKAIVKADRNYTPLNLGTRIQTIDNYNDKENTQMKMDTWATKQLHGKHYYITRNENISKTDTYRWLQKGSIFPETEGFLMAIQDQVIATRNYAKHILKDSNIQDDRCRKCKQTPETIDHITGGCKLLASTEYTERHNMAAKIIHKEIANRYNLEQSKTPYYKYTPTTIIENETHKLYWDVTIHTDKTMKYNRPDITLTDKKEKITYLIDISIPNDTNLANKYNNKIEKYHPLAQEIQRIWNQKKVFIIPLIISATGVTPHSFKKQLQQLKLEQHICARF

SEQ ID NO: 15955 - protein, 1234 aa, Anoplius nigerrimus
METRRKNRCLGKMPPPGDRQGVSGADAGHDSMQAIGDSNPNRRDTVGEPENNTADNRRTNTDQYNTTNPAENVLQVQPATTKAGKQRQRMQWTDDMNRTVMRCYYTASKIETIASGYRPEMRRLFISEYPQLQYNVTEQRLMDQKRSIIKNNRLSPQEIQSIKEAVATELNRQIEQNTHTNTNNTNEDTEHTQQSVPQPIPRDNIQNEIYPTTVTNIPQQQTPQQIQDKQGITQTDKPHIETTEIQAKLDTNIIIWSGTDPTKRNRIPRLIYKKDTPKIINIINNTLTHYIDDNTTLQQIHTVIYAAAITTIQCNRQKIPDNKQNSKYKYIKPHWKIRLERKIETLRKEIGRLTQATKGNTSRNITKHTEIIINRFNNNHTISQTLDTLKQKLSVYAARRKCYNESNHRKEENRLFTHNEKLFYQKLQSKPETDTKEPTKEQITQFWTKTWSTVSKHNNSATWIADEEENHSHIAEQHEYQITEDELTQTIRNTLNWKCPGVDQIHNYWYKQFTNTHPYLTQQINRTIENPHEFPKFLTEGTTYIKPKNQETEDPANYRPITCLPTLYKIITGTICRKIEKHLTQYNIIAEEQKGCKRNSLGCKEQLIIDSTIMKQATKQQRNLHTCYIDYKKAFDSIPHTWLQKILQIYKINRQIREFMYTIMETWRTKIHLKTVIDTTQTDEIKINRGIFQGDALSALWFNMCLNPLSNLLNQTKYGHNIRHQKQKQYTLNHLIYMDDIKLYAATKTQLEGLLKTTEKFTTDINMEFGIKKCKTTHIEKGHWTTDNSQRTLQNETLHNLDKYETYKYLGFEQNTRINHTDIKQHLQKLYKSRLIKILKTKLNAKNLTKAINTYAISILTYSFGIINWTTTDLENLDRITRTQMTKFRKLHPKSCKERITISRNEGGRGQIDIQSLHNRQIKKLRHYFHNNEHELHKAIVKADRNYTPLNLGTHIQTIDNYNDKENTQMKMDTWATKQLHGKHYYITRNENISKTDTYRWLQKGSLFPETEGFLMAIQDQVIATRNYSKHILKDSNIQDDRCRKCKQTPETIDHITGGCKLLASTEYTERHNMAAKIIHKEIANRYNLEQSKTPYYKYTPTTIIENETHKLYWDVTIHTDKTMKYNRPDITLTDKKEKITYLIDISIPNDTNLANKYNNKIEKYHPLAQEIQRIWNQKKVFIIPLIISATGVTPHSFKKQLQQLKLEQHIHEQVQKAVILKTCNITRKFLNLT

SEQ ID NO: 15956 - protein, 1037 aa, Rotaria sp.
MPNIPPLQCVECYKNSITFTAKDKKGLTTHLRLKHPNEYEDSKKVANIRIGWSNDEDKILANLEISLKAVQKGQILDRLTEEWNKIAAASHANLRSKDAIRGRRQQPEYKAILADLKSNLNNQGPDITDSLPIVIEPVSSMDTVTESDDVISVQNLMKEILTLHQNTLSKYMKDAINAFVNHNETEDPVKLTMLGIHQSINEYREKHTVNPQFKRTSFISRKKPARSKTRLEKAKKRAYYMNLYMHNKPRLLEELMDGVTPNTDPPPIHEAIKHYEKIWSTDVKDTQSVDQIPDVDINNKILLSPITKLDIEWAIKKTKKDTAIGIDLISLHEAKIMASEELYIAFNIWLGCKRIPSDLKLNRTTLIPKTNRDLHKITNWRPITISSILLRLFNKIIGHRLSRLFQIDKRQMGFREINGCSFNILWLHHLLKNARLNKRELYVCFIDVAKAFDSIPHESIYRALYRYRAPSAFIDLVRNQYTDSYTTLSYKNLNSKKIQISRGVKQGDSLSPILFNLVLDELLGILKDEFGYNIRDIGSSNIKCFADDICLISGSRIGMGEMLSKTIKFLEQRGLEVNANKCMSIGLQKAYKGKKSKITTEVAFNINGTPVPILGHVENYVKYLGIYFTSIGSININATKQKIQDILSKVCSISLKPHQKINLIRSHIIPLFIYQLINLEVYPKLLKQIDIIIRRTIRSILHLTRSLSIEFFYLPIREGGLQIPVLRDIVGLAKVRIYKNIMRSDDTFLKYLMETQGFHLIYKYMNDLKLDSSYESDDLKQKKVELMKDRRVSYSNKVHGYGFEIFSTCPITNRWLDGETRTMTGRTYINSIKLRTNSLATKVTLNRGLDVDKTCRKCKLQPESIMHVLQFCKNMKGLIYERHNRICSRVVNKLKERGYMVLVEKAYTVSTNDFRILRPDIIAIKEDHGYILDVQCVYESSGASFIFAENHKKEKYTPLIEIIKNEFNCPNVKILILTVGSRGSFYHKHLYCWYELGFTTSELRFVAISCMENSLRIMSTFHRSLTFDNSRDNSSDL

SEQ ID NO: 15957 - protein, 900 aa, Poecilobdella manillensis
MVLWEEVKGRINTLRQVERARQKRYERRRARQEFFRDPYRYGRSLLEPPKSGTLVASKTELEAHLTKTYTDALRSTPLPQRTEILEAPFPDHPFQEAAPSIEEVKGVVKKARNRSAPGPNGIPYLLYKRCPRTLKLLHTIIVSTWANAAVDNEWKVAEGVYIPKEKESKHINQFRPISLLNVEGKIYFSCLAARLTTFMTTNKYIDTAVQKGGIPGVPGCIEHTAMIWEAIQNAKRNQLSLHVVWLDLANAYGSVPHQLLWKTLEIHHVPGTVIEVLKEYFNGFVMRFSTKDCTTCWIPLQIGIAMGCAISPSLFVLAIQVVLNAVGAEIPEMRLGKGVFMPSVKVFMDDTTIVLNRQQIVQRALDKLNDLLQWCRMALKPAKSRSLSLTRGRVRSDVCFTAGGQRIPTVSEEPVKSLGRVFDVSLRDKKRQEAATVSRMTDGLRAIAESPLQGRFKVWLLQFVLLPRLLWPLTIYEIGLQSVEEMERKINRCTRKWFGLPPSLSSIALYSRSTRLRLPLRSIVEEYKISKIRTQWSLNNSSDSRVRDVMPQLRSGRKFRAQEEIEESEAILAFEEKRGPVQVDRHGVGWNHFPRWSTANVQTKAAMIIQERRREMETERIALAVQQSQQGQWTTWEDVIQRSITWKDIWKKSPLRLAFLIRSVYDVLPSGSNLQKWGMVQDASCELCGGEQSLRHVLSSCTYALAHGRYTWRHNQVLQVVVEAAKTACSQANAREIAAPRRMYFLREGSTQHRKRNMAQMRDLLSTAKDWTVAADLQGERHYHQVLQESGKRPDLVLASAATDSVIIVELTVPWEDRIDVSNALKSDRYEELRMDLEGKGYSARVLPIEVGARGLVGKSTYAFLRKIGLSNRQTKQFVQKIAESAESASHWIWTTKDRR

SEQ ID NO: 15958 - protein, 1279 aa, Poecilobdella manillensis
MAVRVLFVRSRCLVTRKKVSGRDIRLINGCGPAPESVRIQGRNTRRGGHSSEDPCQNARSRVSINTPRRWPFDSREKTEGQPGKTGDDRERPVASRKDEVAHGPASQVRQITSATSTTTEICPQGSYRKERENDEPITGPTDFDRPVTTITDFRTALDNGAPGSRCICGKSFASRKGMKIHQTKMGCIERQRPVAQEPTHKTPNDTGQEAHHSPELVRVSLPASDPVRQRIKFPSSKDMKVWQELDGNLATGLKRVMKREGTMKSFSDFIYASCLEKFGSVEVKRPTKPKESRRQIELRNLKREKRVLRSRWKSSGEAEKAGLMVLWEEVKGRINTLRQAERARQKRYERRRARQEFFRDPYRYGRSLLEPPKSGTLAASRTELEAHLTKTYTDALRSTPLPQRTEILEAPFPDHPFQEAAPSIEEVKGVVKKARNRSAPGPNGIPYLLYKRCPRTLKLLHTIIVSTWANAAVDNEWKVAEGVYIPKEKESKHINQFRPISLLNVEGKIYFTCLAARLTTFMTTNKYIDTAVQKGGIPGVPGCIEHTAMIWEAIQNAKRNQLSLHVVWLDLANAYGSVPHQLLWKTLEIHHVPGTVIEVLKEYFNGFVMRFSTKDCTTCWIPLQIGIAMGCAISPSLFVLAIQVVLNAVGAEIPEMRLGRGMFMPSVKVFMDDTTIVLNRQQIVQRALDKLNDLLQWCRMALKPAKSRSLSLTRGRVRSDVCFTARGQRIPTVSEEPVKSLGRVFDDSLRDKNQEAATVSRMTDGLKAIAESPLQGRFKVWLLQFVLLPRLLWPLTIYEIGLQSVEAMERKINRCTRKWFGLPPSLSSVALYSRSTRLRLPLRSIVEEYKISKTRTQWSLNNSSDSRVRDVMPQLRSGRKFRAQEEIEESEAILAFEEKRGPVQVDRHGVGWNHFPRWSTANVQTKAAMIIQERRREMETERIALAVQQSQQGQWSTWEDVIQRSITWKDIWKKSPLRLAFLIRSVYDVLPSGSNLQKWGMVQDASCELCGGEQSLRHVLSSCTYALAHGRYTWRHNQVLQVVVEAAKTACSQANAREIAAPRRMYFLREGSTQHRKRNMAQRRDLLSTAKDWTVAADLQGERHYHQVLQESGKRPDLVLASAATDSVIMVELTVPWEDRIDVSNALESDRYEELRMDLEGKGYSARVLPIEVGARGLVGKSTYAFLRKPFKQANQTVRPENSRVRRIGFSLDLDNEGPKVSLRHGEASRPCPLHQNRDSSVRPGKRQPGRHSHQSDIRSAAVATLTVFRTAEPSRNFS

SEQ ID NO: 15959 - protein, 1038 aa, Poecilobdella manillensis
MGCIERQRPVAQEPTHKTPNDTGQEAHHSPELVRVSLPASDPVRQRIKFPPSKDMKVWQELDGNLATGLKRVMKREGTMKSFSDFIYASCLEKFGSVEVKRPTKPKESRRQIELRNLKREKRVLRSRWKSSGEAEKAGLMVLWEEVKGRINTLRQVERARQKRYERRRARQEFFRDPYRYGRSLLEPPKSGTLVASKTELEAHLTKTYTDALRSTPLPQRTEILEAPFPDHPFQEAAPSIEEVKGVVKKARNRSAPGPNGIPYLLYKRCPRTLKLLHTIIVSTWANAAVDNEWKVAEGVYIPKEKESKHINQFRPISLLNVEGKIYFSCLAARLTTFMTTNKYIDTAVQKGGIPGVPGCIEHTAMIWEAIQNAKRNQLSLHVVWLDLANAYGSVPHQLLWKTLEIHHVPGTVIEVLKEYFNGFVMRFSTKDCTTCWIPLQIGIAMGCAISPSLFVLAIQVVLNAVGAEIPEMRLGKGVFMPSVKVFMDDTTIVLNRQQIVQRALDKLSDLLQWCRMALKPAKSRSLSLTRGRVRSDVCFTAGGQRIPTVSEEPVKSLGRVFDVSLRDKNQEAATVSRMTDGLRAIAESPLQGRFKVWLLQFVLLPRLLWPLTIYEIGLQSVEEMERKINRCTRKWFGLPPSLSSIALYSRSTRLRLPLRSIVEEYKISKIRTQWSLNNSSDSRVRDVMPQLRSGRKFRAQEEIEESEAVLAFEEKRGPVQVDRHGVGWNHFPRWSTANVQTKAAMIIQERRREMETERIALAVQQSQQGQWTTWEDVIQRSITWKDIWKKSPLRLAFLIRSVYDVLPSGSNLQKWGMVQDASCELCGGEQSLRHVLSSCTYALAHGRYTWRHNQVLQVVVEAAKTACSQANAREIAAPRRMYFLREGSTQHRKRNMAQMRDLLSTAKDWTVAADLQGERHYHQVLQESGKRPDLVLASAATDSVIIVELTVPWEDRIDVSNALKSDRYEELRMDLEGKGYSARVLPIEVGARGLVGKSTYAFLRKIGLSNRQTKQFVQKIAESAESASHWIWTTKDRR

SEQ ID NO: 15960 - protein, 1045 aa, Poecilobdella manillensis
MKIHQTKMGCIERQRPVAQEPTHKTPNDTGQEAHHSPELVRVSLPASDPVRQRIKFPPSKDMKVWQELDGNLATGLKRVMKREGTMKSFSDFIYASCLEKFGSVEVKRPTKPKESRRQIELRNLKREKRVLRSRWKSSGEAEKAGLMVLWEEVKGRINTLRQVERARQKRYERRRARQEFFRDPYRYGRSLLEPPKSGTLVASKTELEAHLTKTYTDALRSTPLPQRTEILEAPFPDHPFQEAAPSIEEVKGVVKKARNRSAPGPNGIPYLLYKRCPRTPKLLHTIIVSTWANAAVDNEWKVAEGVYIPKEKESKHINQFRPISLLNVEGKIYFSCLAARLTTFMTTNKYIDTAVQKGGIPGVPGCIEHTAMIWEAIQNAKRNQLSLHVVWLDLANAYGSVPHQLLWKTLEIHHVPGTVIEVLKEYFNGFVMRFSTKDCTTCWIPLQIGIAMGCAISPSLFVLAIQVVLNAVGAEIPEMRLGKGVFMPSVKVFMDDTTIVLNRQQIVQRALDKLSDLLQWCRMALKPAKSRSLSLTRGRVRSDVCFTAGGQRIPTVSEEPVKSLGRVFDVSLRDKNQEAATVSRMTDGLRAIAESPLQGRFKVWLLQFVLLPRLLWPLTIYEIGLQSVEEMERKINRCTRKWFGLPPSLSSIALYSRSTRLRLPLRSIVEEYKISKIRTQWSLNNSSDSRVRDVMPQLRSGRKFRAQEEIEESEAVLAFEEKRGPVQVDRHGVGWNHFPRWSTANVQTKAAMIIQERRREMETERIALAVQQSQQGQWTTWEDVIQRSITWKDIWKKSPLRLAFLIRSVYDVLPSGSNLQKWGMVQDASCELCGGEQSLRHVLSSCTYALAHGRYTWRHNQVLQVVVEAAKTACSQANAREIAAPRRMYFLREGSTQHRKRNMAQMRDLLSTAKDWTVAADLQGERHYHQVLQDSGKRPDLVLASAATDSVIIVELTVPWEDRIDVSNALKSDRYEELRMDLEGKGYSARVLPIEVGARGLVGKSTYAFLRKIGLSNRQTKQFVQKIAESAESASHWIWTTKDRR

SEQ ID NO: 15961 - protein, 1123 aa, Poecilobdella manillensis
MAHGPASQVRQITSATSTTTEICPQGSYRKERENDEPITGPTDFDRPVITITDFRTALDNGAPGSRCICGKSFASRKGMKIHQTKMGCIERQRPVAQEPTHKTPNDTGQEAHHSPELVRVSLPASDPVRQRIKFPPSKDMKVWQELDGNLATGLKRVMKREGTMKSFSDFIYASCLEKFGSVEVKRPTKPKESRRQIELRNLKREKRVLRSRWKSSGEAEKAGLMVLWEEVKGRINTLRQVERARQKRYERRRARQEFFRDPYRYGRSLLEPPKSGTLVASKTELEAHLTKTYTDALRSTPLPQRTEILEAPFPDHPFQEAAPSIEEVKGVVKKARNRSAPGPNGIPYLLYKRCPRTLKLLHTIIVSTWANAAVDNEWKVAEGVYIPKEKESKHINQFRPISLLNVEGKIYFSCLAARLTTFMTTNKYIDTAVQKGGIPGVPGCIEHTAMIWEAIQNAKRNQLSLHVVWLDLANAYGSVPHQLLWKTLEIHHVPGTVIEVLKEYFNGFVMRFSTKDCTTCWIPLQIGIAMGCAISPSLFVLAIQVVLNAVGAEIPEMRLGKGVFMPSVKVFMDDTTIVLNRQQIVQRALDKLSDLLQWCRMALKPAKSRSLSLTRGRVRSDVCFTAGGQRIPTVSEEPVKSLGRVFDVSLRDKNQEAATVSRMTDGLRAIAESPLQGRFKVWLLQFVLLPRLLWPLTIYEIGLQSVEEMERKINRCTRKWFGLPPSLSSIALYSRSTRLRLPLRSIVEEYKISKIRTQWSLNNSSDSRVRDVMPQLRSGRKFRAQEEIEESEAVLAFEEKRGPVQVDRHGVGWNHFPRWSTANVQTKAAMIIQERRREMETERIALAVQQSQQGQWTTWEDVIQRSITWKDIWKKSPLRLAFLIRSVYDVLPSGSNLQKWGMVQDASCELCGGEQSLRHVLSSCTYALAHGRYTWRHNQVLQVVVEAAKTACSQANAREIAAPRRMYFLREGSTQHRKRNMAQMRDLLSTAKDWTVAADLQGERHYHQVLQESGKRPDLVLASAATNSVIIVELTVPWEDRIDVSNALKSDRYEELRMDLEGKGYSARVLPIEVGARGLVGKSTYAFLRKIGLSNRQTKQFVQKIAESAESASHWIWTTKDRR

SEQ ID NO: 15962 - protein, 1045 aa, Poecilobdella manillensis
MKIHQTKMGCIERQRPVAQEPTHKTPNDTGQEAHHSPELVRVSLPASDPVRQRIKFPPSKDMQVWQELDGNLATGLKRVMKREGTMKSFSDFIYASCLEKFGSVEVKRPTKPKESRRQIELRNLKREKRVLRSRWKSSGEAEKAGLMVLWEEVKGRINTLRQVERARQKRYERRRARQEFFRDPYRYGRSLLEPPKSGTLVASKTELEAHLTKTYTDALRSTPLPQRTEILEAPFPDHPFQEAAPSIEEVKGVVKKARNRSAPGPNGIPYLLYKRCPRTLKLLHTIIVSTWANAAVDNEWKVAEGVYIPKEKESKHINQFRPISLLNVEGKIYFSCLAARLTTFMTTNKYIDTAVQKGGIPGVPGCIEHTAMIWEAIQNAKRNQLSLHVVWLDLANAYGSVPHQLLWKTLEIHHVPGTVIEVLKEYFNGFVMRFSTKDCTTCWIPLQIGIAMGCAISPSLFVLAIQVVLNAVGAEIPEMRLGKGVFMPSVKVFMDDTTIVLNRQQIVQRALDKLNDLLQWCRMALKPAKSRSLSLTRGRVRSDVCFTAGGQRIPTVSEEPVKSLGRVFDVSLRDKNQEAATVSRMTDGLRAIAESPLQGRFKVWLLQFVLLPRLLWPLTIYEIGLQSVEEMERKINRCTRKWFGLPPSLSSIALYSRSTRLRLPLRSIVEEYKISKIRTQWSLNNSSDSRVRDVMPQLRSGRKFRAQEEIEESEAILAFEEKRGPVQVDRHGVGWNHFPRWSTANVQTKAAMIIQERRREMETERIALAVQQSQQGQWTTWEDVIQRSITWKDIWKKSPLRLAFLIRSVYDVLPSGSNLQKWGMVQDASCELCGGEQSLRHVLSSCTYALAHGRYTWRHNQVLQVVVEAAKTACSQANAREIAAPRRMYFLREGSTQHRKRNMAQMRDLLSTAKDWTVAADLQGERHYHQVLQESGKRPDLVLASAATDSVIIVELTVPWEDRIDVSNALKSDRYEELRMDLEGKGYSARVLPIEVGARGLVGKSTYAFLRKIGLSNRQTKQFVQKIAESAESASHWIWTTKDRR

SEQ ID NO: 15963 - protein, 984 aa, Poecilobdella manillensis
MKVWQELDGNLATGLKRVMKREGTMKSFSDFIYASCLEKFGSVEVKRPTKPKESRRQIELRNLKREKRVLRSRWKSSGEAEKAGLMVLWEEVKGRINTLRQVERARQKRYERRRARQEFFRDPYRYGRSLLEPPKSGTLVASKTELEAHLTKTYTDALRSTPLPQRTEILEAPFPDHPFQEAAPSIEEVKGVVKKARNRSAPGPNGIPYLLYKRCPRTLKLLHTIIVSTWANAAVDNEWKVAEGVYIPKEKESKHINQFRPISLLNVEGKIYFSCLAARLTTFMTTNKYIDTAVQKGGIPGVPGCIEHTAMIWEAIQNAKRNQLSLHVVWLDLANAYGSVPHQLLWKTLEIHHVPGTVIEVLKEYFNGFVMRFSTKDCTTCWIPLQIGIAMGCAISPSLFVLAIQVVLNAVGAEIPEMRLGKGVFMPSVKVFMDDTTIVLNRQQIVQRALDKLNDLLQWCRMALKPAKSRSLSLTRGRVRSDVCFTAGGQRIPTVSEEPVKSLGRVFDVSLRDKNQEAATVSRMTDGLRAIAESPLQGRFKVWLLQFVLLPRLLWPLTIYEIGLQSVEEMERKINRCTRKWFGLPPSLSSIALYSRSTRLRLPLRSIVEEYKISKIRTQWSLNNSSDSRVRDVMPQLRSGRKFRAQEEIEESEAILAFEEKRGPVQVDRHGVGWNHFPRWSTANVQTKAAMIIQERRREMETERIALAVQQSQQGQWTTWEDVIQRSITWKDIWKKSPLRLAFLIRSVYDVLPSGSNLQKWGMVQDASCELCGGEQSLRHVLSSCTYALAHGRYTWRHNQVLQVVVEAAKTACSQANAREIAAPRRMYFLREGSTQHRKRNMAQMRDLLSTAKDWTVAADLQGERHYHQVLQESGKRPDLVLASAATDSVIIVELTVPWEDRIDVSNALKSDRYEELRMDLEGKGYSARVLPIEVGARGLVGKSTYAFLRKIGLSNRQTKQFVQKIAESAESASHWIWTTKDRR

SEQ ID NO: 15964 - protein, 1223 aa, Poecilobdella manillensis
MAVRVLFVCRKSLSGYRKKVSDRDIRLINGCGPAPESVRIQGRNTRRRGHSSEDPCQNARSRVSINTPRRWPFDAREKTEGQPGKTGDDRERPVASRKDEVAHGPASQVRQITSATSTTTEICPQGSYRKERENDEPITGPTDFDRPVITITDFRTALDNGAPGSRCICGKSFASRKGMKIHQTKMGCIERQRPVAQEPTHKTPNDTGQEAHHSPELVRVSLPASDPVRQRIKFPPSKDMKVWQELDGNLATGLKRVMKREGTMKSFSDFIYASCLEKFGSVEVKRPTKPKESRRQIELRNLKREKRVLRSRWKSSGEAEKAGLMVLWEEVKGRINTLRQVERARQKRYERRRARQEFFRDPYRYGRSLLEPPKSGTLVASKTELEAHLTKTYTDALRSTPLPQRTEILEAPFPDHPFQEAAPSIEEVKGVVKKARNRSAPGPNGIPYLLYKRCPRTLKLLHTIIVSTWANAAVDNEWKVAEGVYIPKEKESKHINQFRPISLLNVEGKIYFSCLAARLTTFMTTNKYIDTAVQKGGIPGVPGCIEHTAMIWEAIQNAKRNQLSLHVVWLDLANAYGSVPHQLLWKTLEIHHVPGTVIEVLKEYFNGFVMRFSTKDCTTCWIPLQIGIAMGCAISPSLFVLAIQVVLNAVGAEIPEMRLGKGLFMPSVKVFMDDTTIVLNRQQIVQRALDKLNDLLQWCRMALKPAKSRSLSLTRGRVRSDVCFTAGGQRIPTVSEEPVKSLGRVFDVSLRDKNQEAATVSRMTDGLRAIAESPLQGRFKVWLLQFVLLPRLLWPLTIYEIGLQSVEEMERKINRCTRKWFGLPPSLSSIALYSRSTRLRLPLRSIVEEYKISKIRTQWSLNNSSDSRVRDVMPQLRSGRKFRAQEEIEESEAILAFEEKRGPVQVDRHGVGWNHFPRWSTANVQTKAAMIIQERRREMETERIALAVQQSQQGQWTTWEDVIQRSITWKDIWKKSPLRLAFLIRSVYDALPSGSNLQKWGMVQDASCELCGGEQSLRHVLSSCTYALAHGRYTWRHNQVLQVVVEAAKTACSQANAREIAAPRRMYFLREGSTQHRKRNMAQMRDLLSTAKDWTVAADLQGERHYHQVLQESGKRPDLVLASAATDSVIIVELTVPWEDRIDVSNALKSDRYEELRMDLEGKGYSARVLPIEVGARGLVGKSTYAFLRKIGLSNRQTKQFVQKIAESAESASHWIWTTKDRR

SEQ ID NO: 15965 - protein, 1041 aa, Poecilobdella manillensis
MKIHQTKMGCIERQRPVAQEPTHKTPNDTGQEAHHSPELVRVSLPAPDPVRQRIKFPPSKDMKVWQELDGNLATGLKRVMKREGTMKSFSDFIYASCLEKFGSVEVKRPTKPKESRRQIELRNLKREKRVLRSRWKSSGEAEKAGLMVLWEEVKGRINTLRQAERARQKRYERRRARQEFFSDPYRYGRSLLEPPKSGTLAASRAELEAHLTKTYTDALRSTPLPQRTEVLEAPFPDHPFQEAAPSIEEVKGVVKKARNRSAPGPNGIPYLLYKRCPRTLKLLHTIIVSTWVNAAVDNEWKVAEGVYIPKEKESKHINQFRPISLLNVEGKIYFSCLAARLTTFMITNKYIDTAVQKGGIPGVPGCIEHTAMIWEAIQNAKRNQLSLHVVWLDLANAYGSVPHQLLWKTLEIHHVPGTVIEVLKEYFNGFVMRFSTKDCTTCWIPLQIGIAMGCAISPSLFVLAIQVVLNAVGAEIPEMRLGKGVFMPSVKAFMDDTTIVLNRQQIVQRALDKLNDLLQWCRMALKPAKSRSLSLTRGRVRSDVCFTAGGQRIPTVSEEPVKSLGRVFDVSLRDKNQEAATVSRMTDGLRAIAESPLQGRFKVWLMQFVLLPRLLWPLTIYEIGLQSVEEMERKINRCTRKWFGLPPSLSSIALYSRSTRLRLPLRSIVEEYKISKIRTQWSLNNSSDSRVRDVMPQLRSGRKFRAQEEIEESEAILAFEEKRGPVQVDRHGVGWNHFPRWSTANVQTKAAMIIQERRREMETERIALAVQQSQQGQWTTWEDVIQRSITWKDIWKKSPLRLAFLIRSVYDVLPSGSNLQKWGMVQDASCELCGGEQSLRHVLSSCTYALAHGRYTWRHNQVLQVVVEAAKTACSQANAREIAAPRRMYFLREGSTQHRKRNMAQMRDLLSTAKDWTVAADLQGERHYHQVIQESGKRPDLVLASAATDSVIIVELTVPWEDRIDVSNALKSDRYEELRMDLEGKGYSARGLPIEVGARGLVGAFLRKIGLSNRQTKQFVQKIAESAESASHWIWTTKDRR

SEQ ID NO: 15966 - protein, 1223 aa, Poecilobdella manillensis
MAVRVLFVCRKSLSGYRKKVSGRDIRLINGCGPAPESVRIQGRNTCRRGHSSEDPCQNARSRVSINTPRRWPFDAREKTEGQPGKTGDDRERPVASRKDEVAHGPASQVRQITSATSTTTEICPQGSYRKERENDEPITGPTDFDRPVTTITDFRTALDNGAPGSRCICGKSFASRKGMKIHQTKMGCIERQRPVAQEPTHKTPNDTGQEAHHSPELVRVSLPAPDPVRQRIKFPPSKDMKVWQELDGNLATGLKRVMKREGTMKSFSDFIYASCLEKFGSVEVKRPTKPKESRRQIELRNLKREKRVLRSRWKSSGEAEKAGLMVLWEEVKGRINTLRQAERARQKRYERRRARQEFFRDPYRYGRSLLEPPKSGTLVASRTELEAHLTKTYTDALRSTPLPQRTEVLEAPFPDHPFQEAAPSIEEVKGVVKKARNRSAPGPNGIPYLLYKRCPRTLKLLHTIIVSTWANAAVDNEWKVAEGVYIPKEKESKHINQFRPISLLNVEGKIYFSCLAARLTTFMTTNKYIDTAVQKGGIPGVPGCIEHTAMIWEAIQNAKRNQLSLHVVWLDLANAYGSVPHQLLWKTLEIHHVPGTVIEVLKEYFNGFVMRFSTKDCTTCWIPLQIGIAMGCAISPSLFVLAIQVVLNAVGAEIPEMRLGKGVFMPSVKVFMDDTTIVLNRQQIVQRALDKLNDLLQWCRMALKPAKSRSLSLTRGRVRSDVCFTAGGQRIPTVSEEPVKSLGRVFDVSLRDKNQEAATVSRMTDGLRAIAESPLQGRFKVWLLQFVLLPRLLWPLTIYEIGLQSVEEIERKINRCTRKWFGLPPSLSSIALYSRSTRLRLPLRSIVEEYKISKIRTQWSLNNSSDSRVRDVMPQLRSGRKFRAQEEIEESEAILAFEEKRGPVQVDRHGVGWNHFPRWSTANVQTKAAMIIQERRREMETERIALAVQQSQQGQWTTWEDVIQRSITWKDIWKKSPLRLAFLIRSVYDVLPSGSNLQKWGMVQDASCELCGGEQSLRHVLSSCTYALAHGRYTWRHNQVLQVVVEAAKTACSQANAREIAAPRRMYFLREGSTQHRKRNIAQMRDLLSTAKDWTVAADLQGERHYHQVLQESGKRPDLVLASAATDSVIIVELTVPWEDRIDVSNALKSDRYEELRMDLEGKGYSARVLPIEVGARGLVGKSTYAFLRKIGLSNRQTKQFVQKIAESAESASHWIWTTKDRR

SEQ ID NO: 15967 - protein, 1026 aa, Poecilobdella manillensis
MSNFVATFNRRQEAHHSPELVRVSLPASDPVRQRIKFPPSKDMKVWQELDGNLATGLKRVMKREGTMKSFSDFIYASCLEKFGSVEVKRPTKPKESRRQIELRNLKREKRVLRSRWKSSGEAEKAGLMVLWEEVKGRINTLRQVERARQKRYERRRARQEFFRDPYRYGRSLLEPPKSGTLVASKTELEAHLTKTYTDALRSTPLPQRTEILEAPFPDHPFQEAAPSIEEVKGVVKKARNRSAPGPNGIPYLLYKRCPRTLKLLHTIIVSTWANAAVDNEWKVAEGVYIPKEKESKHINQFRPISLLNVEGKIYFSCLAARLTTFMTTNKYIDTAVQKGGIPGVPGCIEHTAMIWEAIQNAKRNQLSLHVVWLDLANAYGSVPHQLLWKTLEIHHVPGTVIEVLKEYFNGFVMRFSTKDCTTCWIPLQIGIAMGCAISPSLFVLAIQVVLNAVGAEIPEMRLGKGVFMPSVKVFMDDTTIVLNRQQIVQRALDKLNDLLQWCRMALKPAKSRSLSLTRGRVRSDVCFTAGGQRIPTVSEEPVKSLGRVFDVSLRDKNQEAATVSRMTDGLRAIAESPLQGRFKVWLLQFVLLPRLLWPLTIYEIGLQSVEEMERKINRCTRKWFGLPPSLSSIARYSRSTRLRLPLRSIVEEYKISKIRTQWSLNNSSDSRVRDVMPQLRSGRKFRAQEEIEESEAILAFEEKRGPVQVDRHGVGWNHFPRWSTANVQTKAAMIIQERRREMETERIALAVQQSQQGQWTTWEDVIQRSITWKDIWKKSPLRLAFLIRSVYDVLPSGSNLQKWGMVQDASCELCGGEQSLRHVLSSCTYALAHGRYTWRHNQVLQVVVEAAKTACSQANAREIAAPRRMYFLREGSTQHRKRNMAQMRDLLSTAKDWTVAADLQGERHYHQVLQESGKRPDLVLASAATDSVIIVELTVPWEDRIDVSNALKSDRYEELRMDLEGKGYSARVLPIEVGARGLVGKSTYAFLRKIGLSNRQTKQFVQKIAESAESASHWIWTTKDRR

SEQ ID NO: 15968 - protein, 1156 aa, Poecilobdella manillensis
MLCKSYTLIKNTYIYIGKTGDDRERPVASRKDEVAHGPASQVRQITSATSTTTEICPQGSYRKERENDEPITGPTDFDRPVITITDFRTALDNGAPGSRCICGKSFASRKGMKIHQTKMGCIERQRPVAQEPTHKTPNDTGQEAHHSPELVRVSLPASDPVRQRIKFPPSKDMKVWQELDGNLATGLKRVMKREGTMKSFSDFIYASCLEKFGSVEVKRPTKPKESRRQIELRNLKREKRVLRSRWKSSGEAEKAGLMVLWEEVKGRINTLRQVERARQKRYERRRARQEFFRDPYRYGRSLLEPPKSGTLVASKTELEAHLTKTYTDALRSTPLPQRTEILEAPFPDHPFQEAAPSIEEVKGVVKKARNRSAPGPNGIPYLLYKRCPRTLKLLHTIIVSTWANAAVDNEWKVAEGVYIPKEKESKHINQFRPISLLNVEGKIYFSCLAARLTTFMTTNKYIDTAVQKGGIPGVPGCIEHTAMIWEAIQNAKRNQLSLHVVWLDLANAYGSVPHQLLWKTLEIHHVPGTVIEVLKEYFNGFVMRFSTKDCTTCWIPLQIGIAMGCAISPSLFVLAIQVVLNAVGAEIPEMRLGKGVFMPSVKVFMDDTTIVLNRQQIVQRALDKLNDLLQWCRMALKPAKSRSLSLTRGRVRSDVCFTAGGQRIPTVSEEPVKSLGRVFDVSLRDKNQEAATVSRMTDGLRAIAESPLQGRFKVWLLQFVLLPRLLWPLTIYEIGLQSVEEMERKINRCTRKWFGLPPSLSSIALYSRSTRLRLPLRSIVEEYKISKIRTQWSLNNSSDSRVRDVMPQLRSGRKFRAQEEIEESEAILAFEEKRGPVQVDRHGVGWNHFPRWSTANVQTKAAMIIQERRREMETERIALAVQQSQQGQWTTWEDVIQRSITWKDIWKKSPLRLAFLIRSVYDVLPSGSNLQKWGMVQDASCDLCGGEQSLRHVLSSCTYALAHGRYTWRHNQVLQVVVEAAKTACSQANAREIAAPRRMYFLREGSTQHRKRNMAQMRDLLSTAKDWTVAADLQGERHYHQVLQESGKRPDLVLASAATDSVIIVELTVPWEDRIDVSNALKSDRYEELRMDLEGKGYSARVLPIEVGARGLVGKSTYAFLRKIGLSNRQTKQFVQKIAESAESASHWIWTTKDRR

SEQ ID NO: 15969 - protein, 899 aa, Poecilobdella manillensis
MVLWEEVKGRINTLRQVERARQKRYERRRARQEFFRDPYRYGRSLLEPPKSGTLVASKTELEAHLTKTYTDALRSTPLPQRTEILEAPFPDHPFQEAAPSIEEVKGVVKKARNRSAPGPNGIPYLLYKRCPRTLKLLHTIIVSTWANAAVDNEWKVAEGVYIPKEKESKHINQFRPISLLNVEGKIYFSCLAARLTSFMTTNKYIDTAVQKGGIPGVPGCIEHTAMIWEAIQNAKRNQLSLHVVWLDLANAYGSVPHQLLWKTLEIHHVPGTVIEVLKEYFNGFVMRFSTKDCTTCWIPLQIGIAMGCAISPSLFVLAIQVVLNAVGAEIPEMRLGKGVFMPSVKVFMDDTTIVLNRQQIVQRALDKLNDLLQWCRMALKPAKSRSLSLTRGRVRSDVCFTAGGQRIPTVSEEPVKSLGRVFDVSLRDKNQEAATVSRMTDGLRAIAESPLQGRFKVWLLQFVLLPRLLWPLTIYEIGLQSVEEMERKINRCTRKWFGLPPSLSSIALYSRSTRLRLPLRSIVEEYKISKIRTQWSLNNSSDSRVRDVMPQLRSGRKFRAQEEIEESEAVLAFEEKRGPVQVDRHGVGWNHFPRWSTANVQTKAAMIIQERRREMETERIALAVQQSQQGQWTTWEDVIQRSITWKDIWKKSPLRLAFLIRSVYDVLPSGSNLQKWGMVQDASCELCGGEQSLRHVLSSCTYALAHGRYTWRHNQVLQVVVEAAKTACSQANAREIAAPRRMYFLREGSTQHRKRNMAQMRDLLSTAKDWTVAADLQGERHYHQVLQESGKRPDLVLASAATDSVIIVELTVPWEDRIDVSNALKSDRYEELRMDLEGKGYSARVLPIEVGARGLVGKSTYAFLRKIGLSNRQTKQFVQKIAESAESASHWIWTTKDRR

SEQ ID NO: 15970 - protein, 1045 aa, Poecilobdella manillensis
MKIHQTKMGCIERQRPVAQEPTHKTPNDTGQEAHHSPELVRVSLPASDPVRQRIKFPPSKDMKEWQELDGNLATGLKRVMKREGTMKSFSDFIYASCLEKFGSVEVKRPTKPKESRRQIELRNLKREKRVLRSRWKSSGEAEKAGLMVLWEEVKGRINTLRQVERARQKRYERRRARQEFFTDPYRYGRSLLEPPKSGTLVASKTELEAHLTKTYTDALRSTPLPQRTEILEAPFPDHPFQEAAPSIEEVKGVVKKARNRSAPGPNGIPYLLYKRCPRTLKLLHTIIVSTWANAAVDNEWKVAEGVYIPKEKESKHINQFRPISLLNVEGKIYFSCLAARLTTFMTTNKYIDTAVQKGGIPGVPGCIEHTAMIWEAIQNAKRNQLSLHVVWLDLANAYGSVPHQLLWKTLEIHHVPGTVIEVLKEYFNGFVMRFSTKDCTTCWSPLQIGIAMGCAISPSLFVLAIQVVLNAVGAEIPEMRLGKGVFMPSVKVFMDDTTIVLNRQQIVQRALDKLNDLLQWCRMALKPAKSRSLSLTRGRVRSDVCFTAGGQRIPTVSEEPVKSLGRVFDVSLRDKNQEAATVSRMTDGLRAIAESPLQGRFKVWLLQFVLLPRLLWPLTIYEIGLQSVEEMERKINRCTRKWFGLPPSLSSIALYSRSTRLRLPLRSIVEEYKISKIRTQWSLNNSSDSRVRDVMPQLRSGRKFRAQEEIEESEAILAFEEKRGPVQVDRHGVGWNHFPRWSTANVQTKAAMIIQERRREMETERIALAVQQSQQGQWTTWEDVIQRSITWKDIWKKSPLRLAFLIRSVYDVLPSGSNLQKWGMVQDASCELCGGEQSLRHVLSSCTYALAHGRYTWRHNQVLQVVVEAAKTACSQANAREIAAPRRMYFLREGSTQHRKRNMAQMRDLLSTAKDWTVAADLQGERHYHQVLQESGKRPDLVLASAATDSVIIVELTVPWEDRIDVSNALKSDRYEELRMDLEGKGYSARVLPIEVGARGLVGKSTYAFLRKIGLSNRQTKQFVQKIAESAESASHWIWTTKDRR

SEQ ID NO: 15971 - protein, 1223 aa, Poecilobdella manillensis
MAVRVLFVCRKSLSGYRKKVSGRDIRLINGCGPAPESVRIQGRNTRRRGHSSEDPCQNARSRVSINTPRRWPFDAREKTEGQPGKTGDDRERPVASRKDEVAHGPASQVRQITSATSTTTEICPQGSYRKERENDEPITGPTDFDRPVITITDFRTALDNGAPGSRCICGKSFASRKGMKIHQTKMGCIERQRPVAQEPTHKTPNDTGQEAHHSPELVRVSLPASDPVRQRIKFPPSKDMKVWQELDGNLATGLKRVMKREGTMKSFSDFIYASCLEKFGSVEVKRPTKPKESRRQIELRNLKREKRVLRSRWKSSGEAEKAGLMVLWEEVKGRINTLRQVERARQKRYERRRARQEFFRDPYRYGRSLLEPPKSGTLVASKTELEAHLTKTYTDALRSTPLPQRTEILEAPFPDHPFQEAAPSIEEVKGVVKKARNRSAPGPNGIPYLLYKRCPRTLKLLHTIIVSTWANAAVDNEWKVAEGVYIPKEKESKHINQFRPISLLNVEGKIYFSCLAARLTTFMTTNKYIDTAVQKGGIPGVPGCIEHTAMIWEAIQNAKRNQLSLHVVWLDLANAYGSVPHQLLWKTLEIHHVPGTVIEVLKEYFNGFVMRFSTKDCTTCWIPLQIGIAMGCAISPSLFVLAIQVVLNAVGAEIPEMRLGKGVFMPSVKVFMDDTTIVLNRQQIVQRALDKLSDLLQWCRMALKPAKSRSLSLTRGRVRSDVCFTAGGQRIPTVSEEPVKSLGRVFDVSLRDKNQEAATVSRMTDGLRAIAESPLQGRFKVWLLQFVLLPRLLWPLTIYEIGLQSVEEMERKINRCTRKWFGLPPSLSSIALYSRSTRLRLPLRSIVEEYKISKIRTQWSLNNSSDSRVRDVMPQLRSGRKFRAQEEIEESEAVLAFEEKRGPVQVDRHGVGWNHFPRWSTANVQTKAAMIIQERRREMETERIALAVQQSQQGQWTTWEDVIQRSITWKDIWKKSPLRLAFLIRSVYDVLPSGSNLQKWGMVQDASCELCGGEQSLRHVLSSCTYALAHGRYTWRHNQVLQVVVEAAKTACSQANAREIAAPRRMYFLREGSTQHRKRNMAQMRDLLSTAKDWTVAADLQGERHYHQVLQESGKRPDLVLASAATDSVIIVELTVPWEDRIDVSNALKSDRYEELRMDLEGKGYSARVLPIEVGARGLVGKSTYAFLRKIGLSNRQTKQFVQKIAESAESASHWIWTTKDRR

SEQ ID NO: 15972 - protein, 1223 aa, Poecilobdella manillensis
MAVRVLFVCRKSLSGYRKKVSGRDIRLINGCGPAPESVRIQGRNTCRRGHSSEDPCQNARSRVSINTPRRWPFDAREKTEGQPGKTGDDRERPVASRKDEVAHGPASQVRQITSATSTTTEICPQGSYRKERENDEPITGPTDFDRPVTTITDFRTALDNGAPGSRCICGKSFASRKGMKIHQTKMGCIERQRPVAQEPTHKTPNDTGQEAHHSPELVRVSLPAPDPVRQRIKFPPSKDMKVWQELDGNLATGLKRVMKREGTMKSFSDFIYASCLEKFGSVEVKRPTKPKESRRQIELRNLKREKRVLRSRWKSSGEAEKAGLMVLWEEVKGRINTLRQAERARQKRYERRRARQEFFSDPYRYGRSLLEPPKSGTLAASRAELEAHLTKTYTDALRSTPLPQRTEVLEAPFPDHPFQEAAPSIEEVKGVVKKARNRSAPGPNGIPYLLYKRCPRTLKLLHTIIVSTWVNAAVDNEWKVAEGVYIPKEKESKHINQFRPISLLNVEGKIYFSCLAARLTTFMITNKYIDTAVQKGGIPGVPGCIEHTAMIWEAIQNAKRNQLSLHVVWLDLANAYGSVPHQLLWKTLEIHHVPGTVIEVLKEYFNGFVMRFSTKDCTTCWIPLQIGIAMGCAISPSLFVLAIQVVLNAVGAEIPEMRLGKGVFMPSVKVFMDDTTIVLNRQQIVQRALDKLNDLLQWCRMALKPAKSRSLSLTRGRVRSDVCFTAGGQRIPTVSEEPVKSLGRVFDVSLRDKNQEAATVSRMTDGLRAIAESPLQGRFKVWLLQFVLLPRLLWPLTIYEIGLQSVEEMERKINRCTRKWFGLPPSLSSIALYSGSTRLRLPLRSIVEEYKISKIRTQWSLNNSSDSRVRDVMPQLRSGRKFRAQEEIEESEAILAFEEKRGPVQVDRHGVGWNHFPRWSTANVQTKAAMIIQERRREMETERIALAVQQSQQGQWTTWEDVIQRSITWKDIWKKSPLRLAFLIRSVYDVLPSGSNLQKWGMVQDASCELCGGEQSLRHVLSSCTYALAHGRYTWRHNQVLQVVVEAAKTACSQANAREIAAPRRMYFLREGSTQHRKRNMAQMRDLLSTAKDWTVAADLQGERHYHQVIQESGKRPDLVLASAATDSVIIVELTVPWEDRIDVSNALKSDRYEELRMDLEGKGYSARVLPIEVGARGLVGKSTYAFLRKIGLSNRQTKQFVQKIAESAESASHWIWTTKDRR

SEQ ID NO: 15973 - protein, 1223 aa, Poecilobdella manillensis
MAVRVLFVCRKSLSCYRKKVSDRDIRLINGCGPAPESVRIQGRNTRRRGHSSEDPCQNARSRVSINTPRRWPFDAREKTEGQPGKTGDDRERPVASRKDEVAHGPASQVRQITSATSTTTEICPQGSYRKERENDEPITGPTDFDRPVITITDFRTALDNGAPGSRCICGKSFASRKGMKIHQTKMGCIERQRPVAQEPTHKTPNDTGQEAHHSPELVRVSLPASDPVRQRIKFPPSKDMKVWQELDGNLATGLKRVMKREGTMKSFSDFIYASCLEKFGSVEVKRPTKPKESRRQIELRNLKREKRVLRSRWKSSGEAEKAGLMVLWEEVKGRINTLRQVERARQKRYERRRARQEFFRDPYRYGRSLLEPPKSGTLVASKTELEAHLTKTYTDALRSTPLPQRTEIQEAPFPDHPFQEAAPSIEEVKGVVKKARNRSAPGPNGIPYLLYKRCPRTLKLLHTIIVSTWANAAVDNEWKVAEGVYIPKEKESKHINEFRPISLLNVEGKIYFSCLAARLTTFMTTNKYIDTAVQKGGIPGVPGCIEHTAMIWEAIQNAKRNQLSLHVVWLDLANAYGSVPHQLLWKTLEIHHVPGTVIEVLKEYFNGFVMRFSTKDCTTCWIPLQIGIAMGCAISPSLFVLAIQVVLNAVGAEIPEMRLGKGVFMPSVKVFMDDTTIVLNRQQIVQRALDKLNDLLQWCRMALKPAKSRSLSLTRGRVRSDVCFTAGGQRIPTVSEEPVKSLGRVFDVSLRDKNQEAATVSRMTDGLRAIAESPLQGRFKVWLLQFVLLPRLLWPLTIYEIGLQSVEEMERKINRCTRKWFGLPPSLSSIALYSRSTRLRLPLRSIVEEYKISKIRTQWSLNNSSDSRVRDVMPQLRSGRKFRAQEEIEESEAILAFEEKRGPVQVDRHGVGWNHFPRWSTANVQTKAAMIIQERRREMETERIALAVQQSQQGQWTTWEDVIQRSITWKDIWKKSPLRLAFLIRSVYDVLPSGSNLQKWGMVQDASCELCGGEQSLRHVLSSCTYALAHGRYTWRHNQVLQVVVEAAKTACSQANAREIAAPRRMYFLREGSTQHRKRNMAQMRDLLSTAKDWTVAADLQGERHYHQVLQESGKRPDLVLASAATDSVIIVELTVPWEDRIDVSNALKSDRYEELRMDLEGKGYSARVLPIEVGARGLVGKSTYAFLRKIGLSNRQTKQFVQKIAESAESASHWIWTTKDRR

SEQ ID NO: 15974 - protein, 1223 aa, Poecilobdella manillensis
MAVRVLFVCRKSLSGYRKKVSGRDIRLINGCGPAPESVRIQGRNTRRRGHSSEDPCQNARSRVSINTPRRWPFDAREKTEGQPGKTGDDRERPVASRKDEVAHGPASQVRQITSATSTTTEICPQGSYRKERENDEPITGPTDFDRPVITITDFRTALDNGAPGSRCICGKSFASRKGMKIHQTKMGCIERQRPVAQEPTHKTPNDTGQEAHHSPELVRVSLPASDPVRQRIKFPPSKDMKVWQELDGNLATGLKRVMKREGTMKSFSDFIYASCLEKFGSVEVKRPTKPKESRRQIELRNLKREKRVLRSRWKSSGEAEKAGLMVLWEEVKGRINTLRQVERARQKRYERRRARQEFFRDPYRYGRSLLEPPKSGTLVASKTELEAHLTKTYTDALRSTPLPQRTEILEAPFPDHPFQEAAPSIEEVKGVVKKARNRSAPGPNGIPYLLYKRCPRTLKLLHTIIVSTWANAAVDNEWKVAEGVYIPKEKESKHINQFRPISLLNVEGKIYFSCLAARLTTFMTTNKYIDTAVQKGGIPGVPGCIEHTAMIWEAIQNAKRNQLSLHVVWLDLANAYGSVPHQLLWKTLEIHHVPGTVIEVLKEYFNGFVMRFSTKDCTTCWIPLQIGIAMGCAISPSLFVLAIQVVLNAVGAEIPEMRLGKGVFMPSVKVFMDDTTIVLNRQQIVQRALDKLNDLLQWCRMALKPAKSRSLSLTRGRVRSDVCFTAGGQRIPTVSEEPVKSLGRVFDVSLRDKNQEAATVSRMTDGLRAIAESPLQGRFKVWLLQFVLLPRLLWPLTIYEIGLQSVEEMERKINRCTRKWFGLPPSLSSIALYSRSTRLRLPLRSIVEEYKISKIRTQWSLNNSSDSRVRDVMPQLRSGRKFRAQEEIEESEAILAFEEKRGPVQVDRHGVGWNHFPRWSTANVQTKAAMIIQERRREMETERIALAVQQSQQGQWTTWEDVIQRSITWKDIWKKSPLRLAFLIRSVYDVLPSGSNLQKWGMVQDASCELCGGEQSLRHVLSSCTYALAHGRYTWRHNQVLQVVVEAAKTACSQANAREIAAPRRMYFLREGSTQHRKRNMAQMRDLLSTAKDWTVAADLQGERHYHQVLQESGKRPDLVLASAATDSVIIVELTVPWEDRIDVSNALKSDRYEELRMDLEGKGYSARVLPIEVGARGLVGKSTYAFLRKIGLSNRQTKQFVQKIAESAESASHWIWTTKDRR

SEQ ID NO: 15975 - protein, 984 aa, Poecilobdella manillensis
MKVWQELDGNLATGLKRVMKREGTMKSFSDFIYASCLEKFGSVEVKRPTRPKESRRQIELRNLKREKRVLRSRWKSSGEAEKAGLMVLWEEVKGRINTLRQVERARQKRYERRRARQEFFRDPYRYGRSLLEPPKSGTLVASKTELEAHLTKTYTDALRSTPLPQRTEILEAPFPDHPFQEAAPSIEEVKGVVKKARNRSAPGPNGIPYLLYKRCPRTLKLLHTIIVSTWANAAVDNEWKVAEGVYIPKEKESKHINQFRPISLLNVEGKIYFSCLAARLTSFMTTNKYIDTAVQKGGIPGVPGCIEHTAMIWEAIQNAKRNQLSLHVVWLDLANAYGSVPHQLLWKTLEIHHVPGTVIEVLKEYFNGFVMRFSTKDCTTCWIPLQIGIAMGCAISPSLFVLAIQVVLNAVGAEIPEMRLGKGVFMPSVKVFMDDTTIVLNRQQIVQRALDKLSDLLQWCRMALKPAKSRSLSLTRGRVRSDVCFTAGGQRIPTVSEEPVKSLGRVFDVSLRDKNQEAATVSRMTDGLRAIAESPLQGRFKVWLLQFVLLPRLLWPLTIYEIGLQSVEEMERKINRCTRKWFGLPPSLSSIALYSRSTRLRLPLRSIVEEYKISKIRTQWSLNNSSDSRVRDVMPQLRSGRKFRAQEEIEESEAVLAFEEKRGPVQVDRHGVGWNHFPRWSTANVQTKAAMIIQERRREMETERIALAVQQSQQGQWTTWEDVIQRSITWKDIWKKSPLRLAFLIRSVYDVLPSGSNLQKWGMVQDASCELCGGEQSLRHVLSSCTYALAHGRYTWRHNQVLQVVVEAAKTACSQANAREIAAPRRMYFLREGSTQHRKRNMAQMRDLLSTANDWTVAADLQGERHYHQVLQESGKRPDLVLASAATDSVIIVELTVPWEDRIDVSNALKSDRYEELRMDLEGKGYSARVLPIEVGARGLVGKSTYAFLRKIGLSNRQTKQFVQKIAESAESASHWIWTTKDRR

SEQ ID NO: 15976 - protein, 1223 aa, Poecilobdella manillensis
MAVRVLFVCRKSLSGYRKKVSGRDIRLINGCGPSPESVRIQGRNTCRRGHSSEDPCQNARSRVSINTPRRWPFDAREKTEGQPGKTGDDRERPVASRKDEVAHGPASQVRQITSATSTTTEICPQGSYRKERENDEPITGPTDFDRPVTTITDFRTALDNGAPGSRCICGKSFASRKGMKIHQTKMGCIERQRPVAQEPTHKTPNDTGQEAHHSPELVRVSLPAPDPVRQRIKFPPSKDMKVWQELDGNLATGLKRVMKREGTMKSFSDFIYASCLEKFGSVEVKRPTKPKESRRQIELRNLKREKRVLRSRWKSSGEAEKAGLMVLWEEVKGRINTLRQAERARQKRYERRRARQEFFSDPYRYGRSLLEPPKSGTLAASRAELEAHLTKTYTDALRSTPLPQRTEVLEAPFPDHPFQEAAPSIEEVKGVVKKARNRSAPGPNGIPYLLYKRCPRTLKLLHTIIVSTWVNAAVDNEWKVAEGVYIPKEKESKHINQFRPISLLNVEGKIYFSCLAARLTTFMITNKYIDTAVQKGGIPGVPGCIEHTAMIWEAIQNAKRNQLSLHVVWLDLANAYGSVPHQLLWKTLEIHHVPGTVIEVLKEYFNGFVMRFSTKDCTTCWIPLQIGIAMGCAISPSLFVLAIQVVLNAVGAEIPEMRLGKGVFMPSVKVFMDDTTIVLNRQQIVQRALDKLNDLLQWCRMALKPAKSRSLSLTRGRVRSDVCFTAGGQRIPTVSEEPVKSLGRVFDVSLRDKNQEAATVSRMTDGLRAIAESPLQGRFKVWLLQFVLLPRLLWPLTIYEIGLQSVEEMERKINRCTRKWFGLPPSLSSIALYSRSTRLRLPLRSIVEEYKISKIRTQWSLNNSSDSRVRDVMPQLRSGRKFRAQEEIEESEAILAFEEKRGPVQVDRHGVGWNHFPRWSTANVQTKAAMIIQERRREMETERIALAVQQSQQGQWTTWEDVIQRSITWKDIWKKSPLRLAFLIRSVYDVLPSGSNLQKWGMVQDASCELCGGEQSLRHVLSSCTYALAHGRYTWRHNQVLQVVVEAAKTACSQANAREIAAPRRMYFLREGSTQHRKRNMAQMRDLLSTAKDWTVAADLQGERHYHQVIQESGKRPDLVLASAATDSVIIVELTVPWEDRIDVSNALKSDRYEELRMDLEGKGYSARVLPIEVGARGLVGKSTYAFLRKIGLSNRQTKQFVQKIAESAESASHWIWTTKDRR

SEQ ID NO: 15977 - protein, 1045 aa, Poecilobdella manillensis
MKIHQTKMGCIERQRPVAQEPTHKTPNDTGQEAHHSPELVRVSLPASDPVRQRIKFPPSKDMKVWQELDGNLATGLKRVMKREGTMKSFSDFIYASCLEKFGSVEVKRPTKPKESRRQIELRNLKREKRVLRSRWKSSGEAEKAGLMVLWEEVKGRINTLRQVERARQKRYERRRARQEFFRDPYRYGRSLLEPPKSGTLVASKTELEAHLTKTYTDALRSTLLPQRTEILEAPFPDHPFQEAAPSIEEVKGVVKKARNRSAPGPNGIPYLLYKRCPRTLKLLHTIIVSTWANAAVDNEWKVAEGVYIPKEKESKHINQFRPISLLNVEGKIYFSCLAARLTTFMTTNKYIDTAVQKGGIPGVPGCIEHTAMIWEAIQNAKRNQLSLHVVWLDLANAYGSVPHQLLWKTLEIHHVPGTVIEVLKEYFNGFVMRFSTKDCTTCWIPLQIGIAMGCAISPSLFVLAIQVVLNAVGAEIPEMRLGKGVFMPSVKVFMDDTTIVLNRQQIVQRALDKLNDLLQWCRMALKPAKSRSLSLTRGRVRSDVCFTAGGQRIPTVSEEPVKSLGRVFDVSLRDKNQEAATVSRMTDGLRAIAESPLQGRFKVWLLQFVLLPRLLWPLTIYEIGLQSVEEMERKINRCTRKWFGLPPSLSSIALYSRSTRLRLPLRSIVEEYKISKIRTQWSLNNSSDSRVRDVMPQLRSGRKFRAQEEIEESEAILAFEEKRGPVQVDRHGVGWNHFPRWSTANVQTKAAMIIQERRREMETERIALAVQQSQQGQWTTWEDVIQRSITWKDIWKKSPLRLAFLIRSVYDVLPSGSNLQKWGMVQDASCELCGGEQSLRHVLSSCTYALAHGRYTWRHNQVLQVVVEAAKTACSQANAREIAAPRRMYFLREGSTQHRKRNMAQMRDLLSTAKDWTVAADLQGERHYHQVLQESGKRPDLVLASAATDSVIIVELTVPWEDRIDVSNALKSDRYEELRMDLEGKGYSARVLPIEVGARGLVGKSTYAFLRKIGLSNRQTKQFVQKIAESAESASHWIWTTKDRR

SEQ ID NO: 15978 - protein, 860 aa, Poecilobdella manillensis
MTLEKIDELENNIKMKLQAKAQRVRRYSNHSAQFQQNRLFYKDQKRFYREVNKCQIREHQPPHPCELEEFWKEILEKEITHNHQANWILEENMAQEGLQSDTWRDFDMFELTKILSTTQNWKSPGLDGVHGFWVKYLVTLHGRLLCVYNEIMKNPASTPEWLTEGTTFLLPKIENATHPKNYRPITCLPILYKILTSLIAERIYGHLKNNNIFPEEQKGCTKESRGCKDQLLISQMVVQHAKTFKKDLSITWIDYKKAFDSVPHSLIHQILEIYKVNNIIRNFIQQVMVTWKTSMNLAVGKENIKTGKINIKRGIFQGDSLSPLLFCTILIPLSNLLRKNGGGYSIHGHNISHLLYMDDLKLFATSRELMKKSLQIVEDFSTDIKMEFGIEKCATIEIKNGNIAQGRSIELSTPLHIRSLEIDEYYKYLGMDENNGLNDKLIKLNTKKEYFRRLRIILKSQLNSRNKITAINSWAMPILTYGFGIIRWLKTEIEKMDRKTRKTLTTYGMHHPRADVERLYIKRKYGGRGLLEIWTSYQQAILGFSEYIEKDNSKLIQLVKLNDDLKKKHSMTSQANKIRNKYRMEICTDTKITDELKKRIEKEKLENIKNKPLHEQFFRNIEKPGISRKMTVSWLNKSGMKGETESHIIAAQDQVLKTRYYQKNILKQNVSSKCRLCHKSIESISHVISGCQVLAPTEYTERHDKVASYVHWKICRNLDIEVNEKYYLHVPEPVISKEENTLMWNPGVLTDRNIPANRPDIILLNRKDKQCLLIEISIPDDENVLKKINEKILKYRDLQIEIAGMWKVKVKTVPVVMGALGTTSESLQKELDELPGKTSQYEIQRIALHGTAHILRRILG

SEQ ID NO: 15979 - protein, 1210 aa, Poecilobdella manillensis
MKKLDKITECRTLKVKEFKETKPPRNLFDQACLPKQSFNRADDTQLNTPQIYSPDKYARSPRTNERQTGHSRRQDNQAAITKRESNNSGTGSDQKKQKHKWTKEQYREVIWAYFYAKASGNENLTMGTYNVWRERNPEILPGMNPKNLSNQRRFIVKENMLTTAETEEIAAEVASSIAVYLGPGGGEENEDDKRSEMHCFDDPADGGLEREMVKVDEIKNMEMKISAKVIEVRKIKYEERKKLNKIRNIKLITKEIELANKALQNITENTRLKLTEINEWIYATAVVIAGERPEIKNGDQRIGMPKWKTRINKVISDCRKDLAIIKQFRKGNPSQKVQIKVMEICDRSAMGMKQIDEIENNIRMKLQSKAQRLRRYSKRSTQYQQNRLFNEDQKQFYREINKCQIRVQKPPDPIEMEKFWKEILENDINHNSQAEWIHKEERSHEKLKTETWKNFEESELRKAISATQNWKSPGFDKIHNFWVKYLGSLHGQLLNGYNEIMENPGDMPHWLTKGVTFLLPKTQETDKPKNYRPITCLPTLYKILTSLITDRIYTHLQNNNILQEEQKGCQRKSRGCKDQLLISQMVAQHAKKFKKDLCITWIDYKKAFDSIPHSLIRQILETFKIDDVTRNFIGQSMLRWRTNMILTVGNECIKTGEIFVKRGIFQGDSLSPLLFCMSLIPLSNNLRRNGTGYEIHGQQISHLLYMDDLKLFTTSPEQMEENLKIVEDFSNDIRMEFGIEKCATIEIKQGKVIHGRSIQLTTPLQIRSLEAEECYRYLGMDEENGINDRLVKQKAKKEYFRRIRTILATQLNSRNKITAINSLAIPVLSYGFGIIHWLKSEIEKIDRKTRKMLTINKMHHPRADVQRLYIKRKNGGRGLLEIWSVYQHAMLGLSEYLERDNSKLVQLIRLDDSFKKKYSVIKEADKTRNKYMLKHNHTDVKITDEFKKRIEKEKLEDLKRKPLHGKFIRNTERAGMSKEMTFAWLNRGGLKGETESLIVAAQDQVLKTRYYQRHILKQDITSTCRICHKSIETISHIISGCQVLAPTEYTERHNKVAAYIHWKVCKNLDLQVTEKYYQHSPEPVINKDEITIMWNQGIITDRKIQANRPDIVYIDKNKKCCLLIEISVPDDENILKKISEKILKYKDLEIEIARMWGMKVRTVPVVVGSLGTVAEGLKKELDKLPGEPNYNEIQKIVLFGTAHILRKILD

SEQ ID NO: 15980 - protein, 1210 aa, Poecilobdella manillensis
MKKLDKITECRTLKVKEFKETKPPRNLFDQACLPKQSFNRADDTQLNTPQIYSPDKYARSPRTNEGQTGHSRRKDNQAAITKGESNNSGTGSDQKKQKHKWTKEQYREVIWAYFYAKASGNENLTMGTYNVWRERNPEILPGMNPKNLSNQRRFIVKENMLTTAETEEIAAEVASSIAVYLGPGGGEENEADKRSEMHCFDDPADGGLERERVKIDEIKNMEMKISAKVIEVRKIKYEERKKLNKIRNIKLITKEIELANKALQNITENTRLKLTEINEWIYATAVVIAGERPEIKNGDQRIGMPKWKTRINKVISDCRKDLAIIKQFRKGNPSQKVQIKVMEICDRSAMGMKQIDEIENNIRMKLQSKAQRLRRYSKRSTQYQQNRLFNEDQKQFYREINKCQIRVQKPPDPIEMEKFWKEILENDINHNSQAEWIHKEERSHEKLKTETWKNFEESELKKAISATQNWKSPGFDKIHNFWVKYLGSLHGQLLNGYNEIMENPGDMPHWLTKGVTFLLPKTQETDKPKNYRPITCLPTLYKILTSLITDRIYTHLQNNNILQEEQKGCQRKSRGCKDQLLISQMVAQHAKKFKKDLCITWIDYKKAFDSIPHSLIRQILETFKIDNVTRNFIGQSMLRWRTNMILTVGNECIKTGEIFVKRGIFQGDSLSPLLFCMSLIPLSNNLRRNGTGYEIHGQQISHLLYMDDLKLFTTSPEQMEENLKIVEDFSNDIRMEFGIEKCATIEIKQGKVIHGRSIQLTTPLQIRSLEAEECYRYLGMDEENGINDRLVKQKAKKEYFRRIRTILATQLNSRNKITAINSLAIPVLSYGFGIIHWLKSEIEKIDRKTRKMLTINKMHHPRADVQRLYIKRKNGGRGLLEIWSVYQHAMLGLSEYLERDNSKLVQLIRLDDSFKKKYSVIKEADKTRNKYMLKHNHTDVKITDEFKKRIEKEKLEDLKRKPLHGKFIRNTERAGMSKEMTFAWLNRGGLKGETESLIVAAQDQVLKTRYYQRHILKQDITSTCRICHKSIETISHIISGCQVLAPTEYTERHNKVAAYIHWKVCKNLDLQVTEKYYQHSPEPVINKDEITIMWNQGIITDRKIQANRPDIVYIDKNKKCCLLIEISVPDDENILKKISEKILKYKDLEIEIARMWGMKVRTVPVVVGSLGTVAEGLKKELDKLPGEPNYNEIQKIVLFGTAHILRKILD

SEQ ID NO: 15981 - protein, 1121 aa, Aurelia aurita
MDCQSIPNNGVNETGTSGEGLSPGRCFMAQQHEPGRQQATARRIRRKWSQDDNRIVMECYYNSEPGRNGYRKRMHSVWISKGMFPVTEQRLVDQKNQITKKQWLSNLELEEIKRSIEDASYGQVEQRIEHENRNEDIVDEVNDVDHEAADMNGYFSVDEEVTAEEKNLIERLNEISKKDRARLPSLRGVEKGKLYAAVKKVDNVMGKIKVNNITETNDLIYCGAAMVTEMLGVKSKNNENRKEPWWKRRLEGQVKDLSRDLGRVNALIERKAVKKKDLDALQRKYKFKQKGLQIVKEELRQRIKAKSGKIARYNQRTKQYQQNRQFKNNEGGFYKQLNSEGEQGESEVPDANEARQFWTDMWSTEVEHNRDAGWLEEFKTRMIAGPRQAEVNITGEKIKKILKKVPNWKAPGPDGVQGFWLKNFTTMHKDLEKYFAECLEGQTPAWMTKGRTVLLQKDKSKGRDASNYRPITCLPLCWKLLTALISDEIYSFLENNQLLPEEQKGCRKKSRGTADQLYIDKMILREVKMRKKNLAMGWIDYRKAFDMVPHSWVLECLHILGINNTLMKFLEKTMKDWRVELTCANESLGEVKIKRGIFQGDALSPLLFVITLIPLTSVLKKTKHGYEFAKNREKINHLLYMDDLKLYAKSEKELDSLIQTVRVFSKDIGMQFGIEKCSTLVMKRGKRIKSDGIKMPDDTVIKSLKEGEGYKYLGVLQADEVQAKEMKGKVSNEYKRRVRKILETKLNGGNIIKGINTWAIPVLRYSAAFLHWTKAELQEMDRRTRKLLTMHKGLHPRSNVDRLYLPRKEGGRGLMSAEDTVNLATIGLKRYVRESEEKLLVAARGDTEDEQLETENEFKRRNRQERKTNWKEKVMHGQFLRQTEDVADKDQWLWLKDGSLKRETETLIMAAQEQALRTNLVKAKIDKTQQDSKCRMCGKADESINHLLSECSKMAQKEYKRRHDWVGKKIHWEVCRKYGLETKEKWYEHEPQAVCENNEYKILWDFSIQTDHVIEARRPDMIIVDKKNNKCQIIDFAVPYDTRVDEKEREKILKYQDLARELKKLWNKKVKVIPVIIGALGTTPKALPKRLKEIGIATRIVELQKTVLLHSARILRQVLEI

SEQ ID NO: 15982 - protein, 971 aa, Aurelia aurita
MNGYFSVDEEVTAEEKNLIERLNEISKKDRARLPSLRGVEKGKLYAAVKKVDNVMGKIKVNKITETNDLIYCGAAMVTEMLGVKSKNNENRKEPWWKRRLEGQVKDLSRDLGRVNALIERKAVKKKDLDALQRKYKFKQKGLQIVKEELRQRIKAKSGKIARYNQRTKQYQQNRQFKNNEGGFYKQLNSEGEQGESEVPDANEARQFWTDMWSTEVEHNRDAGWLEEFKTRMIAGPRQAEVNITGEKIKKILKKVPNWKAPGPDGVQGFWLKNFTTMHKDLEKYFAECLEGQTPAWMTKGRTVLLQKDKSKGRDASNYRPITCLPLCWKLLTALISDEIYSFLENNQLLPEEQKGCRKKSRGTADQLYIDKMILREVKMRKKNLAMGWIDYRKAFDMVPHSWVLECLHILGINNTLMKFLEKTMKDWRVELTCANESLGEVKIKRGIFQGDALSPLLFVITLIPLTSVLKKTKHGYEFAKNREKINHLLYMDDLKLYAKSEKELDSLIQTVRVFSKDIGMQFGIEKCSTLVMKRGKRIKSDGIKMPDDTVIKSLKEGEGYKYLGVLQADEVQAKEMKGKVSNEYKRRVRKILETKLNGGNIIKGINTWAIPVLRYSAAFLHWTKAELQEMDRRTRKLLTMHKGLHPRSNVDRLYLPRKEGGRGLMSAEDTVNLATIGLKRYVRESEEKLLVAARGDTEDEQLETENEFKRRNRQERKTNWKEKVMHGQFLRQTEDVADKDQWLWLKDGSLKRETETLIMAAQEQALRTNLVKAKIDKTQQDSKCRMCGKADESINHLLSECSKMAQKEYKRRHDWVGKKIHWEVCRKYGLETKEKWYEHEPQAVCENNEYKILWDFSIQTDHVIEARRPDMIIVDKKNNKCQIIDFAVPYDTRVDEKEREKILKYQDLARELKKLWNKKVKVIPVIIGALGTTPKALPKRLKEIGIATRIVELQKTVLLHSARILRQVLEI

SEQ ID NO: 15983 - protein, 1343 aa, Tuta absoluta
MRQCAPLSPCVPNKSYRSDFTRVDHSDEVLHSGTPNSMKAARNRSSVPQAGTSRAGESRPESGCPTYSGGGNVPRRITRSTTRSPSVDVTQEEPVTHTASATGNIDVRNRRQLTSPTPTEQRRSVLQEMRPATTLAGRSRQRMSWTDNINRQLLRCYYQVTNIETDLTLYRPRMHQKFIAVFPELHFITEQRLADQIRVIHKHNRIIPSERDKIKAEARTFIHNGLPSIEEEGIPANRTQHADETQTQPFSTQPTFNTLSDFCNLSEFLIHSTSDVIANATSASITQPHTTSNEPEFFTHTSDSIDKTTSETTTQTHTTSNDLTSNTQETILSNLLQEALDKYTDTDPTTRPGIPKLTFTRNLNLTIDTMNLVIDKRIKEKSDLNINDIHTMLYCAAIALTTYVNPKNQNTTNNQNNRYKNRNDGKAGWERRLEKKIRSLRKEIGQLTQYLAGKLSLNKQRKINPNNLNTDLLREEKDKKTQILQASAKRLKRYLKSKRRKMDNRNFSNNQKLFYRTLNNENTNSITDPPSIDDTKNYWSDIWSNPSDFNSDASWIEKVEAANTEIETMDEIIILEEDIKDATCSMLNWKAPGPDKIQNFWLKKLKVFHKPLAEIFNTFIENPQQVPQFLTQGITYLKPKDNDTKNPAKYRPITCLPTLYKLLTSIISHKINSHVTRYNLIAEEQKGCCKGSRGCKEQLVIDSEIHTQAIDKHRNLYYSYIDYQKAFDSVPHSWLLKCLELYKIDHKTINFLKIIMTQWTTTLNIKTQRDSLASEKININRGIFQGDSLSPLWFCLALNPLSQLLNNCSEGYLIDRKNKIKITHLLYMDDIKLYASTREQLNRLLKIIETFSNDIIMKFGVDKCKINSILKGKHQNQEPFNLAEQPATIESLSLNETYKYLGFHQSHKLDHKKIKDDLKTKYKQRLTKILNTQLSGRNKIKAINTYAIPILTYSFGIIKWTDTELEALNTLTRTTCNKHLIHHIHSAVERFTLKREKGGRGLIDIKNLHYRQIFNMRTYFLEKRDTSELHKAICSRPNSTHGTLELNDPHFKPKDKITTEETKLDKWKSKALHGKHIANLQKEHIDYTASNTWLKKGNIYAETEGFMIAIQDQIIKTKTYQKRIIKDPTVTSDRCRLCNQQQETIDHITGGCNYLANKQYTDRHNNVAKQIHARIAKKYNLITNIDPYYKYKPQNVLENETAKLYWDRDIITDRTTQNNRPDITLTIKLAKITYLIDISVPNTDNLQKKHTEKIQKYIPLAEEIQAMWHQDQVRIVPIIISSTGIVPKTLHKAIGELKLPKSTYVNIQKSVILDTCSIVRRFLTNATIFQTENDRASEPSHLA

SEQ ID NO: 15984 - protein, 775 aa, Tuta absoluta
MNEITINEEDIAHATSTMLNWKAPGPDKIQNFWLKKLKVFHKPIATIFNSFLDNPEQVPQFLTQGITYLKPKGNDTKNPAKYRPITCLPTLYKLLTSVISHKINFHLTSNNIIAEEQKGCSKNSRGCKEQLIIDSEIHTQAIEKHRNLHYSYIDYQKAFDSVPHSWLVKSLELHKIDTKTINFLKSIMKKWTTTLNIKTVKENLTSTKIEISRGIFQGDSLSPLWFCLALNPLSQLLNDISDGYLIDRQNKIKITHLLYMDDIKLYASTREQLDQLLKTTESFSNDINMKFGIEKCKINSIVKGKHQDQEPYNLTQPSETIECLNINETYKYLGFYQSHKLDHKNIKENLKNLFKQRLIKILKSELSGKNKIKAINTYAIPILTYSFGIIKWSETELETLNTLTRTTCNKYHIHHIHSAVERFTLKREKGGRGVIDIKNLHYRQLNNLRKYFIHKSETSQIHKAICARPNSTHGTLQLNNPNYNPKDKLNTEESKIEKWKSKALHGKHINNLQKAHIDTIGSNSWLKKGNIYAETEGFMVAIQDQTIKTRSYQKRIMKDPTITTDKCRLCNHQPETIDHITGGCNYLANKQYTDRHNNVAKQIHAKLAKKYNLIDKTEPYYKYKPQNVLENQTAKLYWDRDIITDRTTHNNRPDLTLTLKESKTTYLIDVSVPNTDNLIKKHTEKIQKYIPLAEEIQSMWHQNSVRIIPVIISSTGIIPKTLHKAIAELKLPKSTYINLQKSIVLDTCSIVRRFLTNATIFQPAIDVALDPSHLA

SEQ ID NO: 15985 - protein, 960 aa, Tuta absoluta
MSQPSTSASQQKTFQCDLCAAPAFQTLRGLHIHAGKIHKPRAKDTQDLFESPSTIINHLPQTQAAPFGSDLPKFNETIPVIKRIPRGARSCVAQSLRSCIDQVVQTNSCTDWDKLLTFAYRTLHVNKNGNRKLSLTQKVKNNCSQGQVIPSSTSRSRNPRKTYNLIQKVETKISDGDLKGASQLLFSEDMVAPVNEETLHSLQDKHPQPSHLSSQQPVSPPQADICSPNVSPDDIIHAIMSFKNGSSGGVDGLSPQHLKDLVGVSPGDVGRSLALSLASLTELMLSGKVNDSVIEVLYGARLCALKKKDGGIRPIAVGCTFRRLVSKIACKHIGPHLTSRFQPIQVGFGSRGGSEAAVHATRAFLKRSDNQVLLKVDLKNAFNSIDRGAFLKEVKEHIPSVYPYLWQCYGRPSKLFYKDHLLLSSVGCQQGDPLGPAIFSLGIHPIISSILSAFNLWYLDDGTLGGSPDVVLADLQQLKSSFAMIGLEFNFAKCEIYISPTTLSNDRCDILSRFNAVAPGIQSRNDSTLRLLGAPLLEDSIPSFISDQLKKFKGLADRLSSINAHMALAIIKFCLFVPKFTYVLRCSPLWKFTDLLFSVDACISEVLSKVLNCRLTDVAWTQAALPVRFGGIGIRQVTSVALPAYIASAHSCNRLFAEMVTPSLGSGIEILHLVEATAAWSDLCHCDPPKSLHSQRQWDEPVCKNTQQLLLSQFPNAAERARLLAAFEKESGHWLNALPSTNIGTLLDNNTLSLAISLRLGLKITQPHRCRCGAEVDEMGHHGLSCQKSAGRIPRHSALNDVVRRALASANVPATLEPNGIVRTDGKRPDGLTLIPWQRGRCIAWDATCVDTLAPTHIRSTSLQAGAAAANAERQKFLKYADIPGCFMFVPLGFETLGPWGPEATKFIKDLSARLIEASGDSRAGSFLAQRISLAIQRGNAASVLGTVPLRDALEDVFYL

SEQ ID NO: 15986 - protein, 1133 aa, Alatina alata
MNVMSNQNIENNGVNGTGSQSEGPTPGRCSPAQQRGPGRHQATAKKKWSRELNRVVMECYFLSNPVDENGKPIRGYRQRMHRAWKDKGMFEIKEQNLCDQARMIRKNEWLSVVEIEMIKRYVLEEQSEIIEENSIYEESGLSEDNMENVQSDFGERVIPSFNAEGKSEEQREMMQEIIDLMKSEEKEFIPGFKKVERKRLQKLAADINEVIKDIQTHSITETNELLNAVSMYCARQVRLKKPMVRRGNINEPWWKRRLKSSINEVRKHLNVLERKHKGEYVKKGKYLEIERKYKVKNKGIGCVIEELKQRLKAKVFKLKRYEQRIDQFRINRLFQQDQKRVYGELNGNQKGEKVVPDSEESKQFWSNIWSQKESHNGEAEWLKDLKSEKGQYQQDNVVITEGMVKHACQRLPNWKAPGPDGVQGYWFKKMTNLHSRIASQMNDMINNGVRVPGWLTKGRTVLCQKDPTKGNEVGNFRPISCLPLMWKVLTSVLSDSIYSYLEESELLPSEQKGCKRKSRGTKDQLLIDKTILRDCKRRNKNLAMAWVDYKKAYDMVPHSWIIECMKLVNISENVIDFLSGSMATWKTELTASGETLGEVEINRGIFQGDSLSPLLFVICMMPLSSVLRKMSPGYTLGTVKINHLLFMDDLKLFSKNEQEINSLVSTVHSVSKDMKMEFGIQKCGVLVMKRGKVIKTQGINLNDSTVVKEVDENGYKYLGILESNNIHEQKMKEQFRKEYLRRTRLVLQSKLNGRNKISAINTWAVSLMRYGAGILNWRKDELMEIDRRTRKLMTMNKALNPNSDVARLYVRRKEGGRGLIGIENCVKEEENNLAWYIKNSTEDMLQMVCLHGHLKTDESKEPKTFKKYSKEKSKLDWQDKRMHGQFVRDNNEADWERTWGWLNKGDLKAATEALVCSAQEQSLRTNYIKFNIDKTVESPLCRMCAEKGETVSHIVSECSKLAQREYKRRHDNVARYVHWKLSEKVGLERGKEWYNHKPEACVENEEYKILWDMMIQCDQHIQARKPDIVFMNKKKKELKIIDIAIPGDIRVREKEMEKIEKYQPLKDELARLWGLRKVKIIPVVIGALGVVSKKFEGYMKECDDNIRLDVMQKTTLLGTARILRKVLSTEGER

SEQ ID NO: 15987 - protein, 1133 aa, Alatina alata
MNVMSNRNIENNGVNGTGTHSERPTPGRCSPAQQRGPGRHQATAKKKWSRELNRVVMECYFLSNPVDENGKPIRGYRQRMHRAWKDKGMFEIKEQNLCDQARMIRKNEWLSVVEIEMIKRYVLEEQSEIIEENPMYEESGVSEDNMENVQSDFGERVIPSFNAEGKSEEQREMMQEIIDLMKSEEKEFIPGFKKVERKRLQKLAADINEVIKDIQTHSITETNELLNAVSMYCARQVRLKKPMVRRGNINEPWWKRRLNSSINEVRKHLNVLERKHKGEYVKKGKYLEIERKYKVKNKGICCVIEELKQRLTAKVFKLKRYEQRIDQFRINRLFQQDQKRVYGELNGNQKGEKVVPDSEESKQFWSNIWSQKESHNGEAEWLQDLKSEKGQYQQDNVSITEGMVKHACQRLPNWKAPGPDGVQGYWFKKMTNLHSRIASQINDMINNGVRVPGWLTKGRTVLCQKDPTKGNEVGKFRPISCLPLMWKVLTSVLSDSIYSYLEESELLPSEQKGCKRKSRGTKDQLLIDKTILRDCKRRNKNLAMAWVDYKKAYDMVPHSWIIECMKLVNISENVIDFLSGSMATWKTELTASGETLGEVEINRGIFQGDSLSPLLFVICMMPLSSVLRKMSPGYTLGTVKINHLLFMDDLKLFSKNEQEINSLVSTVHSVSKDIKMEFGIQKCGVLVMKRGKVIKTQGINLNDSTVVKEVDENGYKYLGILESNNIHEQKMKEQFRKEYLRRTRLVLQSKLNGRNKISAINTWAVSLMRYGAGILNWRKDELREIDRRTRKLMTMNKALNPNSDVARLYVRRKEGGRGLIGIENCVKEEENNLAWYIKNSTEDMLQMVCLHGHLKTDESKEPKTFKKYSREKSKLDWQDKRMHGQFVRDNNEADWERTWGWLNKGDLKATTEALVCSAQEQSLRTNYIKFNIDKTVESPLCRMCAEKGETVSHIVSECSKLAQREYKRRHDNVARYVHWKLSEKVGLERGKEWYNHKPEACVENEEYKILWDMMIQCDQHIQARKPDIVFMNKKKKELKIIDIAIPGDIRVREKEMEKIEKYQPLKDELARLWGLKKVKIILVVIGALGVVSKKFEGYMKECDDNIRLEVMQKTTQLGTARVLRKVLSTEGER

SEQ ID NO: 15988 - protein, 1179 aa, Alatina alata
MTSSLCQRIQTKGQMGLFGHGWQPVYRWCLKKKHRWLCNLKITKLRMNVMSNQNIENNGVNGTGTQSEGPTPGRCSPAQQRGPGRHQATAKKKWSRELNRVVMECYFLSNPVDENGKPIRGYRQRMHRAWKDKGMFEIKEQNLCDQARMIRKNEWLSVVEIEMIKRYVLEEQSEIIEESSIYEESGVSEDNMENVQSDFGERVIPSFNAEGKSEEQREMMQEIIDLMKSEEKEFIPGFKKVERKRLKKLAADINEVIKDIQTHSITETNELLNAVSMYCARQVRLKKPMVRRGNINEPWWKRRLKSSINEVRKHLNVLERKHKGEYVKKGKYLEIERKYKVTNKGIGCVIEELKQRLKAKAFKLKRYEQRIDQFRINRLFQQDQKRVYGELNGNQKGEKVVPDSEESKQFWSNIWSQKESHNGEAEWLKDLKSEKGQYQQDNVVITEGMVKHACQRLPNWKAPGPDGVQGYWFKKMTNLHSRIASQMNDMINNGVRVPGWLTKGRTVLCQKDPTKGNEVGNFRPISCLPLMWKVLTSVLSDSIYSYLEESDLLPSEQKGCKRKSRGTKDQLLIDKTILRDCKRRNKNLAMAWVDYKKAYDMVPHSWIIECMKLVNISDNVIDFLSGSMATWKTELTASGETLGEVEIKRGIFQGDSLSPLLFVICMMPLSSVLRKMSPGYTLGTVKINHFLFMDDLKLFSKNEQEINSLVSTVHSVSKDIKMEFGIQKCGVLVMKRGKVIKTQGINLNDSTVVKEVDENGYKYLGILESNNIHEQKMKEQFRKEYLRRTRLVLQSKLNGRNKIIAINTWAVSLMRYGAGILNWRKDELREIDRRTRKLMTMNKALNPNSDVARLYVRRKEGGRGLIGIENCVKEEENNLAWYIKNSTEDMLQMVCLHGHLKTDESKEPKTFKKYSREKSKLDWQDKRMHGQFVRDNNEADWERTWGWLNKGDLKATTEALVCSAQEQSLRTNYIKFNIDKTVDSPLCRMCAEKGETVSHIVSECSKLAQREYKRRHDNVARYVHWKLSEKVGLERGKEWYNHKPEACVENEEYKILWDMMIQCDQHIQARKPDIVFMNKKKKELKIIDIAIPGDIRVREKEMEKIEKYQPLKDELARLWGLKKVKIIPVVIGALGVVSKKFEGYMKECDDNIRLDVMQKTTLLGTARILRKVLSTEGER

SEQ ID NO: 15989 - protein, 1140 aa, Morbakka virulenta
MSVKMSNQINENNGVNEAGATCEGLSPGRCSPDQQRGPGRHHTTAKRKWNKELNVAVMECYFLSDPVNEDGKPMRGYRQRMHRVWKERGLFDISEQNLCDQARSIRKNELLSEVEIEMIKRSVLEKETATDFVVNIEDVDQDNDVAQSQSELDVDLRDDVNLPEVPVEFDDEHNAERTEEQQQIIDQICAIMKETDKPFFPGLKKADRKKLANITNSVNEVITHIKTNTITETNDLIFATSIYIAGKLGLRTPTNERRTPKEPWWKRRIKKSIDEIRKHINILKRKKNGENVRRNKYSALEQKYRIKTKGINLVIEELNQRLIAKSHKLRRYDERIHQFRLNRTFSQDQKGVYQKLNGSEKDEKVVPDAEESKAFWSDIWGKEKKHNSEAEWLQKLKEEKKDVQQDNLMISELLLKEQVKRISNWKAPGPDGVQGYWLKHLTTLHSRIAHQMNELVNGNESIPVWLTKGRTVLCQKDPSKGNDVGNFRPISCLPLMWKLMTSIISDNIYKYLEENEMLPDEQKGCRRRSRGTKDQLIIDKAIMKECKRRHKNLAMAWIDYRKAYDMIPHSWIIECLKLVNVSENIIKFITESMEKWETVLTACGETLCEVDIRRGIFQGDSLSPLLFVLCMIPLSSILRKMGAGYTLGTVKVNHLLFMDDLKLFSKNENEIDSLVSTVHAFSRDIGMEFGFQKCGVLVLKRGKVIKSEGLSLTDGNIIKEVDQNGYKYLGIIESDKIKEDIVKESFQKEYLRRVRLILKSKLHGRNKVTAINTWAVSLMRYGAGIINWTKNELEKVDRRTRKLMTMHKSLNPKSDVARLYVKRKEGGRGLISVEKCVRAEENNLAWYVLNSREEMLQMVKNQGLLKTEECKDPEAFKREGKVEMMREWKEKRLHGQFLEENGAVDWDKTWGWLSKGDLKSTTEALICSAQEQSLRTNYLKYHIEKSAESPLCRMCFERGESVSHVVSECSKLAQKEYKRRHDNMARYVHWAMCRTAGLERANEWYNHKPDGCSENEEHKLLWDMMIQCDQHIEARKPDIVMINKRTKEAKIIDIAIPGDKRVNVKETEKIEKYQPLKDEIARLWKLKKVKVIPVVIGALGKVSKKLESHLKDCDENIKMEVVQKTALLGSVRILRKVLSS

SEQ ID NO: 15990 - protein, 1140 aa, Morbakka virulenta
MSVKMSDKINENNGVNEAGTTCEGLSPGRWSPDQQRGPGRHHTTAKRKWNKELNVAVMECYFLSDPVNENGKPMRGYRQRMHRVWKERGLFDISEQNLCDQARSIRKNELLSEVEIEMIKRSVLEKETETDFVVNIEDVDQDNDVAQSQSELDVDLRDDVNLPEVPIEFDDEHNAERTEEQQQIIDQICAIMKETDKPFFPGLKKADRKKLANITNSVNEVITHIKTNTITETNDLIFATSIYIAGKLGLRTPTNERRTPKEPWWKRRIKKSIDEIRKHINILKRKKNGENVRRNKYSALEQKYRIKTKGINLVIEELNQRLIAKSHKLRRYDERIHQFRLNRTFSQDQKGVYQKLNGSEKDEKVVPDAEESKAFWSDIWGKEKKHNSEAEWLQKLKEEKKDVQQDNLMISELLLKEQVKRISNWKAPGPDGVQGYWLKHLTTLHSRIAHQMNELVNGNESIPVWLTKGRTVLCQKDPSKGNDVGNFRPISCLPLMWKLMTSIISDNIYKYLEENEMLPDEQKGCRRRSRGTKDQLIIDKAIMKECKRRHKNLAMAWIDYRKAYDMIPHSWIIECLKLVNVSENIIKFITESMEKWETVLTACGETLCEVDIRRGIFQGDSLSPLLFVLCMIPLSSILRKMGAGYTLGTVKVNHLLFMDDLKLFSKNENEIDSLVSTVHAFSRDIGMEFGFQKCGVLVLKRGKVITSEGLSLTDGNIIKEVDQNGYKYLGIIESDKIKEDIVKESFQKEYLRRVRLILKSKLHGRNKVTAINTWAVSLMRYGAGIINWTKNELEKVDRRTRKLMTMHKSLNPKSDVARLYVKRKEGGRGLISVEKCVRAEENNLAWYVLNSREEMLQMVKNQGLLKTEECKDPEAFKREGKVEMMREWKEKRLHGQFLEENGAVDWDKTWGWLSKGDLKSTTEALICSAQEQSLRTNYLKYHIEKSAESPLCRMCFERGESVSHVVSECSKLAQKEYKRRHDNMARYVHWAMCRTAGLERANEWYNHKPDGCSENEEHKLLWDMMIQCDQHIEARKPDIVMINKRTKEAKIIDIAIPGDKRVNVKETEKIEKYQPLKDEIARLWKLKKVKVIPVVMGALGMVSKKLESHLKDCDENTKMEVVQKTALLGSVRILRKVLSS

SEQ ID NO: 15991 - protein, 1099 aa, Morbakka virulenta
MSVKMSNQINENNGVNEAGATCEGLWPGRCSPDQQQGPGHHHTTAKRKWNKELNVAVMECYFLSDPVNEDGKPMRGYRQRMHRVWKERGLFDISEQNLCDQARSIRKNELLSEVEIEMIKRSVLEKETATDFVVNIEDVDQDNDVAQSQSELDVDLRDDVNLPEVPVEFDDEHNAERTEEQQQIIDQICAIMKETDKPFFPGLKKADRKKLANITNSVNEVITHIKTNTITETNDLIFATSIYIAGKLGLRTPTKERRTPKEPWWKRRIKKSIDEIRKHINILKRKKNGENVRRNKYSALEQKYRIKTKGINLVIEELNQRLIAKSHKLRRYDERIHQFRLNRTFSQDQKGVYQKLNGSEKDEKVVPDAEESKAFWSDIWGKEKKHNSEAEWLQKLKEEKKDVQQDNLMISELLLKEQVKRISNWKAPGPDGVQGYWLKHLTTLHSRIAHQMNELVNGNESIPVWLTKGRTVLCQKDPSKGNDVGNFRPISCLPLMWKLMTSIISDNIYKYLEENEMLPDEQKGCRRRSRGTKDQLIIDKAIMKECKRRHKNLAMAWIDYRKAYDMIPHSWIIECLKLVNVSENIIKFITESMEKWETVLTACGETLCEVDIRRGIFQGDSLSPLLFVLCMIPLSSILRKMGVGYTLGTVKVNHLLFMDDLKLFSKNENEIDSLVSTVHAFSRDIGMEFGFQKCGVLVLKRGKVITSEGLSLTDGNIIKEVDQNGYKYLGIIESDKIKEDIVKESFQKEYLRRVRLILKSKLHGRNKVTAINTWAVSLMRYGAGIINWTKNELEKVDRRTRKLMTMHKSLNPKSDVARLYVKRKEGGRGLISVEKCVRAEENNLAWYVLNSREEMLQMVKNQGLLKTEECKDPEAFKREGKVEMMREWKEKRLHGQFLEENGAVDWDKTWGWLSKGDLKSTTEALICSAQEQSLRTNYLKYHIEKSAESPLCRMCFERGESVSHVVSECSKLAQKEYKRRHDNMARYVHWAMCRTAGLERANEWYNHKPDGCSENEEHKLLWDMMIQCDQHIEARKPDIVMINKRTKEAKIIDIAIPGDKRVNVKETEKIAKYQPLKDKIARLWKLRKVKVIPVVIGAL

SEQ ID NO: 15992 - protein, 1140 aa, Morbakka virulenta
MSVKMSNQINENNGVNEAGATCEGLSPGRCSPDQQRGPGRHHTTAKRKWNKELNVAVMECYFLSDPVNEDGKPMRGYRQRMHRVWKERGLFDISEQNLCDQARSIRKNELLSEVEIEMIKRSVLEKETETDFVVNIEDVDQDNDVAQSQSELDVDLRDDVNLPEVPVEFDDEHNAERTEEQQQIIDQICAIMKETDKPFFPGLKKADRKKLANITNSVNEVITHIKTNTITETNDLIFATSIYIAGKLGLRTPTNERRTPKEPWWKRRIKKSIDEIRKHINILKRKKNGENVRRNKYSALEQKYRIKTKGINLVIEELNQRLIAKSHKLRRYDERIHQFRLNRTFSQDQKGVYQKLNGSEKDEKVVPDAEESKAFWSDIWGKEKKHNSEAEWLQKLKEEKKDVQQDNLMISELLLKEQVKRISNWKAPGPDGVQGYWLKHLTTLHSRIAHQMNELVNGNESIPVWLTKGRTVLCQKDPSKGNDVGNFRPISCLPLMWKLMTSIISDNIYKYLEENEMLPDEQKGCRRRSRGTKDQLIIDKAIMKECKRRHKNLAMAWIDYRKAYDMIPHSWIIECLKLVNVSENIIKFITESMEKWETVLTACGETLCEVDIRRGIFQGDSLSPLLFVLCMIPLSSILRKMGAGYTLGTVKVNHLLFMDDLKLFSKNENEIDSLVSTVHAFSRDIGMEFGFQKCGVLVLKRGKVIKSEGLSLTDGNIIKEVDQNGYKYLGIIESDKIKEDIVKESFQKEYLRRVRLILKSKLHGRNKVTAINTWAVSLMRYGAGIINWTKNELEKVDRRTRKLMTMHKSLNPKSDVARLYVKRKEGGRGLISVEKCVRAEENNLAWYVLNSREEMLQMVKNQGLLKTEECKDPEAFKREGKVEMMREWKEKRLHGQFLEENGAVDWDKTWGWLSKGDLKSTTEALICSAQEQSLRTNYLKYHIEKSAESPLCRMCFERGESVSHVVSECSKLAQKEYKRRHDNMARYVHWAMCRTAGLERANEWYNHKPDGCSENEEHKLLWDMMIQCDQHIEARKPDIVMINKRTKEAKIIDIAIPGDKRVNVKETEKIEKYQPLKDEIARLWKLKKVKVIPVVIGALGKVSEKLESHLKDCDENIKMEVVQKTTLLGSVRILRKVLSL

SEQ ID NO: 15993 - protein, 1140 aa, Morbakka virulenta
MSVKMSNQINENNGVNEAGATCEGLSPGRCSPDQQRGPGRHHTTAKRKWNKELNVAVMECYFLSDPVNEDGKPMRGYRQRMHRVWKERGLFDISEQNLCDQARSIRKNELLSEVEIEMIKRSVLEKETETDFVVNIEDVDQDNDVAQSQSELDVDLRDDVNLPEVPVEFDDEHNAERTEEQQQIIDQICAIMKETDKPFFPGLKKADRKKLANITNSVNEVITHIKTNTITETNDLIFATSIYIAGKLGLRTPTKERRTPKEPWWKRRIKKSIDEIRKHINILKRKKNGENVRRNKYSALEQKYRIKTKGINLVIEELNQRLIAKSHKLRRYDERIHQFRLNRTFSQDQKGVYQKLNGSEKDEKVVPDAEESKAFWSDIWGKEKKHNSEAEWLQKLKEEKKDVQQDNLMISELLLKEQVKRISNWKAPGPDGVQGYWLKHLTTLHSRIAHQMNELVNGNESIPVWLTKGRTVLCQKDPSKGNDVGNFRPISCLPLMWKLMTSIISDNIYKYLEENEMLPDEQKGCRRRSRGTKDQLIIDKAIMKECKRRHKNLAMAWIDYRKAYDMIPHSWIIECLKLVNVSENIIKFITESMEKWETVLTACGETLCEVDIRRGIFQGDSLSPLLFVLCMIPLSSILRKMGAGYTLGTVKVNHLLFMDDLKLFSKNENEIDSLVSTVHAFSRDIGMEFGFQKCGVLVLKRGKVIKSEGLSLTDGNIIKEVDQNGYKYLGIIESDKIKEDIVKESFQKEYLRRVRLILKSKLHGRNKVTAINTWAVSLMRYGAGIINWTKNELEKVDRRTRKLMTMHKSLNPKSDVARLYVKRKEGGRGLISVEKCVRAEENNLAWYVLNSREEMLQMVKNQGLLKTEECKDPEAFKREGKVEMMREWKEKRLHGQFLEENGAVDWDKTWGWLSKGDLKSTTEALICSAQEQSLRTNYLKYHIEKSAESPLCRMCFERGESVSHVVSECSKLAQKEYKRRHDNMARYVHWAMCRTAGLERANEWYNHKPDGCSENEEHKLLWDMMIQCDQHIEARKPDIVMINKRTKEAKIIDIAIPGDKRVNVKETEKIEKYQPLKDEIARLWKLKKVKVIPVVIGVLGKVSKKLESHLKDCDENIKMEVVQKTALLGSVRILRKVLSS

SEQ ID NO: 15994 - protein, 1140 aa, Morbakka virulenta
MSVKMSNQINENNGVNEAGATCEGLSPGRCSPDQQRGPGRHHTTAKRKWNKELNVAVMECYFLSDPVNEDGKPMRGYRQRMHRVWKERGLFDISEQNLCDQARSIRKNELLSEVEIEMIKRSVLEKETATDFVVNIEDVDQDNDVAQSQSELDVDLRDDVNLPEVPVEFDDEHNAERTEEQQQIIDQICAIMKETDKPFFPGLKKADRKKLANITNSVNEVITHIKTNTITETNDLIFATSIYIAGKLGLRTPTNERRTPKEPWWKRRIKKSIDEIRKHINILKRKKNGENVRRNKYSALEQKYRIKTKGINLVIEELNQRLIAKSHKLRRYDERIHQFRLNRTFSQDQKGVYQKLNGSEKDEKVVPDAEESKAFWSDIWGKEKKHNSEAEWLQKLKEEKKDVQQDNLMISELLLKEQVKRISNWKAPGPDGVQGYWLKHLTTLHSRIAHQMNELVNGNESIPVWLTKGRTVLCQKDPSKGNDVGNFRPISCLPLMWKLMTSIISDNIYKYLEENEMLPDEQKGCRRRSRGTKDQLIIDKAIMKECKRRHKNLAMAWIDYRKAYDMIPHSWIIECLKLVNVSENIIKFITESMEKWETVLTACGETLCEVDIRRGIFQGDSLSPLLFVLCMIPLSSILRKMGVGYTLGTVKVNHLLFMDDLKLFSKNENEIDSLVSTVHAFSRDIGMEFGFQKCGVLVLKRGKVITSEGLSLTDGNIIKEVDQNGYKYLGIIESDKIKEDIVKESFQKEYLRRVRLILKSKLHGRNKVTAINTWAVSLMRYGAGIINWTKNELEKVDRRTRKLMTMHKSLNPKSDVARLYVKRKEGGRGLISVEKCVRAEENNLAWYVLNSREEMLQMVKNQGLLKTEECKDPEAFKREGKVEMMREWKEKRLHGQFLEENGAVDWDKTWGWLSKGDLKSTTEALICSAQEQSLRTNYLKYHIEKSAESPLCRMCFERGESVSHVVSECSKLAQKEYKRRHDNMARYVHWAMCRTAGLERANEWYNHKPDGCSENEEHKLLWDMMIQCDQHIEARKPDIVMINKRTKEAKIIDIAIPGDKRVNVKETEKIEKYQPLKDEIARLWKLKKVKVIPVVIGALGKVSKKLESHLKDCDENIKMEVVQKTALLGSVRILRKVLSS

SEQ ID NO: 15995 - protein, 1140 aa, Morbakka virulenta
MSVKMSNQINENNGVNEAGATGEGLSPGRCSPDQQRGPGRHHTTAKRKWNKELNVAVMECYFLSDPVNEDGKPMRGYRQRMHRVWKERGLFDISEQNLCDQARSIRKNELLSEVEIEMIKRSVLEKETATDFVVNIEDVDQDNDVAQSQSELDVDLRDDVNLPEVPVEFDDEHNAERTEEQQQIIDQICAIMKETDKPFFPGLKKADRKKLANITNSVNEVITHIKTNTITETNDLIFATSIYIAGKLGLRTPTKERRTPKEPWWKRRIKKSIDEIRKHINILKRKKNGENVRRNKYSALEQKYRIKTKGINLVIEELNQRLIAKSHKLRRYDERIHQFRLNRTFSQDQKGVYQKLNGSEKDEKVVPDAEESKAFWSDIWGKEKKHNSEAEWLQKLKEEKKDVQQDNLMISELLLKEQVKRISNWKAPGPDGVQGYWLKHLTTLHSRIAHQMNELVNGNESIPVWLTKGRTVLCQKDPSKGNDVGNFRPISCLPLMWKLMTSIISDNIYKYLEENEMLPDEQKGCRRRSRGTKDQLIIDKAIMKECKRRHKNLAMAWIDYRKAYDMIPHSWIIECLKLVNVSENIIKFITESMEKWETVLTACGETLCEVDIRRGIFQGDSLSPLLFVLCMIPLSSILRKMGAGYTLGTVKVNHLLFMDDLKLFSKNENEIDSLVSTVHAFSRDIGMEFGFQKCGVLVLKRGKVITSEGLSLTDGNIIKEVDQNGYKYLGIIESDKIKEDIVKESFQKEYLRRVRLILKSKLHGRNKVTAINTWAVSLMRYGAGIINWTKNELEKVDRRTRKLMTMHKSLNPKSDVARLYVKRKEGGRGLISVEKCVRAEENNLAWYVLNSREEMLQMVKNQGLLKTEECKDPEAFKREGKVEMMREWKEKRLHGQFLEENGAVDWDKTWGWLSKGDLKSTTEALICSAQEQSLRTNYLKYHIEKSAESPLCRMCFERGESVSHVVSECSKLAQKEYKRRHDNMARYVHWAMSRTAGLERANEWYNHKPDGCSENEEHKLLWDMMIQCDQHIEARKPDIVMINKRTKEAKIIDIAIPGDKRVNVKETEKIEKYQPLKDEIARLWKLKKVKVIPVVIGALGKVSKKLESHLKDCDENIKMEVVQKTALLGSVRILRKVLSS

SEQ ID NO: 15996 - protein, 1140 aa, Morbakka virulenta
MSVKMSNQINENNGVNEAGATCEGLSPGRCSPDQQRGPGRHHTTAKRKWNKELNVAVMECYFLSDPVNEDGKPMRGYRQRMHRVWKERGLFDISEQNLCDQARSIRKNELLSEVEIEMIKRSVLEKETATDFVVNIEDVDQDNDVAQSQSELDVDLRDDVNLPEVPVEFDDEHNAERTEEQQQIIDQICAIMKETDKPFFPGLKKADRKKLANITNSVNEVITHIKTNTITETNDLIFATSIYIAGKLGLRTPTNERRTPKEPWWKRRIKKSIDEIRKHINILKRKKNGENVRRNKYSALEQKYRIKTKGINLVIEELNQRLIAKSHKLRRYDERIHQFRLNRTFSQDQKGVYQKLNGSEKDEKVVPDAEESKAFWSDIWGKEKKHNSEAEWLQKLKEEKKDVQQDNLMISELLLKEQVKRISNWKAPGPDGVQGYWLKHLTTLHSRIAHQMNELVNGNESIPVWLTKGRTVLCQKDPSKGNDVGNFRPISCLPLMWKLMTSIISDNIYKYLEENEMLPDEQKGCRRRSRGTKDQLIIDKAIMKECKRRHKNLAMAWIDYRKAYDMIPHSWIIECLKLVNVSENIIKFITESMEKWETVLTACGETLCEVDIRRGIFQGDSLSPLLFVLCMIPLSSILRKMGAGYTLGTVKVNHLLFMDDLKLFSKNENEIDSLVSTVHAFSRDIGMEFGFQKCGVLVLKRGKVIKSEGLSLTDGNIIKEVDQNGYKYLGIIESDKIKEDIVKESFQKEYLRRVRLILKSKLHGRNKVTAINTWAVSLMRYGAGIINWTKNELEKVDRRTRKLMTMHKSLNPKSDVARLYVKRKEGGRGLISVEKCVRAEENNLAWYVLNSREEMLQMVKNQGLLKTEECKDPEAFKREGKVEMMREWKEKRLHGQFLEENGAVDWDKTWGWLSKGDLKSTTEALICSAQEQSLRTNYLKYHIEKSAESPLCRMCFERGESVSHVVSECSKLAQKEYKRRHDNMARYVHWAMCRTAGLERANEWYNHKPDGCSENEEHKLLWDMMIQCDQHIEARKPDIVMINKRTKEAKIIDIAIPGDKRVNVKETEKIEKYQPLKDEIARLWKLKKVKVIPVVIGALGKVSKKLESHLKDCDENIKMEVVQKTAFVGSVRIIRKVLSS

SEQ ID NO: 15997 - protein, 1014 aa, Morbakka virulenta
MEMIKRKVYDSDKNDEGFEETESEGGNAIEPDVVNADEEIDNFVADTTSSRTQEEREMIREIQEILASGEGDSYFPGFKNVDSKRSELTGKVNAIIGDIKTNSVTGTNNLIKAVTIFIRRQFGLKLVSSNLRITKKEPWWKRRINETVYELRRHINILERKRNEKLKKGKYAELENKYRINRKGLSVVIEELKQRLNAKIVKLRRYEQRIEQYRVNRLFNQDQKKVYKELNGEKRANDAVPNAEESKQFWSNIWSRRENHECDAVWLRELKEEKGEYQQDPLIITENLVKKQCKRLPNWKAPGPDLVQGYWFKRLTTLHCRIALHMNDMVNNGTDVPLWLTKGRTVLCQKDKTKGNEVGNFRPISCLPLMWKLLTGIISDVIYKYLEENSVLPNEQKGCRRNSRGTKDQLLIDRAILADSKRKQKNLAMAWVDYKKTYDMVPHSWILECMKLVNISDNIVQFVEGTMKNWKTELTACGESLGEVDIRRGIFQGDSLSPLLFVICMIPLSSVLRKMSAGYTLGDAKINNLLFMDDLKLFARSEKEVNSLVSTVHAISKDIKMEFGIQKCGVLILKRGKLSKTEGIRLCDGEVIKEVTEEGYKYLGIIEADKVKETKMKDMFIKEYFRRTRLVLKSKLNGRNKIKAINTWAVSLMRYGAGVINWRKDELNRLDRRTRKLLTMNKGMNPNSDVDRLYIKRKDGGRGLKGIANTIKSEENNLAWYLKGSTEVMLQMVKAHGHLKVEESVDPAVLKRGTENKLVQSWHEKRLHGQYIRNNKDVSWSDSLLWLKKGDLKIPTEALICSAQEQSLRANYVKFHIDKTAESPLCRMCNQRGESVTHVVSECSKLAQREYKRRHDNVARYIHWLLCRQAGLDRGNAWYNQKPEGVIENNNFKLLWDFMIQCDQHVVAKKPDIVFVDKIKREAEIIYIAVPVDSKVKEKETEKIEKYHNLNEEVTKLWNLRKAKVIPVVIGALGAVSKDCRKHLEKLTGDARLEIIQKTALLGTARILRKVLSI

SEQ ID NO: 15998 - protein, 1165 aa, Morbakka virulenta
MVRVGSSALVSGFPRDGVSRKILVVVTPYHHYLLYECEMINQVIENNGVNGTGTLCEGATPGRCPVAQQRGSGRHPATARRKWTDEVNALVIECYFMSEPVDKNGKPKRGYRRRMHRIWKDRGLFHISEQNLCNQARAIRKNEWLSAVQMEMIKRKVYDSDKNDEGFEETESEGGNAIEPDVVNADEEIENFVADTTSSRTQEEREMIREIQEILASGEGDSYFPGFKNVDRKRLSELTGKVNAIIGDIKTNSVTGTNNLIKAVTIFIGRQLGLKLASSNLRITKKEPWWKRRINETINELRRHINILERKRNDEKLKKGKYAELENKYRINRKGLSVVIEELKQRLNAKIVKLRRYEQRIEQYRVNRLFNQDQKKVYKELNGEKRANDAVPNAEESKQFWSNIWSRRENHECDAVWLRELKEEKGEYQQDPLIITENLVKKQCKRLPNWKAPGPDLVQGYWFKRLTTLHCRIALHMNDMVNNGTDVPLWLTKGRTVLCQKDKTKGNEVGNFRPISCLPLMWKLLTGIISDVIYKYLEENSVLPNEQKGCRRNSRGTKDQLLIDRAILADSKRKQKNLAMAWVDYKKAYDMVPHSWILECMKLVNISDNIVQFVEGTMKNWKTELTACGESLGEVDIRRGIFQGDSLSPLLFVICMIPLSSVLRKMSAGYTLGDAKINNLLFMDDLKLFARSEKEVNSLVSTVHAISKDIKMEFGIQKCGVLILKKGKLSKTEGIRLCDGEVIKEVTEEGYKYLGIIEADKVKETKMKDMFIKEYFRRTRLVLKSKLNGRNKIKAINTWAVSLMRYGAGVINWRKDELNRLDRRTRKLLTMNKGMNPNSDVDRLYIKRKDGGRGLKGIANTIKSEENNLAWYLKGSTEVMLQMVKAHGHLKVEESVDPAVLKRGTENKLVQSWHEKRLHGQYIRNNKDVSWSDSLLWLKKGDLKIPTEALICSAQEQSLRTNYVKFHIDKTAESPLCRMCNQRGESVMHVVSECSKLAQREYKRRHDNVARYIHWLLCRQAGLDRANAWYNQKPEGVVENNNFKLLWDFMIQCDQHVVERKPDIVFVDKIKREAAIIDIAVPGDSRVKEKETEKIEKYHNLKEEVTKLWNLRKAKVIPVVIGALGAVSKDCRKHLEKLTGDARLEIIQKTALLGTARILRKVLSI

SEQ ID NO: 15999 - protein, 1576 aa, Pardosa pseudoannulata
MFSSLLSTSATSEPQVDLPVTPTAVRSVDESSLACSSTPSDTEASHVAPTVTPLQSPERDTLCDNTSDAPRHVSFSPSLREIGTQTDSSDSESGSPMTIFNSASTPCPNANCRVGTVLHCMFPRTNILGCTETGCNRTFAPGSWTSERKQLLDHLQHWHSLHISRIAKWCRICSQRCRRSIAKHECFSDTRFYMVPVDPSRDNILRCTFCTAEFSNDALLTTHIMFLHSSQNDVAPDSEMHPTHEAIPFSHTAEEGRLDASKSTTDENDDTSNPPVCPEPNPTGADISVVVDTQPTSTPCNEQTVTNNEHENSISSSTELSDEDNQLIPSGNNSIVGDIGDTSPPAFSPTPVTNGADGSSPDSSLNSTPPRREWRPHLSDALNSSNDSDEDFIPVRNRRRRPSSVPPPRSQRTRQSENVNITRPINRSPPTRTVNSGTQQVVCDTPGDVRRIGDSLHFVFPICSAIQCTETGCRATFSGVLWTSEKQSLKRHLRNVHQLNNLNDKRWCGICGDEVSYRISSHRCLADLEIFRPSSEGPSNGPYACRWCRFTASTAIAIMNHARKHKRDDLRRRIENNTNSVSNSSSQDASPRGNTPPRIDSSQQSTLSSEVQETQDPMSTPLDQDVVLAEEADLQDEQATATLLEDPDAPSPSHEFVAVFKRILEDATDQAWPSFLAQLEQYTLFVQDFVHLPKERKTTNVVNLNNNARNPRFIQRLYKRNRRRAIRTILKDSAPTCAVPLGELQETFFPEAPTIPGLEVFNHPAPASEVVDLHNFTPEEVLSKLKAAENSAPGPDRITYQHWRSVDPDCKALATIFNIIIKHASIPDTWKESKTIFIPKKSGGDRASDWRPIALSSTIAKLFCGCIARRLSAWIETFSILSPAQKGFLPYDGCFENNFVLSKRFQDARAKRQELCILSLDMSNAFGSITHPAIFEALKSAGAGTSFTRLIEALYCNASSCIVTNEGTSEPLLINSGVRQGCPLSGLLFNITIDPLLRTLTAEDHVNVLAYADDVLLMANSPEQLQNLANKAANACELMGLSLNPAKCFSLHLSTAPTGCRPTVFSINEAAVPFLSDGEAADFLGKPIGYSVVQDPKDINALSAAANGILDSFLAPWQRIDALKTFFFPSLLYAQRTYQFPKTTWSTLDDQLRPMIKKTLSLPPRAANDYIYGDSASGLLGIPVTAEDSDIALIDGAFKLLTSKDPKILELAWDDVFHTTSARSGNDADVEEVAQFLSGKTYSTTSNPISNIWTKARMASSRLGVTWAIQHDRSVAISHLETPILNRRKVFRLLRASLRNSRTNALKSLKHQGKTAHCFTSSKASSHFHHTGEFIRFADWRFVHRARLGLVPLNGYNFDAPPEEKRCRRCNFANESLPHVLNHCMRYSDIMTKRHNVIVNRLKEAASRRWTVVRENQTIGNSTLRPDLLLEKDGHALVIDVTIPFENGVDAFQIARQEKTRKYAQLVNELKNRYKSVSFEAVIVGSLGSWDRGNDRVIARLCSRKYARLLRKLAVSDTLRASRDIYIEHLTGQRQQPSYSDRYAVAISGLITSARDGSLSSSYQNYLTQNQSTVNE

SEQ ID NO: 16000 - protein, 1079 aa, Tomocerus qinae
MDISSDPVPPDLIPSSDDLLPALDINTCYICGQSFSNDDENATLYVQCDECDGWYHVYCTNLKGYSQDEIDSISWKCTYCEESFPNVEEFLEKMRNDDCDNSPQDLNAMPNSNDSPCPICSKLYKGSRGVAIHISKSHPSEYRDSLIPMPKSNSSDENNIQNDCTSSSPLKLSKSQMILANINEELQVTNELLIPLLNNFVDDTFDHLVSKTISIIKEANQKLPGPVHPAKKFYMLRKNKSLFMKKSSSFKKCTNPQRADTRARQIRREKYNYELMQYNYYNQRKRCVNNIFHNSNSKCPISIEMLHSKFSERWSVPNDLRRSNYSSILPEDQHLVNKSFVPSISANDVSAAIGKIKSDSSSGPDGILPRTIKLTKCDEIIATIGSIMIIHNKIPESLREGKTILIHKDKGDAHDVSNWRPITISSVIRRVIEKVIEKKLRAYVSFNSFQKGFISEPGCHINTSILNGCLNKAKRDKLNLVALILDGHQAYDTTGHLHMKMTLDEALIPDSLRNLTLSLQTNNYTRIYSERKVSEPIYFKRGIFQGSSLSPIVFNLSINYVFNEVTNPIIAKEFGFTLDKNLQNLSLLGFVDDLAPLGNSRQSASKLFDLTETLLNETGYKINMKKSTAIIMENGKLNGDDLILENGNTICALKASDSIKYLGVTFSDEIVLNDNKIITNLTEKLNTLVSTPMLHPDQKINILNQYIWPIFTYSLQTTPIRKLTLDFLNKIDKIIRSSVKEIVSLPHDINNFMMYSSKKVKGLQITCARWEAYLQTFNIVNILEFVENPYVSSCRNLKNEKEICLQHLGLSTDDMQVIFNKYKQRKSVFQKRITKDMRDELRIREFIKWTKLPQKGKGVSLFSQCPSANFWIYKKDNLSYSEWTTSIKMTANVAAARAIPGRSQNNHCRINSCNEIETLGHILGFCPHGSLLRNLRHHEVRSLIADSLRDKGYIVHEEVHCTSTDDSNRRIDMIAISGCDGFIIDPTVQFESHDNQPEEVNILKKRIYDPCFPYLKSKYNIVHIETIGLMIGARGTIPKFFEDFRKRFALPNDLTKKIVISVLRGSCKILHNHLFNFKT

SEQ ID NO: 16001 - protein, 1000 aa, Tomocerus maximus
MDTTDEDDDIPSLDPNKCYLCEKSFSSDNESTRYVQCDKCDGWYHTSCTDLNDLTIPEIELLQWNCYYCTQGLPDISGFLDALRRTNSINVSPQITVTDPDTPLIDPDTPQIDPDTPLIDPDTPLIDPDSPSTDPNPMIFDPNRLPCPICKKLYKGSRGVSIHISMSHPSDYRNSLIPRSKSKDSHTNAEQDPDPSVSNPIVSKSQKILSKFNDHLQTINELLTPLINNFDDDYFNELVSKTICILKEANQKLPGPVHPASKFYNLRKKKSLFIKKSSSFKNKTNPQRSDARAKQIRREKYNYELMQYNYYNQRKKCVNNIFQDNDVICPIPIETLHSNFSDRWSHPNNLIRSNYTSISHEDQFLINESFNPLILTDEVSFAISKIKSDSSPGPDGILPRTIKLTKCASIISTIASIMLIHNKIPDSLKEGKTTLIFKKKGDIHNVSNWRPITVSSVIRRVIEKVMEKKLRTFVSFNPFQKGFVSEPGCHINTSILNGCLKKAKKDKLTFVALILDGHQAYDTTGHLHMKMTLDEAPIPDSLRDLTFTLQTNNFTRIHSNRNVSDVIYFKRGIFQGSSLSPIVFNLSINYIFNEITNPEVSQEFGFTLDKKLPNLSLLGFVDDLAPMGNSRQSASYLFSMTESLLHETGYKINTFKSTAIIIDNGKINEEDLILDNGTSIRALKSSESIKYLGVTFNDEIIIDEFKIITTLTDKLNILVGTPMIHPDQKINIINQYIWPIFTYFLQTTPIRKLTNEFLNKIDKIIRSCVKEIIFLPHDLNNSMVYSSKKVKGLQITCARWEAYLQSFNIANILENINNPYIAKVRDLKNEKNICITHLGLSNDDMQLIITKYKHRESIYKKRITKDMRDELRNREFIKWTKLPQKGKGVSLFNQCPSANFWIFNKGTLSYSEWTSSIKMTANVAAARAIPGRSLNYHCRISSCNEIETLGHILGFCPHGSLLRNLRHHEIRSIIANSLREKGYVVHEEIHCVSEDDSNRR

SEQ ID NO: 16002 - protein, 950 aa, Tomocerus minor
MEYRKSLIPSVQNKVPNQALKYNDIKDLTNNESQSQCSETNSKVNKAIQMVNEQLTEMNKIMIEFVQHFDEKRFNDSVSKVINILKEANQKLPGPRHPANRYYALRKNKKLFAKNSSSYKSSTNPERSNARARQVRKEKYNYDLMQYNYFNQRRRCVNSIFRNEDVKCPISLDDLHKNFYDRWSIPNTHTRNTYTTIANEDQKYINESFIPNISKEEILEAIKRIDVDSASGPDGILPRTIKYVRCEQLISSIANIMLLHNTIPNCLKEGKTILIYKKKGDPNDVSNWRPITISSVLRRTIEKAIEKKLRKYISFNFFQKGFVSEPGCHINSSILNGCLKKAKKDKLTFVALILDGHQAYDTTGHKHMELSLKELLIPDCLRNLTLTLQTNNSTRIYMNSKESEPIYFKRGIFQGSSLSPCVFNVAINYVFNEVTNPSIVDTYGFQLNKELPKLSILGFVDDLAPLSNSRDSAAKLFLLVESLLNETGFKINMAKSKAIIIEAGKLSTDDLNLEDDRCISSLKESETIKYLGVTFKDEIVLNECQVLTKLNEKMELLIGTPMLHSDQKLNIINQYIWPIFTYLLQTTPIERLHDSFLNKMDKAIRSTVKEILSLPHDTNNNMIYSPKKFKGLEITCTKWEAFLQTYNIVCILEKTKNPFVSCVRDLTKEKKICQGKLGLSDDDMEIITKRFNKRESLYKKKISNDVRTELRLREFSKWTALPQKGKGVSLFKQCKSANFWMFNKEGLSYSEWISSIKMTANVAAARAIPGRSQSNHCRINSCNEIETLAHILGYCPHGSLLRNIRHHDIRSIIANSFRALNYNVHEEIHCQSDDGSNRRIDMIVIRDKTGIIVDPTVQFENNDDQPEETNINKKKIYDKCIPYLKDKYNLREIETIGLMIGARGTIPSFFENFRKRFNLPKDLTKTIVISVLRGSCKILHNHLFNYNTTS

SEQ ID NO: 16003 - protein, 1500 aa, Araneus ventricosus
MTVLISESSRFFCPKCKFCAPTFNILELHNAQHHSPVFSSSVPSQNPASLHCPFCKDAFSSDVDLQAHNCTSIKRFVLPPSPGPVRNCAFCSFAVIDEATLQKHLLDRHSCKICEFKETFEVKLKTHTRDCHTCKVCSFSERPNLRLHDHTKEVHSCNLCSFVEKKRNGLRFHFKSKHGRWAPNAKFAARDLSAVLSANKKPTIVGLSSPISAESAACSSSSTGIDGSSASPQSGSSHALFCLGCAAEFSSIPLLEDHSTSCENYLSVLRAAIPDRRPLFRCSKCSFVGKDQSSLDTHHQSSHPPPAPQPDGASTLSFNVDFNHPSQSSQLPPPSAYSVPPASFRDGNSLNIVFPIVGKVLCTEEGCTADYYSPKWTIMKNNLIKHLLRHHKVKIFTSNFWCSVCEQKTGSRPSAHPCFANAPLSTPPPTPLQWPCQECEMSFTSETGLNNHVRDHKMKAILASGVQRSITVPKPPRRRVNVNASIPAEERDVADQNISDPLRTIAPLPSLPGTPPLSPDDEEEGLLAPFTRDLEKLLESDPSADTFSYFCTTIDMALVEVYSASATGPPSAAVASNGSSSGSSSQRREIDILDPKTVQTLYNKNRPRAIREITKKSGRFCDIPPATVEEYFRQAWQPNQAEEGFFPPSNISRVDVLDSPFTPSEVSKKLKKAENTAAGPDRITYLHWRSMVAAPRFLSVVFNLCLLFRRVPPAWKSSTTILIPKSGDASLPQNWRPIALSSPIYKMFTKCLAARLGDWCEKYNVLSINQKGFTPYDGVVEHNFVLQQRLLLARSRGKEICIAWLDVTNAFGAIPHGAIFEALAAINTGSVFIDIIKDIYCDSATKILTNEGPTNEIPLLSGVKQGCPISGLLFDICIDPIVRTLQGDHPVHKTLAYADDICIIAESPSELQHQLNIAFSEFSKLGLQLNPGKSTTLHVSGAAPVGSRPTQFFINDVAIKYIEEGDFHRFLGKPVGFDACPDYANLKDLSDLASHIISSKLAIWQKIDALKCFFYPSLQFALRTGQYKKEDWAELDRVIRRGLKAILNLPSNAANNILYGARKMGSFAIPIAAEDSDLYRVDTAFKLLTSKDDQVAALALFELNAVVSARFGIPSPSDQDLEKFLNGDQYRERDNAHSSIWTITRLASFRQGIYWQFDEGVPRIKFDDLTLRSSDRRRILHSLRHKLQVRRSKALIEMPNQGKVIECVAQSTASSHFLTDGKFTRFCDFKFIIPARLNLLPLKGAQTWRPASEKLCNKCNKGELETLPHVLNHCPGRSRGWQLRHDAVGDRIVKALSTRGKFLTINQPVGEDDLRPDFVFQHGKNIYIIDVTIPFENRLDSFEKARQRKIDKYAALIDFYAKSNLKAFIVPIVVGALGSWDTKNDKFLLKFMSKSFALFQKLCVSDCIKWSRDIYIEHQTGKRQFQDPRPRPQTAGHTSSSDPDAPDSQAQRSPQHSAPPISVSSQHVSTPCPQRPSPSVNAASPQISKAKHHNSVQFVS

SEQ ID NO: 16004 - protein, 958 aa, Abscondita terminalis
MSQTPRDTICSDCGVFFRGKRGLGIHRASAHPSSSIPRTASDPGTSSQGTIPNPSVGITLLEQIQTLRRSSRIVKKIPQSVRIPVAQELAKVIAKCASDNTVKAWESLLTFPLVVFDNHMANQEGAPQKQSLTVKLRSNLLKWKLEGVSAPVQSPAVRSNPRPKKNSDPEERRALQVQAKVAEGNIRSAVRLLSSSDDIAPSTPETLDALRKKHPSPTVPFTPPSNNRGHGMIVDEASVAAAIASFKPGSSGGLDGLRPQHLKDLTTRGTGQAGNDLLEALTAVINVILDGKVPESILPLLFGASLTALEKKTGGIRPIATGCTIRRLAAKLTCRSFLDELGEYLRPHQLGFGTLGGCEAVVHATRRWISSQTTGLLLKLDFSNAFNEVNRGRIFGEVAVHIPSLLPFLSQSFHAPTHLLFGEDTVSSAHGLQQGDPVSPALFSLAIHPLVLTMQSPLNLWYLDDGTLGGPGNLVFEDLGRVLASTQELGLRLNPGKCELLVMGEGEEEWVNAIATALPGIKILERKDTGLLGAPLTDDALPGALQAKIEEISLLVDRLPALPSHTALFLLKNCLAIPKLLYILRCSPTWKTPELLEEFDSRIRVGLEDILNVPLSVQSWTQASLPVAQGGLGVRATVDLAVPAFLTSVASTEELVKQMTEGMNIPEDRDREQALVSWTCSSDNATVPVTHAQRDWEAPILSKKAAASVEKATTPSDKARLLATSTKESGAWLNALPSPPLGTMLDDASLRIAVGLRLGTQLCHPHTCRCGAAVDEGGTHGLTCMKNAGRLPRHSAINDIIKRACTSVNVPSILEPPGLFRTDGKKPDGLTLMPWAQGKCLVWDATCADTLAKSYLSSTSKTPGAAAAAAESRKRGKYAAMPNHFSFCPFAVETLGPFGEAAAKLVKELGGRLRAITGEPRSTAFLTQRISLAIQRGNAASVLATVPSSSKLHEIFYI

SEQ ID NO: 16005 - protein, 980 aa, Macropis europaea
MFTTPQGRGIHHKRGHPDWNDERVNVAAVKSRWNDEEEALLARKEVELVRKGEKFINKALHLSFPERTLDSIKSHRKKPSYRNRVSELLQSLSGSLEAPTSGPSTVTEPAAPTPLACQGVDIGDFIYSLPPINTAGFNSSELDRICLLVRVASRDEIFELLSLYIRSIFPANLRKSAGKRPPSDVAMTNRKRRRMAYAKTQDLWRKNRTRCVKTILNDTSACSFPPKEQMVSYWSAIMSRDTLVAPSVEPSDLILPGLVEPILPDEIMHAYLRNGSAAGPDGVSPRMLRSIPIDVLTKLLNLLLYLGRVPSSLLESKTIFIPKKADAQFPGDFRPITVSSVLLRCFHKILANRLMKMIPLDQRQRAFRSTDGCSDNIFLLDLVLRYHHEKHKPLFVASLDVSKAFDSVSHSAIIDTLRSAGVPPSLAQYIKFVYDTGTTRLSCPDWVSDPIRPRCGVKQGDPMSPFLFNLVLDRLLKRLPTDIGADIDGVKINASAFADDLILLSSTSTGLQSLLDTTVAYLRQAGLEINTGKSFTVTLRSVPKAKKTVIDAQSKFVAGGLPFPALKRSDQWHYLGVPFTAEGRLSANPTEMLGDELTKLGKAPLKPQQRLSVLRLYVIPGLYHLLSLGNVKIGVLVKIDRQIRAAVRKWLALPHDCPNAYFHSTIQDGGLGLPSVRWTAPLQRLNRLRKLPLTSEAGSSASGAYLKSEILKAKKRVDDHGVTLDTATKIQKRWANLLYASVDGMALKNSHTIRGQHDWVGEGTRFLSGRDFVNSCRARINALPTRSRTSRGRYTDRRCRAGCSAAETLNHIAQQCHRTHAARIKRHNAITKYVERNLAANGYRVDVEPHLKTAVGLRKPDLIASLGNTALVIDAQVVGEQACLTRAHDRKVAYYGENVDLTRLVKERYACDNVHFLSCTLSCRGIWSQPSISELISKGVLKKKDVKVISSRVLIGTIACHNIFSASTRVIFHTPRTGIG

SEQ ID NO: 16006 - protein, 1058 aa, Haliclystus octoradiatus
MGDNRSLALHISQMHGGKPRVVYFCDVCENFERPSARGVGIHRNRCRGPKTRSEFQCSHCNFSSNTEQGLQVHKAVSHIAIHNETLQTKQAFKWGQNELRELATAEVMIRRDNTYQTVKYRINQYLAENTTSGRSTSQITSVRKRDAYRNLVFELQNEGCNYNHQQTTTTVSEPETTSEPTEGTVQWENSGGKPEESGKLRAVQALNMFLRLPYSGKYPTIHAKIQKYAKEESTWEDVKNEICQALPPKLFHRHRIQTRANNRRRRTFKRQPKGSEKTRKYKVLQKAMAKDRTKTIKQVLDGKFSFEQGVDQPSPSVEAVEEFYVDRLESGHRNDTSANLFPPPIHDPTTYGAFPAEEVKRALSSTKRDTAAGVDGLTLPIITEIGIPLLKAIFNIWWAKGVPIEEKLCRSILLAKGGERTVVGNWRPLTIGTLLLRLYAKCWDQRLRSNVITNNRQKAFVPVDGCYEHVRTIASAMKNAKGKNKELNLVFLDLAKAFDTVQHKSIQIALKQHSIPPEVCALVSDLYEGAKTVFTTPAGQQTRSINLRAGVKQGCPLSPLLFNMIMDDLITRLQATGCGIQFEGGKVAVMGFADDLVLLTNECSEMNMLLHICQKFFDAKSLQINATKSRSLRVLPVKDKKSRKVICGIHRWWKLNPIPPINFDTLVTYLGIELNPRGEIKIPLEKWRTWLERLKAMPLKPDQKVHALKNVVVPRMTHILRLANAGIGRLKQVDRMIREFFKSTLHLPQWTPTAWIHHKDGGGLNNTQESILKCRFKAAGKMLQSPDLVSARLAAEELDKVTSIYDRHGVPYDTTKAITDHYASKNRALLQKLSNGMALSTMADSDVKREWIWRDGKLPGKTRITCIKMLSGTLPTRLNQHRGAVTNTNGKCRGCHTEMETDLHILAKCKRTKDARSARHNEIGVCVGNHLSQQGYKVQREKTWVIHQKRLKPDITATKDGICYLIDVTAPYEKDAQLLGKRELYKDWKYKDVKIEKLQPGSGISKTIVVGIAIGAVGTITQGTRTRLRSLGIGSCAKTLQRIAMTGSARIWAIHEKF

SEQ ID NO: 16007 - protein, 974 aa, Conopomorpha cramerella
MLPSMSQSDIASLTDSSQQFLQCPECSQPRFFKGRKGLKIHSSRLHKSVPVISPPVVQSVEVAGNVVSSFSGQSSAASSSDQPLWRLVGDYKRACPVVKRVPRGARLSVATALLTCIRNTVGRNDKEAWTQLLTFAYRVLHVDKSRDNKLSLTQKIKDNCSRASHTIPDKAGGFFSGDINKRVSGKISDGDIKGAAQLLFSEDAIAPPTADTRAALQSKHPRGEPVEQLPPPPQLSDSSLEAVTEDTLRAITSFKSGSASGLDGLSPQHLKDLVCIVAGDVGQTLLLELTRLVNLMLSGSVCGEVLDVLYGANLIALNKKQGGIRPIAVGNTFRRMASKISCKYVLPELTCKFQPIQLGFGVRGGCEAAVHAVRAFLNHGSGEVLLKVDVKNAFNSINRSTILSQVKENVPQIYKYLWQCYASPSSLVYQDQLILSASGCQQGDPLGPAIFSLAIYPIIKDLCSKFNLWYLDDGTLAGNSVEVLEDLRKLSVAFSSVGLELNSSKCELYINPTFDGAQRCRILEDFEKVCPSIKVVDNSSLSLLGAPIFDEALPVFVNNQLEKFQSARIRLREVHPHMAFIIIRFCLFVPNFTYSLRCAHFWRFPALLVPIDAILRQTLAEILNCSFLEDSVWSQASLPVRHGGLGVRSVSSVALPAFLSSVHSVRDLFGNILRPSLGDVEVTGLSEAVQAWRGVAGSADLPIVSTSQRLWDEPVCKLAVENLLGAALNLADKARLLASLEVESGYWLHALPTVSTGTLLDRQTLSLAVALRLGVRTNEPHSCRCGVRVDVLGYHGLSCQRSAGRLSRHAALNDVIRRALVSVGVPAVLEPSGVSRTDGKRPDGMSLIPWTNGLPLVWDATCVDTVAACHVAPCSVSAGAAACAAEANKRRKYQCLQGYHFVPFGVETLGPWGKEAHGFFKTLKSRLIEVSGNPRAGSYFGQRVSIAVQRGNAASMLGTLPQDAGDLRDIFYIH

SEQ ID NO: 16008 - protein, 981 aa, Nilaparvata lugens
MGVFENVDTPARDAEEPDHTPPRLQVGQLRCQLSTPELAELAPSLPPTPRGPVQLFNPYATPVRANVWQGNAVPFSSLPPYGTFFAAIRDLLPAVARDEEWQSLRLSNLALSAVSGRAQPSEVLSSLSEWFHDVFPAPPAPSAPEAPRVAARPNKPRRPLPKRKIRRMEYARTQKLFRKDMSRAVRSILDGESLVDPPAMPEQGGMFEYWRELMGRESVPLPPRAVYPRQAQLADVWGPVTVAEVVRERIALSSAAGPDGVTPKLWSTVPAPLICLFFNMALCHGGFPMSLLGSRTVFIPKKGGEGRPSDFRPISVSSVAVRHLHKVLASRLYKHGLASLGQRCFGDGCAENVFVLGSLLRQVRQDPRKGMHLASLDVAKAYDSVSHAAITHALRVKGLPEELCTYIARLYAASHTSLELRGIRSAPVPVNRGVRQGDPLSPLLFAYVVDLILESCPVDVSVRLGDVSVSSLAYADDVLLFGQTKKGLALALNAFEATAQQFGLEINTRKSFTLSYVPMGHEKTFFIQSATPFQLSSGPLPQLNADSRWTYLGVEFGVAGPLHVEPLLETTLDRLTRAPLKPQQRLLALRVFLLPRLFHSLVLGRCTKGSLKRADIKVRSYVRKWLSLPPDVPVAFLHAAIRDGGLGIPNLSLDVPAMMDRRLRSLADSSLPAAQVVSRSHWAEYHRKLGATSRLLPDGSISSGSKRHRQAYWKRQLISCVDGSELREARRERASTAWLTARSLHIPGRDFLQHVRTWINALPSRIRTSRGRKVRGSASVRCRAGCPMDETGAHIIQGCFRTHGGRIKRHDAIVATLSDELGKRGCFVARENVYPTSVGPRKPDLVWIKGESSGVLDVQVISGSRPLDRTARDKEAKYANIPDLSVSIRRKHRIPGYQPMRFDTATLSWRGVWSRRSATQLREIGLPTGLLSSVTTRVLQGSHTNFSRFMTMTAIAREPTRRNRFRGRRPRPPGVVPAGIG

SEQ ID NO: 16009 - protein, 1162 aa, Nilaparvata lugens
MSGPAPPAALRQRGPTAPSVGGDPHQSPPALPPSPPPAQFQCVFCQRQFRSLRGLGVHKRSSHPVERDVELAALPDRVKVRWTDEEVRLMARDEAALTAAGEKFLNLALLRSRPERTLEGVKGQRRKAEYRALVAQATADLAAARASPCRPGPAGSPQRSPGHQHAIRRLLGQRVRELMGVYEQVDAQAPVDLPRRADQTPPRLQIPARPCQLSTPELAELAPTSPPPQARLPIQFVLPDARANELQGNVVPFTSLPPYDTFFPSIRLLLPLVMRDEEWQSLQLVEVARSALCGRAKPSETLSALSEWFHSLFPAPPAPSAPEAPRAPAKPKKPKKPKKPLSKRKIRRKEYTLTQRLFKKDMSRAVRSILDGDSLADPPAMPEQGGMFEYWRELMGRESVPLPPRASYPRQAQLADVWGPVSVAEVVRERVALSSAPGPDGVTPKQWSSVPVPLQCLFFNLVLSQGGFPMSLLGSRTVFIPKKGGEGRPSDFRPISVSSVAVRHLHKVLAGRLYKHGLASLGQRCFGDGCAENVFILGSLLRQVRQDPRKGLHVASLDVAKAYDSVSHAAITHALRVKGLPEELCIYIARLYAASHTSLELRGSRSLPVPVNRGVRQGDPLSPLLFAYVVDMILSECPVDVSVRLGDVSVSSLAYADDVLLFGETRRGLTLALNAFETTARRFGLEINTKKSFTLSYVPMGHEKTFFIQMDNPFRLTSGPLPQLDANSRWRYLGVEFGVAGPSNVDPQLATFLERLTRAPLKPQQRLLALRAFLLPRLFHSLVLGRCGKGSLKRADIQVRAAVRKWLNLPPDIPVAFFHAAIRDGGLGIPNLSLDVPAMMDKRLRSLAESSHPAARVVSRSHWADYHRRLSATSLVLEDGTLLNGSRYHRRTYWRQQLASSVDGRELREARRERASTAWLGARSLFIPGRDFIQFVRTWINALPSRIRTSRGRRVRGSASVMCRAGCQLDETGAHIIQGCYRTHGGRIKRHDAIAACLSDELRKRGCLVEREHSYNTAVGPRKPDIFWARGESAGVLDVQVVSGSRPLNRTAREKEEKYGTIPDLQMGIRRRHHLAGNQRIRIDTATLSWRGIWSRRSARQLQEIGLPRGLLTSITTRVLQGSHTNFNRFMQMTAIDTGRARRRRNRRGGPRPPGVVPEGIG

SEQ ID NO: 16010 - protein, 1195 aa, Trypoxylus dichotomus
MGREQGCRATTPAPVFFIGPRNTDKASDRGGKGPIPPRANVMAFQGAIDDDPATSMATNTVFDVELPFQRRSCSVCLHTGKGNFLALRIQDEIQHVSEYHKNCSLIFKCTGCHKQYKSKHAAECHLPKCTGQKPQEDDEFGCDLCNAAFATKRGLSQHQRLKHPLARNEARAAETATTSRATRRGKLLFSPEDLEQLFQLEVEFRGERFINKLIAERLPDKTAKQIGEKRREAAYRRFRDEKLAQLVPLPEEDPPVDPEASGEQEESLEIPPQPSSAVEIPAIEILNATQDSASPETSTWREGIIEAVLAHQLPKKAIPAEQAALIQLLKSALLYARDCDGQVPQAHIDHIYGALESHLASKGGAPRGESRKRRSPTEGPRRRPRRQYIYARTQDLYKKNPGLVAKYVREKIDWWEDGHRLPPPAEISELYTSLWGTKPAVQTPVFDDQEDGIELLDVLQPISLSDVRRRISNTKPSAAAGPDGIQRKHLSHWVTHVALQYFFNFIMCCGRQPTHWRVKNRTTLVRKDGKDGSSVQDYRPITISSLLSRLYWGLIDQRLRRVVRYSPRQKGFIAESGCYNNVHIFNELLRHSKSNNGLVVVQLDLSKAFDTIPHVAIGPALRRKGLPETVVRLVEDQYKDVHMNIQSDDKDIKICLQRGVKQGDPLSPFIFNAVIEPLLLQLEKMPGYSINGGTSVSSLAFADDLILTATNVPQARELLEYTEAYLSGLGMTISAPKCACFRIAPTKDSWYLADPGMKLSCGAAIPYADAETKLNYLGMQISPWAGISSENIKTELLATLQRVKKLALKPYQKVNLISTYLVPHYLYQLVMAVPPMTLLRCLDQELRVVIKDIYHLPQSTANGLIYCGKRDGGLGFPKLEVITVTSTLAAGYRYLNSTDPVMQALAEDTGMVTRLKRLANSVRVNWPLNSLKDIQSYKRRARKTELAGWSELNAQGKSVQSLTDDPIGNAWLYKPQLLQPCRFITALKMRTNTTANRVVLARAGPVADPNCRKCRTQKETLGHILGQCVYTKPDRIRRHDEIKEFIVAQIHKRDKRVAVTKEPVVRLPLGGNLKPDLVIENQGRISVVDVTVRHEDNDYLAQGRLDKLQKYSRLLPILQRDFGASSGEVLPVVVGTRGAMPKETVKALSELGLKDRNTLLTISLIALRSSIELYHKFMDYDGPNLRRNRELVRPD

SEQ ID NO: 16011 - protein, 1154 aa, Trypoxylus dichotomus
MAFQGAIDDDPATSMAMNTVFDVELPFQRRSCSVCLHTGKGNFLALRIQDEIQHVSEYHKNCSLIFKCTGCHKQYKSKHAAECHLPKCTGQKPQEDDEFGCNLCNAAFATKRGLSQHQRLKHPLARNEARAAETATTSRATRRGKLLFSPEDLEQLFQLEVEFRGERFINKLIAERLPDKTAKQIGEKRREAAYCRFRDEKLAQLVPLPEEDPPVDPEASGEQEESLEIPPQPSSAVEIPAIEILNATQDSASPETSTWREGIIEAVLAHQLPKKAIPAEQAALIQLLKSALLYARDCDGQVPQAHIDHIYGALESHLASKGGAQRGESRKRRSPTEGPRRRPRRQYIYARTQDLYKKNPGLVAKYVREKIDWWEDGHRLPPPAEISELYTSLWGTKPAVQTPVFDDQEDGIELLDVLQPISLSDVRRRISNTKPSAAAGPDGIQRKHLSHWVTHVALQYFFNFIMCCGRQPTHWRVKNRTTLVRKDGKDGSSVQDYRPITISSLLSRLYWGLIDQRLRRVVRYSPRQKGFIAESGCYNNVHIFNELLRHSKSNNGLVVVQLDLSKAFDTIPHVAIGPALRRKGLPETVVRLVEDQYKDVHMNIQSDDKDIKICLQRGVKQGDPLSPFIFNAVIEPLLLQLEKMPGYSINGGTSVSSLAFADDLILTATNVPQARELLEYTEAYLSGLGMTISAPKCACFRIAPTKDSWYLADPGMKLSCGAAIPYADAETKLNYLGMQISPWAGISSENIKTELLATLQRVKKLALKPYQKVNLISTYLVPHYLYQLVMAVPPMTLLRCLDQELRVVIKDIYHLPQSTANGLIYCGKRDGGLGFPKLEVITVTSTLAAGYRYLNSTDPVMQALAEDTGMVTRLKRLANSVRVNWPLNSLKDIQSYKRRARKTELAGWSELNAQGKSVQSLTDDPIGNAWLYKPQLLQPCRFITALKMRTNTTANRVVLARAGPVADPNCRKCRTQKETLGHILGQCVYTKPDRIRRHDEIKEFIVAQIHKRDKRVAVTKEPVVRLPLGGNLKPDLVIENQGRISVVDVTVRHEDNDYLAQGRLDKLQKYSRLLPILQRDFGASSGEVLPVVVGTRGAMPKETVKALSELGLKDRNTLLTISLIALRSSIELYHKFMDYDGPNLRRNRELVRPD

SEQ ID NO: 16012 - protein, 2133 aa, Tritrichomonas foetus
MDIPTYSESTPDKLSNDAILTEFRDIFSIESPISYETSHTSEQIQLFSDSLSPNLSITPSVQTKLHSLPSFSVDADSQSSDSLLSPPNYFQDRIFNNMEYNIIENPRLSPTDIYLEIQHWAGNFKINRDTGLFLRDCDIDDINYDGLLFLDEKDMGLDSTDEAESDSGAAIIAFNITDSFVSQFDSDLPNDMIFTNDDSCSSGLCSLDITSRLLNISNDATHDDLENSDNQKDISFNVFLPPTNSTSLPPIENCNPSRSIYVTDFNTNDIENSEINNNINNSNSFCKDKQILSIDFTNSSQTVTSKIIEETNDNSNDDIVPVNTTSNNISSVTSSNTPVDDSPEIKNEDIHPTSGTLPIVEFPLDEDDSLNPFPHNRNTSANSALQKIHDEFQQKLQCYDQQNMLMLLLLYQNQQMNESNKCELNQQINHMLSIIDNQNAQIQSMHYMFSQVMEHNLNHLVTQQNHIAHVGCNSVLDHRLTCNKAMDDVSTRLRSEFNDIILNQLNFQNRVIENCFFTLSQTVQTLLNQSQHPISTPHLNNKVNCDSNCMLSYAPQENMLCSCVTNVSNPQVPICSHNEQHSTQTSDGIIVSHNVHGSDDNSFRSNPNSPSGSSEDGSPPNPLPPDDSEPSQEDNQTQLKQKIYSQLSSVNSVEELNSLIHTWIEEDIIDTSLNEDDDLLMGMYKTRNYVFGGKFACPHANCFCSVNTAAKRKTHILEKHDNRNINPQISILNAILETKLVFKCNNIKLIPFFCMERDCGALFEDGESLRNHITNVHRSNSSLTTKFGWFWGQLIGIARSNNYAPGIHNFTAERLLYCCKQNDCFRTSRAAISSHIAQSTRPDHSNARVAGFGSYVIQSNLIVTNEDIDATQEASEIEHRSAPGTDVSDDGERLHDEAICSEEDHNEGTHNVSLRSDSARSSNVTGIAPSFDEDESDVLRTNDAGPDASSRLGDAVQRRNKALRWRMKYKILEESGISTPYLNKAFRSRVKKGLSDLYKNKIIPLLESYFPSNETEDCWFQFEGALFKATHILAKHTLHSIGKPKEALSKKPRLVKDYIKILNTAAQHNKDINSAVKLTKFIREYDSLLKANTDNETTRNSLGRLEDIIIHVAGSCNDEILRHFGVGDSPDTLRGFVSQSEEWRSKALEWLTDYANHLMNLKSEKITKHEIKRCQELYDDSPRKAMQRYVWPDAYPFCDIDIRNVEEHFTNDWSFSPQFQEADHDSVWHLDRIIDEEDMKQFWIDFIDEKEIMKIVQDRNPASSHGSDALSNAVLSLEPKHAVKFILILLKAIKCTKRTPDNWKHNKTILLFKKNDSSKINNWRPITVTSVIYRTVMSHIAQCFQKLNDRCTYISPEQKGFRHLVNGCFNHTAAVNELMRHCYRSGQDFLAATLDLSNAFGSINHRLIFSTMQQMGFDNAIVTIIKDFYKGTDSVISTHRGRTKPIRIRRGVKQGCPLSPILFDIAIEPLVRYVKKKSIRYGIITSNSTTTIHSAIQAYADDIVLLSNSEEGLQRLLDVVSEFSGFSCIGVNPSKCAITSYIRQNRSRVRSAFPFSIHDEEIPHIDINEFKEYLGAPIARSHVVNLLHTDRLVEELTNKINLIFKSPLRINQKVDALKRFVIPSMDFEMLTNSFRANDMIKLDKLIRSLVNKHIKQLSTPIPFFHTSWRDGGLGIQSLHERLYAFRLKQCGEVLTSTDNHTKQLFSIWLEEEERLRNIAKADDDDVSTFLDWKVKSDGSLDQSHNGTDCIFIRAFKATRKLRLELHISEDGDIIISNADNKEKFTVHSKCVMRKIVQILYKRWHSKLVSMKMKGHTFTTLYNNKISNFYFSPSPPNVNDNLLSFTIAARCNNLPTGEVISHNNETPECRLCNKQLKDTLAHRLNNCDPKKSKYTIRHNKVVQEVMASLKKASRIQFVFHENTTISLRGAPQLPPSVRNLRPDLWFVNPANGVLNIVEVTVPYGQMDDRTDCDPQSTLKLRMEEKLQKYLPLVKAVEDAINIKVNLYVIVVSSLGAVPSSTLVSLRKLLFNNKRLAEATARKISLAAIRGSALIYWNIRMNAGEIDANGSANLGDNEVNSSDDQVIDPDDTLFTDSQFATDQTNHDVVGDVSPLGEGLIHFSTSASEYDGLNDM

SEQ ID NO: 16013 - protein, 1246 aa, Strongyloides venezuelensis
MVETRRQKRDSKSMEGMKDENKMKRAKPSENTNVNSRLMKLEVMTNTIRISNSNQKNDDERCDDIRKVKVKSTLSNYKGGSEHSYKIWTNEEYKMIDEFIKICPVKNGKLQYKEVKDEFMELMKNMNNRTASRVQSEIRSRFTNKDRKIPNYVLERRDQLLEKIVEKNQKSGESKNNSHQSDEKKVEDNGKNIVVYENKSENQTFTFKKSKMRRKFDNMSIEERFTYFCNLKRIPKVRRFDPKRPWIPIKEIDLYLMKKLDPLFISMKSTLSEKGWKNTQKKAKMYFKAALLTMKTFDHTIEDMDGFKNKKSVKLKRTLKRHKKLLSKLNRDQKSNNESAKIRNMMKKNHIKNMKEFIDFQSSICKSVEQKILENEVKEENAKIRYMFNKRPSLKVLSKYKRKKVPIPVNEAVQFFSKIHEKDVNKKMPMFKEWLETIPKHEIKEDMFDLELLNECIKWSKGWKSVGPDNVQAIIYKITESGKNYIKLWIQRVLSSNLPILKTDVTGCGFMIPKKSPDDVDCNNYRVIVAANGDYKLLRSYLYRYVMQKSEDILDKYQYAGIKNIWGTADCMIRNQHIQQNLSIKEDGPKYQWYCDIKKAFDTCSGNAIRLLINRLPLSIQYKKVLMNCLEYQSVQLVNCLKPNINGKIKNTYKLNSGVQQGDSLSPLIFELLMCSTMYHIKKVSTSETPIIAFMDDMKGYSPTIDEMNKQIEVTIAVCKEMNLELSIQKCGWNKIGGELNKEDESKINEIEYPLIRNCYKYLGVEEECDNINNQNTIEKIENKIEERLVMILSSCLNTNQIIKAINTIIIPAYGYVLMQSSGKNLKELLEMAERMDKIIRTHMTVSYSNDSENRLRNKNSSLARLYMNKKTYGLNLMQIKVQVWKELMKKFVHLVFTNSLKDCFQGFYESYKKGNDNIVENFLKMCELLEIKKCKVEENKIVVDGKILDNERDARKWFNEKIELNINDELLSRWKQYMSYSKSMTEFKLQLPWMMKVPFSQGKTRKILEIQQENVPLLTHCKNNPNSPCVWCNGKSFDTALHITSQCKSQMALNCYRERHDEVLKTIANNVRLCLGAKPLNMDALRNSFDEEIKGWKIQIDKMLPYDLVHRKPDLIIYNNEYMYIWELGITTNRNRDRVKKTKYTKYCINSTINVDELNYDKVHVASNLLQVLKKEHPKKKIIYKTIVVGTTGEIDNEFESESYIPQIFNNKKKIEKLKYNVSVASVSQTEYLVRKYQACKTNKL

SEQ ID NO: 16014 - protein, 1125 aa, Strongyloides stercoralis
MKHMKNRTAARVQSEIRSRFTNKDRKIPNYVLERREELLEKVIDNSQTYNDSKNNAKEGNNIEMNETVENYNNDKENNEKQYIIFKKTRMRRKFDNMNIEERFMYFCNLKLLPKVRRFDPKRPWIPIKEIDMYLSTKLEPLMISMNSNLSEKGWKNTQKKAKLYFKAALLTMKTYDHTLEDMDGFKIKKSIKLGKLLKRQKKLLIRLGNENKNNDECAKIRNIMKKHHIKSMKELRDFQSNVCTSLEQKLHEHQIKEESAKTRYLFNKRPSLKVLCKTKKKKVPIPVNEAVQFFSKLHEQDVNKKMPMFKEWLKFIPKDEVKEDKFNLDLLNECIKWSKGWKSVGPDNVQAIIYKITNSGKNYIKLWIQKVLSSNLPILKTDVTGCGFMIPKKKPNDKDCNNYRVIVAANGDYKLLRAYLYRYVMEKSKNILDKHQYAGIKNIWGTTDCMIRNQHIQQNLAIKENGPKYQWYYDIKKAFDTCSGNAIKLLINHLSISNTYKKVLLKCLEYQSVQLVNCMKPNNKGKIKNTYKLHTGIQQGDSLSPLIFELLMCSTMYHIKKISTCDTPVLAFMDDLKGFAPTIDEMNKQIEVTKTVCKEMNLELSIQKCGWNKIGRKTLTKTEESKIEEIEYPLIRNYYKYLGIEEDYNGINNQYTMKKVENKIEEKLVMILASSLNTSQIIKAINTIIIPAYGYILIQNNNKNLKQLLEIAERMDQIIRTHMTVSYNKDSENRLRNKNSSLARLYMKKNTYGLNLMQVKVQVWKEIMKKFVHLTFTESLKDCFQGFYEMYKKGNDNLVGNFLKLCELLKIKKCNVEENKIIVDGKTLDNELMARKWFNEKIERNINDELLNKWKLYMSYAKSMTEFKLQLPWMDKVPFSQGRTRKILEIQQENVPLLTHCKNNPNSPCVWCKEQSFDTALHVTSQCKSQMALNCYRERHDEVLKTIANNIRLCLGARPLNLEDLRKSFDEDVKGWKIHFDKMLPFDLTHRKPDLIIYNKEYMYIWELGITGNRNRDRVKKTKYTKYCINSSINVDELNYDKVNVGKNLLQEIKKKYPNKKIIYKSIIVGPTGELDNDFESEITIPEIFNNKRKIEKLKYNVSVAAVSQTEYLVRKYQACKTNNL

SEQ ID NO: 16015 - protein, 1191 aa, Coccinella septempunctata
MATWKLEEIEILRKYLSEAGSNITKQDHENIRSNLPHRSLAAIKKKCLELKNNSAPNCQPNKWTQEEIQQLVIEYSNRTEQQISKRIKAIKHKFPDRSEKAIATKLRETHPNIYYMKDAPEMHNDTETIETNRAGNDEEIDQIIQLPQEEITCPTDNRLEPDFQLEENCQEPPIAVDEGLQVEFDRILNTVRKHRKRIRKFLATSENAQVIANINTILHLKINQLKELNMNQVDYRLKSKKLIYTAGLLLQTKINNKTYSPPKYLATERKILKLKDCNVRAKKIQNWKGRNLPRYLTQEAIQMKKLKMSPSQYIKSNEDRIKTLTTRLEQQKSRHETQQIRNKFRQSPSVNILEEKELAHPPKIDVVTGYFTQMYRKTMQPSNTPCLNKWLLELQKKCKDQDYQWQYDPQQISSKIDQALKSAAPWKSPGEDGIPTYLYKTLPAAKSHLEEFIIKSIKGEYIPIENDCRAEVILVHKKGDETNVANYRPIALLNADYKILTATITQMLLENVEPWIPKQQLARKHVWGTIHGMLTDKAITQNSRMKRSKHYSAWYDFQKAYDTINHSQLKRLIDRLPLTESIKKLLKNLMGLWSIRVRVGKDKTTPIYIKRGVYQGDTISPLLFILLTASIIHHITTDPRTTKETRGRFDILAFMDDFKCHTTTKKGLKILTEELRRSAAELGLVLNEDKCGFYSRTQQDLDMEDGEPPFLPEIRRGYRYLGLEQLERDTQNNFETITEKIKQLTTKICNSKLTTSQKAKLFNSTAIPSAIYVLGNIYPNEKRTTTLKRCRDLDKEIRKILVETNLKGKTSSNAHIYLPASRGGMGLWSVELEAEIQYIRRGIYLKSHPEMKETRRMYEELQRAGWRNPLSDQEAILEKYGCPPAQYNENNLKKNCAVMKKFIYEKYLEQLENEWQNNMHYGKVVAKETTRIHFPAYNSPLMDSWRWTLLHSAAEEQIHGLGGTAGKRSRCRRGCQHEETAYHVSSSCIIPAYTSRHDNVVYWVLKALLNGFCAPRHVWEKLQFGRATLNEDFHHGNRLVTIRAGGPILTEKRLHHNKPDIFIKLHQPDEIVLLEISVAHIQNYRLQEQIKRTRYEINGVEKVDSKNVHRITRDLNLVRELDAIHHCPVKLGILVIGSYGEVIRTEENEHLKNIMKSMGISEREWTILLNKCSYSVAMSTSQILMKRMKEH

SEQ ID NO: 16016 - protein, 1191 aa, Coccinella septempunctata
MATWKLEEIEILRKYLSEAGSNITKQDHENIRSNLPHRSLAAIKKKCLELKNNSAPNCQPNKWTQEEIQQLVIEYSNRTEQQISKRIKAIKHKFPDRSEKAIATKLRETHPNIYYMKNAPEMHNDTETIEANRAGNDEEIDQIIQLPQEEITCPTDNRLEPDIQLEENSQEPPIAVDEGLQVEFDRILNTVRKHRKRIRKFLATSENAQVIANINTILHLKINQLKELNMNQVDYRLKSKKLIYTAGLLLQTKINNKTYSPPKYLATERKILKLRDCNARAKKIQNWKGRNLPRYLTQEAIQMKKLKMSPSQYIKSNEDRIKTLTTRLEQQKSRHETQQIRNKFRQSPSINILEGKELPHPPKIDVVTGYFTQMYRKTVQPSNTPCLNKWLLELKKKCKDQDYQWQYDPQKISSKIDQALKSAAPWKSPGEDGIPTYLYKTLPAAKSHLEEFIIKSIKGEYIPIENDCRAEVILVHKKGDETNVANYRPIALLNADYKILTATITQMLLGNVEPWIPKQQLARKHVWGTIHGMLTDKAITQNSRMKRSKHYSAWYDFQKAYDTINHSQLKRLIDRLPLTESIKKLLKNLMGLWSIRVRVGKDKTTPIYIKRGVYQGDTISPLLFILLTASIIHHITTDPRTTKETRGRFDILAFMDDFKCHTTTKKGLKILTEELRRSAAELGLVLNEDKCGFYSRTQQDLDIEDEEPPFLPEIRRGYRYLGLEQLERDTQNNFETITENIKKLTTKICTSKLTTSQKAKLFNSTAIPSAIYVLGNIYPNEKRTTTLKRCRDLDKEIRKILVETNLKGKTSSNAHIYLPASRGGMGLWSVELEAEIQYIRRGIYLKSHPEMKETRRLYEELQRAGWRNPLSDQEAILEKYGCPPAQYNENNLKKNCAVMKKFIYEKYLEQLENEWQNNMHYGKVVAKETTRIHFPAYNSPLMDSWRWTLLHSAAEEQIHGLGGTAGKRSRCRRGCQHEETAYHVSSSCIIPAYTSRHDNVVYWVLKALLNGFGAPRHVWEKLQFGRATLNEDFHHGNRLVTIRAGGPILTEKRLHHNKPDIFIKLHQPDEIVLLEISVAHIQNYRLQEQIKRTRYEINGVEKVDSKNVHRITRDLNLVRELDAIHHCPVKLGILVIGSYGEVIRTEENEHLKNIMRSMGISEREWTILLNKCSYSVAMSTSQILMKRMKEH

SEQ ID NO: 16017 - protein, 1076 aa, Coccinella septempunctata
MKDAPEMHNDTETIETNRAGNDEEIDQIIQLPQEEITCPTDNRLEPDFQLEENCQEPPIAVDEGLQVEFDRILNTVRKHRKKIRKFLATSENAQVIANINTILHLKINQLKELNMNQVDYRLKSKKLIYTAGLLLQTKINNKTYSPPKYLATERKILKLKDCNVRAKKIQNWKGRNLPRYLTQEAIQMKKLKMSPSQYIKSNEDRIKTLTTRLEQQKSRHETQQIRNKFRQSPSINILEEKELAHPPKIDVVTGYFTQMYRKTMQPSNTPCLNKWLLELQKKCKDQDYQWQYDPQQISSKIDQALKSAAPWKSPGEDGIPTYLYKTLPAAKSHLEEFIIKSIKGEYIPIENDCRAEVILVHKKGDETNVANYRPIALLNADYKILTATITQMLLENVEPWIPKQQLARKHVWGTIHGMLTDKAITQNSRMKRSKHYSAWYDFQKAYDTINHSQLKRLIDRLPLTESIKKLLKNLMGLWSIRVRVGKDKTTPIYIKRGVYQGDTISPLLFILLTASIIHHITTDPRTTKETRGRFDILAFMDDFKCHTTTKKGLKILTEELRRSAAELGLVLNEDKCGFYSRTQQDLDMEDEEPPFLPEIRRGYRYLGLEQLERDTQNNFETITEKIKQLTTKICNSKLTTSQKAKLFNSTAIPSAIYVLGNIYPNEKRTTTLKRCRDLDKEIRKILVETNLKGKTSSNAHIYLPASRGGMGLWSVELEAEIQYIRRGIYLKSHPEMKETRRMYEELQRAGWRNPLSDQEAILEKYGCPPAQYNENNLKKNCAVMKKFIYEKYLEQLENEWQNNMHYGKVVAKETTRIHFPAYNSPLMDSWRWTLLHSAAEEQIHGLGGTAGKRSRCRRGCQHEETAYHVSSSCIIPAYTSRHDNVVYWVLKALLNGFGAPRHVWEKLQFGRATLNEDFHHGNRLVTIRAGGPILTEKRLHHNKPDIFIKLHQPDEIVLLEISVAHIQNYRLQEQIKRTRYEINGVEKVDSKNVHRITRDLNLVRELDAIHHCPVKLGILVIGSYGEVIRTEENEHLKNIMKSMGISEREWTILLNKCSYSVAMSTSQILMKRMKEH

SEQ ID NO: 16018 - protein, 1105 aa, Propylea japonica
MHYGRIVANEGKKITFPAYYLELKHSQVPKCQPSKWTHEELQRLVNEYATRNEAQIGVRLKAIKHLFPGRSEKAMATKLRETNPSVYYMRVPPENGSDTEATTVNDTGNDQIVEPPQIMEPPRIGEPPQVIEPPQEQTDSPSEDGVEHVTQEENCQDLLAADEKLSDEFNKILNTVKKNRRRIPKFVVTPDNAQIISKVNKILHQRIQQLKNKQVSKIDYRIGCKRYIYAAGLLLQQAIQKTNNSENIPKYLATERKLNKLMSCNIRAKKIQNWRGRNLPGYLVREVVQMKKLKMTPSQYIKTNEDRIIVLTARLEQQKSRYETQQLRNKFRKSPSINVLEKEKPAHPPKIEEVTKYFKELYKKTNEPSNTPCLNKWLHELEKKCKGHDYQWQCDPQQIKEKINQALKHAKPWKSPGEDGIPTSLYNILPAAKVHLEEFIVQSIRGEYQPIENDCRAEVVLIHKKGDHTEISNFRPIALLNTDYKILTATITQMLLEKVEEWIPKQQLARKHIWGTIHGMLMDKALTQTARLNRSKHYSAWYDFQKAYDSISHSQLKRLIDRLPLDKNIKRLLKNLMGLWSIRVRVGKEKTIPIYIKKGVYQGDSISPLLFILLTASIIKHIISDPKTSRETRGRYNIIAFMDDFKCHTATKKGLKILTDELRRSAKELGLVLNEDKCGYYSGGRPVQDGEDEEPSFLPEVRLKRCRDLDKEVRKILVENNLKGRTTSNAHIYIPVSIGGMGLWSIELEAEIQYLRRGIYIKTHPEMKNTMEMFEKLQHAGWRNPLSDHDAIVEKYECPIIQYDKENIPKNCSIIKAHIYKKYLEKLEEEWQNNMHYGKMVIKERDKILFPAYNSPLMDSWRWTLLHSAAEEQIHGLNGTAGRRNNCRRGCNHVETAYHVSSSCIVQAYTSRHDNIVYWVLKTLLNAFEAPKEVYEKLQFGRATLNEDFYHNNRLIMIRAGGPILTEMRLHHNKPDIMIKLPDEIVLLEISVAHLQNYRLQEKIKRTRYEVNSVERVDNNNVHKIKRDLSLVRQLEAIHHCRVNLGILVVGSYGEVVKTEEHENLKKIMRTMNVRERDWTILINKCSYSVALSTSQILMKRLKEQ

SEQ ID NO: 16019 - protein, 1005 aa, Propylea japonica
MSTSPPIDAEPPIQPDEENDESMQARSTPEIPPISMDARLSKKFYNILQKTGKTRKKIKKFFVTPDDKQKLSQVNAILEHHINSIKNKKLALAEERLSCKKCIYAAGLLLQKELVLRTENPPKYQSTERKIHKLKECNIKARRIQNWRGPNLPRNLVTEVRQMKKFKMTPSQYIINNNDRIKNLELKLEQQKSRYATQQTRTMFRNSPSINTLEAKKPAHPPNIADVSKFFTELYRKSVEPQSTPCLNKWLLKLKNNCRDQDYQWQCDPDHINTKVNEVLKLAAPWKSPGEDCIPNYIYKILPAAKSYLQEFITKSLKGEYTPIETDCRAEVILIHKKGDETETSNYRPIALLNTDYKILTGTITQMLLINVQDWIPKQQLARKNIWGTIHGMLTDKAITQTARKNRTRHYSAWYDFEKAFDSISHSQLKRLIDRLPLDGTIKKLLKNLMGMWSIRVRVGNKKTTPIYVKRGVYQGDSISPLLFVLLTASIIHHLLTEPRVARDTRGKYNVLAFMDDFKCHAATKKGLKTLTEQLKKSAEELELQLNDEKCGCFSREQSGEEDEEPSFLPEVRRGYRYLGLEQLERDTQNNFDTIAEKVKQLTTKICQSQLTTNQKSKLFNSTIVPSAVYVMGNIYPNERRTTSLKRCRDLDTEVRKILVANNIKGKTTSNAHVYMPASQGGMGLWSIELEAEIQYVRRGIYIKSHPEMEEVRGMYEKLQHAGWRNPLGDYDATVEKYGAIPERYYFENIRENCKIIKRRIYEKYFQSLEDEWQRNMHYGKVVLKEKGKILFPAYTSPLMDSWRWSLLHSAAEEQLHGLRAIAGKRGKCRRGCQQDETAYHVSSTCVIPAYSSRHDNVVYWVLKMLLGCLSAPEQTSNKLQFGKAVLNEDFQVNKRLITIRAGCKILTEKRLYHNKPDIMLKLHQPDTIILIEISIAHIQNYRLQENIKRTRYEINSVDKIDHKNVHSISRDLSLVRELEAIHHCPVHLGVLVMESFGDRRTQSP

SEQ ID NO: 16020 - protein, 1260 aa, Campodea augens
MTSNQKIIDPLVVPVKEYKCDNCPHTAYEHNDLKRHYKRTHKIDLVFKSFKCKHCDFSNRWLRTVNTHIEKAHPATAPPTPVDKQHKCKHCPLAYNTERGLINHIKYKHKAVKWVPTTATPPAASGSSPAMDTPLSRNTTPNTSRIPISVNRSATITPVGLAAAPSASHTGPPSSSVLSGVPGPSRVRAAPNVNSTRNRRAAAQSVSPPSYVLDERPGPSGQKQTSPNTVDSTPDTSLSSIAEHNISHVSSDLDEPSFVSASGQESNSSIDERDRGFTDFATPTVITQATTAESSEPPVVATEEVVSPPPQIVTPAPVRRLSRSSTAPSIPTPTRGATRVHGPPTFSEYWGNTFRDCFMWEEVELQYSRFVNCISAHLTDEDGKRNKKCNHSSNNKKLPKLAYDPEQASNIQKLYRKDRKKAFRQAVEGDSPYCDINAKDLESYFTEVWKNSNSGDPKFAQIKTKPVGQDLLLKQFRADEVRNRLFRSPNTAPGPDGIRYGLIKTLDSTGLALTHLFNRCRYFQCTPAPWNDCKTILLYKKGDKSDPANWRPLTLSNCICKLYAALISDRLSSYVESNSILNINQKGFRSYSGCTDHNFTVQTLISQLKRVKGEAAFAWLDLSNAFGTVPHNAILSSLERVGVPPEFRNIISELYTNITTSVRGSSNTKQISINRGVKQGCPLSPLLFNLVLQAAMDTVSMTYFPTVDILGEQYKYLAYADDIVIMSSPDHLQSFLNKINEVFTNTGLSLNVRKCASLHVNCRETRTAPATTYSINGAALPTMTEEDCYKYLGCPVGLFTRNSFDEIIDKVDHQVNMLSTSLLAPWQKLDALQTFILPQLDFYLKYASSVKKRLHKLDTSIRNHLKKWYNLPVRAATEFFNLPILSGGAGLVPTNVNFDIQLVLHAHQVLNSKDGKTVTLAENFLTSVVARKIGSLIPDGRDVTKYLNGSMDDALARDSGDIQNIFSQARKATRRLAAKIDIEWIETSNGVSLKININTNNMKNRKPTMAAKIKAALRSSWFNNFTTNKKSQSKTFHLLTKTHVSNHFMRNGSFTRFTDWRFIHRARLNLLPLNACNPASEDKRCRRCNYGLESVPHVLNHCMPQAKNYQDRHNNIQNRLAKAIPGRDNTIRINKSVPGLNENLRPDIVVTNDKKKTCTIVDITIPFENGSRAFTDASNLKSRKYEEVVKHYRGKGYDTNFYTFIVGSLGAWPTENYQVMKALRISNKYSNLMKKLMVSDTIKWGRDIYTEHIQGKGREA

SEQ ID NO: 16021 - protein, 1234 aa, Campodea augens
MATVKKALTEVLVPLKNLKCDACTYTVNEDHNLLKRHYKRKHNTEVTFSSYKCRHCNFVHKLLRSVKSHIEKEHPITHTSTPPSNSKVYKCNLCTSSFNTARGLSHHMRYSHKVTANPLRLASSAQAMPPRQNKTPVNTSRIPVANRSNTPVGSAVLNTKVPNTRSHLVVNEGASTSGMGNTTPLTTHPRNGTAIQPTPPPSSYVLKEGESNQQEISIGSPTLDTSTLSVADHNISHVSSDSDPSFVSVKSQEPININDTSAISVHIEHAQSPPKTPLVEVVNPPPIQNVTPHLLTRSSTAPSISTPIRVASRIQGPPSFSLYWGKTFEECILWEEVELQYNRFIDCMKAHLPEDNKTKPGRNQHRPSQANKPKKVTYDAEKASALQKLYKKDRKKAFRQATEGDSPFCNIPANKLEAYFTEVWREVEHNNIKLAPLHTQVKGQGNLLAPFSTKEVRDRLVRSPNTAPGPDGIRYGLLKLLDTTGQAVTHLINKCQEFQQVPSSWNSSNTVLIHKKGDKEDPANWRPITLSDCVYKLYAALTSDRLTNYVEANSLINISQKGFRSYSGCTDHNFAIQTMITEARRKQGEVAFAWLDLSNAFGTVPHNVLIAALKRIGIPASFQNIVSNLYANSNTCVRGATNTRPINISRGVKQGCPLSPLLFNLVIQAAMDSIHEVQFPPVRILDQNYSYLAYADDIVLVSFPEDLQAYLDKVHEVFSNLGLSTNIRKCATLHVNCTSKRTADPTIFHINGEPLPSMSEEDSYKYLGCPVGLFTRNSFDEVIDKLQVQVNMLSTSLLAPWQKLDALHTFILPQLDFYLKYASNVKKRLHKLDASIRGHLKKWFHLPVRAATEFFNLPILSGGAGLIPTNINFDIQLILYAQQVLNSKDERTVTMAENFLISVVARKIGQPLPDGRDITNYLNGSMEDGMGRDGGDVQNIFSQARKATRRLGSKVNINWIASSKGITLECKHNIPKTNKKPTLAAKIKGALRAFWFNDFTKHKTSQSKTFHLLSKTPVSNHFIRNGAFTRFCDWRFIHRARLNLLPLNACNPVSEDKRCRRCDFGLESIPHVLNHCMPQAKNYQSRHNDIQNRIVKAIPTKDKIIRVNQTIQGYDGALRPDIVVVNDKRKTCVIVDVTVPFENGSGAFTSASENKCKKYEEVVNFYRGKGYDTTFHPFIVGSLGAWPLENYGVLKSLRISRKYSNLMKKLMVSDVIRWGRDIYVQHISGQEATQ

SEQ ID NO: 16022 - protein, 970 aa, Sogatella furcifera
MECVNIDDDIYNGFKNVNSNMDSLVIVNKNETCNNNEDEGKLTSDECCPRNGDDVHEDEPENKGNTLIKNEVEISRTPDNHNTLTTESMNSKQWKIEMLKLVAGKPPGRVKREMATLLETADCMLWKLRENLVIDLDEIDELARLMQELLADKRPPKRNIQRQVKGRNRHGGSKLRNTAKRRAYARTQDLYRRNPRKLADMVVENNLGMLGEDELDTKSTQPTEQLNEMYRELWGTEQVVKDVKENKRKMREMADVMSGFHEKEVLEKVRRMKKGGAPGIDGITVKSILRNYGSCTLMAKMYTITTVCKYIPLLWRKNRTIFIPKPNKDLSLPNSWRPLTIGSVIYRVYSGLLEKRIRRNVTLNVRQRGFQPGQGCNVNCAILDCAMRISRRGRDLYGAVLDMQKAFDMVPHWAIFQALQNKGMPIEMIDLLRNIYDGCTTTIDNGMTEISLKRGVKQGDPLSALLFNVVIDGVFKEAQGETEDVCAIGYADDIVLLNNSKQGLQEQMNRVNRYINGVGLKFNKEKCRTFGITIVKRQWQEDKPKIKIDETVIEALDTDTVFTYLGVKFTIQHGMSIDANLSDMIESLKRVNETKLKPRQKLDLMFAYIAPRYYHAITIGEACKTALRKVDAEIRLLVKEVLHLYHSTPNGLLYARKRDGGLGIPLLEKQILIGEIRAGSQLRRMKHPTWEFFNKFDKRKDHLAKTLKLLGMNPDIEPTEKDIILAKQKYKEEEVQKWAALGPTGHGASAFVDNRESNIWLINERIFSDSTYINALKLRTNTLGTREALTRENKNRSVLCRRCGGEPETLGHVSGHCQKNRQDRIKRHDTIKEKLIRTIQKFDKGVKIHVEQTYTTEEGERFRPDFVIEKENATYIYDVTVREENRASLINACEEKKVKYEGIRQAIIKRKEAKEAFVVPIVIGARGALPKDTIRALRALGVTNKRGLSAISLDAITSTLAMVLKHIDME

SEQ ID NO: 16023 - protein, 1006 aa, Haematobia irritans
MNIDNICGECSRSFQTYAGLRQHIRRAHPETYNQALVEEAPQHSRRAWTQDEQAALVAIEAEMDPSNPTAIIDRLAECSTRSRDAVKKRRQRRSFVQAVARARAARLVEEDLDTSRVADSDTSSEYESAEEQAPDPAAYDPLRDAIRALQIGVEEEPLRNRILGNPGDKSALDELVRRLTEGRGRRVGSFSVAEDRYVIRGEFRQRRRRVLEFRMAQREYDRNPRGLAQRVIDGIGWEPRDVLNIREVEERYEAIFTAASGADEAAIDDAFAEVTDASEPFTREEVTMSLRAMSNDTPGPDGISLRVLRTTNMSSLLLLFNGCMLLGYTPEALKRSRTVLIPKAVSGESGATADWRPITISSILIRLMHKMLSKRLERVPICEMQRGFSRLDGCFANVAVTNAILKIMRREGRSVCLVSLDVSKAFDSVSHASIERALRRVRLDTKTTRYVLNNLQGATTTFDGGSRWVPVNRGVKQGDPISPMLFNIVLDELMVALNKYSGVMVGETSVRALAYADDILLFARNAEDAERMVEEVRQFLAARGLKINPTKSHAIRLQTVPSKKKVLVSREPIRCGEEWITAVEVSQSMRYLGAEFTPHGEKTCATHLLFTHLQRIRKAPLKPAQKLRILRDYLLPRYVAFFQQPNITRKTLKEADRKIRVFVRAVLHMNPHAHKSIIHAPVKEGGLGLMCLAERIPGIMSHRVSRLMEDDVTFRAVMEVEGAWRERIVGMVQPVSGKRENLEHHAALLNSSMTGCGGLRQVAGHRESSRWVYEPPPFWSGQDYIKAVHLRYNMLPCRAIPSNPISARRCRAQGCVRQETVCHILQACQITHADRISRHNYVQNRVAAHARRKGWDVSIERHVYCPEGLRKPDLIFSKGPRVIVSDVAVHWETDEPLAVWYERKKDYYSTAGFLARVQELYPGREVVVLPFIMGARGAWCRMNKDLVAALGLDEKKIAREAVTGVLKGGIITHAKFMRCVWAARFGPDMVFRRDGVSGRFKRQEED

SEQ ID NO: 16024 - protein, 929 aa, Ctenocephalides felis
MAKEEAALIQKGVTQINKALLLLTPGRTLEAIKGQRRSPKYKGQVAGFLSTPADQEINNSCSSDTNSDTNSDTNSDTRNELIQALSQAESKDDDKFRNSILVNICHKAKDLSPTELRMQMTQYLEEIFPSKRTSRIQSTKKKNAPEMNKRQMRRLAYKVTQQHWTKNPSKCIAYILDCKTTSTTPPPDIMVQFWTNVLTSTSNTSPNGQVARNENLSHIWKPVTSEEIKNALPARNTAPGPDGVSAKLLRSMPVDILANVLNLLLLMGRIPDRLVESYTTLIPKKDNACNPGDYRPITVSSVLTRTLNKVLARRLLNEIHIDDRQKAFQPVDGCAHNIFALDHLLRHHRHYHKHLFIASIDVAKAFDTISHAALLNTLKYYNLPHSFINYIEELYKHGWTNLRLGRWTSDPISPRCGVKQGDPLSPILFNLVINRLIETSPPEIGVRIDDKVYNILAFADDLILVASSIKGLQSLLDHAANFLSSCGLVINNSKSFTVSIKNAPHVKKSFVDNNTVFTCGGLELPALSRTDGWCYLGVPFTPEGANIGDIKSKLQIIIDKLTKAPLKPQQRLFALRTIGIPRLLHQLTLGNAKLGLLKSLDGAVRKAIKSWLRLPNDLTTAYFYAHFKDGGLSFPSLRWLVPLRRKNRLMKLNWGENEFHKLEIANCEKRLKDNNNVLSSQKQLDERWARLLHQSVDGGPLAKSSKTPSQHRWVIDGSRFLSGKDYMNCIKFRINAMPTRSRTTRGRKQDRFCRAGCNAPETLDHILQTCHRSHRQRIERHNAVCQYVKRALEKTYSHVDLEPNFKTAEGTRKPDLIAAQSGRAIVLDAQIVGGSMDMARAHKRKLEYYKNLENKVKEKYNVSTVSYNSITLNIRGVWHEESAKYLVSEKILTSDELKVISTRVLIGGLIGFSKWSRTTTIRSERQGIG

SEQ ID NO: 16025 - protein, 921 aa, Ctenocephalides felis
MAKEEVALIKKGITQINKALLTITPGRTLEAIKGQRRSPKYKGLIADFLSTPDETSNTNPCPVATDIDMRDDLTRALAIAKSRDDDKFNSSLLVNICHKAAELSPEELRKQVSEYLESTFPYERVTNPKNSKKGKAPKLNKRQQRRHEYKMTQTHWSKNPSKCISYILDCKATSTPPPPDVMVQFWSNVLTNSVDVSPDVQAARSEDLSHLWKPVSTEEVKCALPDRNTAPGPDGISARLLKSMPTDILVNLLNLLMLMGRIPDRMMESYTTLIPKKDNAEHPGDYRPITVSSVLTRTFNKVLARRLLSEVQIDSRQKAFQPIDGCAHNTLALDHLLRHHRHNNKPVFLASIDVAKAFDSISHAALINTLQYYNLPQPFTLYVKELYKHGWTRLRSGRWTSDPISPRCGVKQGDPLSPILFNLVINRMIETTPPEIGVKIEGMTYNVLAFADDLVLVAASVKGLQTLLSHAENFLASCGLRINTNKSFTVAIKNVPHVKKSFVDKDIIFKCGTQTLPAKSRVEGWTYLGVEFTPEGANIGDLKAKLQSTIEKITKAPLKPQQRLFALRTIGIPKLMHQLTLGNAKLGFLKSLDGAVRKAVRSWLRLPNDITNSYFYANSKDGGLSFPSLRWLVPLRRKNRLLKLNWGESSFHQLEIEKCDKKLMENNIVLASQEQLDERWARLLHKSVDGASLAKSSKVPSQHRWVTEGNKFLTGRDYVNCIKFRINAMPTRSRTTRGRAEDRNCRAGCNAPETLDHVLQTCHRSHRQRIERHNAVCNYVKRALEKSHSRVDWEPTFKTPEGTRKPDLIASQGQKAIVLDAQIVGSSTYMAGAHRRKIEHYKNLEDVVKLKYNVSTVVFNTITLNIRGVWHEESANFLVSEKILNKNELKVISTRAIIGGLNGFAKWSKTTTTRHEPQGIG

SEQ ID NO: 16026 - protein, 1010 aa, Ctenocephalides felis
MDRRGTSFDGQEEAALIQKGVTQINKALLLLTPGRTLEAIKGQRRSPKYKGQVAGFLSAPADQEINNSCSSDTNSDTRNELIQALSQAESKDDDKFKNSILVNICHKAKDLSPTELRMQMTQYLEEIFPSKRTSRIQSTKKKNAPEMNKRQMRRLAYKVTQQHWTKNPSKCIAYILDCKTTSTTPPPDIMVQFWTNVLTSTSNISPNSQVARNENLSHIWKPVTSEEIKNALPARNTAPGPDGVSAKLLRSMPVDILANVLNLLLLMGRIPDRLVESYTTLIPKKDNACNPGDYRPITVSSVLTRTLNKVLARRLLNEIHIDDRQKAFQPVDGCAHNIFALDHLLRHHRHYHKHLFIASIDFDTISHAALLNTLKYYNLPYSFINYIEELYKHGWTNLRLGRWTSDPISPRCGVKQGDPLSPILFNLVINRLIETSPPEIGVRIDDKVYNILAFADDLILVASSIKGLQSLLDHAANFLSSCGLVINNSKSFTVSIKNAPHVKKSFVDNNTVFTCEGLELPALSRTDGWCYLGVPFTPEGANIGDIKSKLQIIIDKLTKAPLKPQQRLFALRTIGIPRLLHQLTLGNAKLGLLKSLDGAVRKAIKSWLRLPNDLTTAYFYAHFKDGGLSFPSLRWLVPLRRKNRLMKLNWGENEFHKLEIANCEKRLKDNNNVLSSQKQLDERWARLLHQSVDGGPLAKSSKTPSQHRWVIDGSRFLSGKDYMNCIKFGINAMPTRSRTTRGRKQDRFCRAGCNAPETLDHILQTCHRSHRQRIERHNAVCQYVKRALEKTYSHVDLEPNFKTAEGTRKPDLIAAQSGRAIVLDAQIVGGSMDMARAHKRKLEYYKNLENKVKEKYNVSTVSYNSITLNIRGVWHEESAKYLVSEKILTSDELKVISTRVLIGGLIGFSKWFKPSRECVYILTGYGPFRHTLYTRGATEDDKCPFCGESETSTHMLVMCDRYDEVRRQSLFEIAGNTNLDVYLETKANYLGLVAFAARAIKTRNEVQNQS

SEQ ID NO: 16027 - protein, 1024 aa, Blattella germanica
MASTTVNQSTSSGIKPILVNCKICGKQFSNRGINIHLARSHPSSQDSHLDDSDERDTNSKISSTNTQIINNSNIPIVLNKSNSDTATLCPHCDKSFVNLHGVSIHISRAHPDIHRNILLNRQPKIAYKRRDHDNTKAEIFSTVTPTSNDLSKLKDELSKRKTTFSGTPNMDDFDQAVTCFIQLLADAINVLPGPKHPATKYYEKRKNKTNINTQRKHGTTTNPERATKRDREKRKTKYQYQLTQFNYYNQRRKAIRAVTETHKPSCKINKNLVYNYYMSHFSLENNNIRQEYISSVSESERVELNDLFPTQVSKQEVASVVSRMAVDTAPGPDHVLMRIVKDDMVMEIISLITTLMLKSGHVPSIFKQARTVLIYKKGDINNIKNWRPISICSVVRRVVERILDKRLRQYVSFNINQRGFTNSPGNLINTSLLKSILAEAKTKRSDATVVFLDISKAFDNIGHLLIRNTLNSLPIPGKLSTLIMNLQEHNSTRIEVNHEKTAPIEIHRGVMQGSPLSPALYNLATDHILNELSEDEIANHYGYHLVPGLLPLTVLGFADDTVLIAKNHHSALELTRMAVYSFKEIGLEINFDKCAIINISKGKLKQTNFPIFEDINIPCIAPDECVPYLGVNFADSCVFDPQDTLTNLKIKLDLLSSSPLLHPDQKFHIINSSICPYLIYKFQTTPLRNIPPTFLTNADIMIRGALKEILQIPMDTPDSILYSPRKYKGLGLFRAKWEAVLQQHNGLRCLNNSKNAYILNTCNIYEQSQECLRQLNVSPSTTFINEKDNFLDPQKLRTALRNEEYQKWCELSHKGKGVILYQEYSPANKWIWHHRGLSSSEWRDAIKMTCNSAAVRAVPGRSQDGNRCRRCHSEFETLSHVLGFCQHGEHLRNSRHHTIRHILADSLKKVGYITYEEVPGIATQGSTRRIDIIAFKPGSKQGYILDPTIRFEVSSTQPEEVNNEKNTIYQPTVPFYKEKYNLDAIEVIGLFIGARGTISKFFVNACKNFGIPSETIKLIGLSAL

SEQ ID NO: 16028 - protein, 1041 aa, Blattella germanica
MASTTVNQSTSSGIKPILVNCKICGKQFSNRGINIHLARSHPSSQDSYLDDSDERDTNSKISSTNTQIINNSNSPIVLNKSNSDTATLCPHCDKSFVNLHGVSIHISRAHPDIHRNILLNRQPKIAYKRRDHDNTKAEIFSTVTPTSNDLSKLKDELSKWKTTFSGTPNMDDFDQAVTCFIQLLADAINVLPGPKHPATKYYEKRKNKTNINTQRKHGTTTNPERATKRDREKRKTKYQYQLTQFNYYNQRRKAIRAVTETHKPSCKINKNLVYNYYMSHFSLENNNIRQEYISSVSESERVELNDLFPTQVSKQEVASVVSRMAVDTAPGPDHVLMRIVKDDMVMEMISLITTLMLKSGHVPSIFKQARTVLIYKKGDINNIKNWRPISICSVVRRVVERILDKRLRQYVSFNINQRGFTNSPGNLINTSLLKSVLAEAKTKRGDATVVFLDISKAFDNIGHLHLRNTLNSLPIPSKLSTLIMNLQEHNSTRIEVNHEKTASIEIHRGVMQGSPLSPALYNLATDHILNELSEDEIANHYGYHLVPGLLPLTVLGFADDTVLIAKNHHSALELTRMAVYSFKEIGLEINFDKCAIINISKGKLKQTNFPIFEDINIPCIAPDECVPYLGVNFADSCVFDPQDTLTNLKIKLDLLSSSPLLHPDQKFHIINSSICPSLIYKFQTTPLRNIPPTFLTNADIMIRGALKEILQIPMDTPDSMLYSPRKYKGLGLFRAKWEAVLQQLNGLRCLNNSKNAYILNTCNIYEQSQECLRQLNVSPSTTFINEKDNFLDPQKLRTALRNEEYQKWCELSHKGKGVILYQEYSPANKWIWHHRGLSSSEWRDAIKMTCNSAAVRAVPGRSQDGNRCRRCHSEFETLSHVLGFCQHGEHLRNSRHHTIRHILADSLKKVGYITYEEVPGIATQGSTRRIDIIAFKPGSKQGYILDPTIRFEVSSTQPEEVNNEKNTIYQPTVPFYKEKYNLDAIEVIGLFIGARGTISKFFVNACKNFGIPSETIKLIGLSALKGSIAILRYHLYSPQVH

SEQ ID NO: 16029 - protein, 929 aa, Craspedacusta sowerbii
MARDHVEAYYEALPTKKVFKWESSELEALAEKELQLVIAGEVDKINQRLHVVHPTRTAAQIATVRKRDIYRELLRKKMALHTSSSQKAKDVQHPPENVTESLVLIEECRRKLQEMVGDETQDVYEIIANDYTGNLQEGTNNWSVTKSLLFPVADQNQQQRKRRFRRYRSKPRRRPKKPTAKQQRFKVTQRLYEVNKAETIKKILDGTLDFTESKAVIAPKLAQVESFYAERLECTKGNETGPIHIGTSCSNNAFSVFSEEEVTTVINDMSSGTAPGVDNMKLKTIRKVSARVLAKILTAWWVYGVPAEEKANRTVLIPKEGDLTEVTNWRPLTIGNLLVRIYAKCWDARLRKSVAWNERQKAFCPVDGCYSNVKILQQAVKASKKKQRELNVVLLDLSKAFDSVLHQSIEKAMIRKGIPADVRQVVADLYSGAVTFVSVGGEQTRSITIRNGVKQGCPLSPFLFNLVLDELICRLEETGYGVQIENEKLCSLAFADDLVLLAPTEFETSELLRICECFFEQKCLQVNAKKSQSLRVLPVKGKVSMKVVTAPHRFWKGEPLPSIGYKHLAKYLGVQMNPRGEVVFSEKIWDDQIERLCKAPLKPYQKVAAVKEVLIPRMIHHLRLSDAGKCKLQQVDRKLRHVVKKILHLPEDTSSEWLHLTSGGGLPCLTELITKSRTKSIEKLLCSSDRVSVAAATLNRPHVTSLQAKLGVEHMSPSEMKRVFEERRRARLSCELNGVGRLTMADSVLVRSWLWDGRFASKQMITGLKILSGTLPTRLRTSRGVNDRSLKLCRHGCQAVESDLHVLSCCMKTKDAVSRRHNLIRDKLAKALKRKVGHEVQIERTWLVGQKHLRPDITVDTADERWFVGLTVPYEQSLDYLVKRENEKREGYRILTEPENGVLPHGKKASVIPIVIGCAGTVTEGTKKR

SEQ ID NO: 16030 - protein, 960 aa, Dermanyssus gallinae
MTEQDASNIASGGPGSSTHSHRITCPLCNGQYTRRGLTRHIAAKHPSASSNISTPTPTPIDNNTQQPARIIEDIQGAAKKLRLVRIVPKPVRKQVAEALTNVLLRVTADNNNDTWCALFSFAPVVLRLPPTRNDTQSLSVIIRHNLREFSNGARLSEVITPGPTQKRTFTNNRVRQTVLKLTEGDVSGAARLIGSSEVLASSTDHLTALCEKHPPAPADLDWPVPPSLPLPCTTSGEEVMAAVKSFSRSSAGGLNFIRPRLLMDLLSPTLGDTAGRLAGALAKVVDLLLWGAPPSQLLPIIFGARLFALQKTDGSVRPIACSSTLRRLAAKIACSRTRVRIGEETGPHQLGFAIPAGAEAAVHAARAYIESRTLPGVLVKLDFKNAFNTVRRDHLLKTVGTHCPQLTHYVNQAYRTASYLALQDDLIASATGLQQGDPLAPPLFCLSIKELVDSIKSPLNIWYLDDGVLGGDVDVVADDIRRVLDFRETSDLELNPRKCEIFVTGNTAQAPDLRILQALLPGCKVTHDNELELLGVPLRPEGLAHALERWQNKLKDVANNLAPLGAHRALFLLRSSFSATRITHLLRGADLTGRLDDLRPLNELTLNALETLLNLSLAPSARKQAQLPISRGGLGVPDPLVAAEPAIVSSLFQCENNAIALLDEAGICQYKEHQRRLYEELKIVCRDAPENPLSQHDWSTFLYDEAYSGLLAGAVNDSTKARLRAVAAKGFGAWLHALPSAPLGTLLDDETTRIGVGLRLGCDLVSPHQCKCGHPVDELAHHGLSCIMSAGRRARHAGINDTFGRALRSSGFPCILEPQGLSVDDGKRPDGMTLTPFSRGRMLVWDATVTDSLAPSMVGGGAISAGHAGNLAETRKLAKYASIGYPHDFQPLAFETLGGPGSLTRKLLHRVGTQLNFATGDKRSAAFLRQRLDLEVQRGNAASVRGTLLKWSQPTLYEIE

SEQ ID NO: 16031 - protein, 960 aa, Dermanyssus gallinae
MMGQDSNNIASGGLQSSVHSQRIACPLCNGQYTRRGLTRHIAAKHPSASANISTSTPTPTDNNRQQLARIIEDIQGAAKKLRLLRILPKPVRKQVAEALANVLLGVSADNNDEAWYALFSFAPVVLRLPPTRNDIQSLSVIIRHNLREFSNGLRLSEIVTPAPTKKRTFTNNRVRQTVLKLTEGDVSGAARLIGSSEVLAPSTDHLTALREKHPPAPPDLEWPAPPSLPLSCTTSGEEVVAAVKSFSRSSAGGLDFIRPRLLIDLLSPTLGDTAGRLASALAKVVDLLLWGAPPSQLLPIIFGARLFALQKKDGSVRPIACSSTLRRLAAKIACNRTRDIIGEATGPHQLGFAVPAGAEAAVHAARAFIDSRTSPGVLVKLDFKNAFNSVRRDHLLKAVATHCPQLTHHVSQAYRTASYLALPDDLIASATGLQQGDPLAPPLFCLCIKEQVDSFKSPLNIWYLDDGVLGGDVDMVADNVRRVLDFRKTLGLELNPEKCEIYVTGDTAQTPDLRILQALLPGCKVTLDNDLELLGVPLRPEGITHALEKWQKKLKEVADNLAPLGSHRALFLLRSSFSATRVTHLLRGADLTGRLDDLRPLNELTLNALDSLLNLSLAPSSRKQAQLSISKGGLGIPDPLVSAGPAIVSSLFRSENNAIALLDEAGISQFTELKRRLYEELKTVCRGAPDNPLSQHDWSTFLYDEVYRGLLASAVDDTTRARLQAVTAKGSGAWLHALPIAPLGTLLDNETTRIGAGLRLGCDLVSPHQCKCGHPVDKLAHHGLSCIMSAGTRARHAGINDTFGRALRSSGFPCILEPQGLSTDDGKRPDGMTLTPFSRGRMLVCDATVTDSLAPSMVGGGAISAGHAGNLAEARKLAKYASIGYPHEFQPLAFETLGGPGNLTRKLLHRVGEQLNLATGDKRSAAFLRQRLDLDVQRGNAASVRGTLLKWSQPTLYEIE

SEQ ID NO: 16032 - protein, 960 aa, Dermanyssus gallinae
MTEQDASNIASGGPGSSTHSHRITCPLCNGQYTRRGLTRHIAAKHPSASSNISTPTPTPIDNNTQQPARIIEDIQGAAKKLRLVRIVPKPVRKQVAEALTNVLLRVTADNNNDTWCALFSFAPVVLRLPPTRNDTQSLSVIIRHNLREFSNGARLSEIITPGPTQKRTFTNNRVRQTVLKLTEGDVSEAARLIGSSEVLASSTDHLTALCEKHPPAPADLDWPVPPSLPLPCTTSGEEVIAAVKSFSRSSAGGLDFIRPRLLMDLLSPTLGDTAGRLAGALAKVVDLLLWGAPPSQLLPIIFGARLFALQKTDGSVRPIACSSTLRRLAAKIACNRTRVRIGEETGPHQLGFAIPAGAEAAVHATRAYIESRTLPGVLVKLDFKNAFNTVRRDHLLKTVGTHCPQLTHYVNQAYRTASYLALQDDLIASATGLQQGDPLAPPLFCLSIKELVDSIKSPLNIWYLDDGVLGGDVDVVADDIRRVLDFRETSGLELNPRKCEIFVTGNTAQAPDLRILQALLPGCKVTHDNELELLGVPLRPEGLAHALERWQNKLKDVANNLAPLGAHRALFLLRSSFSATRITHLLRGADLTGRLDDLRPLNELTLNALETLLNLSLAPSARKQAQLPISRGGLGVPDPRVAAGPAIVSSLFRCENNAIALLDEAGICQYKEHQRRLYEELKIVCRDAPENPLSQHDWSTFLYDEAYSGLLAGAVNDSTKARLRAVAAKGSGAWLHALPSAPLGTLLDDETTRIGVGLRLGCDLVSPHQCKCGHPVDELAHHGLSCIMSAGRRARHAGINDTFGRALRSSGFPCILEPQGLSVDDGKRPDGMTLTPFSRGRMLVWDATVTDSLAPSMVGGGAISAGHAGNLAETRKLAKYASIGYPHEFQPLAFETLGGPGSLTRKLLHRAGTQLNLATGDKRSAAFLRQRLDLEVQRGNAASVRGTLLKWSQPTLYEIE

SEQ ID NO: 16033 - protein, 960 aa, Dermanyssus gallinae
MAEHISNNIASGESGLSTQSERIACPFCNGLYTRRGLTRHITAKHPSSSTNSSLLSPMPIDNNTQQPARIIENIQGAAKRLRLLRIVPKAVRKQVAEALTKVLLGVSADNNVIAWGALLSFVPVILRLPTTRNDAQSLSVIIRHNLREFSNGLRLAEILPPAAARTRKFTDDRVRQTILKLSEGDVSGAARLIGSSDALAPSTDHLTALRDKHPPAPPNLDWPASPGLPLPYTTSGEEVIAAVKSFSRSAAGGLDFIRPRLLMDLLSPTLGDTASRLASALAKVVDLLLWGAPPPQLLPIIFGARLFALQKKDGSVRRIACSSTLRRLAAKIACNRTRETIREAMGLHQLGFATPAGAEAAIHATRAFIDSRTLPGVLVKLDFKNAFNSVRRDYLLKAVLKHCPQLSHYFNQAYRNASCLVLPDDVITSATGLQQGDPLAPLLFCLSIKDLVDSLNSPLNVWYLDDGVLGGDADIVADDVRRVLDFRASSGLELNPEKCEICVTGSSTQTPDLDTLQTLLPGCKVTLDCDLELLGVPLRPQGLTRALAKWQNKLKDVADNLAPLGAHRALFLLRSSFSATRVTHLLRGANLTEQVDDLRTLNELTVDSLESLLNLSLAPSARKQAQLPISKGGLGIPDPLVSAGPAIVSSLFRSESNATALLDEAGIVQYNELKGRLHEELKTMCRGVPDNPLSQRDWSTFLYDEAYSSLLAGAADDSTKARLQAVAAKGSGAWLHAVPSAPLGTLLGNETTRIATGLRLGCDLVTPHQCRCGQPVDKLAHHGLSCIISAGRRARHAGINDTFSRALRSCGYPCILEPQGLSAVDGKRPDGMTLTPFSRGRMLVWDATVTDSLAPSMVGGGAVSAGYAGSLAERRKLAKYASIGYPHEFQPLAFETLGGPGNITRKLLHRVGGQLNLATGDKRSAGFLRQRLDLDVQRGNAASVRGTLLMWSQPALYEIE

SEQ ID NO: 16034 - protein, 960 aa, Dermanyssus gallinae
MAEHISNNIASGESGLSTQSERIACPFCNGLYTRRGLTRHITAKHPSSSTNSSLLSPMPIDNNTQQPARIIENIQGAAKRLRLLRIVPKAVRKQVAEALTKVLLGVSADNNVIAWGALLSFVPVILRLPTTRNDAQSLSVIIRHNLREFSNGLRLAEILPPAAARTRKFTDDRVRQTILKLSEGDVSGAARLIGSSDALAPSTDHLTALRDKHPPAPPNLDWPASPGLPLPCTTSGEEVIAAVKSFSRSAAGGLDFIRPRLLMDLLSPTLGDTASRLASALAKVVDLLLWGAPPPQLLPIIFGARLFALQKKDGSVRPIACSSTLRRLAAKIACNRTRETIRETMGLHQLGFATPAGAEAAIHATRAFIDSRTLPGILVKLDFKNAFNSVRRDYLLKAVLKHCPQLSHYFNQAYRNASCLVLPDDVIASATGLQQGDPLAPLLFCLSIKDLVDSLNSPLNVWYLDDGVLGGDADIVADDVRRVLDFRASSGLELNPEKCEIYVTGSSTQTPDLDTLQTLLPGCKVTLDCDLELLGVPLRPQGLTRALAKWQNKLKDVADNLAPLGAHRALFLLRSSFSATRVTHLLRGANLTEQVDDLRALNELTVDSLESLLNLSLAPSARKQAQLPISKGGLGIPDPLVSAGPAIVSSLFRSESNATALLDEAGIVQYNELKGRLHEELKTMCRGVPDNPLSQRDWSTFLYDEAYSSLLAGAADDSTKARLQAVAAKGSGAWLHAVPSAPLGTLLDNETTRIATGLRLGCDLVTPHQCRCGQPVDKLAHHGLSCIISAGRRARHAGINDTFSRALRSCGYPCILEPQGLSAVDGKRPDGMTLTPFSRGRMLVWDATVTDSLAPSMVGGGAVSAGYAGSLAERRKLAKYASIGYPHEFQPLAFETLGGPGNITRKLLHGVGEQLNLATGDKRSAGFLRQRLDLDVQRGNAASVRGTLLMWSQPALYEIE

SEQ ID NO: 16035 - protein, 960 aa, Dermanyssus gallinae
MAEHISNNIASGESGLSTQSERIACPFCNGLYTRRGLTRHITAKHPSSSTNSSLLSPMPIDNNTQQPSRIIENIQGAAKRLRLLRIVPKAVRKQVAEALTKVLLGVSADNNVIAWNALLSFVPVILRLPTTRNDAQSLSVIIRHNLREFSNGLRLAEILPPAAARTRKFTDDRVRQTILKLSEGDVSGAARLIGSSDALAPSTDHLTALRDKHPPAPPNLDWPASPGLPLPCTTSGEEVIVAVKSFSRSAAGGLDFIRPRLLMDLLSPTLGDTASRLASALAKVVDLLLWGAPPPQLLPIIFGARLFALQKKDGSVRPIACSSTLRRLAAKIACNRTRETIREAMGLHQLGFATPAGAEAAIHATRAFIDSRTLPGVLVKLDFKNAFNSVRRDYLLKAVLKHCPQLSHYFNQAYRNASCLVLPDDVIASATGLQQGDPLAPLLFCLSIKDLVDSLNSPLNVWYLDDGVLGGDADIVADDVRRVLDFRASSGLELNPEKCEIYVTGSSTQTPDLDTLQTLLPGCKVTLDCDLELLGVPLRPQGLTRALAKWQNKLKDVADNLAPLGAHRALFLLRSSFSATRVTHLLRGANLTEQVDDLRALNELTVDSLESLLNLSLAPSARKQAQLPISKGGLGIPDPLVSAGPAIVSSLFRSESNATALLDEAGIVQYNELKGRLHEELKTMCRGVPDNPLSQRDWSAFLYDEAYSSLLAGSADDSTKARLQAVAAKGSGAWLHAVPSAPLGTLLDNETTRIATGLRLGCDLVTPHQCRCGQPVDKLAHHGLSCIISAGRRARHAGINDTFSRALRSCGYPCILEPQGLSAVDGKRPDGMTLTPFSRGRMLVWDATVTDSLAPSMVGGGAVSAGYAGSLVETRKLAKYASIGYPHEFQPLAFETLGGPGNITRKVLHRVGEQLNLATGDKRSAGFLRQRLDLDVQRGNAASVRGTLLMWSQPALYEIE

SEQ ID NO: 16036 - protein, 960 aa, Dermanyssus gallinae
MMEQDSNNIASGGLQSSVHSQRIACPLCNGQYTRRGLTRHIAAKHPSASANISTSTPTPTDNNRQQPARIIKDIQGAAKKLRLLRILPKPVRKQVAEALANVLLGVSADNNDEAWYALFSFAPVVLRLPATRNDIQSLSVIIRHNLREFSNGLRLSEIVTPAPTKKRTFTNNRVRQTVLKLTEGDVSGAPRLIGLSEVLAPSTDHLTALREKHPPAPPDLEWPAPPSLPLSCTTSGEEVVAAVKSFSRSSAGGLDFIRPRLLIDLLSPTLGDTAGRLASALAKVVDLLLWGAPPSQLLPIIFGARLFALQKKDGSVRPIACSSTLRRLAAKIACNRTRDIIGEATGSHQLGFAVPAGAEAAVHAARAFIDSRTSPGVLVKLDFKNAFNSVRRDHLLKAVATHCPQLTHHVSQAYRTASYLALPDDLIASATGLQQGDPLAPPLFCLCIKEQVDSFKSPLNIWYLDDGVLGGDVDMVADDVRRVLDFRKTSGLELNPEKCEIYVTGDTAQTADLRILQALLPGCKVTLGNDLELLGVPLRPEGITHTLEKWQKKLKEVADNLAPLGSHRALFLLRSFFSATRVTHLLRGADLTGRLDDVRPLNELTLNAPDSLLNLSLAPSSRKQAQLPISKGGLGIPDPLVSAGPAIVSSLFRSENNAIALLDEAGISQFTELKRRLYEELKTVCRGAPDNPLSQHDWSTFLYDEVYRGLLASAVDDTTRARLQAVAAKGSGAWLHALPSAPLGTLLDNETTRIGAGLRLGCDLVSPHQCECGHPVDKLAHHGLSCIMSAGRRARHAGINDTFGRALRSSGFPCILEPQGLSTDDGKRPDGMTLTPFSRGRMLVWDATVTDSLAPSMVGGGAISAGHAGNLAEARKLAQYASIGYPHEFQPLAFETLSGPGNLTRKLLHRVGEQLNLATGDKRSAAFLRQRLDLDVQRGNAASVRGTLLKWSQPTLYEIE

SEQ ID NO: 16037 - protein, 960 aa, Dermanyssus gallinae
MAEHISNNIASGESGLSTQSERIACPFCNGLYTRRGLTRHITAKHPSSSSNLSLLSHMPIDNNTQQPARIIENIQGAAKKLRLLRIVPKAVRKQVAEALTKVLLEVSADNNDIAWGALLSFVPVILRLPTTRNDAQSLSVIIRHNLREFSNGLRLAEILPPAAARTRTFTNDRVRQTILKLSEGDVSGAARLIGSSDALAPSTDHLTALRDKHPPAPPNLDWPASPGLPLPCTTSGEEVTAAVKSFSRSAAGGLDFIRPRLLMDLLSPALGDTASRLASALAKVVDLLLWGAPPPQLLPIIFGARLFALQKKDGSVRPIACSSTLRRLAAKIACNRTRETIREAIGLHQLGFATPAGAEAAIHATRAFIDSRTLPGVLVKLDFKNAFNSLRRDYLLKAVLKHCPQLSHYFNQAYRNASCLVLPDDVIASATGLQQGDPLAPLLFCLGIKDLVDSLNSPLNVWYLDDGVLGGDADLVADDVRRVLDFRASSGLELNPEKCEIYVTGSSTQTPDLDTLQTLLPGCKVTLDCDLELLGVPLRPQGLTRALAKWQNKLKDVADNLAPLGAHRALFLLRSSFSATRVTHLLRGANLTEQVEDLRALNELTVNSLESLLNLSLAPSARKQAQLPISKGGLGIPDPLVSAGPAIVSSLFRSESNATALLDEAGIVQYNELKGRLHEELKTVCRGVPDNPLSQRDWSAFLYDEAYCSLLAGAADNSTKARLQAVAAKGSGAWLHAVPSAPLGTLLDNETTRIATGLRLGCDLVTPHQCRCGQPVDELAHHGLSCIISAGRRARHAGINDTFSRALRSCGYPCILEPQGLSAVDGKRPDGMTLTPFSRGKMLVWDATVTDSLAPSMVGGGAVSAGYAGSLAETRKLAKYASIGYPHEFQPLAFETLGGPGNITRKLLHRVGEQLNLATGDKRSAGFLRQRLDLDVQRGNAASVRGTLLMWSQPTLYEIE

SEQ ID NO: 16038 - protein, 960 aa, Dermanyssus gallinae
MMEQDSNNIASGGLQSSVHSQRIACPLCNGQYTRRGLTRHIAAKHPSASANISTSTPTPTDNNRQQPARIIEDIQGAAKKLRLLRILPKPVRKQVAEALANVLLGVSADNNDEAWYALFSFTPVVLRLPPTRNDIQSLSVIIRHNLREFSNGLRLSEIVTPAPTKKRTFTNNRVRQTVLKLTEGDVSGAARLIGSSEVLAPSTDHLTALREKHPPAPPDLEWPAPPSLPLSCTTSGEEVVAAVKSFSRSSAGGLDFIRPRLLIDLLSPTLGDTAGRLASALAKVVDLLLWGAPPSQLLPIIFGARLFALQKKDGSVRPIACSSTLRRLAAKIACNRTRDIIGEATGPHQLGFAVPAGAETAVHAARAFIDSRTSPGVLVKLDFKNAFNSVRRDHLLKAVATHCPQLTHHVSQAYRTASYLALPDDLIASATGLQQGDPLAPPLFCLCIKEQVDSFKSPLNIWYLDDGVLGGDVDMVADDVRRVLDFRKTSGLELNPEKCEIYVTGDTAQTPDLRILQALLPGCKVTLDNDLELLGVPLRPEGITHALEKWQKKLKEVADNLAPLGSHRALFLLRSSFSATRVTHLLRGADLTGRLDDLRPLNELTLNALDSLLNLSLAPSSRKQAQLPISKGGLGIPDPLVSAGPAIVSSLFRSENNAIALLDEAGISQFTELKRRLYEELKTVCRGAPDNPLSQHDWSTFLHDEVYRGLLASAVDDTTRARLRAVAAKGSGAWLHALPSAPLGTLLDNETTRIGAGLRLGCDLVSPHQCKCGHPVDKLAHHGLSCIMSAGRRARHAGINDTFGRALRSSGFPCILEPQGLSTDDGKRPDGMTLTPFSRGRMLVWDATVTDSLAPSMVGGGAISAGHAGNLAEARKLAKYASIGYPHEFQPLAFETLGGPGNLTRKLLHRVGEQLNLATGDKRSAAFLRQRLDLDVQRGNAASVRGTLLKWSQPTLYEIE

SEQ ID NO: 16039 - protein, 960 aa, Dermanyssus gallinae
MAEHISNTIASGESGLSTQSERIACPFCNGLYTRRGLTRHITAKHPSSSTNSSLLSPMPIDNNTQQPARIIENIQGAAKRLRLLRIVPKAARKQVAEALTKVLLGVSADNNVIAWGALLSFVPVILRLPTTRNDAQSLSVIIRHNLREFSNGLRLAEILPPAAARTRKFTDDRVRQTILKLSEGDVSGAARLIGSSDALAPSTDHLTALRDKHPPAPPNLDWPASPGLPLPCTTSGEEVIAAVKSFSRSAAGGLDFIRPRLLMDLLSPTLGDTASRLASALAKVVDLLLWGAPPPQLLPIIFGARLFALQKKDGSVRPIACSSTLRRLAAKIACNRTRETIREAMGLHQLGFATPAGAEAAIHATRAFIDSRTLPGVLVKLDFKNAFNSVRRDYLLKAVLKHCPQLSHYFNQAYRNASCLVLPDDVIASATGLQQGDPLAPLLFCLSIKDLVDSLNSPLNVWYLDDGVLGGDADIVADDVRRVLDFRASSGLELNPEKCEIYVTGSSTQTPDLDTLQTLLPGCKVTLDCDLELLGDPLRPQGLTRALAKWQNKLKNVADNLAPLGAHRALFLLRSSFSATRVTHLLRGANLTEQVDDLRALHELTVDSLESLLNLSLAPSARKQAQLPISKEGLGIPDPLVSAGPAIVSSLFRSESNATALLDEAGIVQYNELKGRLHEELKTMCRGVPDNPLSQRDWSAFLYDEAYSSLLAGASDDSTKARLQAVAAKGSGAWLHAVPSAPLGTLLDNETTRIATGLRLGCDLVTPHQCRCGQPVDKLAHHGLSCIISAGRRARHAGINDTFSRALRSCGYPCILEPQGLSAVDGKRPDGMTLTPFSRGRMLVWDATVTDSLAPSMVGGGAVSAGYAGSLAETRKLAKYASIGYPHEFQPLAFETLGGPGNITRKLLHRVGEQLNLATGDKRSAGFLRQRLDLDVQRGNAASVRGTLLMWSQPALYEIE

SEQ ID NO: 16040 - protein, 960 aa, Dermanyssus gallinae
MTEQDASNIASGGPGSSTHSHRITCPLCNGQYTRRGLTRHIAAKHPSASSNISTPTPTPIDNNTQQPARIIEDIQDAAKKLRLVRIVPKPVRKQVAEALTNVLLRVTADNNNDTWCALFSFAPVVLRLPPTRNDTQSLSVIIRHNLREFSNGARLSEVITPGPTQKRTFTNNRVRQTVLKLTEGDVSGAARLIGSSEVLASSTDHLTALCEKHPPAPADLDWPVPPSLPLPCTTSGEEVMAAVKSFSRSSAGGLDFIRPRLLMDLLSPTLGDTAGRLAGALAKVVDLLLWGAPPSQLLPIIFGARLFALQKTEGSVRPIACSSTLRRLAAKIACNRTRVRIGEETGPHQLGFAIPAGAEAAVHAARAYIESRTLPGVLVKLDFKNAFNTVRRDHLLKTVGTHCPQLTHYVNQAYRTASYLALQDDLIASATGLQQDDPLPPPLFCLSIKELVDSIKSPLNIWYLDDGVLGGDVDVVADDIRRVLDFRETSGLELNPRKCEIFVTGNTAQAPDLRILQALLPGCKVTHDNELELLGVPLRPEGLAHALERWQNKLKDVANNLAPLGAHRALFLLRSSFSATRITHLLRGADLTGRLDDLRPLNELTLNALETLLNLSLAPSARKQAQLPISRGGLGVPDPLVAAGPAIVSSLFRCENNAIALLDEAGICQYKEHQRRLYEELKIVCRDAPENPLSQHDWSTFLYDEAYSGLLAGAVNDSTKARLRAVAAKGSGAWLHALPSAPLGTLLDDETTRIGVGLRLECDLVSPHQCKCGHPVDELAHHGLSCIMSAGRRARHAGINDTFGRALRSSGFPCILEPQGLSVDDGKRPDGMTLTPFSRGRMLVWDATVTDSLAPSMVGGGAISAGHAGNLAETRKLAKYASIGYPHEFQPLAFETLGGPGSLTRKLLYRVGTQLNLATGDKRSAAFLRQRLDLEVQRGNAASVRGTLLKWSQPTLYEIE

SEQ ID NO: 16041 - protein, 903 aa, Dermanyssus gallinae
MPIDNNTQQPARIIENIQGAAKRLRLLRIVPKAVRKQVAEALTKVLLEVSADNNDIAWGALLSFVPVILRLPTTRNDAQSLSVIIRHNLREFSNGLRLAEILPPAAARTRTFTNDRVRQTILKLSEGDVSGAARLIGSSDALAPSTDHLTALRDKHPPAPPNLDWPASPGLPLPCTTSGEEVTAAVKSFSRSAAGGLDFIRPRLLMDLLSPTLGDTASRLASALAKVVDLLLWGAPPPQLLPIIFGARLFALQKKDGSVRPIACSSTLRRLAAKIPCNRTRETIREAIGLHQLGFATPAGAEAAIHATRAFIDSRTLPGVLVKLDFKNAFNSVRRDYLSKAVLKHCPQLSHYFNQAYRNASCLVLPDDVIASATGLQQGDPLAPLLFCLGIKDLVDSLNSPLNVWYLDDGVLGGDADINADDVRRVLDFRASSGLELNPEKCEIYVTGSSTQTPDLDTLQTLLPGCKVTLDCDLELLGVPLRPQGLTRALAKWQNKLKDVADNLAPLGAHRALFLLRSSFSATRVTHLLRGANLTEQVEDLRALNELTVNSLESLLNLSLAPSARKQAQLPISEGGLGIPDPLVSAGPAIVSSLLRSESNATALLDEAGIVQYNELKGRLHEELKTVCRGVPDNPLSQRDWSAFLYDEAYCSLLAGAADNSTKARLQAVAAKGSGAWLHAVPSAPLGTLLDNETTRIATGLRLGCDLVTPHQCRCGQPVDELAHHGLSCIISAGRRARHAGINDTFSRALRSCGYPCILEPQGLSAVDGKRPDGMTLTPFSRGKMLVWDATVTDSLAPSMVGGGAVSAGYAGSLAETRKLAKYASIGYPHEFQPLAFETLGGPGNITRKLLHRVGEQLNLATGDKRSAGFLRQRLDLDVQRGNAASVRGTLLMWSRPTLYEIE

SEQ ID NO: 16042 - protein, 959 aa, Dermanyssus gallinae
MTEQDASNIASGGPGSSTHSHRITCPLCNGQYTRRGLTRHIAAKHPSASSNRSTPTPTPIDNNTQQPARIIEDIQGAAKKLRLVRIVPKPVRKQVAEALTNVLLRVTDDNNNDTWCALFSFAPVFLRLPPTRNDTQSLSVIIRHNLREFSNGARLSEVITPGPTQKRTFTNNRVRQTVLKLPEGDVSGAARLIGSSEVLASSTDPLTALCEKHPPAPADLDWPVPPSLPLPCTTSGEEVMTAVKSFSRSSAGGLDFIRPRLLMDLLSPTLGDTAGRLAGALAKVVDLLLWGVPPSQLLPIIFGARLFALQKTDGSVRPIACSSTLRRLAAKIACNRTRVRIGEETGPHQLGFTIPAGAEAAVHAARAYIESRTLPGVLVKLDFKNAFNTVRRDHLLKTVGTHCPQLTHYVNQAYRTASYLALQDDLIASATGLQQGDPLAPPLFCLSIKELVDSIKSPLNIWYLDDGVLGGDVDVVADDIRRVLDFRETSGLELNPRKCEIFVTGNTAQAPDLRILQALLPGCKVTHDNELELLGVPLRPEGLAHALERWQNKLKDVANNLAPLGAHRALFLLRSSFSATRITHLLRGADLTGRLDDLRPLNELTLNALETLLNLSLAPSARKQAQLPISRGGLGVPDPLVAAGPAIVSSLFRCENNAIALLDEAGICQYKEHQRRLYEELKIVCRDAPENPLSQHDWSTFLYDEAYSGLLAGAVNDSTKARLRAVAAKGSGAWLHALPSAPLGTLLDDETTRIGVGLRLGCDLVSPHQCKCGHPVDELAHHGLSCIMSAGRRARHAGINDTFGRALRSSGFPCILEPQGLSVDDGKRPDGMTLTPFSRGRMLVWDATVTDSLAPSMVGGGAISAGHAGNLAETRKLAKYASIGYPHEFQPLAFETLGGPGSLTRKLLHRVGTQLNLATGERSAAFLRQRLDLEVQRGNAASVRGTLLKWSQPTLYEIE

SEQ ID NO: 16043 - protein, 960 aa, Dermanyssus gallinae
MMEQDSNDIASGGLQSSVHSQRIACPLCNGQYTRRGLTRHIAAKHPSASANISTSTPTPTDNNRQEPARIIEDIQGAAKKLRLLRILPKPVRKQVAEALANVLLGVSADNNDETWYALFSFAPVVLRLPPTRNYIQSLSVIIRHNLREFSNGLRLSEIVTPAPTKKRTFTNNRVRQTVLKLTEGDVSGAARLIGSSEVLAPSTDHLTALREKHPPAPPDLEWPAPPSLPLSCTTSGEEVVAAVKSFSRSSAGGLDFIRSRLLIDLLSPTLGDTAGRLASALAKVVDLLLWGAPPSQLLPIIFGARLFALQKKDGSVRPIACSSTLRRLAAKIACNRTRDIIGEATGPHQLGFAVPAGAEAAVHAARAFIDSRTSPGVLVKLDFKNAFNSVRRDHLLKAVATHCPQLTHHVSQAYRTASYLALPDDLIASATGLQQGDPLAPPLLCLCIKEQVDSFKSPLNIWYLDDGVLGGDVDMVADDVRRVLDFRKTSGLELNPEKCEIYVTGDTAQTPDLRILQALLPGCKVTLDNDLELLGVPLRPEAITHALEKWQKKLKEVADNLAPLGSYRALFLLRSSFSATRVTHLLRGADLTGRLDDLRQLNELTLNALDSLLNLSLAPSSRKQAQLPISKGGLGIPDPLVSAGPAIVSSLFRSENNAIALLDEAGISQFTELKRRMYEELKTVCRGAPDNPLSQHDWSTFLYDEVYRGLLASAVDDTTRARLRAVAAKVSGAWLHALPSAPLGTLLDNETTRIGAGLRLGCDLVSPHQCKCGHPVDKLAHHGLSCILSAGRRARHAGINDTFGRALRSSGFPCILEPQGLSTDDGKRPDGMTLTPFSRGRMLVWDATVTDSLAPSMVGGGAISAGHAGNLAEARKLAKYASIGYPHEFQPLAFETLGGPGNLTRKLLHRVGEQLNLATGDKRSAAFLRQRLDLDVQRGNAASVRGTLLKWSQPTLYEIE

SEQ ID NO: 16044 - protein, 914 aa, Dermanyssus gallinae
MMEQDSNNIASGGLQSSVHSQRIACPLCNGQYTRRGLTRHIAAKHPSASANISTSTPTPTDNNRQQPARIIEDIQGAAKKLRLLRILPKPVRKQVAEALANVLLGVSADNNDEAWYALFSFAPVVLRLPPTRNDIQSLSVIIRHNLREFYNGLRLSEIVTPAPTKKRTFTNNRVRQTVLKLTEGDVSGAARLIGSSEVLAPSTDHLTALREKHPPAPPDLEWPAPPSLPLSCTTSGEEVVAAVKSFSRSSAGGLDFIRPRLLIDLLSPTLGDTAGRLASALAKVVDLLLWGAPPSQLLPIIFGARLFALQKKDGSVRPIACSSTLRRLAAKIACNRTRDIIGEATGPHQLGFAVPAGAETAVHAARAFIDSRTSPGVLVKLDFKNAFNSVRRDHLLKAVATHCPQLTHHVSQAYRTASYLALPDDLIASATGLQQGDPLAPPLFCLCIKEQLDSFKSPLNIWYLDDGVLGGDVDMVADDVRRVLDFRKTSGLELNPEKCEIYVTGDTAQTPDLRILQALLPGCKVTLDNDLELLGVPLRPEGITHALEKWQKKLKEVTDNLAPLGSHRALFLLRSSFSATRVTHLLRGADLTGRLDDLRPLNELTLNALDSLLNLSLAPSSRKQAQLPISKGGLGIPDPLVSAGPAIVSSLFRSENNAIALLDEAGISQFTELKRRLYEELKTVCRGAPDNPLSQHDWSTFLHDEVYRGLLASAVDDTTRARLRAVAAKGSGAWLHALPSAPLGTLLDNETTRIGAGLRLGCDLVSPHQCKCGHPVDKLAHHGLSCIMSAGRRARHAGINDTFGRALRSSGFPCILEPQGLSTDDGKRPDGMTLTPFSRGRMLVWDATVTDSLAPSMVGGGAISAGHAGNLAEARKLAKYASIGYPHEFQPLAFETLGGPGNLTRKLSTESVSS

SEQ ID NO: 16045 - protein, 960 aa, Dermanyssus gallinae
MAEHISNNIASGESGLSTQSERIVCPFCNGLYTRRGLTRHITAKHPSSSSNLSLLSHMPIDNNTQQPARIIENIQGAAKRLRLLRIVPKAVRKQVAEALTKVLLEVSADNNDIAWGALLSFVPVILRLPTTRNDAQSLSVIIRHNLREFSNGLRLAEILPPAAARTRTFTNDRVRQTILKLSEGDVSGAARLIGSSDALAPSTDHLTALRDKHPPAPPNLDWPASPGLPLPCTTSGEEVTAAVKSFSRSAAGGLDFIRPRLLMDLLSPTLGDTASRLASALAKVVDLLLWGAPPPQLLPIIFGARLFALQKKDGSVRPIACSSTLRRLAAKVACNRTRETIREAMGLHQLGFATPAGAEAAIHATRAFIDSRTLPGVLVKLDFKNAFNSVRRDYLSKAVLKHCPQLSHYFNQAYRNASCLVLPDDVIASATGLQQGDPLAPLLFCLGIKDLVDSLNSPLNVWYLDDGVLGGDADIVADDVRRVLDFRASSGLELNPEKCEIYVTGSSTQTPDLDTLQTLLPGCKVTLDCDLELLGVPLRPQGLTRALAKCQNKLKDVADKLAPLGAHRALFLLRSSFSATRVTHLLRGANLTEQVEDLRALNELTVNSLESLLNLSLAPSARKQAQLPISKGGLGIPDPLVSAGPAIVSSLFRSESNATALLDEAGIVQYNELKGRLHEELKTVCRGVPDNPLSQRDWSAFLYDEAYCSLLAAAADNSTKARLQAVAAKGSGAWLHAVPSAPLGTLLDNETTRIATGLRLGCDLVTPHQCRCGQPVDELAHHGLSCIISAGRRARHAGINDTFSRALRSCGYPCILEPQGLSAVDGKRPDGMTLTPFSRGKMLVWDATVTDSLAPSMVGGGAVSAGYAGSLAETRKLAKYASIGYPHEFQPLAFETLGGPGNITRKLLHRVGEQLNLATGDKRSAGFLRQRLDLDVQRGNAASVRGTLLMWSQPTLYEIE

SEQ ID NO: 16046 - protein, 960 aa, Dermanyssus gallinae
MAEHISNNIASGESGLSTQSERIACPFCNGLYTRRGLTRHITAKHPSSFSNLSLLSHMPIDNNTQQPARIIENIQGAAKRLRLLRIVPKAVRKQVAEALTKVLLEVSADNNDIAWGALLSFVPVILRLPTTRNDAQSLSVIIRHNLREFSDGLRLAEILPPAAARTRTFTNDRVRQTILKLSEGDVSGAARLIGSSDALAPSTDHLTALRDKHPPAPPNLDWPASPGLPLPCTTSGEEVTAAVKSFSRSAAGGLDFIVPRLLMDLLSPALGDTASRLASALAKVVDLLLWGAPPPQLLPIIFGARLFALQKKDGSVRPIACSSTLRRLAAKIACNRTRETIREAIGLHQLGFATPAGAEAAIHATRAFIDSRTLPGVLVKLDFKNAFNSVRRDYLSKAVLKHCPQLSHYFNQAYRNASCLVLPDDVIASATGLQQGDPLAPLLFCLGIKDLVDSLNSTLNVWYLDDGVLGGDADIVADDVRRVLDFRASSGLELNPEKCEIYVTGSSTQTPDLDTLQTLLPGCKVTLDCDLELLGVPLRPQGLTRALAKWQNKLKDVADNLAPLGAHRALFLLRSSFSATRVTHLLRGANLTEQVEDLRALNELTVNSLESLLNLSLAPSARKQAQLPISKGGLGIPDPLVSAGPAIVSSLFRSESNATALLDEAGIVQYNELKGRLHEELKTVCRGVPDNPLSQRDWSAFLYDEAYCSLLAGAADNSTKARLQAVAAKGSGAWLHAVPSAPLGTLLDNETTRIATGLRLGCDLVTPHQCRCGQPVDELAHHGLSCIISAGRRARHAGINDTFSRALRSCGYPCILEPQGLSAVDGKRPDGMTLTPFSRGKMLVWDATVTDSLAPSMVGGGAVSAGYAGSLAETRKLAKYASIGYPHEFQPLAFETLGGPGNITRKLLHRVGEQLNLATGDKRSAGFLRQRLDLDVQRGNAASVRGTLLMWSRPTLYEIE

SEQ ID NO: 16047 - protein, 960 aa, Dermanyssus gallinae
MMEQDSNNIASGGLQSSVHSQRIACPLCNGQYTRRGLTRHIAAKHPSASANISTSTPTPTDNNRQQPAHIIEDIQGAAKKLRLLRILPKPVRKQVAEALANVLLGVSADNNDEAWYALFSFAPVVLRLPPTRNDIQSLSVIIRHNLREFSNGLRLSEIVTPAPTKKRTFTNNRVRQTVLKLTEGDVSGAARLIGSSEVLAPSTDHLTALREKHPPAPPDLEWPAPPSLPLSCTTSGEEVVAAVKSFSRSSAGGLDFIRPRLLIDLLSPTLGDTAGRLASALAKVVDLLLWGAPPSQLLPIIFGARLFALQKKDGSVRPIACSSTLRRLAAKIACNRTRDIIGEATGPHQLGFAVPAGAETAVHAARAFIDSRTSPGVLVKLDFKNAFNSVRRDHLLKAVATHCPQLTHHVSQAYRTASYLALPDDRIASATGLQQGDPLAPPLFCLCIKEQVDSFKSPLNIWYLDDGVLGGDVDIVADDVRRVLDFRKTSGLELNPEKCEIYVTGDTAQTPDLRILQALLPGCKVTLDNDLELLGVPLRPEGITHALEKWQKKLKEVADNLAPLGSHRALFLLRSSFSATRVTHLLRGADLTGRLDDLRPLNELTLNALDSLLNLSLAPSSRKQAQLPISKGGLGIPDPLVSAGPAIVSSLFRSENNAIALLDEAGISQFTELKRRLYEELKTVCRGAPDNPLSQHDWSTFLHDEVYRGLLASAVDDTTRARLRAVAAKGSGAWLHALPSAPLGTLLDNETTRIGAGLRLGCDLVSPHQCKCGHPVDKLAHHGLSCIMSAGRRARHAGINDTFGRALRSSGFPCILEPQGLSTDDGKRPDGMTLTPFSRGRMLVWDATVTDSLAPSMVGGGAISAGHAGNLAEARKLAKYASIGYPHEFQPLAFETLGGPGNLTRKLLHRVGEQLNLATGDKRSAAFLRQRLDLDVQRGNAASVRGTLLKWSQPTLYEIE

SEQ ID NO: 16048 - protein, 961 aa, Dermanyssus gallinae
MMQHDPNNISSGGSTGATTHSQQTACPLCNGQYTRRGLTRHIAAKHPSASLSSFATSSTPIDNNAQQTARIIEDIQGVAKRSRPLRIVPKSVRKQVTEALANVLSGVIADNNQQAWYTLFSFVPVVLRLPLSRNDSQSLSVIIRHNLREFSNGLRLADVVAPVTKKNRTFKNDRVRQTILKLTEGDVSGAARLIGSSDVLAPGTDHLAALRNKHPPAPPDLDWPDLPGIPLPCTTSGEEVIAAVKSFARSFAGGLDFIRPRLLIDLLSPTLGDTAGRLAAALAKIVDLLLWGVPPPQLRPIIFGARLFALQKKDGSVRPIACSSTLRRLAAKIACNRTRERIREAIGPHQLGFAAQAGAEAAVHAARAFIDSRSLPGVLVKLDFRNAFNSVRRDHLLKAVGAHCPQLAHHVHQAYRYSSHLVLPDDLISSVTGLQQGDPLAPPLFCLSIKELVDSLNSSLNIWYLDDGVLGGDASMVAEDIRRVLKFRQISGLELNPEKCEIYVTGDSAQAPDLRPLQALLPGCKITHDYDLELLGVPLRPQGLPRVLKKWQSVLKDVANNLTPLGAHRALFLLRSSFSATRVNHLLRGANLTGQLDDLRPLNELTLNTLESLLNLSLAPPARKQAQLPISKGGLGIPDPLISAGPAIVSSLLRSENKVIALLDEAGAVQYKDLTRRLQEELKTICSGAPDNPRSQHDWSALLHEKAYCGLLADAIDDAAKARLRAVAAKGSGAWLHALPSAPLGTLLDDETTRIGAGLRLGCDLVTPHQCKCGQPVDKLAHHGLSCVMSAGRRARHASINDTFSRALRSSGFPCILEPQGLSADDGKRPDGMTLTPFSRGRMLVWDATVTDSLAPSMVGGGAASAGYAGDLAETRKLAKYASIEYPHEFQPLAFETLGGPGNLTRELLHKVGEQLNLAAGDKRSAAFLRQRLDLDVQRGNAASVRGTLLKWCQPTLYEIE

SEQ ID NO: 16049 - protein, 958 aa, Dermanyssus gallinae
MTEQDASNIASGGPGSSTHSHRITCPLCNGQYTRRGLTRHIAAKHPSASSNISTPTPTPIDNNTQQPARIIEDIQGAAKKLRLVRIVPKPVRKQVAEALTNVLLRVTADNNNDTWCALFSFAPVVLRLPPTRNDTQSLSVIIRHNLREFSNGARLSEVITPGPTQKRTFTNNRVRQTVLKLTEGDVSGAARLIGSSEVLASSTDHLTALCEKHPPAPADLDWPVPPSLPLPCTTSGEEVMVKSFSRSSAGGLDFIRPRLLMDLLSPTLGDTAGRLAGALAKVVDLLLWGAPPSQLLPIIFGARLFALQKTDGSVRPIACSSTLRRLAAKIACNRTRVRIGEETGPHQLGFAIPAGAEAAVHAARAYIESRTLPGVLVKLDFKNAFNTVRRDHLLKTVGTHCPQLTHYVNQAYRTASYLALQDDLIASATGLQQGDPLAPPLFCLSIKELVDSIKSPLNIWYLDDGVLGGDVDVVADDIRRVLDFRETSGLELNPRKCEIFVTGNTAQAPDLRILQALLPGCKVTHDNELELLGVPLRPEGLAHALERWQNKLKDVANNLAPLGAHRALFLLRSSFSATRITHLLRGADLTGRLDDLRPLNELTLNALETLLNLSLAPSARKQAQLPISRGGLGVPDPLVAAGPAIVSSLFRCENNAIALLDEAGICQYKEHQRRLYEELKIVCRDAPENPLSQHDWSTFLYDEAYSGLLAEAVNDSTKARLRAVAAKGSGAWLHALPSAPLGTLLDDETTRIGVGLRLGCDLVSPHQCKCGHPVDELAHHGLSCIMSAGRRARHAGINDTFGRALRSSGFPCILEPQGLSVDDGKRPDGMTLTPFSRGRMLVWDATVTDSLAPSMVGGGAISAGHAGNLAETRKLAKYASIGYPHEFQPLAFETLGGPGSLTRKLLHRVGTQLNLATGDKRSAAFLRQRLDLEVQRGNAASVRGTLLKWSQPTLYEIE

SEQ ID NO: 16050 - protein, 960 aa, Dermanyssus gallinae
MAEHISNNIASGESGLSTQSERIACPFCNGLYTRRGLTRHITAKHLSSSSNLSLLSHMPIDNNTQQPARIIENIQGAAKRLRLLRIVPKAVRKQVAEALTKVLLEVSADNNDIAWGALLSFVPVILRLPTTRNDAQSLSVLIRHNLREFSNGLRLAEILPPAAARTRTFTNDRVRQTILKLSEGDVSGAARLIGSSDALAPSTDHLTALRDKHPPAPPNLDWPASPGLPLPCTTSGEEVTAAVKSFSRSAAGGLDFIRPRLLMDLLSPTLGDTASRLASALAKVVDLLLWGAPPPQLLPIIFGARLFALQKKDGSVRPIACSSTLRRLAAKIACNRTRETIREAIGLHQLGFATPAGAEAAIHATRAFIDSRTLPGVLVKLDFKNAFNSLRRDYLLKAVLKHCPQLSHYFNQAYRNASCLVLPDDVIASATGLQQGDPLAPLLFCLGIKGLVDSLNSPLNVWYLDDGVLGGDADLVADDVRRVLDFRASSGLELNPEKCEIYVTGSSTQTPDLDTLQTLLPGCKVTLDCDLELLGVPLRPQGLTRALAKWQNKLKDVADNLAPLGAHRALFLLRSSFSATRVTHLLRGANLTEQVEDLRALNELTANSLESLLNLSLAPSARKQAQLPISKGGLGIPDPLVSAGPAIVSSLFRSESNATALLDEAGIVQYNELKGRLHEELKTVCRGVPDNPLSQRDWSAFLYDEAYCSLLAGAADNSTKARLQAVAAKGSGAWLHAVPSAPLGTLLDNETTRIATGLRLGCDLVTPHQCRCGQPVDELAHHGLSCIISAGRRARHAGINDTFSRALRSCGYPCILEPQGLSAVDGKRPDGMTLTPFSRGKMLVWDATVTDSLAPSMVGGGAVSAGYAGSLAETRKLAKYASIGYPHEFQPLAFETLGGPGNITRKLLHRVGEQLNLATGDKRSAGFLRQRLDLDVQRGNAASVRGTLLMWSQPTLYEIE

SEQ ID NO: 16051 - protein, 960 aa, Dermanyssus gallinae
MAEHISNNIASGESGLSTQSERIACPFCNGLYTRRGLTRHITAKHPSSSSNLSLLSHMPIDNNTQQPARIIENIQGAAKRLRLLRIVPKAVRKQVAEALTKVLLEVSADNNDIAWGALLSFVPVILRLPTTRNDAQSLSVIIRHNLREFSNGLCLAEILPPAAARTRTFTNDRVRQTILKLSEGDVSGAARLIGSSDALAPSTDHLTALRDKHPPAPPNLDWPASPGLPLPCTTSGEEVTAAVKSFSRSAAGGLDFIRPRLLMDLLSPTLGDTASRLASALAKVVDLLLWGAPPPQLLPIIFGARLFALQKKDGSVRPIACSSTLRRLAAKIACNRTRETIREAIGLHQLGFATPAGAEAAIHATRAFIDSRTLPGVLVKLDFKNAFNSLRRDYLLKAVLKHCPQLSHYFNQAYRNASCLVLPDDVIASATGLQQGDPLAPLLFCLGIKDLVDSLNSPLNVWYLDDGVLGGDADLVADDVRRVLDFRASSGLELNPEKCEIYVTGSSTQTPDLDTLQTLLPGCKVTLDCDLELLGVPLRPQGLTRALAKWQNKLKDVADNLAPLGAHRALFLLRSSFSATRVTHLLRGANLTEQVEDLRALNELTVNSLESLLNLSLAPSARKQAQLPISKGGLGIPDPLVSAGPAIVSSLFRSESNATALLDEAGIVQYNELKGRLHEELKTVCRGVPDNPLSQRDWSAFLYDEAYCSLLAGAADNSTKARLQAVAAKGSGAWLHAVPSAPLGTLLDNETTRIATGLRLGCDLVTPHQCRCGQPVDELAHHGLSCIISAGRRARHAGINDTFSRALRSCGYPCILEPQGLSAVDGKRPDGMTLTPFSRGKMLVWDATVTDSLAPSMVGGGAVSAGYAGSLAETRKLAKYASIGYPHEFQPLAFETLGGPGNITRKLLHRVGEQLNLATGDKRSAGFLRQRLDLDVQRGNAASVRGTLLMWYQPTLYEIE

SEQ ID NO: 16052 - protein, 960 aa, Dermanyssus gallinae
MAEHISNNIASGESGLSTQSERIACPFCNGLYTRRGLTRHITAKHPSSSTNSSLLSPTPIDNNTQQPARIIENIQGAAKRLRLLRIVPKAVRKQVAEALTKVLLGVSADNNIIAWGALLSFVPVILRLPTTRNDAQSLSVIIRHNLREFSNGLRLAEILPPAAARTRKFTDDRVRQTILKLSEGDVSGAARLIGSSDALAPSTDHLTALRDKHPPAPPNLDWPASPGLPLPCTTSGEEVIAAVKSFSRSAAGGLDFIRPRLLMDLLSPTLGDTASRLASALAKVVDLLLWGAPPPQLLPIIFGARLFALQKKDGSVRPIACSSTLRRLAAKIACNRTRETIREAMGLHQLGFATPAGAEAAIHATRAFIDSRTLPGVLVKLDFKNAFNSVRRDYLLKAVLKHCPQLSHYFDQAYRNASCLVLPDDVIASATGLQQGDPLAPLLFCLSIKDLVDSLNSPLNVWYLDDGVLGGDADIVADDVRRVLDFRASSGLELNPEKCEIYVTGSSTQTPDLDTLQTLLPGCKVTLDCDLELLGVPLRPQGLTRALAKWQNKLKDVADNLAPLGAHRALFLLRSSFSATRVTHLLRGANLTEQVDDLRALNELTVDSLESLLNLSLAPSARKQAQLPISKGGLGIPDPLVSAGPAIVSSLFRSESNATALLDEAGIVQYNELKGRLHEELKTMCRGVPDNPLSQRDWSAFLYDEAYSSLLAGAADDSTKARLQAVAAKGSGAWLHAVPSAPLGTLLDNETTRIATGLRLGCDLVTPHQCRCGQPVDKLAHHGLSCIISAGRRARHAGINDTFSRALRSYGYPCILEPQGLSAVDGKRPDGMTLTPFSRGRMLVWDATVTDSLAPSMVGGGAVSAGYAGSLAETRKLAKYASIGYPHEFQPLAFETLGGPGNITRRLLHRVGEQLNLATGDKRSAGFLRQRLDLDVQRGNAASVRGTLLMWSQPALYEIE

SEQ ID NO: 16053 - protein, 903 aa, Dermanyssus gallinae
MPIDNNTQQPARIIENIQGAAKRLRLLRIVPKAVRKQVAEALTKVLLEVSADNNDIAWGALLSFVPVILRLPTTRNDAQSLSVIIRHNLREFSNGLRLAEILPPAAARTRTFTNDRVRQTILKLSEGDVSGAARLIGSSDALAPSTDHLTALRDKHPPAPPNLDWPASPGLPLPCTTSGEEVTAAVKSFSRSAAGGLDFIRPRLLMDLLSPTLGDTASRLASALAKVVDLLLWGAPPPQLLPIIFGARLFALQKKDGSVRPIACSSTLRRLAAKIACNRTRETIREAIGLHQLGFATPAGAEAAIHATRAFIDSRTLPGVLVKLDFKNAFNSLRRDYLLKAVLKHCPQLSHYFNQAYRNASCLVLPDDVIASATGLQQGDPLAPLLFCLGIKDLVDSLNSPLNVWYLDDGVLGGDADLVADDVRRVLDFRASSGLELNPEKCEIYVTGSSTQTPDLDTLQTLLPGCKVTLDCDLELLGVPLRPQGLTRALAKWQNKLKDVADNLAPLGAHRALFLLRSSFSATRVTHLLRGANLTEQVEDLRALNELTVNSLESLLNLSLAPSARKQAQLPISKGGLGIPDPLVSAGPAIVSSLFRSESNATALLDEAGIVQYNELKGRLHEELKTVCRGVPDNPLSQRDWSAFLYDEAYCSLLAGAADNSTKARLQAVAAKGSGAWLHAVPSAPLGTLLDNETTRIATGLRLGCDLVTPHQCRCGQPVDELAHHGLSCIISAGRRARHAGINDTFSRALRSCGYPCILEPQGLSAVDGKRPDGMTLTPFSRGKMLVWDATVTDSLAPSMVGGGAVSAGYAGSLAETRKLAKYASIGYPHEFQPLAFETLGGPGNITRKLLHRVGEQLNLATGDKRSAGFLRQRLDLDVQRGNAASVRGTLLMWSQPTLYEIE

SEQ ID NO: 16054 - protein, 916 aa, Dermanyssus gallinae
MAEHISNNIASGESGLSTQSERIACPFCNGLYTRRGLTRHITAKHPSSSSNLSLLSHMPIDNNTQQPARIIENIQGAAKRLRLLRIVPKAVRKQVAEALTKVLLGVSADNNDIAWGALLSFVPVILRLPTTRNDAQSLSVIIRHNLREFSNGLRLAEILPPAAARTRTFTNDRVRQTILKLSEGDVSGAARLIESSDALAPSTDHLTALRDKHPPAPPNLDWPASPGLPLPCTTSGEEVTAAVKSFSRSAAGGLDFIRPRLLMDLLSPTLGDTASRLASALAKVVDLLLWGVPPPQLLPIIFGARLFALQKKDGSVRPIACSSTLRRLAAKIACNRTRETIREAIGLHQLGFATPAGAEAAIHATRAFIDSRTLPGVLVKLDFKNAFNSVRRDYLLKAVLKHCPQLSHYFNQAYRNASCLVLPDDVIASATGLQQGDPLAPLLFCLGIKDLVDSLNSPLNVWYLDDGVLGGDADIVADDVRRVLDFRASSGLELSPEKCEIYVTGSSTQTPDLDTLQTLLPGCKVTLDCDLELLGVPLRPQGLTRALAKWQNKLKDVADNLAPLGAHRALFLLRSSFSATRVTHLLRGANLTEQVEDLRALNELTVNSLESLLNLSLAPSARKQAQLPISKGGLGIPDPLVSAGPAIVSSLFRSESNATALLDEAGIVQYNELKGRLYEELKTVCRGVPDNPLSQRDWSAFLYDEAYCSLLAGAADNSTKARLQAVAAKGSGAWLHAVPIVPLGTLLDNETTRIATGLRLGCDLVTPHQCRCGQPVDELAHHGLSCIISAGRWARHAGINDTFSRALRSCGYPCILEPQGLSAVDGKRPDGMTLTPFSRGKMLVWDATVTDSLAPSMVGGGAVSAGYAGSLAETRKLAKYASIGYPHEFQPLAFETLGGPGNITRKLLHRVDRQVS

SEQ ID NO: 16055 - protein, 961 aa, Dermanyssus gallinae
MMQHDPNNISSGGSTGATTHSQQTACPLCNGQYTRRGLTRHIAAKHPSASLSSFATSSTPIDNNAQQTARIIEDIQGVAKRSRLLRIVPKSVRKQVAEALANVLSGVIADNNQQAWYTLFSFVPVVLRLPLSRNDSQSLSVIIRHNLREFSNGLRLADVVAPVTKKNRTFKNDRVRQTILKLTEGDVSGAARLIGSSDVLAPGTDHLAALRNKHPPAPPDLDWPDLPGIPLPCTTSGEEVIAAVKSFARSSAGGLDFIRPRLLIDLLSPTLGDTAGRLAAALAKIVDLLLWGVPPPQLRPIIFGARLFALQKKDGSVRPIACSSTLRRLAAKIACNRTRDRIREAIGPHQLGFAAQAGAEAAVHAARAFIDSRSLPGVLVKLDFRNAFNSVRRDHLLKAVGAHCPQLAHHVHQAYRYSSHLVLPDDLISSVTGLQQGDPLAPPLFCLSIKELVDSLNSSLNIWYLDDGVLGGDASMVAEDIRRVLEFRQISGLELNPEKCEIYVTGDSAQAPDLRPLQALLPGCKITHDYDLELLGVPLRPQGLPRVLKKWQSVLKDVANNLTPLGAHRALFLLRSSFSATRVNHLLRGANLTGQLDDLRPLNELTLNTLESLLNLSLAPPARKQAQLPISKGGLGIPDPLISAGPAIVSSLLRSENKVIALLDEAGAVQYKDLTRRLQEELKTICSGAPDNPRSQHDWSALLHEKAYCGLLADAIDDAAKARLRAVAAKGSGAWLHALPSAPLGTLLDDETTRIGAGLRLGCDLVTPHQCKCGQPVDKLAHHGLSCVMSAGRRARHASINDTFSRALRSSGFPCILEPQGLSADDGKRPDGMTLTPFSRGRMLVWDATVTDSLAPSMVGGGAASAGYAGDLAETRKLAKYASIEYPHEFQPLAFETLGGPGNLTRKLLHRVGEQLNLAAGDKRSAAFLRQRLDLDVQRGNAASVRGTLLKWCQPTLYEIE

SEQ ID NO: 16056 - protein, 960 aa, Dermanyssus gallinae
MAEHISNNIASGESGLSTQSERIACPFCNGLYTRRGLTRHITAKHPSSSSNLSLLSHMPIDNNTQQPARIIENIQGAAKRLRLLRIVPKAVRKQVAEALTKVLLEVSADNNDIAWGALLSFVPVILRLPTTRNDAQSLSVIIRHNLREFSNGLRLAEILPPAAARTRTFTNDRVRQTILKLSEGDVSGAARLIGSSDALAPSTDHLTALRDKHPPAPPNLDWPASPGLPLPCTTSGEEVTAAVKSFSRSAAGGLDFIRPRLLMDLLSPTLGDTASRLASALAKVVDLLLWGAPPPQLLPIIFGARLFALQKKDGSVRPIACSSTLRRLAAKIACNRTRETIREAIGLHQLGFATPAGAEAAIHATRAFIDSRTLPGVLVKLDFKNAFNSLRRDYLLKAVLKHCPQLSHYFNQAYRNASCLVLPDDVIASATGLQQGDPLAPLLFCLGIKDLVDSLNSPLNVWYLDDGVLGGDADLVADDVRRVLDFRASSGLELNPEKCEIYVTGSSTQTPDLDTLQTLLPGCKVTLDCDLELLGVPLRPQGLTRALAKWQNKLKDVADNLAPLGAHRALFLLRSSFSATRVTHLLRGANLTEQVEDLRALNELTVNSLESLLNLSLAPSARKQAQLPISKGGLGIPDPLVSAGPAIVSSLFRSESNATALLDEAGIVQYNELKGRLHEELKTVCRGVPDNPLSQRDWSAFLYDEAYCSLLAGAADNSTKARLQAVAAKGSGAWLHAVPSAPLGTLLDNETTRIATGLRLGCDLVTPHQCRCGQPVDELAHHGLSCIISAGRRARHAGINDTFSRALRSCGYPCILEPQGLSAVDGKRPDGMTLTPFSRGKMLVWDATVTDSLAPSMVGGGAVSAGYAGSLAETRKLAKYASIGYPHEFQPLAFETLGGPGNITRKLLHRVGEQLNLATGDKRSAGFLRQRLDLDVQRGNAASVRGTLLMWSQPTLYEIE

SEQ ID NO: 16057 - protein, 960 aa, Dermanyssus gallinae
MMEQDSNNIASGGLQSSVHSQRIACPLCNGQYTRRGLTRHIAAKHPSASANISTSTPTPTDNNRQQPARIIEDIQGAAKKLRLLRILPKPVRKQVAEALANVLLGVSADNNDEAWYALFSFAPVVLRLPPTRNDIQSLSVIIRHNLREFSNGLRLSEIVTPAPTKKRTFTNNRVRQTVLKLTEGDVSGAARLIGSSEVLAPSTDHLTALREKHPPAPPDLEWPAPPSLPLSCTTSGEEVVAAVKSFSRSSAGGLDFIRPRLLIDLLSPTLGDTAGRLASALAKVVDLLLWGAPPSQLLPIIFGARLFALQKKDGSVRPIACSSTLRRLAAKIACNRTRDIIGEATGPHQLGFAVPAGAEAAVHAARAFIDSRTSPGVLVKLDFKNAFNSVRRDHLLKAVATHCPQLTHHVSQAYRTASYLALPDDLIASATGLQQGDPLAPPLFCLCIKEQVDSFKSPLNIWYLDDGVLGGDVDMVADDVRRVLDFRKTSGLELNPEKCEIYVTGDTAQTPDLRILQALLPGCKVTLDNDLELLGVPLRPEGITHALEKWQKKLKEVADNLAPLGSHRALFLLRSSFSATRVTHLLRGADLTGRLDDLRPLNELTLNALDSLLNLSLAPSSRKQAQLPISKGGLGIPDPLVSAGPAIVSSLFRSENNAIALLDEAGISQFTELKRRLYEELKTVCRGAPDNPLSQHDWSTFLHDEVYRGLLASAVDDTTRARLRAVAAKGSGAWLHALPSAPLGTLLDNETTRIGAGLRLGCDLVSPHQCKCGHPVDKLAHHGLSCIMSAGRRARHAGINDTFGRALRSSGFPCILEPQGLSTDDGKRPDGMTLTPFSRGRMLVWDATVTDSLAPSMVGGGAISAGHAGNLAEARKLAKYASIGYPHEFQPLAFETLGGPGNLTRKLLHRVGEQLNLATGDKRSAAFLRQRLDLDVQRGNAASVRGTLLKWSQPTLYEIE

SEQ ID NO: 16058 - protein, 960 aa, Dermanyssus gallinae
MMEQDSNNIASGGLQSSVHSQRIACPLCNGQYTRRGLTRHIAAKHPSASANISTSTPTPTDNNRQQPARIIEDIQGAAKKLRLLRILPKPVRKQAAEALANVLLGVSADNNDEAWYALFSFAPVVLRLPATRNDIQSLSVIIRHNLREFSNGLRLSEIVTPAPTKKRTFTNNRVRQTVLKLTESDVSGAARLIGSSEVLAPSTDHLTALREKHPPAPPDLEWPAPPSLPLSCTTSGEEVVAAVKSFSRSSAGGLDFIRPRLLIDLLSPTLGDTAGRLASALAKVIDLLLWGAPPSQLLPIIFGARLFALQKKDGSVRPIACSSTLRRLAAKTACNRTRDIIGEATGPHQLGFAVPAGAEAAVHAARAFIDSRTSPGILVKLDFKNAFNSVRRDHLLKAVATHCPQLTHHVSQAYRTASYLALPADLIASATGLQQGDPLAPPLFCLCIKEQVDSFKSPLNIWYLDDGVLGGDVDMVADDVRRVLDFRKNSGLELNPEKCEIYVTCDTAQTPDLRILQALLPGCKVTLDNDLELLGVPLRPEGITHALEKWQKKLKEVADNLAPLGSHRALFLLRSSFSAARVTHLLRGADLTGRLDDLRPLNELTLNALDSLLNLSLAPSSRKQAQLPISKGSLGIPDPLVSAGPAIVSSLFRSENNAIALLDEAGISQFPELKRRLYEELKTVCRGAPNNPLSQHEWSTFLYDEVYRGLLASAVDDTTRARLRAVAAKGSRAWLHALPSAPLGTLLDNETTRIGAGLRLGCDLVSPHQCKCGHPVDKLAHHGLSCIMSAGRRARHAGINDTFGRTLRPSGFPCILEPQGLSTDDGKRPDGMTLTPFSRGRMLVWDATVTDSLAPSMVGGGAISAGHAGNLAEARKLAKYASIGDPHEFQPLAFETLGGPGNLTRKLLHRVGEQLNLATGDKRSAAFLRQRLDLEVQRGNAASVRGTLLKWSQPTLYEIE

SEQ ID NO: 16059 - protein, 961 aa, Dermanyssus gallinae
MMQHDPNNISSGGSTGATTHSQQTACPLCNGQYTRRGLTRHIAAKHPSASLSSFATSSTPIDNNAQQTARIIEDIQGVAKRSRLLRIVPKSVRKQVAEALANVLSGVIADNNQQAWYTLFSFVPVVLRLPLSRNDSQSLSVIIRHNLREFSNGLRLADVVAPVTKKNRTFKNDRVRQTILKLTEGDVSGAARLIGSSDVLAPGTDHLAALRNKHPPAPPDLDWPDLPGIPLPCTTSGEEVIAAVKSFARSSAGGLDFIRPRLLIDLLSPTLGDTAGRLAAALAKIVDLLLWGVPPPQLRPIIFGARLFALQKKDGSVRPIACSSTLRRLAAKIACNRTRERIREAIGPHQLGFAAQAGAEAAVHAARAFIDSRSLPGVLVKLDFRNAFNSVRRDHLLKAVGAHCPQLAHHVHQAYRYSSHLVLPDDLISSVTGLQQGDPLAPPLFCLSIKELVDSLNSSLNIWYLDDGVLGGDASMVAEDIRRVLEFRQISGLELNSEKCEIYVTGDSAQAPDLRPLQALLPGCKITHDYDLELLGVPLRPQGLPRVLKKWQSVLKDVANNLTPLGAHRALFLLRSSFSATRVNHLLRGANLTGQLDDLRPLNELTLNTLESLLNLSLAPPARKQAQLPISKGGLGIPDPLISAGPAIVSSLLRSENKVIALLDEAGAVQYKDLTRRLQEELKTICSGAPDNPRSQHDWSALLHEKAYYGLLADAIDDAAKARLRAVAAKGSGAWLHALPSAPLGTLLDDETTRIGAGLRLGCDLVTPHQCKCGQPVDKLAHHGLSCVMSAGRRARHASINDTFSRALRSSGFPCILEPQGLSADDGKRPDGMTLTPFSRGRMLVWDATVTDSLAPSMVGGGAASAGYAGDLAETRKLAKYASIEYPHEFQPLAFETLGGPGNLTRKLLHRVGEQLNLAAGDKRSAAFLRQRLDLDVQRGNAASVRGTLLKWCQPTLYEIE

SEQ ID NO: 16060 - protein, 961 aa, Dermanyssus gallinae
MMQHDPNNISSGGSTGATTHSQQTACPLCNGQYTRRGLTRHIAAKHPSASLSSFATSSTPIDNNAQQTARIIEDIQGVAKRSRLLRVVPKSVRKQVAEALANVLSGVIADNNQQAWYTLFSFVPVVLRLPLSRNDSQSLSVIIRHNLREFSNGLRLADVVAPVTKKNRTFKNDRVRQTILKLTEGDVSGAARLIGSSDVLAPGTDHLAALRNKHPPAPPDLDWPDLPGIPLPCTTSGEEVIAAVKSFARSSAGGLDFIRPRLLIDLLSPTLGDTAGRLAAALAKIVDLLLWGVPPPQLRPIIFGARLFALQKKDGSVRPIACSSTLRRLAAKIACNRTRDRIREAIGPHQLGFAAQAGAEAAVHAARAFIDSRSLPGVLVKLDFRNAFNSVRRDHLLKAVGAHCPQLAHHVHQAYRYSSHLVLPDDLISSVTGLQQGDPLAPPLFCLSIKELVDSLNSSLNIWYLDDGVLGGDASMVAEDIRRVLEFRQISGLELNPEKCEIYVTGDSAQAPDLRPLQALLPGCKITHDYDLELLGVPLRPQGLPRVLKKWQSVLKDVANNLTPLGAHRALFLLRSSFSATRVNHLLRGANLTGQLDDLRPLNELTLNTLESLLNLSLAPPARKQAQLPISKGGLGIPDPLISAGPAIVSSLLRSENKVIALLDEAGAVQYKDLTRRLQEELKTICSGAPDNPRSQHDWSALLHEKAYCGLLADAIDDAAKARLRAVAAKGSGAWLHALPSAPLGTLLDDETTRIGAGLRLGCDLVTPHQCKCGQPVDKLAHHGLSCVMSAGRRARHASINDTFSRALRSSGLPCILEPQGLSADDGKRPDGMTLTPFSRGRMLVWDATVTDSLAPSMVGGGAASAGYAGDLAETRKLAKYASIEYPHEFQPLAFETLGGPGNLTRKLLHRVGEQLNLAAGDKRSAAFLRQRLDLDVQRGNAASVRGTLLKWCQPTLYEIE

SEQ ID NO: 16061 - protein, 960 aa, Dermanyssus gallinae
MMEQDSNNIASGGLQSSVHSQRIACPLCNGQYTRRGLTRHIAAKHPSASANISTSTPTPTDNNRQQPARIIEDIQGAAKKLRLLRILPKPVRKQVAEALANVLLGVSADNNDEAWYALFSFAPVVLRLPPTRNDIQSLSVIIRHNLREFSNGFRLSEIATPAPTKKRTFTNNRVRQTVLKLTEGDVSGAARLIGSSEVLAPSTDHLTALREKHPPAPPDLEWPAPPSLPLSCTTSGEEVVAAVKSFSRSSAGGLDFIRPRLLIDLLSPTLGDTAGRLASALAKVVDLLLWGAPPSQLLPIIFGARLFALQKKDGSVRPIACSSTLRRLAAKIACNRTRDIIGEATGPHQLGFAVPAGAETAVHAARAFIDSRTSPGVLVKLDFKNAFNSVRRDHLLKAVATHCPQLTHHVSQAYRTASYLALPDDLIASATGLQQGDPLAPPLFCLCIKEQVDSFKSPLNIWYLDDGVLGGDVDMVADDVRRVLDFRKTSGLELNPEKCEIYVTGDTAQTPDLRILQALLPGCKVTLDNDLELLGVPLRPEGITHALEKWQKKLKEVADNLAPLGSHRALFLLRSSFSATRVTHLLRGADLTGRLDDLRPLNELTLNALDSLLNLSLAPSSRKQAQLPISKGGLGIPDPLVSAGPAIVSSLFRSENNAIALLDEAGISQFTELKRRLYEELKTVCRGAPDNPLSQHDWSTFLHDEVYRGLLASAVDDTTRARLRAVAAKGSGAWLHALPSAPLGTLLDNETTRIGAGLRLGCDLVSPHQCKCGHPVDKLAHHGLSCIMSAGRRARHAGINDTFGRALRSSGFPCILEPQGLSTDDGKRPDGMTLTPFSRGRMLVWDATVTDSLAPSMVGGGAISAGHAGNLAEARKLAKYASIGYPHEFQPLAFETLGGPGNLTRKLLHRVGEQLNLATGDKRSAAFLRQRLDLDVQRGNAASVRGTLLKWSQPTLYEIE

SEQ ID NO: 16062 - protein, 960 aa, Dermanyssus gallinae
MAEHISNNIASGESGLSTQSERIACPFCNGLYTRRGLTRHITAKHPSSSSNLSLLSHMPIDNNTQQPARIIENIQGAAKRLRLLRIVPKAVRKQVAEALTKVLLEVSADNNDIAWGALLSFVPVILRLPTTRNDAQSLSVIIRHNLREFSNGLRLAEILPPAAARTRTFTNDRVRQTILKLSEGDVSGAARLIGSSDALAPSTDHLTALRDKHPPAPPNLDWPASPGLPLPCTTSGEEVTAAVKSFSRSAAGGLDFIRPRLLMDLLSPTLGDTASRLASALAKVVDLLLWGAPPPQLLPIIFGARLFALQKKDGSVRPIACSSTLRRLAAKIACNRTRETIREAIGLHQLGFATPAGAEAAIHATRAFIDSRTLPGVLVKLDFKNAFNSLRRDYLLKAVLKHCPQLSHYFNQAYRNASCLVLPDDVIASATGLQQGDPLAPLLFCLGIKDLVDSLNSPLNVWYLDDGVLGGDADLVADDVRRVLDFRASSGLELNPEKCEIYVTGSSTQTPDLDTLQTLLPGCKVTLDCDLELLGVPLRPQGLTRALAKWQNKLKDVADNLAPLGAHRALFLLRSSFSATRVTHLLRGANLTEQVEDLRALNELTVNSLESLLNLSLAPSARKQAQLPISKGGLGIPDPLVSAGPAIVSSLLRSESNATALLDEAGIVQYNELKGRLHEELKTVCRGVPDNPLSQRDWSAFLYDEAYCSLLAGAADNSTKARLQAVAAKGSGAWLHAVPSAPLGTLLDNETTRIATGLRLGCDLVTPHQCRCGQPVDELAHHGLSCIISAGRRARHAGINDTFSRALRSCGYPCILEPQGLSAVDGKRPDGMTLTPFSRGKMLVWDATVTDSLAPSMVGGGAVSAGYAGSLAETRKLAKYASIGYPHEFQPLAFETLGGPGNITRKLLHRVGEQLNLATGDKRSAGFLRQRLDLDVQRGNAASVRGTLLMWSQPTLYEIE

SEQ ID NO: 16063 - protein, 960 aa, Dermanyssus gallinae
MAEHISNNIASGESGLSTQSERIACPFCNGLYTRRGLTRHITAKHPSSSTNSSLLSPMPIDNNTQQPARIIENIQGAAKRLRLLRIVPKAVRKQVAEALTKVLLGVSADNNIIAWGALLSFVPVILRLPTTRNDAQSLSVIIRHNLREFSNGLRLAEILPPAAARTRKFTDDRVRQTILKLSEGDVSGAARLIGSSDALAPSTDHLTALRDKHPPAPPNLDWPASPGLPLPCTTSGEEVIAAVKSFSRSAAGGLDFIRPRLLMDLLSPTLGDTASRLASALAKVVDLLLWGAPPPQLLPIIFGARLFALQKKDGSVRPIACSSTLRRLAAKIACNRTRETIREAMGLHQLGFATPAGAEAAIHATRAFIDSRTLPGVLVKLDFKNAFNSVRRDYLLKAVLKHCPQLSHYFDQAYRNASCLVLPDDVIASATGLQQGDPLAPLLFCLSIIDLVDSLNSPLNVWYLDDGVLGGDADIVADDVRRVLDFRASSGLELNPEKCEIYVTGSSTQTPDLDTLQTLLPGCKVTLDCDLELLGVPLRPQGLTRALAKWQNKLKDVADNLAPLGAHRALFLLRSSFSATRVTHLLRGANLTEQVDDLRALNELTVDSLESLLNLSLAPSARKQAQLPISKGGLGIPDPLVSAGPAIVSSLFRSESNATALLDEAGIVQYNELKGRLHEELKTMCRGVPDNPLSQRDWSAFLYDEAYSSLLAGAADDSTKARLQAVAAKGSGAWLHAVPSAPLGTLLDNETTRIATGLRLGCDLVTPHQCRCGQPVDKLAHHGLSCIISAGRRARHAGINDTFSRALRSCGYPCILEPQGLSAVDGKRPDGMTLTPFSRGRMLVWDATVTDSLAPSMVGGGAVSAGYAGSLAETRKLAKYASIGYPHEFQPLAFETLGGPGNITRKLLHRVGEQLNLATGDKRSAGFLRQRLDLDVQRGNAASVRGTLLMWSQPALYEIE

SEQ ID NO: 16064 - protein, 960 aa, Dermanyssus gallinae
MAEHISNNIASGESGLSTQSERIACPFCNGLYTRRGLTRHITAKHPSSSSNLSLLSHMPIDNNTQQPARIIENIQGAAKRLRLLRIVPKAVRKQVAEALTKVLLGVSADNNDIAWGALLSFVPVILRLPTTRNDAQSLSVIIRHNLREFSNGLRLAEILPPAAARTRTFTNDRVRQTILKLSEGDVSGAARLIGSSDALAPSTDHLTALRDKHPPAPPNLDWPASPGLPLPCTTSGEEVTAAVKSFSRSAAGGLDFIRPRLLMDLLSPTLGDTASRLASALAKVVDLLLWGAPPPQLLPIIFGARLFALQKKDGSVRPIACSSTLRRLAAKIACNRTRETIREAIGLHQLGFATPAGAEAAIHATRAFIDSRTLPGVLVKLDFKNAFNSVRRDYLLKAVLKHCPQLSHYFNQAYRNASCLVLPDDVIASATGLQQGDPLAPLLFCLGIKDLVDSLNSPLNVWYLDDGVLGGDADIVADDVRRVLDFRASSGLELNPEKCEIYVTGSSTQTPDLDTLQTLLPGCKVTLDCDLELLGVPLRPQGLTRALAKWQNKLKDVADNLAPLGAHRALFLLRSSFSATRVTHLLRGANLTEQVEDLRALNELTVNSLESLPNLSLAPSARKQAQLPISKGGLGIPDPLVSAGPAIVSSLFRSESNATALLYEAGIVQYNELKGRLYEELKTVCRGVPDNPLSQRDWSAFLYDEAYCSLLAGAADNSTKARLQAVAAKGSGAWLHAVPSVPLGTLLDNETTRIATGLRLGCDLVTPHQCRCGQPVDELAHHGLSCIISAGRRARHAGINDTFSRALRSCGYPCILEPQGLSAVDGKRPDGMTLTPFSRGKMLVWDATVTDSLAPSMVGGGAVSAGYAGSLAETRKLAKYASIGYPHEFQPLAFETLGGPGNITRKLLHRVGEQLNLATGDKRSAGFLRQRLDLDVQRGNAASVRGTLLMWSQPTLYEIE

SEQ ID NO: 16065 - protein, 960 aa, Dermanyssus gallinae
MAEHISNNIASGESGLSTQSERIACPFCNELYTRRGLTRHITAKHPSSSSNLSLLSHMPIDNNTQQPARIIENIQGAAKRLRLLRIVPKAVRKQVAEALTKVLLGVSADNNDIAWGALLSFVPVILRLPTTRNDAQSLSVIIRHNLREFSNGLRLAEILPPAAARTRTFTNDRVRQTILKLSEGDVSGAARLIGSSDALAPSTDHLTALRDKHPPAPPNLDWPASPGLPLPCTTSGEEVTAAVKSFSRSAAGGLDFIRPRLLMDLLSPTLGDTASRLASALAKVVDLLLWGAPPPQLLPIIFGARLFALQKKYGSVRPIACSSTLRRLAAKIACNRTRETIREAIGLHQLGFATPAGAEAAIHATRAFIDSRTLPGVLVKLDFKNAFNSVRRDYLLKAVLKHCPQLSHYFNQAYRNASCLVLPDDVIASATGLQQGDPLAPLLFCLGIKDLVDSLNSPLNVWYLDDGVLGGDADIVADDVRRVLDFRASSGLELNPEKCEIYVTGSSTQTPDLDTLQTLLPGCKVTLDCDLELLGVPLRPQGLTRALAKWQNKLKDVADNLAPLGAHRALFLLRSSFSATRVTHLLRGANLTEQAEDLRALNELTVNSLESLLNLSLAPSARKQAQLPISKGGLGIPDPLVSAGPAIVSSLFRSESNATALLDEAGIVQYNELKGRLHEELKTVCRGAPDNPLSQRDWSAFLYDEAYCSLLAGAADNSTKARLQAVAAKGSGAWLHAVPSAPLGTLLDNETTRIATGLRLGCDLVTPHQCRCGQPVDELAHHGLSCIISAGRRARHAGINDTFSRALRSCGYPCILEPQGLSAVDGKRPDGMTLTPFSRGKMLVWDATVTDSLAPSMVGGGAVSAGYAGSLAETRKLAKYASIGYPHEFQPLAFETLGGLGNITRKLLHRVGEQLNLATGDKRSAGFLRQRLDLDVQRGNAASVRGTLLMWSQPTLYEIE

SEQ ID NO: 16066 - protein, 960 aa, Dermanyssus gallinae
MAEHISNNIASGESGLSTQSERIPCPFCNGLYTRRGLTRHITAKHPSSSNNLSLLSHMPIDNNTQQPARIIENIQGAAKRLRLLRIVPKAVRKQVAEALTKVLLEVSADNNDIAWGALLSFVPVILRLPTTRNDAQSLSVIIRHNLREFSNGLRLAEILPPAAARTRTFTNDRVRQTILKLSEGDVSGAARLIGSSDALAPSTDHLTALRDKHPPAPPNLDWPASPGLPLPCTTSGEEVTAAVKSFSRSAAGGLDFIRPRLLMDLLSPTLGDTASRLASALAKVVDLLLWGAPPPQLLPIIFGARLFALQKKDGSVRPIACSSTLRRLAAKVACNRTRETIREAIGLHQLGFATPAGAEAAIHATRAFIDSRTLPGVLVKLDFKNAFNSLRRDYLLKAVLKHCPQLSHYFNQAYRNASCLVLPDDVIASATGLQQGDPLAPLLFCLGIKDLVDSLNSPLNVWYLDDGVLGGDADLVADDVRRVLDFRASSGLELNPEKCEIYVTGSSTQTPDLDTLQTLLPGCKVTLDCDLELLGVPLRPQGLTRALAKWQNKLKDVADNLAPLGAHRALFLLRSSFSATRVTHLLRGANLTEQVEDLRALNELTVNSLESLLNLSLAPSARKQAQLPISKGGLGIPDPIVSAGPAIVSSLFRSESNATALLDEAGIVQYNELKGRLHEELKTVCRGVPDNPLSQRDWSAFLYDEAYCSLLAGAADNSTKARLQAVAAKGSGAWLHAVPSAPLGTLLDNETIRIATGLRLGCDLVTPHQCRCGQPVDELAHHGLSCIISAGRRARHAGINDTFSRALRSCGYPCILEPQGLSAVDGKRPDGMTLTPFSRGKMLVWDATVTDSLAPSMVGGGAVSAGYAGSLAETRKLAKYASIGYPHEFQPLAFETLGGPGNITRKLLHRVGEQLNLATGDKRSAGFLRQRLDLDVQRGNAASVRGTLLMWSQPTLYEIE

SEQ ID NO: 16067 - protein, 961 aa, Dermanyssus gallinae
MMQHDPNNISSGGSTGSTTHSQQTACPLCNGQYTRRGLTRHIAAKHPSASLSSFATSSTPIDNNAQQTARIIEDIQGVAKRSRLLRIVPKSVRKQVAEALANVLSGVIADNNQQAWCTLFSFVPVVLRLPLSRNDTQSLSVIIRHNLREFSNGLRLADVVAPVTKKNRTFKNDRVRQTILKLTEGDVSGAARLIGSSDVLAPGTDHLAALRNKHPPAPPDLDWPDLPGIPLPCTTSGEEVIAAVKSFARSSAGGLDFIRPRLLIDLLSPTLGDTAGRLAAALAKIVDLLLWGVSPPQLRPIIFGARLFALQKKDGSVRPIACSSTLRRLAAKIACNRTRDRIREAIGPHQLGFAAQAGAEAAVHAARAFIDSRSLPGVLVKLDFRNAFNSVRRDHLLKAVGAHCPQLAHHVHQAYCYSSHLILPDDLISSVTGLQQGDPLAPPLFCLSIKELVDSLNSSLNIWYLDDGVLGGDASMVAEDIRRVLEFRQISGLELNPEKCEIYVTGDSAQAPDLRPLQALLPGCKITHDYDLELLGVPLRPQGLPRVLKKWQSVLKDVANNLTPLGAHRALFLLRSSFSATRVNHLLRGANLTGQLDDLRPLNELTLNTLESLLNLSLAPPARKQAQLLISKGGLGIPDPLISAGPAIVSSLLRSENKVIALLDEAGAVQYKDLTRRLQEELKTICSGAPDNPRSQHDWSALLHEKAYCGLLADAIDDAAKARLRAVAAKGSGAWLHALPSAPLGTLLDDETTRIGAGLRLGCDLVTPHQCKCGQPVDKLAHHGLSCVMSAGRRARHASINDTFSRALRSSGFPCILEPQGLSADDGKRPDGMTLTPFSRGRMLVWDATVTDSLAPSMVGGGAASAGYAGDLAETRKLAKYASIEYPHEFQPLAFETLGDPGNLTCKLLHRVGEQLNLAAGDKRSAAFLRQRLDLDVQRGNAASVRGTLLKWCQPTLYEIE

SEQ ID NO: 16068 - protein, 960 aa, Dermanyssus gallinae
MMEQDSNNIDSGGLQSSVHSQRIACPLCNGQYTRRGLTRHIAAKHPSASANISTSTPTPTDNNRQQPACIIEDIQGAAKKLRLLRILPKPVRKQVAEALANVLLGVSADNNDEAWYALFSFAPVVLRLPATRNDIQSLSVIIRHNLREFSNGLRLSEIVTPAPTKKRTFTNNRVRQTVLKLTEGDVSGAARLIGSSEVLAPSTDHLTALREKHPPAPPDLEWPAPPSLPLSCTTSGEEVVAAVKSFSRSSAGGLDFIRPRLLIDLLSPTLGDTAGRLASALAKVVDLLLWGAPPSQLLPIIFGARLFALQKKDGSVRPIACSSTLRRLAAKIACNRTRDIIGEATGPHQLGFAVPAGAEAAVHAARAFIDSRTSPGVLVKLDFKNAFNSVRRDHLLKAVATHCPQLTHHVSQAYRTASYLALPDDLIASATGLQQGDPLAPPLFCLCTKEQVDSFKSPLNIWYLDDGVLGGDVDMVADDVRRVLDFRKTSGLELNPEKCEIYVTGDTAQTPDLRILQALLPRCKVTLDNDLELLGVPLRPEGITHALEKWQKKLKEVADNLAPLGSHRALFLLRSSFSATRVTHLLRGADLTGRLDDLRPLNELTLNALESLLNLSLAPSSRKQAQLPISKGGLGIPDPLVSAGPAIVSSLFRSENNAIALLDEAGISQFTELKRRLYEELKTVCRGAPDNPLSQHDWSTFLYDEVYRGLLASAVDDTTRARLQAVAAKGSGAWLHALPSAPLGTLLDNETTRIGAGLRLGCDLVSPHQCKCGHPVDKLAHHGLSCIMSAGRRARHAGINDTFGRALRSSGFPCILEPQGLSTDDGKRPDGMTLTPFSRGRMLVWDATVTDSLAPSMVGGGAISAGHAGNLAEARKLAKYASIGYPHEFQPLAFETLGGPGNLTRKLLHRVGEQLNLATGDKRSAAFLRQRLDLDVQRGNAASVRGTLLKWSQPTLYEIE

SEQ ID NO: 16069 - protein, 960 aa, Dermanyssus gallinae
MMEQDSNNIASGGLQSSVHSQRIACPLCNGQYTRRGLTRHIAAKHPSASANISTSTPTPTDNNRQQPARIIEDIQGAAKKLRLLRILPKPVRKQVAEALANVLLGVSADNNDEAWYALFSFAPVVLRLPPTRNDIQSLSVIIRHNLREFSNGLRLSEIVTPAPTKKRTFTNNRVRQTVLKLTEGDVSGAARLIGSSEVLAPSTDHLTALREKHPPAPPDLEWPAPPSLPLSCTTSGEEVVGAVKSFSRSSAGGLDFIRPRLLIDLLSPTLGDTAGRLASALAKVVDLLLWGAPPSQLLPIIFGARLFALQKKDGSVRPIACSSTLRRLAAKIACNQTRDIIGEATGPHQLGFAVPAGAETAVHAARAFIDSRTSPGVLVKLDFKNAFNSVRRDHLLKAVATHCPQLTHHVSQAYRTASYLALPDDLIASATGLQQGDPLAPPLFCLCIKEQVDSFKSPLNIWYLDDGVLGGDVDMVADDVRRVLDFRKTSGLELNPEKCEIYVTGDTAQTPDLRILQALLPGCKVTLDNDLELLGVPLRPEGITHALEKWQKKLREVADNLAPLGSHRALFLLRSSFSATRVTHLLRGADLTGRLDDLRPLNELTLNALDSLLNLSLAPSSRKQAQLPISKGGLGIPDPLVSAGPAIVSSLFRSENNAIALLDEAGISQFTELKRRLYEELKTVCRGAPDNPLSQHDWSTFLHDEVYRGLLASAVDDTTRARLRAVAAKGSGAWLHALPSAPLGTLLDNETTRIGAGLRLGCDLVSPHQCKCGHPVDKLAHHGLSCIMSAGRRARHAGINDTFGRALRSSRFPCILEPQGLSTDDGKRPDGMTLTPFSRGKMLVWDATVTDSLAPSMVGGGAISAGHAGNLAEARKLAKYASIGYPHEFQPLAFETLGGPGNLTRKLLHRVGEQLNLATGDKRSAAFLRQRLDLDVQRGNAASVRGTLLKWSQPTLYEIE

SEQ ID NO: 16070 - protein, 960 aa, Dermanyssus gallinae
MAEHISNNIASGESGLSTQSERIACPFCNGLYTRRGLTRHITAKHPSSSSNLSLCSHMPIDNNTQQPARIIENIQGAAKRLRLLRIVPKAVRKQVAEALTKVLLGVSADNNDIAWGALLSFVPVILRLPTTRNDAQSLSVIIRHNLREFSNGLRLAEILSPAAARTRTFTNDRVRQTILKLSEGDVSGAARLIGSSDALAPSTDHLTALRDKHPPAPPKLDWPASPGLPLPCTTSGEEVTAAVKSFSRSAAGGLDFIRPRLLMDLLSPTLGDTASRLASVLAKVVDLLLWGAPPPQLLPIIFGARLFALQKKDGSVRPIACSSTLRRLAAKIACNRTTETIREAIGLHQLGFATPAGAEAAIHATRAFIDSRTLPGVLVKLDFKNAFNSVRRDYLLKAVLKHCPQLSHYFNQAYRNASCLVLPDDVIASATGLQQGDPLAPLLFCLGIKDLVDSLNSPLNVWYLDDGVLGGDADIVADDVRRVLDFRASSGLELNPEKCEIYVTGSSTQTPDLDTLQTLLPGCKVTLDCDLELLGVPLRPQGLTRALAKWQNKLKDVADNLAPLGAHRVLFLLRSSFSATRVTHLLRGANLTEQVEDLRALNELTVNSLESLLNLSLAPSARKQAQLPISKGGLGIPDPLVSAGPAIVSSLFRSESNATALLDEAGIVQYNELKGRLYEELKTVCRGVPDNPLSQRDWSAFLYDEAYCSLLAGAADNSTKARLQAVAAKGSGAWLHAVPSVPLGTLLDNETTRIATGLRLGCDLVTPHQCRCGQPVDELAHHGLSCIISAGRRARHAGINDTFSRALRSCGYPCILEPQGLSAVDGKRPDGMTLTPFSRGKMLVWDATVTDSLAPSMVGGGAVSAGYAGSLAETRKLAKYASIGYPHEFQPLAFETLGGPGNITRKLLHRVGEQLNLATGDKRSAGFLRQRLDLDVQRGNAASVRGTLLMWSQPTLYEIE

SEQ ID NO: 16071 - protein, 961 aa, Dermanyssus gallinae
MMQHDPNNISSGGSTGATTHSQQTACPLCNGQYTRRGLTRHIAAKHPSASLSSFATSSTPIDNNAQQTARIIEDIQGVAKRSRLLRIVPKSVRKQVAEALANVLSGVIADNNQQAWYTLFSFVPVVLRLPLSRNDSQSLSVIIRHNLREFSNGLRLADVVAPVTKKNRTFKNDRVRQTILKLTEGDVSGAARLIGSSDVLAPGTDHLAALRNKHPPAPPDLDWPDLPGIPLPCTTSGEEVIAAVKSFARSSAGGLDFIRPRLLIDLLSPTLGDTAGRLAAALAKIVDLLLWGVPPPQLRPIIFGARLFALQKKDGSVRPIACSSTLRRLAAKIACNRTRDRIREAIGPHQLGFAAQAGAEAAVHAARAFIDSRSLLGVLVKLDFRNAFNSVRRDHLLKAVGAHCPQLAHHVHQAYRYSSHLVLPDDLISSVTGLQQGDPLAPPLFCLSIKELVDSLNSSLNIWYLDDGVLGGDASMVAEDIRRVLEFRQISGLELNPEKCEIYVTGDSAQAPDLRPLQALLPGCKITHDYDLELLGVPLRPQGLPRVLKKWQSVLKDVANNLTPLGAHRALFLLRSSFSATRVNHLLRGANLTGQLDDLRPLNELTLNTLESLLNLSLAPPARKQAQLPISKGGLGIPDPLISAGPAIVSSLLRSENKVIALLDEAGAVQYKDLTRRLQEELKTICSGAPDNPRSQHDWSALLHEKAYCGLLADAIDDAAKARLRAVAAKGSGAWLHALPSAPLGTLLDDETTRIGAGLRLGCDLVTPHQCKCGQPVDKLAHHGLSCVMSAGRRARHASINDTFSRALRSSGFPCILEPQGLSADDGKRPDGMTLTPFSRGRMLVWDATVTDSLAPSMVGGGAASAGYAGDLAETRKLAKYASIEYPHEFQPLAFETLGGPGNLTRKLLHRVGEQLNLAAGDKRSAAFLRQRLDLDVQRGNAASVRGTLLKWCQPTLYEIE

SEQ ID NO: 16072 - protein, 960 aa, Dermanyssus gallinae
MAEHISNNIASGESGLSTQSERIACPFCNGLYTRRGLTRHITVKHPSSSTNSSLLSPMPIDNNTQQPARIIENIQGAAKRLRLLRIVPKAVRRQVAEALTKVQLGVSADNNVIAWGALLSFVPVILRLPTTRNDAQSLSVIIRHNLREFSNGLRLAEILPPAAARTRTFTNDRVGQTILKLSEGDVSGAARLIGSSDALAPSTDHLTALRDKHPPAPPNLDWPASPGLPLPCTTSGEEVIAAVKSFSRSAAGGLDFIRPRLLMDLLSPSLGDTASRLASALPKVVDLLLWGGSPPQLLPIIFGARLFALQKKDGSVRPIACSSTLRRLAANIACNRIRETIREAMGLHQLGFATPAGAEAAIHATRAFIDSRTLPGVLVKLDFKNAFNSVRRDYLLKAVLKHYPQLSHYFNQAYRNASCLVLPDDVIASATGLQQGDPLAPLLFCLSIKDLVDSLNSPLNVWYLDDGVLGGDADIVADDVRRVLDFRASSGLELNPEKCEIYVTGSSTQTPDLDTLQTLLPGCKVTLDCDLELLGVPLRPQGLTRVLAKWQNKLKDVADNLAPLGAHRALFLLRSSFSATRVTHLLRGANLTEQVDDLRALNELTVNSLESLLNLPLAPSARKQAQLPISKGGLGIPDPLVSAGPAIVSSLFRSESNATALLDEAGIVQYNELKGRLHEELKTVCRGVPDNPLSQRDWSAFLYDEAYCSLLAGATDDSTKARLQAVAAKGSGAWLHAVPSAPLGTLLDNETTRIATGLRLGCDLVTPHQCRCGQPVDKLAHHGLSCIISARRRARHAGINDTFSRALRSCGYPCILEPQGLSAVDGKRPDGMTLTPFSRGRMLVWDATVTDSLAPSMVGGGAVSAGYAGSLAETRKLAKYASIGYPHEFQPLAFETLGGPGNITSKLLHRVGEQLNLATGDKRSAGFLRQRLDLDVQRGNAASVRGTLLMWYQPTLYEIE

SEQ ID NO: 16073 - protein, 960 aa, Dermanyssus gallinae
MMEQDSNNIASGGLQSSVHSQRIACPLCNGQYTRRGLTRHIAAKHPSASANISTSTPTPTDNNRQQPARIIEDIQGAAKKLRLLRILPKPVRKQVAEALANVLLGVSADNNDEAWYALFSFAPVVLRLPPTRNDIQSLSVIIRHNLREFSNGLRLSEIVTPAPTKKRTFTNNRVRQTVLKLTEGDVSGAARLIGSSEVLAPSTDHLTALREKHPPAPPDLEWPAPPSLPLSCTTSGEEVVAAVKSFSRSSAGGLDFIRPRLLIDLLSPTLGDTAGRLASALAKVVDLLLWGAPPSQLLPIIFGARLFALQKKDGSVRPIACSSTLRRLAAKIACNRTRDIIGEATGPHQLGFAVPAGAETAVHAARAFIDSRTSPGVLVKLDFKNAFNSVRRDHLLKAVATHCPQLTHHVSQAYRTASYLALPDDLIASATGLQQGDPLAPPLFCLCIKEQVDSFKSPLNIWYLDDGVLGGDVDMVADDVRRVLDFRKTSGLELNPEKCEIYVTGDTAQTPDLRILQALLPGCKVTLDNDLELLGVPLRPEGITHALEKWQKKLKEVADNLAPLGSHRALFLLRSSFSATRVTHLLRGADLTGRLDDLRPLNELTLNALDSLLNLSLAPSSRKQAQLPISKGGLGIPDPLVSAGPAIVSSLFRSENNAIALLDEAGISQFTELKRRLYEELKTVCRGAPDNPLSQHDWSTFLHDEVYRGLLASAVDDTTRARLRAVAAKGSGAWLHALPSAPLGTLLDNETTRIGAGLRLGCDLVSPHQCKCGHPVDKLAHHGLSCIMSAGRRARHAGINDTFGRALRSSGFPCILEPQGLSTDDGKRPDGMTLTPFSRGRMLVWDATVTDSLAPSMVGGGAISAGHAGNLAEARKLAKYASIGYPHEFQPLAFETLGGPGNLTRKLLHRVGEQLNLATGDKRSAAFLRQRLDLDVQRGNAASVRGTLLKWSQPTLYEIE

SEQ ID NO: 16074 - protein, 960 aa, Dermanyssus gallinae
MAEHISNNIASGESGLSTQSERIACPFCNGLYTRRGLTRHITAKHPSSSSNLSLLSHMPIDNNTQQPARIIENIQGAAKRLRLLRIAPKAVRKQVAEALTKVLLEVSADNNDIAWGALLSFVPVILRLPTTRNDAQSLSVIIRHNLREFSNGLRLAEILPPAAARTRTFTNDLVRQTILKLSEGDVSGAARLIGSSDALAPSTDHLTALRDKHPPAPPNLDWPASPGLPLPCTTSGEEVTAAVKSFSRSAAGGLDFIRPRLLMDLLSPALGDTASRLASALAKVVDLLLWGAPPPQLLPIIFGARLFALQKKDGSVRPIACSSTLRRLAAKIACNRTRETIREAIGLHQLGFATPAGAEAAIHATRAFIDSRTLPGVLVKLDFKNAFNSVRRDYLSKAVLKHCPQLSHYFNQAYRNASCLVLPDDVIASATGLQQGDPLAPLLFCLGIKDLVDSLNSPLNVWYLDDGVLGGDADIVADDVRRVLDFRASSSLELNPEKCEIYVTGSSTQTPDLDTLQTLLPGCKVTLDCDLELLGVPLRPQGLTRALAKWQNKLKDVADNLAPLGAHRALFLLRSSFSATRVTHLLRGANLTEQVEDLRALNELTVNSLESLLNLSLAPSARKQAQLPISKGGLGIPDPLVSAGPAIVSSLFRSESNATALLDEAGIVQYNELKGRLHEELKTVCRGVPDNPLSQRDWSAFLYDEAYCSLLAGAADNSTKARLQAVAAKGSGAWLHAVPSAPLGTLLDNETTRIATGLRLGCDLVTPHQCRCGQPVDELAHHGLSCIISAGRRARHAGINDTFSRALRSCGYPCILEPQGLSAVDGKRPDGMTLTPFSRGKMLVWDATVTDSLAPSMVGGGAVSAGYAGSLAETRKLAKYASIGYPHEFQPLAFETLGGPGNITRKLLHRVGEQLNLATGDKRSAGFLRQRLDLDVQRGNAASVRGTLLMWSQPTLYEIE

SEQ ID NO: 16075 - protein, 961 aa, Dermanyssus gallinae
MMQHDPNNISSGGSTGSTTHSQQTACPLCNGQYTRRGLTRHIAAKHPSASLSSFATSSTPIDNNAQQTARIIEDIQSVAKRSRLLRIVPKSVRKQVAEALANVLSGVIADNNQQAWYTLFSFVPVVLRLPLSRNDTQSLSVIIRHNLREFSNGLRLADVVAPVTKKNRTFKNDRVRQTILKLTEGDVSGAARLIGSSDVLAPGTDHLAALRNKHPPAPPDLDWPDLPGIPLPCTTSGEEVIAAVKSFARSSAGGLDFIRPRLLIDLLSPTLGDTAGRLAAALAKIVDLLLWGVPPPQLRPIIFGARLFALQKKDGSVRPIACSSTLRRLAAKIACNRTRDRIREAIGPHQLGFAAQAGAKAAVHAARAFIDSRSLPGVLVKLDFRNAFNSVRRDHLLKAVGAHCPQLAHHVHQAYRYSSHLVLPDDLISSVTGLQQGDPLAPPLFCLSIKELVDSLNSSLNIWYLDDGVLGGDASMVAEDIRRVLEFRQISGLKLNPEKCEIYVTGDSAQAPDLRPLQALLPGCKITHDYDLELLGVPLRPQGLPRVLKKWQSVLKDVANNLTPLGAHRALFLLRSSFSATRVNHLLRGANLTGQLDDLRPLNELTLNTLESLLNLSLAPPARKQAQLPISKGGLGIPDPLISAGPAIVSSLLRSENKVIALLDEAGAVQYKDLTRRLQEELKTICSGAPDNPRSQHDWSALLHEKAYCGLLADAIDDAAKARLRAVAAKGSGAWLHALPSAPLGTLLDDETTQIGAGLRLGCDLVTPHQCKCGQPVDKLAHHGLSCVMSAGRRARHASINDTFSRALRSSGFPCILEPQGLSADDGKRPDGMTLTPFSRGRMLVWDATVTDSLAPSMVGGGAASAGYAGDLAETRKLAKYASIEYPHEFQPLAFETLGGPGNLTRKLLHRVGEQLNLAAGDKRSAAFLRQRLDLDVQRGNAASVRGTLLKWCQPTLYEIE

SEQ ID NO: 16076 - protein, 696 aa, Dermanyssus gallinae
MDLLSPTLGDTAGRLASALAKIVDLLLWGVPPPQLRPIIFGAKLFAIQKKDGSVRPIACSSTLRRLAAKIACNRTRDRIREATGSHQLGFAAQAGAETAVHAARAFIDLRSLPGVLVKLDFRNAFNTVRRDHLLKTVGAHCPQLAHYVYQAYRYSSHLVLPDDLISSATGLQQGDPLAPPLFCLSIKELVDSLKSSLNIWYLDDGVLGGDADMVAEDVRRVLEFRQISGLELNPEKCEIFVTGDSAQAPDLRPLEALLPGCKITLDHDLELLGVPLRPQGLTRALEKWQSVLKDVANNLTPLGAHRALFLLRSSFSATKVTHLLRGADLTGRLDDLRPLNELTLNTLESLLNLSLAPPARKQAQLPISKGGLGIPNPLISAGPAIVSSLLRSEDNAIALLDEAGAVRYNDHTRRLQEELETICSGAPDNPRSQHDWSALLHEKVYCGLLTGATDDSAKARLRAVAAKGSGAWLHALPSAPLGTLLDDETTRIGAGLRLGCDLVSSHQCKCGQLVDKLAHHGLSCIMSAGRRARHASINDTVSRALRSSGFPCILEPQGLSADNGKRPDGMTLTPFSRGRMLVWDATVTDSLAPSMVGGGAISAGHAGNLAEAKKLAKYASIGYPHEFQPLAFETLGGPGNLTRKLLHRVGEQLNLATGDKRSAAFLRQRLDLDVQRGNAASVRGTLLKWSQPTLYE

SEQ ID NO: 16077 - protein, 912 aa, Dermanyssus gallinae
MMEQDSNNIASGGLQSSVHSQRIACPLCNGQYTRRGLTRHIAAKHPSASANISTSTPTPTDNNRQQPARIIEDIQGAAKKLRLLRILPKPVRKQVAEALANVLLGVSADNNDEAWYALFSFAPVVLRLPPTRNDIQSLSVIIRHNLREFSNGLRLSEIVTPAPTKKRTFTNNRVRQTVLKLTEGDVSGAARLIGSSEVLAPSTDHLTALREKHPPAPPDLEWPAPPSLPLSCTTSGEEVVAAVKSFSRSSAGGLDFIRPRLLIDLLSPTLGDTAGRLASALAKVVDLLLWGAPPSQLLPIIFGARLFALQKKDGSVRPIACSSTLRRLAAKIACNRTRDIIGEATGPHQLGFAVPAGAETAVHAARAFIDSRTSPGVLVKLDFKNAFNSVRRDHLLKAVATHCPQLTHHVSQAYRTASYLALPDDLIASATGLQQGDPLAPPLFCLCIKEQVDSFKSPLNIWYLDDGVLGGDVDMVADDVRRVLDFRKTSGLELNPEKCEIYVTGDTAQTPDLRILQALLPGCKVTLDNDLELLGVPLRPEGITHALEKWQKKLKEVADNLAPLGSHRALFLLRSSFSATRVTHLLRGADLTGRLDDLRPLNELTLNALDSLLNLSLAPSSRKQAQLPISKGGLGIPDPLVSAGPAIVSSLFRSENNAIALLDEAGISQFTELKRRLYEELKTVCRGAPDNPLSQHDWSTFLHDEVYRGLLASAVDDTTRARLRAVAAKGSGAWLHALPSAPLGTLLDNETTRIGAGLRLGCDLVSPHQCKCGHPVDKLAYHGLSCIMSAGRRARHAGINDTFGRALRSSGFPCILEPQGLSTDDGKRPDGMTLTPFSRGRMLVWDATVTDSLAPSMVGGGAISAGHAGNLAEARKLAKYASIGYPHEFSTPSIRNLGRSWQLDSQAPPQSR

SEQ ID NO: 16078 - protein, 959 aa, Dermanyssus gallinae
MMQHDPNNTSSGGSNGSAAHSQQTACPLCNGQYTRRGLTRHIAAKHPSASLSSFTTSPTSVDNNIPQSARIIEDIQGVAKRSRLLRIVPKPVRKQVAEALTNVLSGVIADNNEHAWYALFSFVPVVLRLPPSRNDAQSLSVIIRHNLREFSNGLRLAEVVAPVAKKNRTFKNDRVRQTILKLTEGDVSGAARLIGSSDVLAPSTDHLAALRNKHPPAPPDLNWPAPPGLLLPCTTSGEEVIAAVKTFARSSTGGLDFIRPRLLMDLLSPTLGDTAGRLASALAKIVDLLLWGVPPPQLRPIIFGAKLFAIQKKDGSVRPIACSSTLRRLAAKIACNRTRDRIREATGSHQLGFAAQAGAEAAVHAARAFIDSRSLPGVLVKLDFRNAFNTVRRDHLLKAVGAHCPQLAHHVYQAYRYSSHLVLPDDLISSATGLQQGDPLAPPLFCLSIKELVDSLKSSLNIWYLDDGVLGGDADMVAEDVRRVLEFRQISGLELNPEKCEIFVTGDSAQAPDLRPLEALLPGCKITLDHDLELLGVPLRPQGLKRALEKWQNVLKDVANNLTPLGAHRALFLLRSSFSATKVTHLLRGADLTGRLDDLRPLNELTLNTLESLLNLSLAPPARKQAQLPISKGGLGIPDPLISAGPAIVSSLLRSENNAIALLDEAGAVQYNDHTRRLQEELETICSGAPDNPRSQHDWSALLHEKVYCGLLTGATDDSAKARLRAVAAKGSGAWLHALPSAPLGTLLDDETTRIGAGLRLGCDLVSSHQCKCGQPVDKLAHHGLSCIMSAGRRARHASINDTVSRALRSSGFPCILEPQGLSADNGKRPDGMTLTPFSRGRMLVWDATVTDSLAPSMVGGGAISAGHAGNLAEAKKLAKYASIDYPHEFQPLAFETLGGPGNLTRKLLYRVGEQLNLATGDKRSAAFLRQRLDLDVQRGNAASVRGTLLKWSQPTLYE

SEQ ID NO: 16079 - protein, 960 aa, Dermanyssus gallinae
MMEQDSNNIASGGLQSSVHSQRIACPLCNGQYTRRGLTRHIAAKHPSASANISTSTPTPTDNNRQQPARIIEDIQGAAKKLRLLRILPKPVRKQVAEALANVLLGVSADNNDEAWYALFSFAPVVLRLPPTRNDIQSLSVIIRHNLREFSNGLRLSEIVTPAPTKKRTFTNNRVRQTVLKLTEGDVSGAARLIGSSEVLAPSTDHLTALREKHPPAPPDLEWPAPPSLPLSCTTSGEEVVAAVKSFSRSSAGGLDFIRPRLLIDLLSPTLGDTAGRLASALAKVVDLLLWGAPPSQLLPIIFGARLFALQKKDGSVRPIACSSTLRRLAAKIACNRTRDIIGEATGPHQLGFAVPAGAEAAVHAARAFIDSRTSPGVLVKLDLKNAFNSVRRDHLLKAVATHCPQLTHHVSQAYRTASCLALPDDVIASATGLQQGDPLAPPLFCLCIKEQVDSFKSPLNIWYLDDGVLGGDVDMVADDVRRVLDFRKTSGLELNPEKCEIYVTGDTAQTPDLRILQALLPGCKVTLDNNLELLGVPLRPEGITHALEKWQKKLKEVADNLAPLGSHRALFLLRSSFSATRVTHLLRGADLTGRLDDLRPLNELTLNALDSLLNLSLAPSSRKQAQLPISKGGLGIPDPLVSAGPAIVSSLFRSENNAIALLDEAGISQFTELKRRLYEELKTVCRGAPDNPLSQHDWSTFLYDEVYCGLLASAVDDTTRARLRAVAAKGSGAWLHALPSAPLGTLLDNETTRIGAGLRLGCDLVSPHQCKCGHPVDKLAHHGLSCIMSAGRRARHAGINDTFGRALRSSGFPCILEPQGLSTDDGKRPDGMTLTPFSRGRMLVWDATVTDSLAPSMVGGGAISAGHAGNLAEARKLAKYASIGYPHEFQPLAFETLGGPGNLTRKLLHRVGEQLNLATGDKRSAAFLRQRLDLDVQRGNAASVRGTLLKWSQPTLYEIK

SEQ ID NO: 16080 - protein, 961 aa, Dermanyssus gallinae
MMQHDPNNISSGGSTGSTTHSQQTACPLCNGQYTRRGLTRHIAAKHPSASLSSFATSSTPIDNNAQQTARIIEDIQGVAKRSGLLRIVPKSVRKQVAEALANVLSGVIADNNQQAWYTLFSFVPVVLRLPLSRNDTQSLFVIIRHNLREFSNGLRLADVVAPVTKKKRTFKNDRVRQTILKLTEGDVSGAARLIGSSDVLAPGTDHLAALRNKHPPAPPDLDWPDLPGIPLPCTTSGEEVIAAVKSFARSSAGGLDFIRPRLLIDLLSPTLGDTAGRLAAALAKIVDLLLWGVPPPQLQPIIFGARLFALQKKDGSVRPIACSSTLRRLAAKIACNRTRDRIREAIGPHQLGFAAQAGAEAAVHAARAFIDSRSLPGVLVKLDFRNAFDYVRRDHLLKAVGAHCPELAHHVHQAYRYSSHLVLPDDLISSVTGLQQGDPLAPPLFCLSIKELVDSLNSSLNIWYLDDGVLGGDASMVAEDIRRVLEFRQISGLELNPEKCEIYVTGDSAQAPDLRPLQALLPGCKITHDYDLELLGVPLRPQGLPRVLKKWQSVLKDVANNLTPLGAHRALFLLRSSFSATRVNHLLRGANLTGQLDDLRPLNELTLNTLESLLNLSLAPPARKQAQLPISKGGLGIPDPLISAAPAIVSSLLRSENNVIALLDEAGAVQYKDLTRRLQEELKTICSGAPDNPRSQHDWSALLHEKAYCGLLADAIDDAAKARLRAVAAKGSGAWLHALPSAPLGTLLDDETTRIGAGLRLGCDLVTPHQCKCGQPVDKLAHHGLSCVMSAGRRARHASINDTFSRALRSSGFPCILEPQGLSADDGKRPDGMTLTPFSRGRMLVWDATVTDSLAPSMVGGGAASAGYAGDLAETRKLAKYASIEYPHEFQPLAFETLGGPGNLTRKLLHRVGEQLNLAAGDKRSAAFLRQRLDLDVQRGDASSVRGTLLKWCQPTLYEIE

SEQ ID NO: 16081 - protein, 961 aa, Dermanyssus gallinae
MMQHDPNNISSGGSTGATTHSQQTACPLCNGQYTRRGLTRHIAAKHPSASLSSFATSSTPIDNNAQQTARIIEDIQGVAKRSRLLRIVPKSVRKQVAEALANVLSGVIADNNQQAWYTLFSFVPVVLRLPLSRNDTQSLPVIIRHNLREFSNGLRLADVVAPVTKKNRTFKNDRVRQTILKLTEGDVSGAARLIGSSDVLAPGTDHLAALRNKHPPAPPDLDWPDLPGIPLPCTTSGEEVIAAVKSFARSSAGGLDFIRPRLLIDLLSPTLGDTAGRLAAALAKIVDLLLWGVPPPQLRPIIFGARLFALQKKDGSVRPIACSSTLRRLAAKIACNRTRDRIREAIGPHQLGFAAQAGAEAAVHAARAFIDSRSLPGVLVKLDFRNAFNSVRRDHLLKAVGAHCPQLAHHVHQAYRYSSHLVLPDYLISSVTGLQQGDPLAPPLFCLSIKELVDSLNSSLNIWYLDDGVLGGDASMVAEDIRRVLEFRQISGLELNPEKCEIYVTGDSAQAPDLRPLQALLPGCKITHDYDLELLGVPLRPQGLPRVLKKWQSVLKDVANNLTPLGAHRALFLLRSSFSATRVNHLLRGANLTGQLDDLRPLNELTLNTLESLLNLSLAPPARKQAQLPISKGGLGIPDPLISAGPAIVSSLLRSENKVIALLDEAGAVQYKDLTRRLQEELKTICSGAPDNPRSQHDWSALLHEKAYCGLLADAIDDAAKARLRAVAAKGSGAWLHALPSAPLGTLLDDETTRIGAGLRLGCDLVTPHQCKCGQPVDKLAHHGLSCVMSAGRRARHASINDTFSRALRSSGFPCILEPQGLSADDGKRPDGMTLTPFSRGRMLVWDATVTDSLAPSMVGGGAASAGYAGDLAETRKLAKYASIEYPHEFQPLAFETLGGPGNLTRKLLHRVGEQLNLAAGDKRSAAFLRQRLDLDVQRGNAASVRGTLLKWCQPTLYEIE

SEQ ID NO: 16082 - protein, 961 aa, Dermanyssus gallinae
MMQHDPNNISSGGSTGATTHSQQTACPLCNGQYTRRGLTRHIAAKHPSASLSSFATSSTPIDNNAQQTARIIEDIQGVAKRSRLLRIVPKSVRKQVAEALANVLSGVIADNNQQAWYTLFSFVPVVLRLPLSRNDSQSLSVIIRHNLREFSNGLRLADVVAPFTKKNRTFKNDRVRQTILKLTEGDVSGAARLIGSSDVLAPGTDHLAALRNKHPPAPPDLDWPDLPGIPLPCTTSGEEVIAAVKSFARSSAGGLDFIRPRLLIDLLSPTLGDTAGRLAAALAKIVDLLLWGVPPPQLRPIIFGARLFALQKKDGSVRPIACSSTLRRLAAKIACNRTRERIREAIGPHQLGFAAQAGAEAAVHAARAFIDSRSLPGVLVKLDFRNAFNSVRRDHLLKAVGAHCPQLAHHAHQAYRYSSHLVLPDDLISSVTGLQQGDPLAPPLFCLSIKELVDSLNSSLNIWYLDDGVLGGDASMVAEDIRRVLEFRQISGLELNPEKCEIYVTGDSAQAPDLRPLQALLPGCKITHDYDLELLGVPLRPQGLPRVLKKWQSVLKDVANNLTPLGAHRALFLLRSSFSATRVNHLLRGANLTGQLDDLRPLNELTLNTLESLLNLSLAPPARKQAQLPISKGGLGIPDPLISAGPAIVSSLLRSENKVIALLDEAGAVQYKDLTRRLQEELKTICSGAPDNPRSQHDWSALLHEKAYCGLLADAIDDAAKARLRAVAAKGSGAWLHALPSAPLGTLLDDETTRIGAGLRLGCDLVTPHQCKCGQPVDKLAHHGLSCVMSAGRRARHASINDTFSRALRSSGFPCILEPQGLSADDGKRPDGMTLTPFSRGRMLVWDATVTDSLAPSMVGGGAASAGYAGDLAETRKLAKYASIEYPHEFQPLAFETLGGPGNLTRKLLHRVGEQLNLAAGDKRSAAFLRQRLDLDVQRGNAASVRGTLLKWCQPTLYEIE

SEQ ID NO: 16083 - protein, 960 aa, Dermanyssus gallinae
MAEHISNNIASGESGLSTQSERIACPFCNGLYTRRGLTRHITAKHPSSSSNLSLLSHMPIDNNTQQPARIIENIQGAAKRLRLLRIVPKAVRKQVAEALTKVLLEVSADNNDIAWGALLSFVPVILRLPTTRNDAQSLSVIIRHNLREFSNGLRLAEILPPAAARTRTFTNDRVRQTILKLSEGDVSGAARLIGSSDALAPSTDHLTALRDKHPPAPPNLDWPASPGLPLPCTTSGEEVTAAVKSFSRSAAGVLDFIRPRLLMDLLSPTLGDTASRLASALAKVVDLLLWGAPPPQLLPIIFGARLFALQKKDGSVRPIACSSTLRRLAAKIACNRTRETIREAIGLHQLGFATPAGAEAAIHATRAFIDSRTLPGVLVKLDFKNAFNSVRRDYLSKAVLKHCPQLSHYFNQAYRNASCLVLPDDVIASATGLQQGDPLAPLLFCLGIKDLVDSLNSPLNVWYLDDGVLGGDADIVADDVRRVLDFRASSGLELNPEKCEIYVTGSSTQTPDLDTLQTLLPGCKVTLDCDLELLGVPLRPQGLTRALAKWQNKLKDVADNLAPLGAHRALFLLRSSFSATRVTHLLRGANLAEQVEDLRALNELTVNSLESLLNLSLAPSARKQAQLPISKGGLGIPDPLVSAGPAIVSSLFRSESNATALLDEAGIVHYNELKGRLHEELKTVCRGVPDNPLSQRDWSAFLYDEAYCSLLAGAADNSTKARLQAVAAKGSGAWLHAVPSAPLGTLLDNETTRIATGLRLGCDLVTPHQCRCGQPVDELAHHGLSCIISAGRRARHAGINDTFSRALRSCGYPCILEPQGLSAVDGKRPDGMTLTPFSRGKMLVWDATVTDSLAPSMVGGGAVSAGYAGSLAETRKLAKYAFIGYPHEFQPLAFETLGGPGNITRKLLHRVGEQLNLATGDKRSAGFLRQRLDLDVQRGNAASVRGTLLMWSQPTLYEIE

SEQ ID NO: 16084 - protein, 960 aa, Dermanyssus gallinae
MTEQDASNIASGGPGSSTHSHRITCPLCNGQYTRRGLTRHIAAKHPSASSNISTPTPTPIDNNTQQPARIIEDIQGAAKKLRLVRIVPKPVRKQVAEALTNVLLRVTANNNNDTWCALFSFAPVVLRLPPTRNDTQSLSVIIRHNLREFSNGARLSEVITPGPTQKRTFTNNRVRQTVLKLTEGDVSGAARLIGSSEVLASSTDHLTALCEKHPPAPADLDWPVPLSLPLPCTTSGEEVMAAVKSFSRSSAGGLDFIRPRLLMDLLSPTLGDTAGRLAGALAKVVDLLLWGAPPSQLLPIIFGARLFALQKTDGSVRPIACSSTLRRLAAKIACNRTRVRIGEETGPHQLGFAIPAGAEAAVHAARAYIESRTLPGVLVKLDFKNAFNTVRRDHLLKTVGTHCPQLTHYVNQAYRTASYLALQDDLIASATGLQQGDPLAPPLFCLSIKELVDSIKSPLNIWYLDDGVLGGDVDVVADDIRRVLDFRETSGLELNPRKCEIFVTGNTAQAPDLRILQALLPGCKVTHDNELELLGVPLRPEGLAHALERWQNKLKDVANNLAPLGAHRALFLLRSSFSATRITHLLRGADLTGRLDDLRPLNELTLNALETLLNLSLAPSARKQAQLPISRGGLGVPDPLVAAGPAIVSSLFRCENNAIALLDEAGICQYKEHQRRLYEELKIVCRDAPENPLSQHDWSTFLYDEAYSGLLAGAVNDSTKARLRAVAAKGSGAWLHALPSAPLGTLLDDETTRIRVGLRLGCDLVSPHQCKCGHPVDELAHHGLSCIMSAGRRARHAGINDTFGRALRSSGFPCILEPQGLSVDDGKRPDGMTLTPFSRGRMLVWDATVTDSLAPSMVGGGAISAGHAGNLAETRKLAKYASIGYPHEFQPLAFETLGGPGSLTRKLLHRVGTQLNLATGDKRSAAFLRQRLDLEVQRGNAASVRGTLLKWSQPTLYEIE

SEQ ID NO: 16085 - protein, 903 aa, Dermanyssus gallinae
MPIDNNTQQPARIIENIQGAAKRLRLLRIVPKAVRKQVAEALTKVLLGVSADNNDIAWGALLSFVPVILRLPTTRNDAQSLSVIIRHNLREFSNGLRLAEILPPAAARTRTFTNDRVRQTILKLSEGDVLGAARLIGSSDALAPSTDHLRALRDKHPPAPPNLDWPASPGLPLPCTTSGEEVTAAVKSFSRSAAGGLDFIRPRLLMDLLSPTLGDTASRLASALAKVVDLLLWGAPPPQLLPIIFGARLFALQKKDGSVRPIACSSTLRRLAAKIACNRTRETIREAIGLHQLGFATPAGAEAAIHATRAFIDSRTLPGVLVKLDFKNAFNSVRRDYLLKAVLKHCPQLSHYFNQAYRNAFCLVLPDDVTASATGLQQGDPLAPLLFCLGIKDLVDSLNSPLNVWYLDDGVLGGDADIVADDVRRVLDFRASSGLELNPEKCEIYVTGSSTQTPDLDTLQTLLPGCKVTLDCDLELLGVPLRPQGLTRALAKWQNKLKDVADNLAPLGAHRALFLLRSSFSATRVTHLLRGANLTEQVEDLRALNELTVNSLESLLNLSLAPSARKQAQLPISKGGLGIPDPLVSAGPLIVSSLFRSESNATALLDEAGIVQYNELKGRLYEELKTVCRGVPDNPLSQRNWSAFLYDEAYCSLLAGAADNSTKARLQAVAAKGSGAWLHAVPSVPLGTLLDNETTRIATGLRLGCDLVTPHQCRCGQPVDELAHHGLSCIISAGRRARHAGINDTFSRALRSCGYPCILEPQGLSAVDGKRPDGMTLTPFSRGKMLVWDATVTDSLAPSMVGGGAVSAGYAGSLAETRKLAKYASIGYPHEFQPLAFETLGGPGNITRKLLHRVGEQLNLATGDKRSAGFLRQRLDLDVQRGNAASVRGTLLMWSQPTLYEIE

SEQ ID NO: 16086 - protein, 960 aa, Dermanyssus gallinae
MAEHISNNIASGESGLSTQSERIACPFCNGLYTRRGLTRHITAKHPSSSSNLSLLSHMPIDNNTQQPARIIENIQGAAKRLRLLRIVPKAVRKQVAEALTKVLLEVSADNNDIAWGALLSFVPVILRLFTTRNDAQSLSVIIRHNLREFSNGLRLAEILPPAAARTRTFTNDRVRQIILKLSEGDVSGAARLIGSSDALAPSTDHLTALRDKHPPAPPNLDWPASPGLPLPCTTSGEEVTAAVKSFSRSAAGGLDFIRPRLLMDLLSPTLGDTASRLASALAKVVDLLLWGAPPPQLLPIIFGARLFALQKKDGSVRPIACSSTLRRLAAKIACNRTRETIREAIGLHQLGFATPAGAEAAIHATRAFIDSRTLPGVLVKLDFKNAFNSLRRDYLLKAVLKHCPQLSHYFNQAYRNASCLVLPDDVIASATGLQQGDPLAPLLFCLGIKDLVDSLNSPLNVWYLDNGVLGGNADLVADDVRRVLDFRASSGLELNPEKCEIYVTGSSTQTPDLDTLQTLLPGCKVTLDCDLELLGVPLRPQGLTRALAKWQNKLKDVADNLAPLGAHRALFLLRSSFSATRVTHLLRGANLTEQVEDLRALNELTVNSLESLLNLSLAPSARKQAQLPISKGGLGIPDPLVSAGPAIVSSLFRSESNATALLDEAGIVQYNELKGRLHEELKTVCRGVPDNPLSQRDWSAFLYDEAYCSLLAGAADNSTKARLQAVAAKGSGAWLHAVPSAPLGTLLDNETTRIATGLRLGCDLVTPHQCRCGQPVDELAHHGLSCIISAGRRARHAGINDTFSRALRSCGYPCILEPQGLSAVDGKRPDGMTLTPFSRGKMLVWDATVTDSLAPSMVGGGAVSAGYAGSLAETRKLAKYASIGYPHEFQPLAFETLGGPGNITRKLLHRVGEQLNLATGDKRSAGFLGQRLDLDVQRGNAASVRGTLLMWSQPTLYEIE

SEQ ID NO: 16087 - protein, 1165 aa, Morbakka virulenta
MATSVSYRRNRNYTKQFQWTYELNKDVFDCYNKAREISGKGYMKRMKLLWDEIHPELNFTEKNLRQQATYVIQRGYILETNTNSNVNNNPQGQLAGTVNNNDQRNNEEHDKVDNGINDIVNDIPPNGTPIITEQQSDLPNNRELYEDLRRRFLDNYGKYRSVDNDRIELTSVKKRPNEEELNILNFIAKECMNDIKGKRSVTYEDINCLLYVVAVTLKQHKNDVSLKPFAEKRSTEPEWMRQLHQKIDRLRRTIAHTELILKCKQTETFTRKQLNVLKSLKKKFGNTKKQTLIFRLASIKNELKATAVSLSYKKKVYERKRINRRFTNNPKSVYRTFRGDSVDVKELPSKEEVENYWRSIWGVEGNFNHEAEWLKTLERDYCTQVTPLENCSITLDLLSKTIKRLQDNKSPGSDLITGYWYKNLTFYRDELAALFEKSFNGHADIPLWLSRAKTRLLPKNKETNIPKNYRPIALLNIMLKLYTGCINQLLQTYCSQNKIAAIEQAGGRKDVWGCFEQLMINKTILDEVKNNRRSLVTMWLDYQKAFDSVPHEWLIKALRLAKVPEKIVSALQSLMTKWSSKVQLQGNGSPLVTESIQYKRGIFQGDSLSVLLFILAVNPLSFLLNQHRGYQIGNNGNRDTNITHLFFVDDLKLYSTNLNQMKMLLDIVTQFSNDIGMLFGEPKCAYIIIEKGKLATSGEPIVINGVTIQPLKANDSYKYLGQDESVGYAGPINKDRVINEYKKRMKKIWTSELSAYHKHIAHNAFAVPVLIPTFGILEWTIEEIDNIDIQTRKILNMTNNFHRNSDIDRLYVPRKKGGRGLKSIRIAFESRMVTARQHLRQNTNDNKYIVKMIQHEEKKLLRVGKELLESMEINDVADQKPRNVGKLFTAKCLERKQELFFAKPLHGYTAKTVAGINEIDVKSTREWLTNKYINSHSEAYACAIEEQEIGTKDIIYRRKQRQNQNPPGDNKCRLCKQQVEDITHVISSCSRMSSRYYLPLRHDIIAKHVYEKLRNKHNLETRVTYDDQFIERNGQHEYWWNVPVRTPSKVQHNRPDLIVWNSSDKTCQVVEFSCPADVNVARKINEKENAYGPLLRMLQFMYTEYKFSFVPVIIGALGTVPRNLKMSLSIMGFNEKECRDIVSRLQQKSILGTVKIVKSFMNFQK

SEQ ID NO: 16088 - protein, 1165 aa, Morbakka virulenta
MATSVSYRRNRNYTKQFQWTYELNKDVFDCYNKAREISGKGYMKRMKLLWDEIHPELNFTEKNLRQQATYVIQRGYILETNTNSNVNNNPQGQLAGTVNNNDQRNNEEHDKVDNGINDIVNDIPPNGTPIITEQQSDLPNNRELYEDLRRRFLDNYGKYRSVDNDRIELTSVKKRPNEEELNILNFIAKECMNDIKGKRSVTYEDINCLLYVVAVTLKQHKNDVSLKPFAEKRSTEPEWMRQLHQKIDRLRRTIAHTELILKCKQTETFTRKQLNVLKSLKKKFGNTKKQTLIFRLASIKNELKATAVSLSYKKKVYERKRINRRFTNNPKSVYRTFRGDSVDVKELPSKEEVENYWRSIWGVEGNFNHEAEWLKTLERDYCTQVTPLENCSITLDLLSKTIKRLQDNKSPGSDLITGYWYKNLTFYRDELAALFEKSFNGHADIPLWLSRAKTRLLPKNKETNIPKNYRPIALLNIMLKLYTGCINQLLQTYCSQNKIAAIEQAGGRKDVWGCFEQLMINKTILDEVKNNRRSLVTMWLDYQKAFDSVPHEWLIKALRLAKVPEKIVSALQSLMTKWSSKVQLQGNGSPLVTESIQYKRGIFQGDSLSVLLFILAVNPLSFLLNQHRGYQIGNNGNRDTNITHLFFVDDLKLYSTNLNQMKMLLDIVTQFSNDIGMLFGEPKCAYIIIEKGKLATSGEPIVINGVTIQPLKANDSYKYLGQDESVGYAGPINKDRVINEYKKRMKKIWTSELSAYHKHIAHNAFAVPVLIPTFGILEWTIEEIDNIDIQTRKILNMTNNFHRNSDIDRLYVPRKKGGRGLKSIRIAFESRMVTARQHLRQNTNDNKYIVKMIQHEEKKLLRVGKELLESMEINDVADQKPRNVGKLFTAKCLERKQELFFAKPLHGYTAKTVAGINEIDVKSTREWLTNKYINSHSEAYACAIEEQEIGTKDIIYRRKQRQNQNPPGDNKCRLCKQQVEDITHVISSCSRMSSRYYLPLRHDIIAKHVYEKLRNKHNLETRVTYDDQFIERNGQHEYWWNVPVRTPSKVQHNRPDLIVWNSSDKTCQVVEFSCPADVNVARKINEKENAYGPLLRMLQFMYTEYKFSFVPVIIGALGTVPRNLKMSLSIMGFNEKECRDIVSRLQQKSILGTVKIVKTFMNFQK

SEQ ID NO: 16089 - protein, 1063 aa, Morbakka virulenta
MTKEEHDKVDNGINDIVNDIPPNGTPIITEQQSDLPNNRELYEDLRRRFLDNYGKYRSVDNDRIELTSVKKRPNEEELNILNFIAKECMNDIKGKRSVTYEDINCLLYVVAVTLKQHKNDVSLKPFAEKRSTEPEWMRQLHQKIDRLRRTIAHTELILKCKQTETFTRKQLNVLKSLKKKFGNTKKQTLIFRLASIKNELKATAVSLSYKKKVYERKRINRRFTNNPKSVYRTFRGDSVDVKELPSKEEVENYWRSIWGVEGNFNHEAEWLKTLERDYCTQVTPLENCSITLDLLSKTIKRLQDNKSPGSDLITGYWYKNLTFYRDELAALFEKSFNGHADIPLWLSRAKTRLLPKNKETNIPKNYRPIALLNIMLKLYTGCINQLLQTYCSQNKIAAIEQAGGRKDVWGCFEQLMINKTILDEVKNNRRSLVTMWLDYQKAFDSVPHEWLIKALRLAKVPEKIVSALQSLMTKWSSKVQLQGNGSPLVTESIQYKRGIFQGDSLSVLLFILAVNPLSFLLNQHRGYQIGNNGNRDTNITHLFFVDDLKLYSTNLNQMKMLLDIVTQFSNDIGMLFGEPKCAYIIIEKGKLATSGEPIVINGVTIQPLKANDSYKYLGQDESVGYAGPINKDRVINEYKKRMKKIWTSELSAYHKHIAHNAFAVPVLIPTFGILEWTIEEIDNIDIQTRKILNMTNNFHRNSDIDRLYVPRKKGGRGLKSIRIAFESRMVTARQHLRQNTNDNKYIVKMIQHEEKKLLRVGKELLESMEINDVADQKPRNVGKLFTAKCLERKQELFFAKPLHGYTAKTVAGINEIDVKSTREWLTNKYINSHSEAYACAIEEREIGTKDIIYRRKQRQNQNPPGDNKCRLCKQQVEDITLVISSCSRMSSRYYLPLRHDIVAKHVYEKLRNKHNLETRVTYDDQFIERNGQHEYWWNVPVRTPTKVQHNRPDLIAWNSPDKTCQVVEFSCPADVNVVRKINEKENAYGPLLRMLQFMYTEYKFSFVPVIMGALGTVPRNLKMSLSSMGFNEKECWNIVSRFQQKNYFSHGKNCQNFYEFPKI

SEQ ID NO: 16090 - protein, 1029 aa, Trypanosomatidae sp.
MAEPPGATVPSVAEHLKRRRVEGSEPVAVGSRQEGLSGESAVETIVVESGSEADEESTAGGLGASRQAPGDDSGGPGPRAEEDLAPVGYLYPENLAVPQGAACPVVGCGYRPNTRVGPRLVEHLNTVHRDILGNIPVDAWRRQGLVRCLRCGSALTASGHGRGAHGGKCGPYRSRNAAIRARTQSFFGGISQNSDTLTAGNGVSEAGGLVEVGRVEDPTTDPWYRVRTPLKRRIYRTDFRVWQGLARPVLLGYSLADTAGKEGRLLALLNLPRDHLEVQVNAKRGIQPQPAEIEAQVRRKVVELAGIGAVGRAMAVMTRGRLVEVPLERVMEQLEELHPQEDPRGYPAAPDTGEVLRAKEQKVRRAIAARMGRGTAPGLDGWTRELLLPLAEDPALLHEITSVVSDIMQGKVAEVVARRLRSSAVTPIPKDEAGTKIRPIVPESAWLKLASLVAMAEIPSSFKETFKGWQYGVWGDVAKAVAKIRRDSEEHEYLVALDGVNAYNTMSRAHILQAVYAEQRLKPIWGVVKVALGGPGFLGVYRDGCLKGNLWSTKGIRQGMVLGPLLYATGMAAAIGPVRQRIPGVPVTAYIDDITLAASGAEGARAAEAYADALETVGVVTNARKSMVVGPEGTRVGIEGVELPVVTEARILGAHFRARGTPEARTIEWLQAAVEKWQPIHQKLRQDIIPKNIAMMMTRISLGSKMTFLLQTHSPQELETAAKTADDEVEQTLQHLVGQVEITTRARLLAQLPIREGGLGLRRSSEIAKFAQADVGQGEAHQAHTKALDEGIKHQLQPLLSESEVQILKSNAGMGAGRVLTDSSLRIPDVAATIALRERLLLRVLPEGMQCVCGGDATNYHVHTCSNIPTKPRTRRHDGVVDELVALARKMGYEPSKEPRADVTSRARPDLYITGSLKPAATDVTVTYPGRQARGAPLPLQQAYRNKMGAWEAWGNLRGVDMQPVVLGTNAEIHPESAKWIRRLTSVEDKDKIHTSYNEVTGRIVETVLVGNVELFNAVTNLALVRELM

SEQ ID NO: 16091 - protein, 1029 aa, Crithidia fasciculata
MAEPPGATVPSVAEHLKRRRVEGSEPVVVGSRQEGLSGESAVEAIVVESGSEADEESTARGLGASRQAPGDDSGGPVPRAEEDLAPVGYLYPENLAVPQGAACPVVGCGYRPNTRVGPRLVEHLNTVHRDILGNIPVDAWRRQGLVRCLRCGSALTASGHGRGAHGGKCGPYRSRNAAIRARTQSFFGGISQNSDTLTAGNGVSEAGGLVEVGRVEDPTTDPWYRVRTPLKRQIYRTDFRVWQGLARPVLLGYSLADTAGKEGRLLALLNLPRDHLEVQVNAKRGIQPQPAEIEAQVRRKVVELAGIGAVGRAMAVMTRGRLVEVPLERVMEQLEELHPQEDPRGYPAAPDTSEVLRAKEQKVRRAIAARMGRGTAPGLDGWTRELLLPLAEDPALLHEITSVVSDIMQGKVAEVVARRLRSSAVTPIPKDEAGTKIRPIVPESAWLKLASLVAMAEIPSSFKETFKGWQYGVWGDVAKAVAKIRRDSEEHEYLVALDGVNAYNTMSRAHILQAVYAEQRLKPIWGVVKVALGGPGFLGVYRDGCLKGNLWSTKGIRQGMVLGPLLYATGMAAAIGPVRQRIPGVPVTAYIDDITLAASGAEGARAAEAYADALETVGVVTNARKSMVVGPEGTRVGIGGVDLPVVAEARILGAHFRARGTPEARTIEWLQAAVEKWRPIHQKLRQDIIPKNIAMMMTRISLGSKMTFLLQTHSPQELETAAKTADDEVEQTLQHLMGQVEITPRARLLAQLPIREGGLGLRRSSEIAKFAQADVGQGEAHQAHTKALDEGIKHQLQPLLSESEVQILKSNAGMGAGRVLTDSSLRIPDVAATIALRERLLLRVLPEGMQCVCGGDATNYHVHTCSNIPTKPRTRRHDGVVDELVALARKMGYEPSKEPRADVTSRARPDLYITGSLKPAATDVTITYPGRQARGAPLPLQQAYRNKMGAWEAWGNLRGVDMQPVVLGTNAEIHPESAKWIRRLTSVEDKDKIHTSYNEVTGRIVETVLVGNVELFNAVTNLALVRELM

SEQ ID NO: 16092 - protein, 1029 aa, Trypanosomatidae sp.; identical to SEQ ID NO: 16090

SEQ ID NO: 16093 - protein, 898 aa, Bradysia odoriphaga
MYKCKCSLPLVRIIQKSVRSAVCQELAKVIEFVIAKNDMFAWCRLLCFPLIVLNTIPKSSFKDNHRPNVIRHNLKIFSEISDVAGLFNELLRLLSFERPKKPLCHSEKLIIKIAQRKISEGDIGGAVRVLSSQEGMAECTPENIEKLQLKHPDENSPIENDPIPNIEQFDTSTEQVVNAIKHFPISSSGGIDGLRPRHLKDLISFSCGESSTKLTAAIAKLVNVIRSGKVLQIIEPIFFGASLIALAKTNGDLRPIAIGLVWRRLAGKIGCFAVKTPLSEILAPIQNGFGVRGGAEAIVHAVRAFCKINHINPIAIIKFDFRNAFNEMLRKFLLKEVKRSAPSLFPMLQQAYGNASCLFFGDSIISSKRGTQQGDPCAPAAFSIGLMPLTHSLLSQLNAWFLDDGVIGDEFEAVLRDIKKVIDFSKVSGLTLNTSKCEVYFINASPEAKEEMLEKLNDLLPGIRLIEAANFKLLGAPILEEGLDEALSSGLDTVKTLCSRLPLLDTHPALRLLRCSLSSPRFQYLLRTSPTFTHESRLTEIDEFYRSTLETITNNKIHDTSWRQATLPLAMSGLGIRSTVDLAFPAYFSSMFQSAAISDRILAKLNVHIIDPDFVSLVEAYPAEWTPATLETKMVQGAWDSLRCKAIFAELISTSGPTDRARLLASSSKTSSKWLQAVPSHQLGLLLDNDSARIAIALRLGTKVCKPHQCICGEMVDPKGYHALTCNKTKGKYAQHAEINKIFSMAFSSAGFPTDLEPYGLSRRDGKRPDGLTCYPWSRGRSLIWDVTVVNTTASSYLSLTSAQCGSAADQAERAKHNNYLDLKQHYEFTPLAFETLGAVGPETQIFLNKLGKLMKKKTGENRSLDFLLQRISLAIQRGNSCSIRDTFGDIIENNVFM

SEQ ID NO: 16094 - protein, 1049 aa, Bradysia odoriphaga
MDSDTDDGDQNVCPICSKTFPTMAGIRQHWTKRHTDNEIQSAVETNSQSHINSANAVIFTPAPITLASSVPSVSPIRSSIHDLNNANVTINNRVSCGVCGFLAKNERGLNVHLRSHNNQPTIGEPQDFPSQFDLDPLDTANIVLKFGELIYKCKCTIPLVRIIQKSVRTIVCQEYTKVIENVVVKNDLFAWCRLLSFPLIVLNTIPKSGFKDNHRPNAIRHNLSVFSKITDVAGLFNELLNLLSFERPKKPLCHSEKLTIKIAQRKIGEGDIGGAVRVLSSQEGIADYTSENVGKLQHKHPDENLPIEEETITNIEQFDTSIEQVTNAIRHFPISSSGGIDGLRPRHLKDLISFTCGDESAKLSLAIAKFVNVIRSGKVLSLIEPVFFGAALIALAKDNGDLRPIAIGLTWRRLAGKIGCFAVKTPLSQALGPIQNGFGVRGGSEAIVHAVRAFCKSKHTSPIAIIKFDFRNAFNEMLRRFLLKEIKRTAPSLFPMLQQAYRCASFLFFGDAIISSKRGTQQGDPCAPAAFSIGLMPLTHSLMSRLNAWFLDDGVIGDEFQSVLDDIRKVIAFSNESGLTLNTSKCEVYFVNATPQAKDEMLEELNNVLPGIKQVEASSFKLLGAPIFHEGISEALNSGLDTVKTLCKRLPSLDIHPALRILRCSLSSPRFQYLLRTSPTFLHQTELNEIDTYYRHTLEAITNNTITDTSWKQATFPLSFAGLGIRSTVSLAHSAYFSSVFQSEELANHILAKSDLHIVNTEFLSMIESYPLEWTPATIESKKSQSAWDKLRCQTEFEELLSLSGPTDRARLLASSSKTSTKWLQAVPSPQLGLLLDNDSARIAVALRLGNRVCEPHQCICGERVDYNGYHGLTCNKTKGKYAQHAEINKIFSMAFSSGGVPNRLEPYGLSRRDGKRPDGITSYPWNRGRLLIWDVTVVNTTAISYLNLTSIKCGAAADQAERSKHNNYIDLKRQYEFTPLAFETFGAIGPETDIFIRKLGKLMKKKTGESRSRDFLLQRISIAIQRGNAISIRDTFCDISNNNSNVFM

SEQ ID NO: 16095 - protein, 1129 aa, Bradysia odoriphaga
MTKVLLNAIYNARYAEVSFSITIRRTLQSVFWSARKAVVGETIMWNSFTSLKVSTEVRRKFVYVHPRLRIRLQCDLSVPLNGLLTMDSESDDEENVCPICLKTFKSMAGIRQHWTKGHTATEIQSAVVINSQSSINLLPPPTSPTSTIPLALTQAVNPISTAALSSREIVNNRISCDVCGFLAKNERGLNVHLRSHNSNSNINIGDTQDLPTHFYFDPLDTTNAVQKLGELLYKCKCSLPIVRIIQKSVRKIVCQEFAKVIECVVAKNDLFAWCRLLCFPMIVLNTIPKSSFKDNHRPNIIRHNLKIFTDIVDIAGLFKELLSLLSFDRPKKPLCHSERLIIKIAQRKISEGDIGGAVRVLSSQDGIADCTPENIEKLRRKHPDENLPIEEESIPNLECFDTSTEQVVNAIKHFPISSSGGIDGLRPRHLKDLISFSCGEASAKLTSAIAKLANVIRSGKVLQVIEPIFFGASLIALAKTNGDLRPIAIGLVWRRLAFKIGCFAVKTPLSEVLSPIQNGFGVRGGCEAIVHAVRAFCKASHVNPTVVIKFDFQNAFNEMLRRFLLKEVKKTAPSLFPMLQQAYRSASCLFFGNAIISSKRGTQQGDPCAPAAFSIGLMPLTHSLLSQLNAWFLDDGVIGDEFDAAVRDVKKVIAFSDESGLTLNPSKCEVFFINTTPDEKDRMLHELNDLLPGIKVIEPANFKLLGTPILEEGLNEALTSGLDVVKTLCRRLPLLDTQPALRLLRCSLSSPRFQYLLRTSPAFLLEARLSEIDGFYRSTLETITNNSFSDTSWKQATLPMAFAGIGIRSTVDLACPAYFSSVFQSEELSDRILSKSNLHIINSQFLSLIEAYPAEWTPATLAFRKDQNVWDNLRCKSTFNELMSLSGPSDRARLLASSSKTSSKWLQAVPSHQLGLLLDNDSARIAVALRLGNKVCEPHQCICGEMVGSNGYHALTCNKTSGKYVQHADINKIFSMAFSSAGVPNNLEPYGLSRLDGKRPDGLTCYPWSRGRSLIWDVTVVNTTAPSYLNLTSVQCGSAADLAERGKHNDYIDLKQFYEFTPLAFETFGAVGPETDLFLSKLGKLMKEKTGEARSLDFLLQRISISIQRGNSCSIRDTFRDNFCDNVFL

SEQ ID NO: 16096 - protein, 739 aa, Bradysia odoriphaga
METLPNIEAFDTSNEQIMNTIRHFPISSSGGIDGLRPRHLKDLVSFSCGDAGGKLTAASAKLVNIIRSGEVFDSILPIFYGASLIALAKENGDIRPIAIGLVWRRLAGKIGCFTVKESLSQLLRPIQNGFGVRGGSEAIVHAVRTFARGNHSNPTAIIKYDFRNAFNEMFRKFMLNEIKIAAPSLFPMLQQAYRFPSSLFFGDAIVLSKRGTQQGDPCAPAAFSIGLRRLTHSLKSRLNSWFLDDGVTGDIFNTILEDIRRVLAFSAESGLTLNPAKCEVYFINTQPEEKEEMLEELNFLLPGIKVLDDTSFKLLGAPILDEGISDSLSKGLEATKTLCKRLPSLDIHPALRVLRSSLSSPRFQYLLRTTPAFLHSAKLDEIDEFYRHTLESITNNKFSDTSWIQATLPMSMAGLGIRRTTDLAQPAYFSSIFQSEELSNLILANTNLRIFDQQIASMINDYPSELTPSKEDLKKLQSSWDNLRSKSIFDELLSSSGPTDRARLLASSTKTSSKWLQAVPSHQLGLLLDNDSARTAVVLRCGNYVYEPHRCVCGEMVDPKGYHALSCNKTKGKYPRHGEINKIFSMASGSAGVPNNIEPYDLSRRDGKRPDGVTSYPWSRGRPLIWDVTVVNSIATSYLNVTSLASGAAADQAERHKHNNYIDLRATYNFTPLAFETFGAIGPETAIFLKKLGKLMKKNTGEARSLDYLLQRVSIAIQRGNSICIRDTFDDGCDFNVFM

SEQ ID NO: 16097 - protein, 752 aa, Chrysotoxum bicinctum
MPSCPITQEEVTSATRFVSNWKAPGPDRIQNIWIKKLPVLHKCIARHFTTWLEEPDEVPAFLMQGSTFLLPKSSPSTNPAGYRPITCLSTMYKLFTKIITNRIYKHCENNNIVTEEQKGCAKDSQGCKEQLIVDTIAVRQALQGKRNLSMAFVDYKKAFDSVPHSYLHEILEIYKIDSKIRRFLKVISEKWCVILHLGGKTSAKINIRRGILQGDAFSPLWFCLSLNPLSNLLKSLNIGFTIKAETGTQTINHLLYVDDLKLYANGKEKVHRLLNTVKCFNGDIKMEFGSEKCKIVHLKKGKIQNDDTGYHIDEQNVIANLTDEESYKYLGLVQLKGICDSTIKQALVNQFIKRLKVVLESKLNAGNTVKAINTWAIPILTYSFGVVKWSDTDLNNIMRSIRTHLTKHRYHHPKSAVERVVLPRCEGGRGLIDVAQLHHTQICHLRSYFERKTETSSLIRTVCLADRNHTPLNLRSQSYETPTNVQSDAALSEIWKNKAIHGIHRKVLEQENIHQEYSNLWLKRGQLFAETEGFIIAIQDRVIPTKNYRRAILKEEMVNDLCRRCQASSETIDHILGGCTNLAAHEYTARHNQVAKIVYLRIVKDLKLTEITEPYYKYNPPAVLENSEFKLYWDRAITTDQSIRANRPDIVVFEKSAKKITIYDIAIPLSHNLQTAYSSKIGKYTELANEMKAMYHAESVNIVPIVISATGLITKIMVLKMEKENLIVDLERMQKAVILNTCNIVRRFLQIS

SEQ ID NO: 16098 - protein, 1052 aa, Chrysotoxum bicinctum
MIIIIIINLTPENSLQEEVQRNNATEPQEPPLAAAANINNSEPLPIEETREEPIDNSVYNTLDEHFRTALFEYENSSPLERNTLPKLKSFKQIEKLTNILNNRILPEHVSSRISFERLHLLLYASAVAVAKTLGKKIQNILPASARIPKVPSWERRLENKIKRLRADIGRINAFLAGCRTNKVKKQIKTLCAQNQSIPPTTGGIVDIKDKKVQLLAATSKRLARYRLSRERKNQNRRFSTDERSFYRSIVRPHANETDGEMANIEEATTFWKKIWDRSDEHVHRAPWLVNERSQHENTTAMTSYGVSEEEVAVAIKAVSNWKAPGPDRIQNIWIKKLSIFHRPLAMHFTLWLDEPETMPGFLMQGNTFLLLKGNPTPNPAGYRPITCLSTIYKLFTKLITSRVYRHCNDNNIMTEEQKGCAKESQGCKEQLIVDSVLVRQAVQGKRNLSMAFIDYKKAFDSVPHSYLHEILEVYKIDPKIRRFLKVASEQWCVILHLGGQTSAKVNIRSGILQGDAFSPLWFCLSLNPLSNLLKSLNIGFSIKAETGTQQLNHLLYVDDLKLYANSEEKIHRLIKTVKCFSDDIKMEFGLDKCKVVHLRKGKVQSDDPGYCIDEQNVISNLSDGESYKYLGLIQLKGICDSDIKSGLIKEFNRRLRLVLQSKLNAGNIFKAINTWAIPTLTFSFGVVKWSDTDLDNIMRSIRTQLTKHRFHHPKSAIERIVLPRCEGGRGLIDIPQLHHKQILSLRSYFGVKSRTSCFLNTICLADKHHTPLNLRSQTYDIPPNVQTEAALIDTWKNKSLHGTHRKSLEQETIHKPTSNLWLTRGKLFAETEGFIISIQDKVVATKNYRRIILHDIMPNDLCRRCQASSETIDHILGGCTSLATHDYTSRHNQVAKIVHSRLAVDLKLAVEKQPYYKYNPPAVLENNAFKLYWDRSIVTDQTIRANRPDIVMFDKISKKITIYDVAIPLTQNLQATYSTKIGKYTELAHEMKAMYRADSVNIVPIVISATGVITKSLIVQLEKEKLSSELEQMQKAVILSTCNIVRRFLQLQ

SEQ ID NO: 16099 - protein, 1203 aa, Chrysotoxum bicinctum
MEMQNQNVSNRVGISTQTSADSATAGAGLAPEGDESPAELHLINTAQPTIDTRPSTTPASSVLINSGFSTTNAGLPRQRIKWSTEMNKSIMRCYYISTKIETELHVYRAEMRNLFLNLFPQYIHLTEQNIADRKRAIITKKLLTDYELQALKQEATQHLNLTPENSLQEEVQRNNATQPQEPPLAAAANINNSEPLPIEETREEPIDNSVYNTLDEHFRTALFEYENSSPLERNTLPKLKSFKQIEKLTNMLNNRILPEHVSSRISFERLHLLLYASAVAVTKTLGKKIQNILPASARIPKVPSWERRLENKIKRLRADIGRINAFLAGCRTNKVKKQIKTLHAQNQSIPPTTGGIVDIKDKKVQLLAATSKRLARYRLSRERKNQNRRFSTDERSFYRSIVRPHANETDGEMANIEEATTFWKKIWDRSDEHVHRAPWLVNERSQHENTTAMTSYGVSEEEVAVAIKAVSNWKAPGPDRIQNIWIKKLSIFHRPLAMHFTLWLDEPETMPGFLMQGNTFLLLKGNPTPNPAGYRPITCLSTIYKLFTKLISSRVYRHCNDNNIMTEEQKGCAKESQGCKEQLIVDSVLVRQAVQGKRNLSMAFIDYKKAFDSVPHSYLHEILEVYKIDPKIRRFLKVASEQWCVILHLGGQTSSKVNIRSGILQGDAFSPLWFCLSLNPLSNLLKSLNIGFSIKAETGTQQLNHLLYVDDLKLYANSEEKIHRLIKTVKCFSDDIKMEFGLDKCKVVHLRKGKVQSDDPGYCIDEQNLISNLSDGESYKYLGLIQLKGICDSDIKSGLIKEFNRRLRLVLQSKLNAGNIFKAINTWAIPTFTFSFGVVKWSDTDLDKIMRSIRTQLTKHRFHHPKSAIERIVLPRCEGGRGLIDIPQLHHKQILSLRSYFGVKSRTSCFLNTICLADKHHTPLNLRSQTYDIPPNVQTEAALIDTWKNKSLHGTHRKSLEQETIHKPTSNLWLTRGKLFAETEGFIISIQDKVVATKNYRRIILHDVMPNDLCRRCQASSETIDHILGGCTSLATHDYTSRHNQVAKIVHSRLAVDLKLVVEKQPYYKYNPPAVLENSAFKLYWDRSIVTDQTIRANRPDIVMFDKISKKITIYDVAIPLTQNLQATYSTKIGKYTELAHEMKAMYRADSVNIVPIVISATGVITKSLIVQLEKEKLSSELEQMQKAVILSTCNIVRRFLQL

SEQ ID NO: 16100 - protein, 1204 aa, Chrysotoxum bicinctum
MEMQNQNVSNRVGISTQTSADSATAGAGLAPEGDESPAELHLINTAQPTIDTRPSTTPASSVLINSGFSTTNAGLPRQRIKWSTEMNKSIMRCYYISTKIETELHVYRAEMRNLFLNLFPQYIHLTEQNIADRKRAIVTKKLLTDYELQALKQEATQHLNLTPENSLQEEVQRNNATEPQEPPLAAAANINNSEPLPIEETREEPIDNSVYNTLDEHFRTALFEYENSSPLERNTLPKLKSFKQIEKLTNILNNRILPEHVSSRISFERLHLLLYASAVAVAKTLGKKIQNILPASARIPKVQSWERRLENKIKRLRADIGRINAFLAGCRTNKVKKQIKTLCAQNQSIPPTTGGIVDIKDKKVQLLAATSKRLARYRLSRERKNQNRRFSTDERSFYRSIVRPHANETDGEMANIEEATTFWKKIWDRSDEHVHRAPWLVNERSQHENTTAMTSYGVSEEEVAVAIKAVSNWKAPGPDRIQNIWIKKLSIFHRPLAMHFTLWLDEPETMPGFLMQGNTFLLLKGNPTPNPAGYRPITCLSTIYKLFTKLITSRVYRHCNDNNIMTEEQKGCAKESQGCKEQLIVDSVLVRQAVQGKRNLSMAFIDYKKAFDSVPHSYLHEILEVYKIDPKIRRFLKVASEQWCVILHLGGQTSAKVNIRSGILQGDAFSPLWFCLSLNPLSNLLKSLNIGFSIKAETGTQQLNHLLYVDDLKLYANSEEKIHRLIKTVKCFSDDIKMEFGLDKCKVVHLRKGKVQSDDPGYCIDEQNVISNLSDGESYKYLGLIQLKGICDSDIKSGLIKEFNRRLRLVLQSKLNAGNIFKAINTWAIPTLTFSFGVVKWSDTDLDNIMRSIRTQLTKHRFHHPKSAIERIVLPRCEGGRGLIDIPQLHHKQILSLRSYFGVKSRTSCFLNTICLADKHHTPLNLRSQTYDIPPNVQTEAALIDTWKNKSLHGTHRKSLEQETIHKPTSNLWLTRGKLFAETEGFIISIQDKVVATKNYRRIILHDIMPNDLCRRCQASSETIDHILGGCTSLATHDYTSRHNQVAKIVHSRLAVDLKLAVEKQPYYKYNPPAVLENNAFKLYWDRSIVTDQTIRANRPDIVMFDKISKKITIYDVAIPLTQNLQATYSTKIGKYTELAHEMKAMYRADSVNIVPIVISATGVITKSLIVQLEKEKLSSELEQMQKAVILSTCNIVRRFLQLQ

SEQ ID NO: 16101 - protein, 953 aa, Chrysotoxum bicinctum
MLNNRILPEHVSSRISFERLHLLLYASAVAVTKTLGKKIQNILPASARIPKVPSWERRLENKIKRLRADIGRINAFLAGCRTNKVKKQIKTLRAQNQSIPPTTGGIVDIKDKKVQLLAATSKRLARYRLSRERKNQNRRFSTDERSFYRSIVRPHANETDGEMANIEEATTFWKKIWDRSDEHVHRAPWLVNERSQHENTTAMTSHGVSEEEVAVAIKAVSNWKAPGPDRIQNIWIKKLSIFHRPLAIHFTLWLDEPETMPGFLMQGNTFLLLKGNPTPNPAGYRPITCLSTIYKLFTKLISSRVYRHCNDNNIMTEEQKGCAKESQGCKEQLIVDSVLVRQAVQGKRNLSMAFIDYKKAFDSVPHSYLHEILEVYKIDPKIRRFLKVASEQWCVILHLGGQTSSKVNIRSGILQGDAFSPLWFCLSLNPLSNLLKSLNIGFSIKAETGTQQLNHLLYVDDLKLYANSEEKIHRLIKTVKCFSDDIKMEFGLDKCKVVHLRKGKVQSDDPGYCIDEQNLISNLSDGESYKYLGLIQLKGICDSDIKSGLIKEFNRRLRLVLQSKLNAGNIFKAINTWAIPIFTFSFGVVKWSDTDLDKIMRSIRTQLTKHRFHHPKSAIERIVLPRCEGGRGLIDIPQLHHKQILSLRSYFGVKSRTSCFLNTICLADKHHTPLNLRSQTYDIPPNVQTEAALIDTWKNKSLHGTHRKSLEQETIHKPTSNLWLTRGKLFAETEGFIISIQDKVVATKNYRRIILHDIMPNDLCRRCQASSETIDHILGGCTSLATHDYTSRHNQVAKIVHSRLAVDLKLVVEKQPYYKYNPPAVLENSALKLYWDRSIVTDQTIRANRPDIVMFDKISKKITIYDVAIPLTQNLQATYSTKIGKYTELAHEMKAMYRADSVNIVPIVISATGVITKSLIVQLEKEKLSPELEQMQKAVILSTCNIVRRFLQL

SEQ ID NO: 16102 - protein, 1201 aa, Chrysotoxum bicinctum
MERKTMKMPNLNETNRVGISTQTSAATATAGAGLAPEGDESPADPHNHNRPTAIVNIHPLATPASSVLRSTHSLTTSAGLPRQRIQWSTEMNKSVMRCYFISTKNETELNVYRAEMRNLFIIDYPQYGHLTEQNIADRRRAITSRKLLSDYELNTLRQEVILNLNRTPEFSAHQAHNNNAEQSENHTTAPTPNDNQPLSQTNDNPLFNTLNEHFSEALLEYENIHPLERGTLPKLNSFREIERLTNILNTRILPHHISNETSFEKLHLLLHVSAVAVTKTMGKKVKHTLQATPARTPKVPYWEKRLQNKIERLRAEIGRITAFQTGCRTKKVKKQIKALLSPTQYFPPTSAEIVEIKDQKAQQLAASAKRLARYRESRERRRQNRYFSINERGFYRNATKINANEANGEIANIEEATSFWKEIWDNPINHEYEAPWLVNERYRHENTPEMPSCPITQEEVTSATRFVSNWKAPGPDRIQNIWIKKLPVLHKCIARHFTAWLEEPDEVPAFLMQGSTFLLPKSSPSTNPAGYRPITCLSTMYKLFTKIITNRIYKHCENNNIVTEEQKGCAKDSQGCKEQLIVDTIAVRQALQGKRNLSMAFVDYKKAFDSVPHSYLHEILEIYKIDSKIRRFLKVISEKWCVILHLGGKTSAKINIRRGILQGDAFSPLWFCLSLNPLSNLLKSLNIGFTIKAETGTQTINHLLYVDDLKLYANGKEKVHRLLNTVKCFNGDIKMEFGLEKCKIVHLKKGKIQNDDTGYHIDEQNVIANLTDEESYKYLGLVQLKGICDSTIKQALVNQFIKRLKVVLESKLNAGNTVKAINTWAIPILTYSFGVVKWSDTDLNNIMRSIRTHLTKHPYHHPKSAVERVVLPRCEGGRGLIDVAQLHHTQICHLRSYFERKTETSSLIRTVCLADRNHTPLNLRSQSYETPTNVQSDAALIEIWKNKAIHGIHRKVLEQENIHQEYSKLWLKRGQLFAETEGFIIAIQDRVIPTKNYRRAILKEEMVNVLCRRCQASSETIDHILGGCTNLAAHEYTARHNQVAKIVYLRIVKDLKLTEITEPYYKYNPPAVLENSEFKLYWDRAITTDQSIRANRPDIVVFEKSAKKITIYDIAIPLSHNLQTAYSSKIGKYTELANEMKAMYHAESVNIVPIVISATGLITKIMVLQMEKENLIVDLERMQKAVILNTCNIVRRFLQIS

SEQ ID NO: 16103 - protein, 928 aa, Coremacera marginata
MLNNTILPQHVTHNISFERLHLLLYASAVAVTKTLGQKIKHSQQIHTDRIPIVPRWERRLQIKIERLRADIGRITAYLAGCRTNKIKKQIGILCVSMQYYPPTLADITAIKDTKIQQLAASAKRLARYRECRERKRQNRCFITDEKVFYRNLAKTSSSEANGEIAKIEEATSFWMNIWDKPEEHQHEAPWLVNERLQNENTAEMAPCTVTAEDITAAIRTVCNWKAPGPDKIQNIWIKKLDVLHRPLAMYFTLWLDEPENMPCFLLQGNTFLLPKGRPSSDPAGYRPITCLATIYKLFTKIITNQISRHCYDNNIMTEEQKGCAKHSQGCKEQLTVDSVVVHQALQRNRNLSMAFVDYKKAFDSVPHSYLLEILEIYRIDPKVRKFLEVISGKWCVVLHLGGKTSQKVNIRRGILQGDAFSPLWFCLSLNPLSKLLKSMNIGFNIKAETGIQTLNHLLYVDDLKLYANGKEKVHRLLNVVKCFSDDIKMEFGLDKCKIVHFKKGKVQNDELGYHIDEQHVISNLSDSESYKYLGLTQLKGVCNAEIKLALVKQFNRRLRLILGSKLNAGNLFKAINTWAVPTLTFSFGVVKWSDTDLNNIMRTVRTELSKHRYHHPKSAIERVVLPRCEGGRGLIDVIQLHHQQICNLRAYFEAKSITSSLIRTICHADSQYTPLNLRSQVHESPPNVQTDGVLIEAWKNKSMHGKHRNVLEQENIHRPLSNLWLTRGQLFAETEGFLVSIQDKVVATKNYRRTILKENMASDSCRRCQTATETIDHILGGCISLAAHDYTARHNHVAKIVHSRLAINLKLTADREPYYKYNPPAVLENSEFKLYWDRSIITDQTIRANRPDIVVFNKRANNITLYDVAIPLSHNLHTTYSTKIGKYTELAHEMKAMYRAESVNIIPIVISATGVITKTLVTQLKKKI

SEQ ID NO: 16104 - protein, 1186 aa, Aelia acuminata
MSVYFRIEGDHVLVGHPLPKISSGQHYTKCPVPGCGKEYINSTWTAGLQSVMRHVSAGHRLTGIKPRHFCRICQRNIEERPKVTSHPCLVHAVAPVVEVAGTVFECRECGDKFPTSRGLLNHTTTAHAPMPNNEEAATEPEPDRRITRRALREMNARPPSPVAEEESVVRGTAVGDAENINPVEEPADPTVETFDPGPPHLEEEDRPARPEEALLEGAGNGESGAVIEAASSRRGAPEEEEEDAVIKRLIRELGEVHQKDINDDTWKAFGGILKRIIERVRLVCKIRPKQKVGPVRQAVNPSDPRTIQRIYRMNRRKAIRMVLGEPPSVCNLPLEEMTARLEGEDVGGFDPDAVEGLERAEEAVVMTIITPEEVRDRLRRFENSAPGEDGIDYRSWRKVDPEGKLLASIYNICLKHRRVPEEWKMSRTIFLPKVKSPTGIKDWRPIALTRTIYKIYAGVLADRISSWCRSNQVLSPYQKGFTAHDGVFEHNYVLRQRMVAARKKREELCTAWLDISDAFGTIPHACITGALEKRGAGSALVDIVRDLYVDTFTSVSSSSEESDPIRMVRGIKQGCPLSGLLFILGIDHIIRELNSGEEHTVLAYADDIALLSPNPGGLQRLLNEAAEALARVGLRINPEKCKTMHLSGKAPVGIRETRFKIMGREIGTLKEGEVQSFLGNPVGFRAVNPKAEMEEIVAKARGILGSKLAPWQKIDALRTFVYPSLNFQMRNGQHPKGDWSRVDEVVRAEIKRALNLPAEASNEYIYGARSEGLCGIPVAAEESDLALIDGAFKLLTTNDEKLRQLAGKDLYESAASRAKPGHQPDPEAFLSGLVTEGMRERSSQVSDCWTKGRQASQRMGVQWHFQEDVPSLVYGDVTMMAHDRCKVIRTLRLKKQMERGEALRRKPVQGRVPECLKDSPDSSHFLQTGEAMSFADWRFIHRARLQLVPLNGHRRYGGDQEKSCRRCTFANECLAHVIGQCNVHAVLRQRHDAIVDRLERTARNRGYGVVGKNQAVDDSGLRPDLVVEKGDSALIIDVTVPFENRREAFESARARKEEKYAALKTSLRTRYREVKIAPIVVGALATWDPSNDKHLRGITTRAYLKKMRRLVTCETVAWSRCMYMEHLSGRVQRTYRWPRPERDQAEEEEIPAEPRLLDEEDVGRASPEPSTSREHPGGVEGGASCH

SEQ ID NO: 16105 - protein, 1198 aa, Aelia acuminata
MSIYFRLESDHMVACHPLPKLANGQHYTVCPVPGCGKEYTTTLWTAGLQSLMRHVSAGHRLPGIKTRHYCRICESYIQERPKVTSHPCLLQAVNPIEEMTGAVWECSQCGDVFTASRGLYNHTVMTHNAPMPNNRESADTEPPRRVTRNTQRQLQLSLAPRSQGQLPSGSSENVLTNQRVEVDVTEGEVEIVNTSEPSTTPNVQVATEPLVVREGRQTSEETQIEVLAGTGDGPHAVRSRASLRRGVPGEEEDALLRQYRRDLGEVYALDVSEDSWLAFEGIMIKVIEQVHLVCNIKVKETFRRQTRRTVNPSDPGTIQRIYRLNRRKAIRMVLGEPSAECNLPLEELTARLGGDELGEFDPTQLDGVLRAEETVVMTGFTPEEVRDRLRRFENSAPGEDGIDYRSWRKVDPEGKLLALIFNICLKHRKVPGEWKDSKTIFLLKVKSPTQIKDWRPIALTRTIYKIYSGILADRITSWCRSNQVLSPYQKGFTAHDGVFEHNYVLRQRMVAARKQRGELCTAWLDISDAFGTIPHACITGALEKRGAGSALVDIVRDLYVDTFTSVSSSSEESDPIRMVRGIKQGCPLSGLLFILGIDHIIRELNSGEEHTVLAYADDIALLSPNPGGLQRLLNEAAEALARVGLRINPEKCKTMHLSGKAPVGIRETRIKIMGREIGILKEGEVQSFLGNPVGFRAVNPKAEMEEIVAKARGILGSKLAPWQKIDALRTFVYPSLNFQMRNGQHTKGDWSRVDEVVRAEIKRALNLPAEASNEYIYGARSEGLCGIPIAAEESDLALIDGAFKLLTTNDEKLRQLAGKDLYESAASRAKPGHQPDPEAFLSGLVTEGMRERSSQVSDCWTKGRQASQRMGVQWHFQEDVPSLVYGDVTMMAHDRCKVIRTLRLKKQMERGEALLRKPVQGRVPECLKDSPDSSHFLQTGEAMSFADWRFIHRARLQLVPLNGHRRYGGDQEKSCRRCTFANECLAHVIGQCNVHAVLRQKRHDAIVDRLERTARNRGYGVVGKNQAVDNSGLRPDLVVEKGDSALIIDVTVPFENRKEAFESARARKEEKYAALKTSLRTRYREVKIAPIVVGALGTWDPSNDKYLRGITTRAYLKKMRRLVTSETIAWSRCMYMEHLSGRVQRPYRWPRPERDQAEEEEIPAEPRLLDEEDVGRASPEPSTSREHPGGVEGGASCH

SEQ ID NO: 16106 - protein, 1187 aa, Aelia acuminata
MSVYFRIEGDHVLVGHPLPKISSGQHYTKCPVPGCGKEYINSTWTAGLQSVMRHVSAGHRLTGIKPRHFCRICQRNIEERPKITSHPCLVHAVAPMVEVAGTVFECRECGDKFPTSRGLLNHTTTTHAPMPNNEEAATEPEPDRRITRRALREMNARPPSPVAEEESVVRGTAVGDAENINPVEEPADPAVETFDPGPPRLEEEDRPARPEEALLEGAGNGESGAVIEPASSRRGAPEEEEEDAVIKRLIRELGEVHQKDVNNDTWEAFGGILKRIIERVRLVCKIRPKEKVGPVRRAVNPSDPRTIQRIYRMNRRKAIRMVLGEPPSVCNLPLEEMTARLEGEDVGDFNPEALEGLERAEEAVVMTIITPEEVHDRLRRFENSAPGEDGIDYRSWRKVDPEGKLLASIYNVCLKHRRVPEEWKMSRTIFLPKVKSPTGIKDWRPIALTRTIYKIYAGVLADRISSWCRSNQILSPYQKGFTAHDGVFEHNYVLRQRMVAARKKREELCTAWLDISDAFGTIPHACITGALEKRGAGTALVDIVRDLYMDTFTSVSSSSEESDPIRMVRGIKQGCPLSGLLFILGIDHIIRELNSGEEHTVLAYADDIALLSPNPGGLQRLLNEAAEALARVGLRINPEKCKTMHLSGKAPVGIRETRFKIMGREIGTLKEGEVQSFLGNPVGFRAVNPKADMEEIVAKARGILGSKLAPWQKIDALRTFVYPSLNFQMRNGQHTKGDWSRVDEVVRAEIKRALNLPAEASNEYIYGARSEGLCGIPVAAEESDLALIDGAFKLLTTNDEKLRQLAGKDLYESAASRAKPGHQPDPEAFLSGLVTEGMRERSSQVSDCWTKGRQASQRMGVQWHFQEDVPSLVYGDVTMMAHDRCKVIRTLRLKKQIERGEALRRKPVQGRVPECLKDSPDSSHFLQTGEAMSFADWRFIHRARLQLVPLNGHRRYGGDQEKSCRRCTFANECLAHVIGQCNVHAVLRQKRHDAIVDRLERTARNRGYGVVGKNQAVDDSGLRPDLVVEKGDSALIIDVTIPFENRKEAFESARARKEEKYAALKTSLRTRYREVKIAPIVVGALGTWDPSNDKYLRGITTRAYLKKMRRLVTCETIAWSRCMYMEHLSGRVQRPYRWPRPERDQAEEEEIPAEPRLLDEEDIGRASPEPSTSREHPGGVEGGASCH

SEQ ID NO: 16107 - protein, 1160 aa, Euschistus heros
MRHVSAGHRLPGIKPRHFCRICNRYIEERPKITTHPCLENAVAPLVNMAGPAWECERCGDVFPTSRGLQNHAALTHAPRPTPTEMPATDSEPNRRVTRSAHRSANMGQSSRTCERPPSPVEEEEDGVREAAVVEAVNINSTEEMATTAVAVSSPAPQQMEEREGLVTTGEIRDEGLRGTIGGDPGAATNRAPSRRGAPVEEEEDVLLKELMNELGEVHAKEVEDGAWVAFEGIMKRIYDRVRLICKIRLKERRGPGRRTIDPSDPSAIQRLYRLNRRKAVRMVLGESPVECNLPIERMAAHLEGVETGDFDPSVLEGVKRAEEAVIMTSFSPEEVYDRLRRFENSAPGEDGIDYRSWKKVDPRGKLLATIFNICLKHRRVPDDWKESRTIFLPKVKSPEKESDWRPIALTRTIYKIYAGVLAERVTSWCGVHGVISPFQKGFTAHDGVFEHNYVLRQRMVAARKDRKELCAAWLDITDAFGAIPHACIAGALETRGAGVALVEIIRDLYTDSYTSVSSSNGWSDPIRMRRGIKQGCPLSGLLFILGIDHVIEKLNSGDDHTVLAYADDIALLSPDPEGLQRLIDEAAEAFNKIGLRINPAKCKTMHLSGKAPVGIRETRFSVGGDEIDILKEGEEQSFLGNPVGFRAVHPKADMEEILTKAKGILTSKLAPWQKIDALRTFVYPSLGFQMRNGHYPKGEWTRMDELVRADLKRVLDLPAEASNEYLYGARSEGLCGIPIAAEESDLALIDGAFKLLTTKDEKLRRMASLDLLSSTEARTRIGHQPEPQAFLSGLVTNGMRERSSQVSDCWTRGRQASQRMGVQWDIQEDVPSVTYGDVTVRAHERHRLIRTLRQKKQLERGEALRQKAVQGRVPECLKDSPDSSHFLQTGEFLSFADWRFIHRARLQLVPLNGHRRYGVDQDKSCRRCTFANECLAHVIGQCNVHAVLRQRRHDAIVDRIEATAKNRRYGIVGKNQAVDDSGLRPDLVVAKGDKAIIIDVTVPFENRQEALDSARRRKEEKYAALKSSLRSRYREVKISPIVVGALGTWDPSNDRHLRGITTGAYLKKKMKRLVTCETIAWSRCIYMEHLSGRIQRPYRWHRPEESQAQREEGPALEARMGEEEDRRDEGAVGQASPEPSTSRDHPGGVEREASEVTGRC

SEQ ID NO: 16108 - protein, 1194 aa, Aelia acuminata
MSIYFRLESDHMVTCHPLPKLANGQHYTVCPVPGCGKEYTTTLWTAGLQSLMRHVSAGHRLPGIKTRHYCRICESYIQERPKVTSHPCLLQAVNPIEEMTEAVWECSQCGDVFTASRGLYNHTVMTHNAPMPNNRESADTEPPRRVTRNTQRQLQLSLAPRSQGQLPSGSSENVLTNQRVEVDVTEGEVEIVNTSEPSTTPNVQVATEPLVVREGRQTSEETQIEVLAGTGDGPHAVRSRASLRRGVPGEEEDALLRQYRRDLGEVYVDVSEDSWLAFEGIMVKVIEQVRLVCNIKVKETFRRQTRRTLNPSDPGTIQRIYRLNRRKAIRMVLGEPSAECNLPLEELTARLGGDELGEFDPTQLDGVLRAEETVVMTGFTPEEVRDRLRRFENSAPGEDGIDYRSWRKVDPEGKLLALIFNICLKHRKVPGEWKDSKTIFLPKVKSPTQIKDWRPIALTRTIYKIYSGILADRITSWCRVHEVLSPYQKGFTAHDGVFEHNYVLRQRMVSARKNKKELCTAWLDISDTFGSIPHACITGALEKRGAGNTLVEIIRDLYTDSFTSVSTPSGESDPIRMIRGIKQGCPLSGLLFILGIDHVIQELNSGDEHTVLAYADDIALLSPSPEGLQRQIYRAAEALKKIGFRINPKKCKTMHLSGKTPVGIRETRFWLDGKELERLKEGDVQSFLGVPVGFRAVPPKADLEEIVAKAKAILNSKLAPWQKIDALRTFVYPSLNFPMRNAQYPKGDWTGVDEIIRAEIKRVLDLPSEASNEYLYGARSEGLCGIPIAAEESDLALIDGAFKLLTSNDVKLRQMAWMDLESSTLSRTKPGHQPDPQSFLSGLVTEGMLERSSQVSDCWTKARQASQRMGVKWDFLEDVPEIEYRDVIVKAHDRRRLLRNLRLKKQMERGEALRRKPVQGRVPECLKDSPDSSHFLHTGEFLSFADWRFIHKARLQLVPLNGHRRHGEDQDKSCRRCTFANECLAHVLGQCNVHTVLRQKRHDAIVKRLEETARNRGYGVAAVNQAVDDSGLRPDLVVTKGDRALVFDVTVPFENRKEALESARKRKEEKYAALKTSLRNRYREVKIAPIVVGALGTWDPENDKYLKGITTRAFLKKMKRLVTCETIAWSRCMFMEHLSGRIQRPYRWHRPEDEREPDDIAPAAPPLLGEEDAGRASPGPSTSSDNGGASLRGH

SEQ ID NO: 16109 - protein, 1194 aa, Aelia acuminata
MSIYFRLESDHMVACHPLPKLANGQHYTVCPVPGCGKEYTTTLWTAGLQSLRHVSAGHRLPGIKTRHYCRICESYIQERPKVTSHPCLLQAVNPIEEMTGAVWECSQCGDVFTASRGLYNHTVMTHNAPMPNNRESADTEPPRRVTRNTQRQLQLSLAPRSQGQLPSGSLENVLTNQREEVDVTEGEVEIVNTSEPSTTRNVQVATEPLVVREGRQTSEETQIEVLAGTGDGPHAVRSRASLRRGVPGEEEDALLRQYRRDLGEVYALDVSEDSWLAFEGTMVKVIEQVRLVCNIKVKETFRRQTRRTVNPSDPGTIQRIYRLNRRKAIRMVLGEPSAECNLPLEELTARLGGDELGEFDPTQHDGVLRAEETVVMTGFTPEEVRDRLRRFENSAPGEDGIDYRSWRKVDPEGKLLALIFNICLKHRKVPGEWKDSKTIFLPKVKSPTQIKDWRPIALTRTIYKIYSGILADRITSRCRVHEVLSPYQKGFTAHDGVFEHNYVLRQRMMSARKNKKELCTAWLDISDAFGSIPHACITGALEKRGAGNTLVEIIRDLYTDSFISVSTPSGESDPIRMIRGIKQGCPLSGLLFVLGIDHVIQELNSGDEHTVLAYADDIALLSPSPEGLQRQIYKAAEALKKIGFRINPKKCKTMHLSGKTPVGIRETRFWLDGKELERLKEGDVQSFLGVPVGFRAVPPKADLEEIVAKAKAILNSKLAPWQKIDALRTFVYRSLNFPMRNAQYPKGDWTGVDEIIRAEIKRVLDLPSEASNEYLYGARSEGLCGIPIAAEESDLALIDGAFKLLTSNDVKLRRMAWMDLESSTLSRTKPGHQPDPQSFLSGLVTEGMLERSSQVSDCWTKARQASQRMGVKWDFLEDVPEIKYRDVIVKAHDRRRLLRNLRLKKQMERGEALRRKPVQGRVPECLEDTPDSSHFLHTGEFLSFADWRFIPKARLQLVPLNGHRRHGEDQDKSCRRCTFANECLAHVLGQCNVHTVLRQKKHDAIVKRLEETARNRGYGVAAVNQAVDDSGLRPNLVVTMGDRALVFDVTVPFENRKEALESARKRKEEKYAALKTSLRNRYREVKIAPIVVGALGTWDPENDKFLKGVTTRAFLKKMKRLVTCETIAWSRCMFMEHLSGRIQRPYRWHWPEDEREPDDIAPAAPPLLGEEDAGRASPGPSTSSGNGGASLRGQ

SEQ ID NO: 16110 - protein, 1112 aa, Aelia acuminata
MSVYFRIEGDHVLVGHPLPKISSGQHYTKCPVPGCGKEYINSTWTAGLQSVMRHVSAGHRLTGIKPRHFCRICQRNIEERPKVTSHPCLVHAVAPVVEVAGTVFECRECGDKFPTSRGLLNHTTTAHAPMPNNEEAATEPEPDRRITRRALREMNARPPSPVAEEESVVRGTAVGDAENINPVEEPADPTVETFDPGPPHLEEEDRPARPEEALLEGAGNGESGAVIEAASSRRGAPEEEEEDAVIKRLIRELGEVHQKDINDDTWEAFGGILKRIIERVRLVCKIRPKQKMGPLRRAVNPSDPRTIQRIYRMNRRKAIRMVMGEPPSVCNLPLEEMTARLEGEDVGDFDPDAVEGLERAEEAVVMTIITPEEVRDRLRRFENSAPGEDGIDYRSWRKVDPEGKLLASIYNVCLKHRRVPEEWKMSRTIFLPKVKSPTGIKDWRPIALTRTIYKIYAGVLADRISSWCRSNQVLSPYQKGFTAHDGVFEHNYVLRQRMVAARKQRGELCTAWLDISDAFGTIPHACITGALKKRGAGSALVDIVRDLYVDTFTSVSSSSEESDPIRMVRGIKQGCPLSGLLFILGIDHIIRELNSGEEHTVLAYADDIALLSPNPGGLQRLLNEAAEALARVGLRINPEKCKTMHLSGKGPVGIRETRFKIMGREIGTLKEGEVQSFLGNPVGFRAVNPKAEMEEIVAKARGILGSKLAPWQKIDALRTFVYPSLNFQMRNGQHTKGDWSRVDEVVRAEIKRALNLPAEASNEYIYGARSEGLCGIPVAAEESDLALIDGAFKLLTTNDEKLRQLAGKDLYESAASRAKPGHQPDPEAFLSGLVTEGMRERSSQVSDCWTKGRQASQRMGVQWHFQEDVPSLVYGDVTMEAHDRCKVIRTLRLKKQMERGEALRRKPVQGRVPECLKDSPDSSHFLYTGEFLSFADWRFIHKARLQLVPLNGHRRHGEDQDKSCRRCTFANECLAHVLGQCNVHTVLRQKGHDAIVKRLEETARNRGYGVAAVNQAVDDSGLRPDLVVTKGDRALVFDVTVPFENRKEALESARKRKEEKYAALKTSLRNRYREVKIAPIVVGALGTWDPENDKFLKGITTRAFLKKMKRLL

SEQ ID NO: 16111 - protein, 1210 aa, Euschistus heros
MSIYFRIEGDHVLVGHPLPKLSSGQHYTQCPVAGCGKEYTNSTWTAGLQSVMRHVSAGHRLPGIKPRHFCRICNRYIEERPKITTHPCLENAVAPLVNMAGPAWECERCGDVFPTSRGLQNHAALTHAPRPTPTEMPATDSEPNRRVTRSAHRSANMGQSSRTCERPPSPVEEEEDGVREAAVVEAVNINSTEEMATTAVAVSSPAPQQMEEREGLVTTGEIRDEGLRGTIGGDPGAATNRAPSRRGAPVEEEEDVLLKELMNELGEVHAKEVEDGAWVAFEGIMKRIYDRVRLICKIRLKERRGPGRRTIDPSDPSAIQRLYRLNRRKAVRMVLGESPVECNLPIERMAAHLEGVETGDFDPSVLEGVKRAEEAVIMTSFSPEEVYDRLRRFENSAPGEDGIDYRSWKKVDPRGKLLATIFNICLKHRRVPDDWKESRTIFLPKVKSPEKESDWRPIALTRTIYKIYAGVLAERVTSWCGVHGVISPFQKGFTAHDGVFEHNYVLRQRMVAARKDRKELCAAWLDITDAFGAIPHACIAGALETRGAGVALVEIIRDLYTDSYTSVSSSNGWSDPIRMRRGIKQGCPLSGLLFILGIDHVIEKLNSGDDHTVLAYADDIALLSPDPEGLQRLIDEAAEAFNKIGLRINPAKCKTMHLSGKAPVGIRETRFSVGGDEIDILKEGEEQSFLGNPVGFRAVHPKADMEEILTKAKGILTSKLAPWQKIDALRTFVYPSLGFQMRNGHYPKGEWTRMDELVRADLKRVLDLPAEASNEYLYGARSEGLCGIPIAAEESDLALIDGAFKLLTTKDEKLRRMASLDLLSSTEARTRIGHQPEPQAFLSGLVTNGMRERSSQVSDCWTRGRQASQRMGVQWDIQEDVPSVTYGDVTVRAHERHRLIRTLRQKKQLERGEALRQKAVQGRVPECLKDSPDSSHFLQTGEFLSFADWRFIHRARLQLVPLNGHRRYGVDQDKSCRRCTFANECLAHVIGQCNVHAVLRQRRHDAIVDRIEATAKNRRYGIVGKNQAVDDSGLRPDLVVAKGDKAIIIDVTVPFENRQEALDSARRRKEEKYAALKSSLRSRYREVKISPIVVGALGTWDPSNDRHLRGITTGAYLKKMKRLVTCETIAWSRCIYMEHLSGRIQRPYRWHRPEESQAQREEGPALEARMGEEEDRRDEEAVGQASPEPSTSRDHPGGVEREASEVTGRC

SEQ ID NO: 16112 - protein, 1210 aa, Euschistus heros
MSIYFRIEGDHVLVGHPLPKLSSGQHYTQCPVAGCGKEYTNSTWTAGLQSVMRHVSAGHRLPGIKPRHFCRICNRYIEERPKITTHPCLENAVAPLVNMAGPAWECERCGDVFPTSRGLQNHAALTHAPRPTPTEMPATDSEPNRRVTRSAHRSANMGQSSRTCERPPSPVEEEEDGVREAAVVEAVNINSTEEMATTAVAVSSPAPQQMEEREGLVTTGEIRDEGLRGTIGGDPGAATNRAPSRRGAPVEEEEDVLLKELMNELGEVHAKEVEDGAWVAFEGIMKRIYDRVRLICKIRLKERRGPGRRTIDPSDPSAIQRLYRLNRRKAVRMVLGESPVECNLPIERMAAHLEGVETGDFDPSVLEGVKRAEEAVIMTSFSPEEVYDRLRRFENSAPGEDGIDYRSWKKVDPRGKLLATIFNICLKHRRVPDDWKESRTIFLPKVKSPEKESDWRPIALTRTIYKIYAGVLAERVTSWCGVHGVISPFQKGFTAHDGVFEHNYVLRQRMVAARKDRKELCAAWLDITDAFGAIPHACIAGALETRGAGVALVEIIRDLYTDSYTSVSSSNGWSDPIRMRRGIKQGCPLSGLLFILGIDHVIEKLNSGDDHTVLAYADDIALLSPDPEGLQRLIDEAAEAFNKIGLRINPAKCKTMHLSGKAPVGIRETRFSVGGDEIDILKEGEEQSFLGNPVGFRAVHPKADMEEILTKAKGILTSKLAPWQKIDALRTFVYPSLGFQMRNGHYPKGEWTRMDELVRADLKRVLDLPAEASNEYLYGARSEGLCGIPIAAEESDLALIDGAFKLLTTKDEKLRRMASLDLLSSTEARTRIGHQPEPQAFLSGLVTNGMRERSSQVSDCWTRGRQASQRMGVQWDIQEDVPSVTYGDVTVRAHERHRLIRTLRQKKQLERGEALRQKAVQGRVPECLKDSPDSSHFLQTGEFLSFADWRFIHRARLQLVPLNGHRRYGVDQDKSCRRCTFANECLAHVIGQCNVHAVLRQRRHDAIVDRIEATAKNRRYGIVGKNQAVDDSGLRPDLVVAKGDKAIIIDVTVPFENRQEALDSARRRKEEKYAALKSSLRSRYREVKISPIVVGALGTWDPSNDRHLRGITTGAYLKKMKRLVTCETIAWSRCIYMEHLSGRIQRPYRWHRPEESQAQREEGPALEARMGEEEDRRDEGAVGQASPEPSTSRDHPGGVEREASEVTGRC

SEQ ID NO: 16113 - protein, 1198 aa, Stiretrus anchorago
MSEYFRIEGDYVLVGHPLPRLPSGQHYTKCPVPGCGKEYTNNVWTAGLQSLMRHVSAGHRLRGIKPRHFCRICKNFIVEKPKITTHPCLQHAVAPVVEMTGTAFGCGECGDVFPTARGLQNHVTTTHAPMPETTEEAAAEREPEMRVTRRAHRELNAGPVTRSRAGPPSHVAEGDDRRGAAGGEAEPINYDEESATPAVATVNQEARRLEDRLAPVSEEDERDVGQGGAGNGDSSAVMNTASSRRGVPEEEEEDAELKRLRTSLGEVHSRDVNQETWVAFEGLLKEIIERVRLICKIRPRRMGGPRRRTVDPSDPRTIQRIYRLNRRKAIRMVLGEPPSECNLPLEEMTAHLEGEMVGDFDPTSLDGVEVAEEAVITTRITPEEVHDRLRRFENSAPGEDGIDYRSWRKVDPEGRLLASIFNICLRHQRVPEEWKESRTIFLPKVKSPTQMKDWRPIALTRTIYKIYAGILADRIASWCRVNEVLSPFQKGFTAHDGVFEHNYVLRQRMVAARKSKGELCTAWLDISDAFGTIPHACITGALERRGAGSALVEIIRDLYSESYTSVCSSSGVSDPIRMERGIKQGCPLSGLLFILGIDHIIKDLNSGEQHTVLAYADDIALLSPDPGGLQRQIDKAAEALKRIGLRINPTKCKTMHLSGKAPVGIRETQFKIMGRNIVKLKEGDVQSFLGNPVGFRAVHPKAELEEIVAKARGILGSMLAPWQKIDALRTFVYPSLNFQMRNGQFPKGDWSRVDEVLRAEIKRVLDLPAEASNEYLYGARSEGLCGIPVAAEESDLALIDGAFKLLTSKDEKLRRMANMDLHESAASRTRAGHQPNTEAFLSGLVTEEMRERSSQVSDCWTKGRQASQRMGVQWIIQEDVPSLECGDVTVRAHDRHRLLRILRHKKQMERGEALRQKAVQGRVPECLKDSPESSHFLQTGDFMSFADWRFVHKARLQLVPLNGHRRYGVDQEKSCRRCTFANECLAHVLGQCNVHAVLRQKRHDAIVDRLESTARNRGYGVVGKNQHVDDSGLRPDLVVAKGDRAMIIDVTVPFENRKEALESARTRKEEKYAALRTSLRTKYREVKIAPIVVGALGTWDPNNDKHLRGITTGAFLRKMRRLVVCETLAWSRCMYMEHISGRIQRPYRWHRPEQDQAEDGDAPAEPLLLGEGEIGRASPEPSTSRGIPGGVDREASCH

SEQ ID NO: 16114 - protein, 1210 aa, Euschistus heros
MSIYFRIEGDHVLVGHPLPKLSSGQHYTQCPVAGCGKEYTNSTWTAGLQSVMRHVSAGHRLPGIKPRHFCRICNRYIEERPKITTHPCLENAVAPFVNMAGPAWECERCGDVFPTSRGLQNHAALTHAPRPIQTEDPATNSEPNRRVTRSAHRGTNMGQSSRTHVRTPSPVDEEEDGVREAAVVEAVDTIAIEETATVAVAVPSPAPRQMEEREGPVTTGEIRDEGLRGTIGGDPGAAINRAPSRRGAPVEEEEDVLLNELMSELGEVHAKEVEDGAWVAFEGILKRIYDRVRLVCKIRLKERRGPGRRTIDPSDPSAIQRLYRLNRRKAMRMVLGEPSVECNLPIERMAAQLEGVETGDFDPSVLGGVKRAEEAVIMTSFSPEEVYDRLRRFENSAPGEDGIDYRSWKKVDPRGKLLATIFNICLKHRRVPDDWKESRTIFLPKVKSPGKESDWRPIALTRTIYKIYAGVLAERVTSWCRVHGVISPFQKGFTAHDGVFEHNYVLRQRMVAARKDRRELCAAWLDITDAFGAIPHACIAGALETRGAGVALVEIIRDLYTDSYTSVSSSNGWSDPIRMRRGIKQGCPLSGLLFILGIDHVIEKLNSGDDHTVLAYADDIALLSPDPEGLQRLIDEAAEAFNKIGLRINPAKCKTMHLSGKAPVGIRETRFSVGGDEIDILKEGEEQSFLGNPVGFRAVHPKAEMEEILTKARGILTSKLAPWQKIDALRTFVYPSLGFQMRNGHYPKGEWTRMDELVRADLKRVLDLPAEASNEYLYGARSEGLCGIPIAAEESDLALIDGAFKLLTTKDEKLRRMASLDLLSSTEARTRIGHQPEPQAFLSGLVTNGMRERSSQVSDCWTRGRQASQRMGVQWDIQEDVPSVTYGDVTIRAHERHRLIRTLRQKKQLERGEALRQKAVQGRVPECLKDSPDSSHFLQTGEFLSFADWRFIHRARLQLVPLNGHRRYGVDQDKSCRRCTFANECLAHVIGQCNVHTVLRQMRHDAIVDRIEATAKNRGYGIVGKNQAVDDSGLRPDLVVAKGDKAIIIDVTVPFENRREALDSARRRKEEKYAALKSSLRSRYREVKTSPIVVGALGTWDPNNDRHLRGITTGAYLKKMKRLVTCETIAWSRCMYMEHLSGRIQRPYRWHRPEEGQAQREEGPASEARMGEEEDRRDGEAEGQASPEPSTSRDHPGGVEGEASEVTGRC

SEQ ID NO: 16115 - protein, 1219 aa, Riptortus pedestris
MDIYFRLEGDVVLAAHPLPVTPTGQSYTHCPVRGCSDIYITKSYSAGLQSLLRHLTNAHKLPGLKSSHYCRLCDRAIEGNRPKNHACLRNVDLPVAQVQVTTWECEECRERFTSARGLHNHKMTTHVIMPRRREAAANLPIPDTGRTRRLVQQQLRPRTRSQSRSPSPAPRQVDMNEGPLAVITEEEAGPSHRYQSPVSSPRISSNPVSPIERLGTQALRTVEDLPTGDPNSPEEGNTLLEGAEEVAPVAVERVNGPAEVENFDLEEQPLRPFIARLREVQGRNVTHENWGEFEGIMEEITRTVRQKFKIKDNKNRSGIGRRTVDPSDPKAIQRIYKLNRRKAIRMILDEPTPQCDLPLDELSRRLVGEEDGDWDPRVLSGVKVAEEAVVTTPFTPEEVKDRLRRFENSAPGEDGIDYRIWRRVDPEGKVLCHVYNICLKHRRVPASWKKSRTIFLPKVPSPESISDWRPIALSRTVYKIYAGLLAERVTSWCRVHEVLSPNQKGFTAHDGVFEHNYVLQRRMAAARKQRKDLCIAWLDISDAFGTVPHAAITGALAQRGAGEPLVEMVRDLYTDSSTSVSTPSGESGSLYPRRGIKQGCPMSGLLFIIAINHIVEALDSGDEHTVLAYADDIVLLADTPEELQRRLDEARRQLLKMGMRLNSAKCKTLHLSGQTPVGVRGTHFTLGGTQLRDLKEGETQRFLGQPVGFRAVPPQADIEKVVKTAKKILSSKLAPWQRLDALKTFVYPALNFAMRNGHYLKKDWARVDDVLRADIKKALGVPQEAANEYIYGARAEGLCGFQIAAEESDLALIDGAFKLLTSLDDKLRRLAVADLKDSTRARTKEGHRPDPESYLSGLVTEGMRERSSQVSDHWTRGRNASKRVGVQWSFQEDTPKVNFRGESVTQEERQRLIRTLRMKLQQERGEALRQKPSQGRVAECLKNSPDSSHYLLTGEYLSFADWRFVHKARLQLVPLNGATRWGDNDKSCRRCGFANESLNHVVGQCNTHAALRQKRHDAIVDRIEVTAKSRGYTIVAKNQTADDSRLRPDLVVAKGEKAMIIDVTCPFENRLEAFERARKDKEDKYAPLKSSLESRYREVKIAPVVVGALGTWDPKNDKYLRGLSTKAYLKKMKRLVVCQTLSCSRCIYMEHLSGRIQRPFRWDRPAGDQQEEEPAADEPLSQATPDEMTPEIGEEDVGLSTTSVGTARTPSFNQDEGSA

SEQ ID NO: 16116 - protein, 1133 aa, Apoderus coryli
MGDSNKAEHVCPCGKSFAKNDNLKKHQRYYCRGEFSCRESEDENECTICGQTFKGTAGVKQHMRRRHPEEYNALSEKSDGRRYRAWSAMENYSLARAEIDYSGIDVNKHLAKLFPDRTLDMIKSHRRQETYKSLRDRMRCEIEEAASDPEPELNSTSPQPSTSHPYLEGMPGIEAEEDEVFIYVPDTIGNLGDITSAEPSLADELAAVLNNGSAIINKSKNSNTSSNSAERPGSPDPPPISPSLNNATVNQDNNAPLPPPVPSPSPPGSPDSTEHHEHDVVLEYIYSILGDNSLIIPPEVRRLVGIVIADADAAESRNVLDALYKTITAPLEIRPFANVENRSSDNRNLRRNQKFRLCQNMFNKDRSRLADGIIDDTLFGETGSSPHIDDVERAYNNIFGSESPLDNETITDYKTSPELYLPITTEDLEEAFSRKQSDSKGPDGANISHFKRVPRHVLALLFNLTIYSGEIPDIWRRNRTILIPKPGADPANVDSWRPITISNAAYRLFNKILAKRFQKLPFSQEQRGFRDLDGTLANSMILQCIIKTYRRNKKPHSISTLDLRKAFDTVSHHSIQRALERFRVNPKIRNLIINGYQGNTTTVCVNGKTTGTISLSRGVKQGDPLSPYLFNMVVDELLCFLNRLGGGLEVNGSNITSLAYADDLVLLAENRADMQILVRHTERLLGRRGMALNANKSTNLTVNSLPNRNKLYVNTNARVIAGGGFLNAIGVADQFKYLGYSYDFMGAKQASLRDLPGQLDRIQRAPLKPQQKYILLKYYLLPRYIYMMQNPDVSLQSLDSVDRLFRLALKKILHLPNSVSNAAIYAPIKQGGLGVLSFRRRIPGIILRRYRRLGDRPGEHQIVSVLGSAIMGQQLERLDRWCHEAGSTNNSVASYWSMKLESSASGCGIWQVGQDEASSAWIDSPPPFWSGGDYVKAVLLRFNMLPTIGGLHNRSEHVRCRGGCNRRETLCHVLQGCPVTHYERIRRHDRVVAGLARVAREKNLSVETEPRIRDETGSLHKPDLVVIKSNEVVVADVGIHWEGPDTLMVSQQHKIAHYSAPAVVRAVQRRYPDKNIRVASFTIGARGAWCPANSILSDFVGLSRINRRSIVADVMKGSWIAHRAFSRLVWDGQ

SEQ ID NO: 16117 - protein, 912 aa, Cassiopea xamachana
MKIEKDIEMKRKELSIITELEKGSRVKERKIRNIERKYNIRRSQNLTEVKEIIKQQMQAKAQRIRRFEKRTKFYRQNKTFKEDTKRFYRELGKKSIEVKEPPELREVEEFWSKIWEDNKSHNSEAQWIIDQDKVTENQEQQRWHDVSKEEAILAIMKSSNWKAPGNDGIANFWLKNLSSVHEDLTTAYNDILKNPEKQPDWLTEGLTYLLPKTEETKNPKNYRPITCLPTMYKMLTSILTERTFAFLEENELLPTEQKGCKRGSYGCKDQLMINKMILENCARSKRNLSSAWIDYKKAFDSVPHSWIIKCLEMFKINPTVVNFISASMKKWKTTLHLNHNNGSLKSRRININSGIFQGDSLSPLLFCFALAPLSTLLNNTKQGYEINKRKINHLFYMDDLKAYAMNDNQLKNLLDIVNTFSDDIKMEFGLDKCAKATFIKGKLTKTSNIVLNQTTTIQELDQEGTYKYLGINEGDGIQHSKMKEKIRKEYYRRIRMVLKSELNAMNKIEAINTVAIPVVTYSFNIINWTLEDIRNLNRKTRKLLTKERMHHPKPDVDRMYLPKSTGGRGLIQIETTYKTTTIGLAKYLEKSQDPFLKLVNLHEEKKKSYSIMSYAAKFKQELNLNEIEEKNNESVTKIAKRVKQHAKSKALDRIKKKWESKAMHGQYPSRIKEADVDFKQTNDWLKGTGLKAETEGLIIAAQDQSLATRLYHHRIIKDGTNPLCRLCNKYDESIDHILAGCPELAKTEYIKRHNNAAAYMHWKILQYYNIKTADKWYEHQPETVTENETVTILWDMQVHTDRTIKANKPDIIIKNKKEKTCMLIDMAVPSDRNTSVKVAEKLSNYKDLEIEITRMWGMKTQIVPVIIGALGVIKKGIDKQICKMPGNINVTELQKIALLGFAHILQKVLSIK

SEQ ID NO: 16118 - protein, 1006 aa, Megastigmus dorsalis
MNTQEDNFSWPSVSNYNLNVNNVNQPSISDLLVCDQCSFTARSAIGLGQHRRHRHSEVYNASVNTVRTKAQWSNEEIRRLAVLEAANEPRQNMNMFLAQAHGSGRTIEAIKGLRKQQKYKDALQRVRDASMRQAPNPSEAAPLIHRTEEQDNQRFIDWININLPKLPETTPGITSVRAAASCVIQGRSPMQYLQDWLSGIPTEANNVVGRPRINSQPRTNISRRKAKKEEYQRIQRLWKRNMAKAAALVLDGDDDSREQPSLQVQQEFWRPIFEGHQGVQDELQENTQAQHEVRWDVWKPVTEAETRNSRVTNGTAPGPDRITVADWKAIPDIAKAVVFNIILMHGHIPLSMSDSRTVLIPKVEGSMDTSQYRPLSIASVVLRHLHKILATRLLHLPLLNKMQRAFIMADGVAENSTTLASILKDARTRLKQVHVGILDVKKAYDTVKHSAISEALKNKGLPLQLIEYIGHLYEASRTRLEVKGEYSEWIHPAQGVRQGDPLSPLVFNMVMDAALDNLQPHIGYDIGTTTLTALAFADDLILLASSVEGMQTQLDIITHHLNPRGLHLMPAKCSVLSLVPSGREKKMKVDIESRLTAEGQRVPQIGIKDEWKYLGVTFNSYGPVKIRIKMEEHLQRIKAAPLKPQQRIKILRTFLITRYIHALVLGRTLHGELRRADKLVRRAVRGWLRLPNDVINGFFHAPASDGGLGIPSFESMIPELAKKRLEHLRTSSAPAAQWTFTSQWSMEKRIWCRLAKKTKKDWKCSLHNSTDGYELRECSNASASYSWIHDDYVHIPANDWIKYQHVRINSLPTRIRLTRGRRQAYGQLHCRAGCVKDETAAHVIQECPRTHGGRIKRHDAIVNTVSRILMERGWTVHKEPIIHTSRGNLKPDIVCMKDLHIHVLDAQIVTGARQLRDLNARKRNYYGTNLELQKNIRSRFGNERSTITTEGITISWRGIWSADSHAFLRALKFSRLQLQGITTRVILGSYLNFHTFNTATFRARMS

SEQ ID NO: 16119 - protein, 914 aa, Megastigmus dorsalis
MNMFLAQAHGSGRTIEAIKGLRKQQKYKDALQRARDASMRQAPNPSEAAPLIHRTEEQDNQRFIDWININLPKLPETTPGITSVRAAASCVIQGRSPMQYLQDWLSGIPTEANNVVGRPRINSQPRTNISRRKAKKEEYQRIQRLWKRNMAKAAALVLDGDDDSREQPSLQVQQEFWRPIFEGHQGVQDELQENTLAQHEVRWDVWKPVTEAETRNSRVTNGTAPGPDRITVADWKAIPDIAKAVVFNIILMHGHIPLSMSDSRTVLIPKVEGSMDTSQYRPLSIASVVLRHLHKILATRLLHLPLLNKMQRAFIMADGVAENSTTLASILKDARTRLKQVHVGILDVKKAYDTVKHSAISEALKNKGLPLQLIEYIGHLYEASRTRLEVKGEYSEWIHPAQGVRQGDPLSPLVFNMVMDAALDNLQPHIGYDIGTTTLTALAFADDLILLASSVEGMQTQLDIITHHLNPRGLHLMPAKCSVLSLVPSGREKKMKVDIESRLTAEGQRVPQIGIKDEWKYLGVTFNSYGPVKIRIKMEEHLQRIKAAPLKPQQRIKILRTFLITRYIHALVLGRTLHGELRRADKLVRRAVRGWLRLPNDVINGFFHAPASDGGLGIPSFESMIPELAKKRLEHLRTSSAPAAQWTFTSQWSMEKRIWCRLAKKTKKDWKCSLHNSTDGYELRECSNASASYSWIHDDYVHIPANDWIKYQHVRINSLPTRIRLTRGRRQAYGQLHCRAGCVKDETAAHVIQECPRTHGGRIKRHDAIVNTVSRILMERGWTVHKEPIIHTSRGNLKPDIVCMKDLHIHVLDAQIVTGARQLRDLNARKRNYYGTNLELQKNIRSRFGNERSTITTEGITISWRGIWSADSHAFLRALKFSRLQLQGITTRVILGSYLNFHTFNTATFRARMS

SEQ ID NO: 16120 - protein, 1011 aa, Megastigmus dorsalis
MNVSGDNSPGSSVTRTRAASPGNIPVCRSAPSVSGGFVCSECGYAAPTAIGLGQHRRHRHKEVHNAAINVARIKAPWTDEEIRCVAVLEVAQGDRRNMNMFLAEAHGSGRTVEAIKGLRKQQRYKEAMERARRDERPVATEELIRQPLNYGPEHVNTRFTDWIRIALPKLPDTTPGITHIRASASSVLHGLPALCHVEDWLKLLAPEQAQRQPVRARTPPTGHISRKKAKREQYARIQKLWKRNMSKAASIILNGDDSASDSPSLLQQIQFWKPIFAGSQEEEDESYSSSNQRHEVKWDVWRPVTETEVRRCKVANGSAPGPDGISVTDWKTIPDMAKAMIFNIILMGGTCPLSMSDSRTVLIPKVKGSMDASQYRPLSIASVVIRHLHKVLAARLLHIPLLNNIQRAFISADGVAENTITLAAILKDARARLKQLHVGILDVRKAFDTVKHSAILKALADKGLPPQLIKYMGDLYKSSRTRLEVRGEYSDWIHPSQGVRQGDPLSPLLFNIVVDIALDNLHSHVGYDLDLTTLNALAFADDLVLLAGTREGMQLQLDQITSYLNPQGLRLMPAKCSILSLVPSGREKKIKVETECTFKAEGQLVQQIRITDEWKYLGVRFNSYGPIKVKIDIDEYLQRIKQAPLKPQQRLKILRTFLLPKYAHSLVLGRTLHGELRRADKKVRRAVRGWLRLPHDVTNAYFHSQTTEGGLGIQSFESLIPELAKRRIESLRGSLAPAARWVVDAQWVREKLAWCRHVKRTKKSWKQQLHNSTDGHELRECNKASASYRWINDDYVVIPANEWIKYHHVRVNCLPSLIRLLRGRRRESGGQRCRAGCVRDETTAHIVQECPRTHGGRIKRHDAVCRTVATLLRIKGWTVHEEPRVATMSGTFKPDLVCTREDRILVLDAQIVSGARPLRDLNTQKRDYYGRNGDLMQRITSTFGHAGSSITVEAITISWRGVWAADSDRCLRALNFTTTQLQGLTTRVLLGSYLNFHTFNNATFRAQVRGR

SEQ ID NO: 16121 - protein, 858 aa, Echinostoma caproni
MFKAVLESPVCQGDKLSAVDGVRRLAEGLQNGAFTEMTAARELEGYIKSEFPHTWAPKKERDGKKHTNREWSRKRMRRAQYAVVQTLYTKSRKDAANLVLSGDWATCHLHERNEPPSNMLEYWKELFEAESVEDKRPVIKDRSIQWQILDPITVEEVKEVAVAIGKSAAGLDRVGAASLWKQPSGVTQLLNLLLLLEFPSMHLSKGRVTLIPKVKNPKGPTDFRPIAVASVILRTLHKILARRWLKVMKLDSLQLAFQRRDGCLEASELLQTVIRNAHCKSQSLAAAFVDVSKAFDTVSTNTILRAAQRQGLPPPFVSYLKRLYEGSSVQLLTTTIRCGRGVRQGDPLSPLLFNAVMDEVIGGSLPLLGVEVGGRRIGALAYADDLVLFAENESRLKDKLVALNSALQAAGMAINASKSCTLTITSNTHQKTVALQPTRSSIGGESLKPLSVDDKVTYLGLTFNWKGLVRMKHTRVLEENLNQLRRAPLKPYQRLTILKHHLIPRLNHELVLGFPHRNTLKSMDVMIRGAVRGWLRLPSDTTLAYMYTKVAEGGLGLPCLSTTIPLAQRKRLEKIAAGVDLLANTVKSSESFRVLLRSANLPVRVGGEVACSKQEAEIYWKRTLYRSCDGRGLEVEAHPSSYDWIGDPSRIPSRVFLRSLKLRGGLLPTKVRAARRRPGSNVEVRCKNGCGLPESVDHITQVCHVTHDVRCERHNRIAKKVGKAFEKLGAKVWFEPTVLCGPSFCKPDLVVKIGESLSVMDVCITTARRIDQTKKAKIEKYGMPEIEQGLLQLAELPPSSKVRHVPVVLTNRGLIDRKCGMRLQRMGIHRRVLGDLAVTALLGSLKCYDLFMRGTRRY

SEQ ID NO: 16122 - protein, 1239 aa, Cecidostiba fungosa
MEPPNKITEEGDAIIILLPIQEDDTLLCCLCAGVGRYRGQRKIENFVRHAKEQHPDRVITYKCWSCGFVAPADKRYPRKIVTQHCGDCVPQVRSIRSGATDTARRARVRAELIREPQVAEAQQQQPRQPNPPQQTPPSQQGVQTLDAVSPVGPRTRRRRRGITRVSSSSNEQSSPTPPPSNNPISPEVASNAGSDDVFLSPAALPEETHVVRTRQGDSGTPQPPAETATIRPTEGEPTAHVPHSTPPRSSTPIPHTSPTSTVPPPSPVQGTDRPTTTGLSAPRTVAPQDRYQREQLAPRLAGPTPEQTRLIEALDAASNQRDLEEVSARAATFLGRFATQPGDRPRPTGRRNPRPQHRPQVEGHGRIADATRIQRLFRTSKKKAVQEVLAGPNRFCQIGKNAVYRHFVDLAAPRDGEEVWPRVFHQAVPSAVSNEQMTRPFSSEEVARKLKGRSNTAPGPDGLNYSNLRRADPGAHVLTAYYNAVARLEEVPISWGKSNTILLHKKGDPGEITNWRPIALGDTIPKLFAALLADRLKTWASENGRFSREQKGFLQFEGCYEHNFVLQEIIRNARQEGTELVVTWLDLSNAFGSVPHSTIMRALALHGLPRKTTSIISALYRHMTTSVRTRDGFTEPFRVQAGVRQGCPLSPDVFNLVVEILIREMKTTGHGLTFCGERFTSFAYADDLAIVADSRDGMTALLSAVENAARAVGLTFNPSKCASLHIRGRGDGAVLPTRFTIQGEEIRSLGPNDAYLHLGIPTGYQIRQSPSNTIAEILEDLRTLDQSLLAPWQKIETAAIFILPRLDFVMQGASIEKAYLERADKEIKRFARKWLGLPQRASSELIYLPPSQGGAGLLPLSDLYDLLTVAHGFKMLCSPDAIVRHIAESTLGQAVTRRLFREANQSEMADFLSGEIELRRSVSLTTFWAKVRSATMRLKRKFSLRWDWSDEDHHFTLACTDSSNEPVTTAPPNKQQLLRRMRMALVDFYTKRLLAKPNQGKVLEITRRSRESNHFLRTGSFTRFCDWRFVHRARLNVLPLNGARHWDRQADKRCRRCGAGLETLPHVLNHCGPHAVARQKRHNNIQDRLVKASKAQGVITVNRAVQGLQGAAAALRPDIVVRDEASRRLLIVDVCAPFENRASAFEEARREKLRKYQPIADQLSGQGYRVDIHSFIVGALGGWDGRNEKVIDLLRINSRYARMMRRLMVSDTIRWGRDIYVEHVSGVRQYHLASSTHEA

SEQ ID NO: 16123 - protein, 891 aa, Ormyrus pomaceus
MVTNAVRQLEEDARTENEDAPGSPVDANMDHGIKQWLREALTELGRETPRIRALRELMEKGIQNLDIRDDIQAWLQQHVAVEERNSRRREDGPELNNGGSRKQEKRASYKRIQTLWRKNMSKAAHIILDGDNTAGPQPSLDTQVEFWLPILQKGINTGNDTAPFEPTGRAEHGGVWAPITAAEVKTSTPKGGTSSGPDGIPMSAWKPIPDKEKAVLFNLFLLTGQCPESIVNSRTVLIPKEVGTMDPAQYRPLSIASVILRHFHKVLAARVRDLNLLDARQRAFIIADGAAENVNILATTIQDARRRLRPLFLAILDIRKAFDSVSHDAIYQAMRQKRLPGRFRNYLRQQYKSAKTRIEVGGEKSQWINPTQGVRQGDPLSPLLFNMTMDNVLASLSPQVGYELEGQNLSALAFADDVILVASTRPGLQDAMERVTAAAAKQGLRLMPTKCKTVALIPSGREKKVKVDSNPFFVNGQTIETVGLNDVWKYLGIEFDPRGPTITRIQIQDQLNRITRGPLKPQQRLTILKMFLLPRWTHRLVLGRTTLHDLRNADKKVRKAVRTWLRLPHDTPMGYYHAATNEGGLGIIALESKIPELVKTRITNLEDSSLPIIRTVVEGDWVKSRRAWANHMRIESARWKDLLYGSVDGRDLRESAKAWASTAWVNDPHLAIPANDWVKYHHVRINALPTRVRTTRGRRRSATEIGCRAGCPRTETAYHVIQQCERTHGGRILRHDNVAVTIATSLHDQGWQVEREGLYPTREGTRKPDIVVHRANQCAIIDVQIVSGAEELKNPHKRKIDYYKNNIDLLSQIRRKFGHSGPIETMAVTVTWRGIWHPQSENFLLNAGIPKWKIKGITTRILLGSYLNFQAFNKSTFRATNRYVQAAGGRR

SEQ ID NO: 16124 - protein, 858 aa, Dicyema japonicum
MVYKRKLYTHESRCKRRRENNLFEFNRRLFYRRLHENGHSVCSQQDAEMLSTWGSMWEAKPRRGNAWNVPYSAAPFLAESCGIFDFRKKFEAVVRHLPDWKTTGVDKVYNFFIKRCTSLHESMCRVLQKSITNPETIPDWACTGTTYLIPKLDNPQSAADYRPITCMPTLYKLMTKLVANEVRSFVDANGILSENQLGTVRNCQGAKEQALINKCLSVSHGNSLLSMWVDVKKAYDSVDHSYLVECLHSLCMPVWFISFVVAVMNRWSIHLNYNRHRIGEVKLKRGILQGDSMSPLLFVLCLEPLSRRLNDRFEQIPVHCEGVCFSTNHLLFIDDLKMYARTAEELYSMGVCAREFFESIGLDLNYSKSATNTQVCSELVRVLEEHEGYKYLGVTESPKSLIMPETKRQITEGIRKRAALLCKTSLNARNLFLALNEYAVSLLNYYIGVVEFEPKEYDEMDVMIRGVLRENHVHVLAANKERLYLPRDKFGRGLCGVVQLSERILMRMHDTLIAGSSVSARKHAIITTEKTRATHLGTIRPFLSAKYGVDDGGLVNVKALIELQYNNLMEKINLKSLHKVLFRALDNPHVDLKSSTIWLKYGDNSPRSEALYTYMQDRNIFWGRSTNTCPHCKSRSMSVDHLATRCGSMLCHDYVWRHNEVVRSLHLLLCNKYGIRHTRKLRTHKVQSVVENTRVQIKVDSVIRTSVLVKHNKPDIVVHDKESGQVLIIEVGITSQDRLQTVEVEKKRKYDFLANEMGQMLGCKVLVIPIVMTWEGIATKYHKGYLKQLGVDRKLQAYLQSTVLKRTLESLTLEYRRQSPEMPYGQRVQLDKALSELFQQPESNLPEEAGEQAGEEGC

SEQ ID NO: 16125 - protein, 769 aa, Trialeurodes vaporariorum
MVWSEISKQEVANVIGKTLNWKAPGVDRIQNFWLKRFTSAHEQLAKHFNSLISAGEFPEWLARGVTFLIPKNENTEDPKNYRPITCLNTIFKTYTGVLAEKITGYVEEAGIMPLEQKGNRRNVRGCVDQLLISKMVIEDARSNNKDLAIAWIDYRKAFDSVPHSWILESLRLMGIHPTVIGACQVMMKSWATNIRVETEDGPTMTELIWVRRGIYQGDSLSPLLFCLCLIPLTHLLRSQKNGYKTSGPEIEIDHLLFVDDLKIFANGEKALKSQMKVTYDFSSDIGMQFSLDKCAKAFFKNGRFVKTENIRVDEKVVIRQMEDGEQYRYLGIDESENISHARMKVKLRAEYTRRVRAVLKSQLSSQNKLQAIGTFALPVLEYSFGIVNWTPKDVRTLDVRTRKLLTMFKLHHPSADVDRLYVSRKEGGRGLRQVEGALKALSINLNRYLEDKAKVDPRMRMVRSKDRKLGPKTSINKAAVRNTTEEGYVPRLGDTQAQERLAVKRAISKNIRNRWSQKPMHGQFPRLLEEEGLDRNRSVLWLTRGHMKGETESLIVAAQEQALATRYRTVRIHKIPGTTKCRMCGKFDETIDHVVSGCPVLAKEEYIYRHNRVGAHLHYEICRAVGAPVDTDKWYQHQPKPVVNSEDGKTTILWDRPVQTDRTVPANRPDIIVKQKGGPCLLIDVAIPMDKNVNNKEAEKLLKYKSLEIEIQRMWRTRTAVVPIVIGATGVVSTAMSSHLKRVPGQTSFASIQKTAILGTATILRKVLT

SEQ ID NO: 16126 - protein, 1017 aa, Trialeurodes vaporariorum
MGSNAEVRTPHQETHGELERLIRSTYEKEKGSNLGTREAVRRINNIRSAKPIIEEANREVGKIIRGNGEEVTLKNLNALIYAAAKVVSDTVNPKKEERGSGEPHRVKPASPPWVRRIESRVLGLRRHLSSLASATGERQRPVVQQLLHVYEEHGQLDRDSTIEYLKQRISALAQRLRRYKKRTQQFKENTLYQNNRKVFFRKLRGEVVDTRGKPKWEEVDRFWRGVYEREAQHNSEAAWLNKIKVNSEMVWSEISKQEVANVIGKTLNWKAPGVDRIQNFWLKRFTSAHEQLAKHFNALISAGEFPEWLARGVTFLIPKNENTEDPKNYRPITCLNTIFKTYTGVLAEKITGYVEEAGIMPLEQKGNRRNVRGCVDQLLISKMVIEDARSNNKDLAIAWIDYRKAFDSVPHSWILESLRLMGIHPTVIGACQVMMKSWATNIRVETEDGPTMTELFRVRRGIYQGESLSPLLFCLCLIPLTHLLRSQKNGYKTSGPEIEIDHLLFVDDLKIFANGEKALKSQMKVTYDFSSDIGMQFGLDKCAKAFFKNGRFVKTENIRVDEKVVIRQMEDGEQYRYLGIDESENISHARMKVKLRAEYTRRVRAVLKSQLSSQNKLQAIGTFALPVLEYSFGIVNWTPKDVRTLDVRTRKLLTMFKLHHPSADVDRLYVSRKEGGRGLRQVEGALKALSINLNRYLEDKAKVDPRMRMVRSKDRKLGPKTSINKAAVRNTTEEGYVPRLGDTQAQERLAVKRAISKNIRNRWSQKPMHGQFPRLLEEEGLDRNRSVLWLTRGHMKGETESLIVAAQEQALATRYRTVRIHKIPGTTKCRMCGKFDETIDHVVSGCPVLAKEEYIYRHNRVGAHLHYEICRAVGAPVDTDKWYQHQPKPVVNSEDGKTTILWDRPVQTDRTVPANRPDIIVKQKDGPCLLIDVAIPMDKNVNNKEAEKLLKYKSLEIEIQRMWRTRTAVVPIVIGATGVVSTAMSSHLKRVPGQTSFASIQKTAILGTATILRKVLT

SEQ ID NO: 16127 - protein, 1017 aa, Trialeurodes vaporariorum
MGSNAEVRTPHQETHGELERLIRSTYEKEKGSNLGTREAVRRINNIRSAKPIIEEANREVGKIIRENGEEMTLKNLNALIYAAAKVVSDTVNPKKEERGSGEPHRVKPASPPWVRRIESRVLGLRRHLSSLASATGERQRPVVQQLLHVYEEHGQLDRDSTIEYLKQRISALAQRLRRYKKRTQQFKENTLYQNNRKVFFRKLRGEVVDTRGKPKSEEVDRFWRGVYEREAQHNSEAAWLNKIKVNSEMVWSEISKQEVANVIGKTLNWKAPGVDRIQNFWLKRFTSAHEQLAKHFNSLISAGEFPEWLARGVTFLIPKNENTEDPKNYRPITCLNTIFKTYTGVLAEKITGYVEEAGIMPLEQKGNRRNVRGCVDQLLISKMVIEDARSNNKDLAIAWIDYRKAFDSVPHSWILESLRLMGIHPTVIGACQVMMKSWATNIRVETEDGPTMTELIRVRRGIYQGDSLSPLLFCLCLIPLTHLLRSQKNGYKTSGPEIEIDHLLFVDDLKIFANGEKALKSQMKVTYDFSSDIGMQFGLDKCAKAFFKNGRFVKTENIRVDEKVVIRQMEDGEQYRYLSIDESENISHARMKVKLRAEYTRRVRAVLKSQLSSQNKLQAIGTFALPVLEYSFGIVNWTPKDVRTLDVRTRKLLTMFKLHHPSADVDRLYVSRKEGGRGLRQVEGALKALSINLNRYLEDKAKVDPRMRMVRSKDRKLGPKTSINKAAVRNTTEEGYVPRLGDTQAQERLAVKRAISKNIRNRWSQKPMHGQFPRLLEEEGLDRNRSVLWLTRGHMKGETESLIVAAQEQALATRYRTVRIHKIPGTTKCRMCGKFDETIDHVVSGCPVLAKEEYIYRHNRVGAHLHYEICRAVGAPVDTDKWYQHQPKPVVNSEDGKTTILWDRPVQTDRTVPANRPDIIVKQKDGPCLLIDVAIPMDKNVNNKEAEKLLKYKSLEIEIQRMWRTRTAVVPIVIGATGVVSTAMSSHLKRVPGQTSFASIQKTAILGTATILRKVLT

SEQ ID NO: 16128 - protein, 931 aa, Ganaspis sp.
MARREAELSLEPNIRFMNVALVAEFSNRSLESIKGQRRKATYKALVEEFRVQILNQHEVVDNTVMEEDDSFSESDPFMDFFRTVEAPPASVTAFEAHLLHTICKEAVHASRESIRTRLGLYIVTILRSNNIRPAKRRKRTTLRVETRRQARRREYAETQLAWSKIRSGCIKAILSDTSDVKQPPQHVMEPYWTEVITRSSDASPDPNDLKQDNIIPQLWCPVTLEEIRRSKISLKTAPGPDGFTSRLMRSMDDGVLLMLFNLMLWCEQVPDCLLKSRTIFLAKKGDASEPGDFRPITIASVIMRGLHRILAARISSAVVIDERQRGFRSYVDGCRDNIFQLDMILKQHRSSCKQMFMGSVDVSKAFDSVSHVAIINILRSFGFPEPLIRYIANVYDKGSTILEGENWSSKPVTPRRGVKQGDPLSSVIFYMITHRLLERLSPDVGVDVGDKRVNASAFADDLNLYASTAAGLQRLIDTASDFLNLCGMRINPDKSHTLSMRKEVREQKMVVDVSTKFVVEGRQLKALNSEDEFKYLGVYFTCRGRRREKPAVLLGGDLDSLSKAPLKPQQRLFALRCNVIPKSFHSLALGDVTIGSLNKADILIRTSVRKWLNLAKDTPNPYFHASVEDGGLGIPSLRWSAPLLRLERLSSLSNSGLAIHNEFLQKEMSLCKRRLKDHEREYCNRVHIRGMFALRLYNSVDGCGLKHSRDTPGQHRWVCDGTKFLSGRDYIKSVRLRINGLATKSRTSRGRHSDRQCRAGCYQPETLKHVLQACHRTHDIRVRRHNAVTSYICRRLRSRGYTVVEEERITTRQGLRKPDIIAVRDNTALLIDAQIRNDQPNLDQAHEEKVSKYRDNPEVLADCQRRCNGEVRFTSATLNWRGVWARTSSEDLLRLGLTRDDLKVISSRVLVGGLAAFHAFNRRTYVRAGIG

SEQ ID NO: 16129 - protein, 903 aa, Apodemia duryi
MRIERRIAETRATISRLQCYKSGNRRPRIVRYVRMAFAGTEVNLSHPEFGQRLTEKVDELMQKIAAWGKRIRRYSRQTRRRYENHMFQNNQRRYFRLLERPRTASQNTTENTPAGTDVYDFWRKIWSESIVHEEADWIEDHKKACDAIISPMSPIIITRENIELATSNLNNCKSPGVDGIHNYWLKSFTNCHEKLASQFQDSIQYKSLPKFLTTGITYLIHKSGNPEDPKNYRPITCLPTLYKLLSSVLAVKILEHVDKYDIMCPNQNGCKKGSRGTKELLVIDSIIGQVVRRNRRNFAAAWIDYRKAFDSVPHTWLLEILKLYKVDSTMRDFLEMCMRQWRTVLNLPGVHDLSDANVIEIRRGIFQGDSLSPLWFCLSLNPLSWLLNKAGSGFRIRKSGSQITHLLYMDDLKLFAPNVTKLNELLSITQKFSSSIRMNFGFEKCAVLHAARGKIVKSENMQCSGLTTLKTLSEDETYRYLGMSQSIGIQSSVVKEMALEKFYSRLKRLLDSALSGGNRVRAFNSWAIPVLLYTFGIIKWSQTELDAIDRKVRTTMTEHRMHHPKSSTARLYIPRKFGGRGVLSVKNMHNKEVNSLRAYFLSTADSPLHAEIRMCDLGFTPISLAENNWQNLQELGVSERIKEWETKELHGRFCSVLQENHVNTETSLFWLRCGELFAETEAFVCAIQDQVIKTRNYRRHIIKDGTVDICRACHLPGETIRHITSGCSALANCEYLHRHNQVAKIIHQELAARYGLIEFKVPYYKYSPQSVRENDRAKLYWDQSIVTDRSISANKPDIVLLDRAQSKVFLVDVTIPFDENLQKAEREKLSKYLDLTFEITEMWKVTSTEVVPVVVSANGLIPNSLDKYLSLLNLNTTSIKARMQKAVLLDTARIVRRFLSLPL

SEQ ID NO: 16130 - protein, 975 aa, Anoncus sp.
MPGCDRSFEIIRGRGVHEQRVHKNWYDRRQVEEIDVRSAQWNAEESSLLARQEARLTLEGARFMNQALAPYFPNRTIEAIKGQRRYQRHKDRVQQYIVELEAETDAEPQPVSIQGNNDDDQLEKIEALRTAIKDEIAKQNPLRGAEFRKEMLDRICRNVLSWPLERISEQLEIYLLEVFPTPQRRERPNQVAGVEAQRTKRQARRAEYAKTQRAWKKNPCNCLRVLLKDKTAARTPDEALMVPFWRTIMTQASDESPGVNLSQRQETEALWKPIEPTEIKKAFPEMTTSPGPDGLTARQLRAVPMNVLVGIVNLLLLCGKLPRHLLESRTTLIPKKDGASEPGDFRPITVSSVLTRMYHKILANRFANHIILDERQRAFLPVDGTAESIFDLDMILRYHRQNFKPLYIASIDVAKAFDSVTHNTIRDTLATKGIPSHLSEYIMDTYARSTTRLTCGTWESDPITPLCGVKQGDPLSPIIFNMVMDGLLRLIPPEVGVDVDGEYYNALAFADDLVFTASTPQGLQIVLDTATNYLAKCGLAINTGKSFTVAMRSVPHMKKSVVDGTTRFTCSGRAMPALQREDEWKYLGVPFTPEGRSCGRENAPLKPQQRLFALRVMVLPGLYHLLSLGNTTLSRLKKIDSMVRAATRKWLDLPHDTPNAYFHANVKDGGLSVPSMRWLMPLYRWMRLQGNRSEEQQLSPYLAQEIGRAKRRLREGREEICSTKELEKRWAKLLHASIDGKALKESNKVPQQHQWITEGTRFLSGRDYINAAKIRINAMPTRSRTARGRLKDRSCRAGCRAVETLDHVLQKCYRTHGSRVDRHNAVASYVKRALGKSHDTVEEEPQFATEIGLRKPDLIAKKETKALVVDAQIVGEHVNLEEAHKEKQAKYKHLEGKIKERYGVRDVTFTTVTLSYRGVWSKTSAQSLIDGNILKKKELKILSTRVLIGGLTSFWRFNRATSSASSRRTQRIGVG

SEQ ID NO: 16131 - protein, 1010 aa, Campoletis sonorensis
MENNNAGEPTGSSGPTIVPEVFVCRMQGCDRTFPTIRGRGVHEQRVHKNWYDQRMLDEVEARRAQWNAEELSLLARQEARLTLEGTRFLNQALQPLFPHRTLEAIKGQRRNQTYKNRVLQYMEELAEAAEQPEPQPQNESDDEQSDRIRALRSAITAELSKHRPLRGAEFHMEELEQICSNVQTWTTERISQHLEMYLLRVFPPPQRRSRSNPTQVDAHITRRQARRAEYGRTQKAWTKNPCNCLRVILKDKTASRIPSEDIMVPYWQNLMTQASVNTPGVTARRANEGDTEALWRPIEPTEIKAAFPELSTAPGPDGLSARQLKATPSNVLVGIFNLFLLCGKLPRHLLDSRTTLIPKKDGATEPGDFRPITVSSVITRTYHKILANRFSKFVCLDKRQRAFVPIDGCAESIFDLDLILRYHRQNFKPLYMVSIDIAKAFDSVTHNTIRDTLATKGIPPHLSNYIVDTYARSTTHLVCDGWESEEITPLCGVKQGDPLSPIIFNMVMDELLRLIPPEVGVNVDGETYNALAFADDLVFVASTQQGLQTTLDIATDYLAKCGLVINTGKSFTVTIKTVPHKKKTAVDGRARFTCSGQVMPALRREDEWRYLGVPFTPEGRSKGEENRLLAAALEKISKAPLKPQQRLFALRVMILPSIYHLLSLGNTTLSRLKKIDAMVRAAIRKWLNLPHDVSKAYFHAHAKDGGLSVPSMRWLMPLRRWQRLKALRRDEQPLSSYLSQEIGRAERRLRDGQEFLNTTKELEKRWAKVLHSTIDGRALKESSKVPQQNQWITDGNRLLSGKDFVNAVKLRINAMPTRSRTARGRRNDRSCRAGCMAVETLDHVLQKCHRTHKARVERHDAVASYIQRALGKRYEMVDKEPRFTTAEGLRKPDLIAKRGTEALVLDAQVVGEHVNLELAHEEKSRKYEHLRDMIKAKYGVQSVNFTSITLSYRGIWSKTSAQFLVEGNIIRKQELKIVSTRSLIGGLASFWKFNRATTSANPRRHRNGIG

SEQ ID NO: 16132 - protein, 1020 aa, Mesochorus sp.
MIMNTIMNALNTGEPSGSTGPTNDYPEMFQCRKEGCNRNFSSKRGRGVHEQRTHKNWYDERVVEENPIKRGQWSAEETSLLARQEARLTKERVRFINQALAPLFPNRTLEGIKGQRKNPKYKQQVQGYLEQLEDGGENETETLMMTENIEQSERVEALKTAFIKELSLHQPLEGPSFKMEDLNTICKNIKIWTPTRVAEQLELYLLDIYPKASKRKTSSSTGRNKAQTNRKKKRREEYAKVQRAWRRSPCDCMRVLLKDKKSTESPAQDIMVPFWTNVMTQPNETTPGVGRIEPHVEDEQEIMWKPISIDEIKKAFPEISTAPGPDGLTARQLKLTPNNVLVGITNLLLLCGKMPKHLLESRTTLIPKKDGAVDPGDFRPITVSSVLTRLFHKILANRMSLFVHLDSRQRAFLPVDGCAESIFELDQILRYHRQKFKSVYIASVDVAKAFDSVTHNTIRDTLTSRGLPTYLIEYITDIYKRSTTRLTCMNWESEEIHPLCGVKQGDPLSPIIFNLVMDGLLQKIPQEIGVNVAGQHYNALAFADDLIFVASTPVGLQTTLDIAAEYLKNCGLMINTGKSFTVAIRNIPHVKKTAVDRNAIFSCSGRKMPALQREDEWRYLGVPFTPEGRSKGEELQKLKNMLDTLTKAPLKPQQRLFGLRVMVMPGLYHLLSLGNTTLSRLNKVDATVRNAVRKWMGLPHDTGKAYFHTSAKDGGLSVPSMRWLMPLRRWERLKNLCGNEDTDIPPFLAQEIARAKRRLMEGRELLDGYRKLEKRWATVLYGSFDGKPLKDSAKVAQQHQWVTDGTRLLNGRDYVNAIKIRINALPTKSRTARGRRKDRMCRGGCMAVETLDHVLQKCHRTHKARIERHNAISSYIKRAMEKKFDVVEEEPHFATEEGLRKPDLIAIGGDRALVLDAQIVGEHVDLEQAHAAKCAKYLELRQVIKDRYRVRNVGFTAATISYRGIWSATSARELIEENNILKKTELKILSTRVLIGGLSGFWRFNRTTTFVRRAPRIGIG

SEQ ID NO: 16133 - protein, 1029 aa, Mesochorus sp.
MEAIMNATNAGEPSGSRGPTEHPEVFHCRKDGCNRSFPTARGRGVHEQKAHKNWYDERVVEENPVRRGQWSAEESSLLARQEARLTKEGVRFINQALVPLFPNRTLEGIKGQRRNQKHKELVLRYREELESGDENAEEHNQDEIEHNVETLPTVGNLAEKPERVEALKTAIIKELTQHQPLNGPNFKMDHLNLICKNIKTWTLERLAEQLEMYLLDIYPRVQKRKADNRSENGSIAQSKKKKRREEYAKVQRAWKKSPCDCLRTLLKDKKSDKTPAKDIMVPFWTTVFTQQSDVTPGVDHIEPHEDDEYKRLWNPIDLGEIKKAFPETSTAPGPDGLTARQLKLTPSNVLVAVMNLLLLCGKMPKHLLESKTTLIPKKDEAADPGEFRPITVSSVLTRLFHKILANRISRFVHLDSRQRAFLPVDGCAESIFELDLILRHHRQKFKALYIASVDVAKAFDSVTHNTIRDTLASRGIPSHLVNYITDTYKRSTTRLACRNWESEELHPLCGVKQGDPLSPIIFNLVMDGLLQKIPPEIGVDVDRQHYNAIAYADDLIFMASTQIGLQTSLDIASGYLYTCGLMINAGKSFTIAIKSIPHVKKTAVDRKVRFSCSGREMPALQREDEWRYLGVPFTPEGRSKGEEICKLKTMLDTLTKAPLKPQQRLFGLRVMVMPGLYHLLSLGNTTLSRLKKVDALVRDAVRRWIGLPHDTVKAYFHASVKDGGLSIPSMRWLMPLRRWERLRNLYGEEGIIATPFLALEIGRARKRLVEEREFLDGFRKIEKRWAKVLYGSFDGKPLKDSAKVPQQHQWVTDGTKFLSGRDYVNAIKLRINAMPTKSRTARGRRKDRMCRAGCGAVETLDHILQKCHRTHRPRIERHNAVSSYLKRAMEKKYEKVEEEPRFMIGEELRKPDLIAIGGDRALVLDAQVVGEHVDLEQAHAAKSAKYTELQHAIKDRYRVRNVGFTTATLSYRGIWSLTSARELTEGNNILKTTELKIISTRVLIGGLSGFWRFNRTTTAVRRAPRNGIG

SEQ ID NO: 16134 - protein, 1133 aa, Euura saliciscinereae
MAGGATMPSARVRRRNPPPGRFACEQCVLSFTTKSGLSQHERFAHPALRNEKRQSLANRPAKKRGVKPKLWTKAELRRLSELSERHKNERYINKYLEPHFPGKTKKQIGDARRRLDKIEDMSSEDEPDQGTGHADDQAADPLDESPAGPPTPNPTNPTGPNRTVEAETPVTPPNPDPSEPIPNPPELDREHPEPYPELSTAAPESGTPAPQAGGPAPHPEIPHLEGEVAHTNDWRAPFAVAIRELETAVGPWGSLANELREIWDEQNGREQALDQFIKQSLVPALLRERVAPNDNVRQPNKGRKAKAGRPPAQGKYKNRRKGKPPTRDQKRRYPYARSQDIYDNCPRKLADMVATGDFSILELKPDKPSAEAVASLYNDLWGTTGPTIMSLPTAERVTDLEMANIVRPITGKDVKARLTRIANDSAKGPDNITKSHIAKAGVPELLAMLFNILLATGYYPNEWRINRTTLLPKPGKNRADVRNWRPITISSMISRIYSGLIDAKLRLTLKQNHRQKGFTNENGCLSNINLLDTAIRQAKTHRGGVFSILDIAKAFDTVPHSAIRAALRRKGIPYELANYIQGMYANCQTTIAADNGQTVKIELKRGVKQGNPLSPLLFNLCIEPLLEKIQGLTKGLDIEGNPLSVLAFADDMVLVGKDRAIAKNQLELTDQYLRSLGMTLSIEKCASFGIVATHKSWFVTNPRLEVRGVPVPTTDPGETTRYLGAIIGPWQGLARGTEVTTISAVTRRVQHLPLRPMQKIDLLTTYVLPRYTYALIVSHTPSSVLKMIDVELRGIVKEMLHLTISTTNHFLYAPRRMGGLGFPRLETQVQLATLRGGVKLANSADPTTRAMANNSRNTARLKQTANNLGLPWPCTIQEIDARKTKLKKGEIEKWSKMKRQGVGVNLFATDPLGNRWLSDHKLLKGSRMIDAMSLRTNTFGTRAVLARVTKDMDTNCRRCGGARETLGHVLGSCNSNKPARIKRHDEIKNLIANKVAKDKRVIEEATIRAGRELFKPDLVIMNEGRATIVDVSVRYENGNYLSLAADEKVRKYTRIIPQIKEQLGCEQAEIVPIIVGSRGMLPMSTKTALRALGMSRTDALTISLITLRCSVEIANTFLDGYDHEEGRREARGG

SEQ ID NO: 16135 - protein, 1066 aa, Oryctes borbonicus
MNKGDKFPCKCGKEFATEAGLKQHIRRRYCRYRPEQQGEAPAAETHRCTYCPREFATFPGLRQHVRLGHPGEYNNELERQVENPLRDPSRWSDEEIIAMAKHEIKYEGRFINKHLHSLFPFRSIEAIKSKRLTADYKNLIASLKTEGTLARDIDEEIEEEAAASVSEPTVEFVEESILPRGSLDSVNIPGPAIERVGEHVPPVTSSAPGMPSQESVDAGRVTPPASSPSHSSSRPDDTTTGIESPVIVMNACPPLPTDDVFAVRDPVRLYLASYFDNTQGWSDEDRALYDLVCRSSVKNNRTTVHEGLEKWLEQVLSNLNVRNNRARGNNGRYKRNTGGKGSYRRGANRAHLYKIAQIMYRRNRTRLAEHILDGKPLDSAQTFPPIETIQARYEDIFSTESPDDDHPITDHVQHTVETYLPVTEQDIVRGLAEMKSPTAGPDHLKLHHLRRVPVRCLVMMFNIMIIFGVVPESLKANRTVLLHKGGDPLLMDNWRPITISSILLRLLNRLLAQRLSRLPIHNNQRGFRKADGVLLNTLTLEAIIKKRRVQRRPYSIIAVDLRKAFDTVSQHSILRALQRFKVDDHTIRLIGEQYRGPFTKISSGASSCTAPISLNRGVKQGDPLSPILFNLVLDELLCRLERRDGGLTVNERQEVKVLGYADDLLLCANDHRVANKLLKEAVEFFRERGLALNAKKSVALSVGVVPGKKQLFTHTKSFFYVGGVAIPQLTPVDLFKYLGSRYNFSGQVRPSFEQLKTQLARVKAAPLKPSQKCSFIRDYLVPRFLSLMQTSRVTLKALKDVDTLVRKSIRNVLHMNRTSPDAYIHAPIRDGGLGIISLRAHVPAIMRGRLFRIASTADPLTAAVLQIPAVEKFQNKLLRWTEGNGGNTDNIRKEWSRRLQESYSGNGLRQGNKDGISGNWIRNPPQFWSGQDYVNAVLLRGNLLPTRGIPSNPPHERKCRAGCDRTESLSHVLQGCPLTHWHRIRRHDRISRRLRQLAESKGWIVEEETRLRLADGSLRKPDLIMIKDNTLAVCDVTIAWEGPNPLDLAYHQKVAYYSQPLVLERI

SEQ ID NO: 16136 - protein, 1142 aa, Cloeon dipterum
MPTPMSSDASPRGHCLLTWPFEPGLCTACLGQDQRHMLVSRETASAHFKSRHSRCEILLVCHQCRKCFKKQGNVIRHYAQCASRAVPLVHCLDCDKSFATHAGLSAHVTHEHRPRESPPGGLRTTALWTGAELRLLLRLSKQFADHKSINTVLARYLPNQSVKQIRYKRAQQSFQNVLQEQWPALSALTDEELAGLQDPSSTDPPHATLGVKRKLQMDSEQVAASPPRKQGRQSDRPEVPSKWQQRYRDLLAQWRGTGDRKLDVVLGPLRLEQSQEAIDAAYDEFIKVLGPGTSVQDKRGDQAKKSRKRNRRRKTDSKLQSARRKQAYEYGRMQTKFTSSPDELAKAVIANRDPLERAANRVARAPLKQLYDELWGQRVLGCSLPSVDAPFETHPKHFLLPMQAAEIKMRLDNMKRTTASGLDNIRKAMVSPDSVLEGLAFLFNTLLLAGCVPKAWLENRTTLIPKPGRDTTKAENYRPITVSSIVSRLFWGVVDSRLRMVINLSPRQKGFVAEAGCFNNVLLLKEALRAMTHARRGIIIQLDITKAFDIIPHELIAHALTAKGVPQFFASFVQRTYENVHTTINHKEGPIRVQFSRGVKQGDPLSPLLFALLLDPLLDQLNNLHGYKHLGVSLNVLAFADDLILLATTTKEATDLLFTTETYLQSLGMGLSPTKSVAFQFGPTGGTWSVTDPNLRLRNGRIPFLELSDKMTYLGASIGHDGKSSAKQLELELTAVLERLHTLPLKGKQRFQLVKDYVLPHFYHALTLSEVTRTHLLELDKIVRTSVKRWLHLPITYPTAVLHVSPKDGGLGLPVLGSLIPRLQLQLYSRATENEDPALIAAFRAGGVRTRCQQLALSLHCPWPITRPTALWLASKQDQDRLKQYHELGTTSMPQCRKNDKFGNKPLARPQLLSSRDFKLFLLALGGTVPTNVVLKRAGDTARNENCRLCHETKESVGHIIGGCQVNLPQRVARHDKVCEMVIERITNLTAVLEPVVREQAYEMRNNLGQKYVRKPDWVFLLDNDLLICDVTVRMEKPGYERTAAKEKRSKYEDDGFYKVLKRRYGEHLQPRVVPLVFGAFGAVPQSTLAALLSIHPNLAKKSFVQMISLTVLKRSLLILRGTVEQAGPTRKKKREKTRPRQ

SEQ ID NO: 16137 - protein, 1199 aa, Ophraella communa
MENLRSNNNLSGGRGRRTIPHRNRLDDKSGMDASGASGTSSCNGTTRSASNQPSQLQHNEPPQTRLAQNLSAAPQEVHSKARRRKWSLSDNKNILRAYFTSTNCDRNKPGFRKRMLTEWKKINPDSELTEQQIANQLRAIRINQLLTELEIETVKKEIQSTLQVPRSEGEDDDVPDQTVTSEVEETVQENIVENLQFENMEINNDDTNQAFVRDIIFEFNRNKIIYSDTEPNTRPKLNKITSTKKVFAICNILDKHIEDTIKHANLETIQTIVYSAAATTIALTRKKNITEGKEELKDQNRRKPTEPKWKKRIEHKINKNRSNLTKILNWKNKSGKLSKQLNDYFKQNKINESIENEITMHIENLKQKIAVYGKRLRRYNKSYRRKDDNKRFIRNEKHFYATMNDENIRISKTPQEEEVTRYWKQLWEAKGKHNEKGVWLKQEKEQNNKLIEMEGIIVTEMNVTNTIKKTNNWKSPGPDQIHNFWWKQFKSIHKIIAMEITKHIEHEKELPYFLTEGLTYLKPKTIETDCAKNYRPITCLNTLYKIITSIIASKINEHLENNNIMTDEQKGCKKGTQGCKEQLWIDTIVTQCAKHKQRNMSVAWIDYSKAFDSVPHSWLLEILNIYKINPKLRTFLRKCMDTWRTKLHLRTDETTIKSQTIPVRSGIFQGDSLSPLWFILALNPLSRLLKNSKFGFKIKGNTEYLSHLFYVDDLKLYAPTENQLNKLIELTKTFSDDILMKFGMDKCAKLNVLRGKHKLQEDDVDTQTNFKYIQGNNTYKYLGFHQTLTRNEKQIKEKLIETVTQRTTKILATQLNGKNKIKAINTWALPVLVYSFGVLCWSNTELEDIDRKIRVLLTKGRIHHPKSATERLYLPRKLGGRGLLSIVYSHQKQIATLKTYYEKKARTTQLYKTLMEIDKYTPIYKRKEEETVLSINEKIDKWKSKTVHGKYPQALETSDKTASTNWLTRGELYAETEGFIVAIQDKVIETRNYKKYIEKIPGVQDTCRLCNKKPETIEHIISACEKIAQTEYLKRHNLSAAIIHQELTHKYKFNTEKKVPYYQYVPKPILENSEYKIMWDFTIQTDITVASNRPDITLLDKTNKTAYFFDITHPGDHNILAAEQTKLSKYQELATEYQNIYKLKTVLIILVVVSVTGLITKNTMTQLTKLQLHHLLPTIQKSTIMETCRITRKTLQIRE

SEQ ID NO: 16138 - protein, 1310 aa, Ophraella communa
MSAHTIISPSINPPNLNISSPSSIATTTNNAESVLSGFQLTTTKAGKTRQRMKWTEDMNKELIRCYYIVTQAESQTLGYRQELYHLFINKYPHLRDQLTEQKVADQRRSIIVNNRLPTSIIRNILDEVKNKLQRSTTNTQQQLNPIDNNTPPTNDIPLTSNDTQQPSTSIDTNPPQTQNNGTHKPNTQTKSQQRMVWTESLNRRIMEIYYEITQGETLAIGYRKELHKRFTAEYPELSQLSEQRIADQKRVIISNKRIPKHILEEIKEKHIECDHQLNTINEYNTNLRQSTDSNQNTNKNTNSEPNIATDPELIQEVTPNDEIIKIFDETIRKYKEYEPTTRPRLPKLKQNKMTSKTIDVINNLLQRKITDETDLKTLHLYIYAAAYTTLSLNNQKIVDHNYHRKSNNYIPPWQQRLEKQVKTTRQEIAKISEKINNNTKKTKVNREIEKIVTKHKETNLIILLDTLKQKLLAYAHRLRRYKKSRKRKIQNTLFYQNQKTFYHQLESTDIEVKETPSLKELETFWSNIWSGTKQHNRHADWIQEEIAHTENYTHMNTITITKPFLTKIIKKLHNWKSPGVDSIQNYWYKYLTSTHDKLAELFTKIIQHPDLMPSFFTQGITYLKPKDSDTKDPSKYRPITCLPTIYKILTATITAKIEDHLTNNHILTEEQKGCRKGSQGCKEQLIVDQNITHYTKKHKSNLFNAFIDYQKAFDSIPHSWLLQILEIYKIDNTLINFLKTTMQTWRTNLHIVTTKTTLRSNPVYINNGIFQGDSLSALWFCIALNPLSNILNRTNIGFSLKNHIQQTTQQTYINHLFYMDDLKLYTTTKTDLTKLLNLTETFSNDIHMKFGLDKCRTCSIEKGKLIEHDGHTTQNKQQINSIKYNEQYKYLGFHQSPITDHKTIKSNLKTKFEIRLNKILKTELNGKNTTIAINTYAVPILTYSFGIIKWSDTELDSLNTLIRTTLYKHRKHHIHSAIQRITLPREEGGRGFIDIKNLHNKQISLLRKYFFDKQDSPLHELIIGIDQTPLQLKNTNYTPTIEENQTKITTWKNKTLHGVHINEITQSHIDKAASNIWLKSGGLFAETEAFIIAIQDKVIKTKNYQKHIIKDPTIPNDICRKCQNQPETIDHITSGCSFLATTEYIHRHDNVGRQIHLELAKKHKLTTTDKPWYHYTPPVVLENEKIKLYWDRNIITDRTRTNNRPDITMTDKTTKTTYLIDFSIPNTSNLQKKYTEKIQKYLPLAEEIKSVWKQEKVKIVPIVLSATGVIPKTLQDSLQTLNLPHYILPQIQKSVIISTCTIVRRFLNNI

SEQ ID NO: 16139 - protein, 1101 aa, Homalodisca vitripennis
MAEPIRDLVGGGPGALAELAGGGDVFVVPWRPSGCGSCLHWFERPGLIAKHYAEQHPGVPVFFRCGNCSRSFGGVHASLCHLGRCRGPVEVADGDFFCTECGKSFTSQIGLSQHKRHKHPAVRNVERMAPPQRPDRPLGPYEWSEEDTLRLIHELGGAPPLGRYASALTPIFPGRTSKQIRDKVASLVRSGRLRAGPQPDIVPGRVGGVADVQVPPPGPVGLPGDGVAPGVGGEDVNGGWSTGIREFWLREEPTHELALELREHWSSVVSPDLEWIDSFVDRVSRSLTDADQVPVRRRPTRRGRTRDVIRRRIYAYTQEFYRKCPARLAECARAGLPVCSLADSPSPPAEEIRGVYSALWDSPGLCRFDPPPGDEVHWIDPISSREVKSRIKGMRPGSAPGPDSVRKRHLLGVPGVENLLAGLFNLLLSTGQFPSGWSVNSTTMIPKSGKDLSVASGWRPITVGSVLARMYCALVEARVRRVVRLSVRQKGFVEGNGCFGNVFLLHECIRRGKLSSLACAQLDVSKAFDSVPHEAIFRALRGRSVPEVLIDVISSIYRNASTSFKNCGGFNVDIRRGVKQGDPLSPLLFNIVLDFLLVELSSSDLGFIVGEHRVPVLAFADDLILMGSSVAELQALLDIVSAFFSSVNMELSVPKCGGFFVRKRAKTWVQEPLGVSLDRVPLRNFGIDEPFSYLGALFTVHRGLSNSSVYSSIRDSAARCSRFSLKPMQKLNLLCNFVLPAFYYKLIADPPGLVALRELDSFLRTLVRTMLHLPSVVASSYVHMRRADGGLGVPRLVDLVRAANVRALAALSRSDDPVLRSVLVDPRVSSLASDSAAALDLNWPPRDEDVVAIKDRLREREFVTFSGLGSQGKGASCFRGNSLGNKWLWSEGELYPGEIIDLIQIRTNTFPSRECLARASPAENILCRRCSAKPETLGHIIGECPAGRGPRIARHDRIVDAVEASALNRQFVVAREQLFTPTGEGGAVIAEPLRPDLVVVTRDSALVVDVTVRFEQDDSLVAAAREKINKYGILAQTLMGRFGVDKFRVLPLVFGSRGGFPAATRRSLGILGVGSDVQLGNILMGVVRSTVAIARCHMDVR

SEQ ID NO: 16140 - protein, 935 aa, Brachystomella parvula
MEDAHFSFSQNGNSQGDPATSFLSPPNSLPTKGQALERAASWITSNLKVSTCSHLMKNDVYARYSHEMSSDRLLTLGEFRNQMKSIFPELQTRRHNRYYGVSWISEDFSENANPCEEDLGLFLSKLKQGVPTLHHCPKGARRKVGQALISLLNEISVSPSDQSLWRKLFLFSYCVLPVPTKTDQINNLTKWVKQHVDVWVKGELKFPSLRKKSSHGNTSGNLPKKVEAKLADGDIRGAIRLATSEDTIAPNVPEVLASLLEKHPPHPEPTFFPADPSDEVVFPALKEESIRAIKSFPRGSAGGPDGLKPQILKDLTSSSIGEAMAESIRKFTNVILSGKVPQSICPLLFGASLTALRKKTGGIRPIAVGSSWRRLAAKIAVWRMTPSLLSVFSPHQLGVGVKGGVEAGAHAAANYYSADHPTAKAFLKIDFKNAFNEVRRDVILNRVRDMFPELYPFFFQSYRSDSILFFGQSKIFSRRGVQQGDPAGPALFSLAIQPIVQAMESEFNEWFLDDGTVGDDPQSVLRDFKTIKEMAADVGLSLNESKCELGILSCDTGSKKEIWEQFRQAAPEIQPMTPAKSTLLGAPLTFESTEEVLKEKINQFSLMSSRLTELSSHSAFFLLKASISTPRLNYFLRVAPTWNHNERLNEYDDALKTTLEKILNCSLSKDAWAQSSLPVRCGGLGISHAVDLAVPCFLSSVYSVQNLVSCLLPSRISSTCNDVPIGLDMWSQLTGLELPPQEIRGQQSAWSGPIYVTTQKRLVEEASTLETKARLFAYTQPEASAWLSALPSPQLGTLLDDESFRVSCSIRLGCEVCQPHKCACGKEVTVSGLHGLSCKKSSGRFSRHQSCNEILARAFRSAEVPCILEPVGCSRSDGKRPDGQTLVPWYRGKSLVWDFTCRDTYAPSYLPTTSLNAGAAAEKAETSKNLKYDFL

SEQ ID NO: 16141 - protein, 1168 aa, Amphibalanus amphitrite
MRRTTAAGRSRYPTFTSYSAKMPRRKNSVKGKNSQDGQKQHNSLSDSQPQIISSSGNPSVVVCEQCGIRNSRKHHITCDSCGHHWHLTCVGLKRREADFLSRWWCKRCLGFETSLSSQPDHSTANVLRSTPEADIPSSDAGDLASSLAKLRQDRHVIRRIPRGARIATAGALTTLLEDTVQNNTGSTWKRLLLFPYHALCVPERDSSQTQDTSLTSKIKRQVNSYMTSTPLIHVQSSVETNRVKNPLHGKRQRPEHNEDGRLQRSVAAKIEDGDVRGAIRLLASKDQLAQSSQEIIDSLQLKHPPSPDDLALPAAPDESIQPCQVTEPEVAASIASLDTGSSAGLDGLRPAHLKDLTTRSTGEAGVRLISALTALVNLVLSGDVPASARDAFFGGALTALRKPGGGVRPIAVGNTYRRLATKVALKPISAELGDLLRPVQLGYGTTGGCEAAAHATRRFNDELGEGSAIIKIDMRNAFNSIRRDHFLHQVRERVPSLFHLLWQAYSAPTPLFYETATITSATGLQQGDPCGPAVFALAIDQVARGVTAPFNCWYLDDGTIGGQVSTICSDLQKLIPAMASIGLSINARKCEIILPDGSADEEAMQAVRRIHELIPGAAVLGASEQTILGAPITEAAAETVMEEKQGELKHMVERFHHLDAHTALFLLRNCIWLPKLQYLLRASPLYRQASLLSQLDAVMQSALTSISNVKLTGASWEQAVLPTRYGGLGLRLLVDVALPSYVSSLHACHGIIYSCLPDSMTACVTEEREKAVNDWQEAAGGENVPERDEQLKQKPWDAVLAKQQQEKLLSEANQYDRARLLSTAAPESGAWLHAAPSANLGTLLDRETLRVAIALRLGADVCRPHRCRCGSIADSKGYHALTCKFSAGRHPRHTALNDIVRRALQSARIPSLLEPTGVDRGDGKRPDGISIFPFKNGMCLAWDATCVNTYADSHVLAAATSAGTAAHEAEVKKRKKYDDLTQRFHFEPLAFETSGACGPSTKVFVRELGARIASVTEDRRETAWLWQRLALAVVRGNAASILQTAEHEVQQKLREQETGTWRGRTVQNRRNGLREEPLGVGELHCALPSRNPLDDPELAQYLKPRAAPRSVDERVATTQELTDQLLSIAPSCSGVSPGSPRPNRLATYASLLAEMKRDAVSGYVEPGG

SEQ ID NO: 16142 - protein, 1197 aa, Amphibalanus amphitrite
MVAITPQNFYVQVTFSKEDRLSIGCPVPKILAFEERPHGRPAGRPAAHTQKFPLKEGCHLLDTTQFLQCITHCCRCVTNPCKACRCVRLGNPCTTCRFGDKCPNTTPSATTDIAAEIATLRRTGRILPHVPRGARIAVADELARLINSAVAEGAEGAWRRLMRFAYTALRVKEQSQEAPRSSLAAKVRLNLTQNGDPDGAQPSVPPTKRRRGHRPADGVTAMSRRVASKLTDGDIRGALRTLTSDDSYAPPADDVINKMQEKHPKPPADLRDIPPPDDSQAPMVASEADVMKAINSFPPSSSAGLDGIRPAHLRSLLTKHTAEAGARLLTALTALTNLALSGRLPECVVPAFFGASLIALRKKDGGLRPIAVGSVYRRIAGKVAAAAVSGAIGARLRPIQLGVATRNGCEAAVHAVRAYIQGSSESAVDSKIMVKLDVSNAFNTVRRDSMMEAVIEQAPAIYPFVWQGYNTTTPLFIGDSKILSQTGIQQGDPLSSLLFSLTVDAAARSADTDINIWYLDDGTLAGSVPDVVSSIQRVKAELSKVGLTINPTKCEAILLEGSSEESKSIALRHLHSVLPDIREVAMSELELLGAPVHDDQVRRKLLQGQLMVEKLIRRLQALEEAHQAFFLLKSYVSLPRVLYLLRSSPAYRHPALLVKIDETVRCGMEAITNVRLRGDSWRQATLPVNLGGLGVRMVTDVALPAHIASQVASADTIASIYGSAAARVGEATRCLVEEWEAHTGLPSPDVSRQRYQRDWDRAAAEAISRQLLDDCTTDVDRARLRAAAQPHSGAWLNAFPAASVGTLLDPDTLRTAVALRVGAEVCAPHRCRCGADIDERGLHGLSCQLSAGRFPRHAELNSVIKRGLAAAGLPSVLEPAGLDRGDGRRPDGITAFPYAEGRCLVWDATCVDTFSASSVAASAARASAAATAAEGRKRRRYEAISRRYLFRPVAVETSGALGSDSCSFLKDLGRRIVQVTGDRRDMERLIQRISVAVVRGNATAIRLAGAHDRPDVRTAVTSFDRSGGDSRGNSHDVDRCSRSSCGESSDECGGGSGRGSGGGGGDRSTGEISDGCDNTGEGNCSVGCSKDSATALRPGPVMPVRPSAGSRSEEPSRNPLDDPDLAYYLLPRRESPPLTDADSPTTQQLAEQLLCLSPSLAQDTPRPPRPNALTAYAALLAKMRESIRDHGAAPEPL

SEQ ID NO: 16143 - protein, 1134 aa, Amphibalanus amphitrite
MKTSQCITHCCRCVTNPCKACRCVRLGNPCTTCRFGDKCPNTTPSATTDIAAEIATLKRTGRILPHVPRGARIAVADELARLINSAVAEGAEGAWRRLMRFAYTALRVKEQSQEAPRSSLAAKVRLNLTQNGDPDGAQPSVPPTKRRRGHRPADGVTAMSRRVASKLTDGDIRGALRTLTSDDSYAPPADDVINKMQEKHPKPPADLRDIPPPDDSQAPLVASEADVMKAINSFPPSSSAGLDGIRPAHLRSLLTKHTAEAGARLLTALTALTNLALSGRLPECVVPAFFGASLIALRKKDGGLRPIAVGSVYRRIAGKVAAAAVSGAIGARLRPIQLGVATRNGCEAAVHAVRAYIQGSSESAVDSKIMVKLDVSNAFNTVRRDSMMEAVIEQAPAIYPFVWQGYNTTTPLFIGDSKILSQTGIQQGDPLSSLLFSLTVDAAARSADTDINIWYLDDGTLAGSVPDVVSSIQRVKAELSKVGLTINPTKCEAILLEGSSEESKSIALRHLHSVLPDIREVSMSELELLGAPVHDDQVRRKLLQGQLMVEKLIRRLQALEEAHQAFFLLKSYVSLPRVLYLLRSSPAYRHPALLVKIDETVRCGMEAITNVRLRGDSWRQATLPVNLGGLGVRMVTDVALPAHIASQVASADTIASIYGSAAARVGEATRCLVEEWEAHTGLPSPDVSRQRYQRDWDRAAAEAISRQLLDDCTTDVDRARLRAAAQPHSGAWLNAFPAASVGTLLDPDTLRTAVALRVGAEVCAPHRCRCGADIDERGLHGLSCQLSAGRFPRHAELNSVIKRGLAAAGLPSVLEPAGLDRGDGRRPDGITAFPYAEGRCLVWDATCVDTFSASSVAASAARASAAATAAEGRKRRRYEAISRRYLFRPVAVETSGALGSDSCSFLKDLGRRIVQVTGDRRDMERLIQRISVAVVRGNATAIRLAGAHDRPDVRTAVTSFDRSGGDSRGNSHDVDRCSRSSCGESSDECGGGSGRGSGGGGGDRSTGEISDGCDNTGEGNCSVGCSKDSATALRPGPVMPVRPSAGSRSEEPSRNPLDDPDLAYYLLPRRESPPLTDADSPTTQQLAEQLLCLSPSLAQDTPRPPRPNALTAYAALLAKMRESIRDHGAAPEPL

SEQ ID NO: 16144 - protein, 1140 aa, Amphibalanus amphitrite
MKTSQCITHCCRCVTNPCKACRCVRLGNPCTTCRFGDKCPNTTPSATTDIAAEIATLKRTGRILPHVPRGARIAVADELARLINSAVAEGAEGAWRRLMRFAYTALRVKEQSQEAPRSSLAAKVRLNLTQNGDPDGAQPSVPPTKRRRGHRPADGVTAMSRRVASKLTDGDIRGALRTRPPHRTLTSDDSYAPPADDVINKMQEKHPKPPADLRDIPPPDDSQAPLVASEADVMKAINSFPPSSSAGLDGIRPAHLRSLLTKHTAEAGARLLTALTALTNLALSGRLPECVVPAFFGASLIALRKKDGGLRPIAVGSVYRRIAGKVAAAAVSGAIGARLRPIQLGVATRNGCEAAVHAVRAYIQGSSESAVDSKIMVKLDVSNAFNTVRRDSMMEAVIEQAPAIYPFVWQGYNTTTPLFIGDSKILSQTGIQQGDPLSSLLFSLTVDAAARSADTDINIWYLDDGTLAGSVPDVVSSIQRVKAELSKVGLTINPTKCEAILLEGSSEESKSIALRHLHSVLPDIREVAMSELELLGAPVHDDQVRRKLLQGQLMVEKLIRRLQALEEAHQAFFLLKSYVSLPRVLYLLRSSPAYRHPALLVKIDETVRCGMEAITNVRLRGDSWRQATLPVNLGGLGVRMVTDVALPAHIASQVASADTIASIYGSAAARVGEATRCLVEEWEAHTGLPSPDVSRQRYQRDWDRAAAEAISRQLLDDCTTDVDRARLRAAAQPHSGAWLNAFPAASVGTLLDPDTLRTAVALRVGAEVCAPHRCRCGADIDERGLHGLSCQLSAGRFPRHAELNSVIKRGLAAAGLPSVLEPAGLDRGDGRRPDGITAFPYAEGRCLVWDATCVDTFSASSVAASAARASAAATAAEGRKRRRYEAISRRYLFRPVAVETSGALGSDSCSFLKDLGRRIVQVTGDRRDMERLIQRISVAVVRGNATAIRLAGAHDRPDVRTAVTSFDRSGGDSRGNSHDVDRCSRSSCGESSDECGGGSGRGSGGGGGDRSTGEISDGCDNTGEGNCSVGCSKDSATALRPGPVMPVRPSAGSRSEEPSRNPLDDPDLAYYLLPRRESPPLTDADSPTTQQLAEQLLCLSPSLAQDTPRPPRPNALTAYAALLAKMRESIRDHGAAPEPL

SEQ ID NO: 16145 - protein, 1134 aa, Amphibalanus amphitrite
MKTSQCITHCCRCVTNPCKACRCVRLGNPCTTCRFGDKCPNTTPSATTDIAAEIATLKRTGRILPHVPRGARIAVADELARLINSAVAEGAEGAWRRLMRFAYTALRVKEQSQEAPRSSLAAKVRLNLAQNGDPDGAQPSVPPTKRRRGHRPADGVTAMSRRVASKLTDGDIRGALRTLTSDDSYAPPADDVINKMQEKHPKPPADLRDIPPPDDSQAPLVASEADVMKAINSFPPSSSAGLDGIRPAHLRSLLTKHTAEAGARLLTALTALTNLALSGRLPECVVPAFFGASLIALRKKDGGLRPIAVGSVYRRIAGKVAAAAVSGAIGARLRPIQLGVATRNGCEAAVHAVRAYIQGSSESAVDSKIMVKLDVSNAFNTVRRDSMMEAVIEQAPAIYPFVWQGYNTTTPLFIGDSKILSQTGIQQGDPLSSLMFSLTVDAAARSADTDINIWYLDDGTLAGSVPDVVSSIQRVKAELSKVGLTINPTKCEAILLEGSSEESKSIALRHLHSVLPDIREVAMSELELLGAPVHDDQVRRKLLQGQLMVEKLIRRLQALEEAHQAFFLLKSYVSLPRVLYLLRSSPAYRHPALLVKIDETVRCGMEAITNVRLRGDSWRQATLPVNLGGLGVRMVTDVALPAHIASQVASADTIASIYGSAAARVGEATRCLVEEWEAHTGLPSPDVSRQRYQRDWDRAAAEAISRQLLDDCTTDVDRARLRAAAQPHSGAWLNAFPAASVGTLLDPDTLRTAVALRVGAEVCAPHRCRCGADIDERGLHGLSCQLSAGRFPRHAELNSVIKRGLAAAGLPSVLEPAGLDRGDGRRPDGITAFPYAEGRCLVWDATCVDTFSASSVAASAARASAAATAAEGRKRRRYEAISRRYLFRPVAVETSGALGSDSCSFLKDLGRRIVQVTGDRRDMERLIQRISVAVVRGNATAIRLAGAHDRPDVRTAVTSFDRSGGDSRGNSHDVDRCSRSSCGESSDECGGGSGRGSGGGGGDRSTGEISDGCNNTGEGNCSVGCSKDSATALRPGPVMPVRPSAGSRSEEPSRNPLDDPDLAYYLLPRRESPPLTDADSPTTQQLAEQLLCLSPSLAQDTPRPPRPNALTAYAALLAKMRESIRDHGAAPEPL

SEQ ID NO: 16146 - protein, 1134 aa, Amphibalanus amphitrite
MKTSQCITHCCRCVTNPCKACRCVRLGNPCTTCRFGDKCPNTTPSATTDIAAEIATLKRTGRILPHVPRGARIAVADELARLINSAVAEGTEGAWRRLMRFAYTALRVKEQSQEAPRSSLAAKVRLNLTQNGDPDGAQPSVPPTKRRRGHRPADGVTAMSRRVASKLTDGDIRGALRTLTSDDSYAPPADDVINKMQEKHPKPPADLRDIPPPDDSQAPLVASEADVMKAINSFPPSSSAGLDGIRPAHLRSLLTKHTAEAGARLLTALTALTNLALSGRLPECVVPAFFGASLIALRKKDGGLRPIAVGSVYRRIAGKVAAAAVSGAIGARLRPIQLGVATRNGCEAAVHAVRAYIQGSSESAVDSKIMVKLDVSNAFNTVRRDSMMEAVIEQAPAIYPFVWQGYNTTTPLFIGDSKILSQTGIQQGDPLSSLLFSLTVDAAARSADTDINIWYLDDGTLAGSVPDVVSSIQRVKAELSKVGLTINPTKCEAILLEGSSEESKSIALRHLHSVLPDIREVAMSELELLGAPVHDDQVRRKLLQGQLMVEKLIRRLQALEEAHQAFFLLKSYVSLPRVLYLLRSSPAYRHPALLVKIDETVRCGMEAITNVRLRGDSWRQATLPVNLGGLGVRMVTDVALPAHIASQVASADTIASIYGSAAARVGEATRCLVEEWEAHTGLPSPDVSRQRYQRDWDRAAAEAISRQLLDDCTTDVDRARLRAAAQPHSGAWLNAFPAASVGTLLDPDTLRTAVALRVGAEVCAPHRCRCGADIDERGLHGLSCQLSAGRFPRHAELNSVIKRGLAAAGLPSVLEPAGLDRGDGRRPDGITAFPYAEGRCLVWDATCVDTFSASSVAASAARASAAATAAEGRKRRRYEAISRRYLFRPVAVETSGALGSDSCSFLKDLGRRIVQVTGDRRDMERLIQRISVAVVRGNATAIRLAGAHDRPDVRTAVTSFDRSGGDSRGNSHDVDRCSRSSCGESSDECGGGSGRGSGGGGGDRSTGEISDGCDNTGEGNSSVGCSKDSATALRPGPVMPVRPSAGSRSEEPSRNPLDDPDLAYYLLPRRESPPLTDADSPTTQQLAEQLLCLSPSLAQDTPRPPRPNALTAYAALLAEMRESIRDHGAAPEPL

SEQ ID NO: 16147 - protein, 1134 aa, Amphibalanus amphitrite
MKTSQCITHCCRCVTNPCKACRCVRLGNPCTTCRFGDKCPNTTPSATTDIAAEIATLKRTGRILPHVPRGARIAVADELARLINSAVAEGAEGAWRRLMRFAYTALRVKEQSQEAPRSSLAAKVRLNLTQNGDPDGAQPSVPPTKRRRGHRPADGVTAMSRRVASKLTDGDIRGALRTLTSDDSYAPPADDVINKMQEKHPKPPADLRDIPPPDDSQAPLVASEADVMKAINSFPPSSSAGLDGIRPAHLRSLLTKHTAEAGARLLKALTALTNLALSGRLPECVVPAFFGASLIALRKKDGGLRPIAVGSVYRRIAGKVAAAAVSGAVGARLRPIQLGVATRNGCEAAVHAVRAYIQGSSESAVDSKIMVKLDVSNAFNTVRRDSMMEAVIEQAPAIYPFVWQGYNTTTPLFIGDSKILSQTGIQQGDPLSSLLFSLTVDAAARSADTDINIWYLDDGTLAGSVPDVVSSIQRVKAELSKVGLTINPTKCEAILLEGSSEESKSIALRHLHSVLPDIREVAMSELELLGAPVHDDQVRRKLLQGQLMVEKLIRRLQALEEAHQAFFLLKSYVSLPRVLYLLRSSPAYRHPALLVKIDETVRCGMEAITNVRLRGDSWRQATLPVNLGGLGVRMVTDVALPAHIASQVASADTIASIYGSAAARVGEATRCLVEEWETHTGLPSPDVSRQRYQRDWDRAAAEAISRQLLDDCTTDVDRARLRAAAQPHSGAWLNAFPAASVGTLLNPDTLRTAVALRVGAEVCAPHRCRCGADIDERGLHGLSCQLSAGRFPRHAELNSVIKRGLAAAGLPSVLEPAGLDRGDGRRPDGITAFPYAEGRCLVWDATCVDTFSASSVAASAARASAAATAAEGRKRRRYEAISRRYLFRPVAVETSGALGSDSCSFLKDLGRRIVQVTGDRRDMERLIQRISVAVVRGNATAIRLAGAHDRPDVRTAVTSFDRSGGDSRGNSHDVDRCSRSSCGESSDECGGGSGRGSGGGGGDRSTGEISDGCDNTGEGNCSVGCSKDSATALRPGPVMPVRPSAGSRSEEPSRNPLDDPDLAYYLLPRRESPPLTDADSPTTQQLAEQLLCLSPSLAQDTPRPPRPNALTAYAALLAKMRESIRDHGAAPEPL

SEQ ID NO: 16148 - protein, 1148 aa, Leptopilina boulardi
MANDNNNASEFGETGPILPNIGRGPEYDGNKKILKIFIPTPVAFDCPICFGNNEITSFMEIKTFSSHISRSHKVDGEVWSCLTCLRDFKSLHAVRVHAPKCKGVEGSIALEHVCEACNASFATQRGLSAHELTKHPDVRNRKRNELVNKPKLRGGAPLTRWTDDEMSVLAQWVPRYFGARDINKQLATHLPNKTAAQISTKRRSAGFAQYLLDIQTNNTGNDVTNTDNLSGDSESEHSETSAKNQDTSSDDDDPFNDEDMEPWFHIMREVVVSEQSVDPSLKDVYQMETQLISIAETVVDGVDSPLVHDRIDYFIENIITPYLIRNNKIKRPRHMGVGGPPRISNSKDTAKRNNRQKRSDVYAKCQELFKNKPAKLAEIVISGEDSELRPRQLPPTADDVNKLYTELWGTAGPQSKISFNIRERGLMLDVMPPITVDVVCKRIRRSNKKSAAGIDGILLGDLNKKGIAEILARLFNVLLLTGYFPKSWKRNRTTLIPKTGDLNDVMNWRPITISSMVARIFMGIIDQRVSRITKLSCRQKGFTNENGCADNINILNEAISSAKTSNGGIFIILDIRKAYDTVSHSAILKSLMRAGVPWYLASYIEGAYRGCCSQITSREGPVSIDFKRGVKQGDPLSPTIFNCVMDPVIAAVEDVGDGISVGTHGVPILAFADDLAVLTRDKDQAIKLLRLIKSKLAEVGMSISIKKCFCFKINSHKDTWSVVDPQISFDGSAINYVEPSKFMRYLGSRIGPWRGISKNDYRNELAMVLNRTAGLSLKPMQKVILITRYVIPHFLYGLIIGKTTMTMLEDLDRLVKLKVKTILHLQASTTDGLLYSRKRDGGIGIPKLQNIISIAKLKNWLKMSQSKDLTSREVANSDKYIKDIRMFARSVGITFPFDMKTLNRLKLKIKIDEVQRWAALASQGQGVPWFVDDPVCNCWLYNYNLLRPSRFITALQLRSNTCGVKTVLFRGRPQINTEEVMCRRCHSRPETTAHVLGYCSFNKPFRISRHNEVLDLIINKINQRGGAIKVMKEPEISINGVLLKPDLIVEEEDSIVVIDVTVRYEQGQSLFEAKREKERKYHPVADHLAGTFHKVASVQPIVVGSRGALPHFTVQVLEKCGLKKTDYQTISLIALRTSMEMFHSFLDG

SEQ ID NO: 16149 - protein, 1089 aa, Penaeus chinensis
MECFCRSKPFDENGKPIRGYRQRMFSEWRNRGGFESTEQRICDQARAIRRNGWLSELELEMIKRSVIEEEEREASNEEEDGREQIYNENFVDVDAEENLVNDVNVEENDQQNGGFVVEDDVLENILSESQRVIVENLRKIYVEKRTAEGISFKKVDKNKLKREINRVNQVIRHIETKNITETNELIRAATVWVAEQLGLKKPEFRAKKDPWWKRRIEDDIKRIRKDVNILERDLRGELSHKKSKKLQRLKEKYRVNKKGIKTVIEELKQRMIAKSAKIKRYDQRINQFRQNRTFSIDQNFFYKEMNGGEARTNEVPDAEESRRFWDDIWTVVKEHNKGAEWLSELKNEVKGRHSQEGVTISIENVIKQAKKMPNWKAPGKDCVQGYWIKNLTNMHDRIADQLNKILMGTDSLPKWLTHGRTVLCQKDPKKGNAGPITCLPLMWKLMTGIIADQMYAYLEKEHLLPDEQKGCRRKSRGTKNQLLIDKTILKDCRKRHTNLAMAWIDYKKAYDFVPHSWISECMEMFGIAGNVREFLQRSMVQSKLSLTSNGEELGDVDVKRGIFQGDSLSPLLFVLSMIPLSSLLRKVNVCYEWGTKEYKLNHLLFMDDLKLYSKSEEQIDSLIQTTHIFSNDIGMEFGIKKCGVLVLKKGKIVRCEGIELPNDEIIKEVGQEGYTYLGIVELDKVKENEMKEKTMKEYKRRLRLILKSKLNGRNKITAINTWAVAIFRYGAGIICWREKELNSIDRKTRKNLTMYGAMHPKSDVDRLYIKRKEGGGGLISVEQCVKGEENSLGFYVANSEELLIRGVCASGTIQTEETMEKEEFKRRKAEELKQKWTGKAMYRQFVREMPEKVDRVKSWEWLSRSDLKVGTEAVICAAQEQAIRTNYVKHYIDKSNDSPLCRMCGKRGESIQHIVSECEKLAQKEYKKLHDNVAKKVHWDLCRKHGLEHSDKWYEHTPEGVVENEAMKILWDINVQCDNVIQARRPDVKVIHKEKKEALIVDIAVPADTRIAEKELEKVEKYQDLKREIKRLWELRCAKVVPVVIGALGSVTKDLECWIENMDIVPEVGVLQKTALLGTARILRKVLEL

SEQ ID NO: 16150 - protein, 1070 aa, Penaeus chinensis
MFREWRNRGGFESTEQRICDQARAIRRNGWLSELELEMIKRSVIEEEEREASNDEEDGREQIYNENFVDVDVEENLVNDVNVEENDQQNGGFVVEDDVLENILSESQRVIVENLRKIYVEKRTAEGISFKKVDKNKLKREINRVNQVIRHIETKNITETNELIRAATVWVAEQLGLKKPEFRAKKDPWWKRRIEDDIKRIRKDVNILERDLRGELSHKKSKTLQRLKEKYRVHKKGIKTVIEELKQRMIAKSAKIKRYDQRINQFRQNRTFSIDQKKIYKEMNGGEARTNEVPDAEESRRFWGDIWTVEKEHNKGAEWLSELKNEVKGRHSQEGVTISIENVRKQAKKMPNWKAPGKDGVQGYWIKNMTNMHDRIANQLNKILMGTDSLPKWLTHGRTVLCQKDPKKGNAVENYRPITCLPLMWKLMTGIIADQMYDYLEKEHLLPDEQKGCRRKSRGTKDQLLIDKTILKDCRKRHTNLAMAWIDYKKAYDFVPHSWISECMEMFGIAGNVREFLQRSMVQWKLSLTSNGEELGDVDVKRGIFQGDSLSPLLFVLSMIPLSSLLRKVNVCYEWGTKEYKLNHLLFMDDLKLYSKSEEQIDSLIQTTHIFSNDIGMEFGIKKCGVLVLKRGKIVRCEGIELPNDEIIKEVGQEGYTYLGIVELDKVKENEMKEKTMKEYKRRLRLILKSKLNGRNKITAINTWAVAIFRYGAGKICWREKELNSIERKTRKNLTMYGAMHPKSDVDRLYIKRKEGGRGLISVEQCVKGEENSLGFYVANSEELLIRGVCASGTIQTEETMEKEEFKRRKAEELKQKWTGKAMYGQFVREMPEKVDRVKSWEWLSRSDLKVGTEAVICAAQEQAIRTNYVKHYIDKSSDSPLCRMCGKRGESIQHIVSECEKLAQKEYKKRHDNVAKKVHWDLCRKHGLQHSDKWYEHTPEGVVENEAVKILWDINVQCDNVIQARRPDVIVIHKEKKEALIVDIAVPADTRIAEKELEKVEKYQDLKREIKRLWELRCAKVVPVVIGALGSVTKDLECWIENMDIVPEVGVLQKTALLGTARILRKVLEL

SEQ ID NO: 16151 - protein, 1026 aa, Morbakka virulenta
MIRREIERESQLNEGGIDDEINEREPNVQKNENDDEKEQITHAEGAAIGEVEEDGMDQEQKQIIDELKVILLDGKDCNGISFKKVDKKNLKRLTDKVNETISYVNTKNITETNNLIRAVSVWVAEKLGLKKLEKKEREEPRWKRRIENDIKRLKHDLSLLDRESKGQIGIKKTYKLRKLEEKYRVKRKGIKTVMEELKQRIIAKSAKIKRYEQRIKQFRQNRLFNIDQKKVYTELSGGGIRTGDIPDAEVSKKFWGDIWSIEKEHNKEAEWLSTMKEELNGEYHSQNNITVTTAMVKKQCRKMPNWKAPGKDKVQGYWIKNLDILHDRIAKQLNDVLLGEQCIPEWMTYGHTVLCQKDISKGNAVDNYRPITCLPIMYKLLTRVISDEMYNYLERERLLPEEQKGCKRKSRGTKDQLLIDKTILRDCRKRHTNLAMAWIDYRKAYDFVPHSWIQECLEMFGIADNIRNFLRKSMEKWKLSLTSNGTELGDVKVKRGIFQGDSLSPLLFVMCMIPMSLVLRKVSARYELNRRQVSLNHLLFMDDLKLYGKDETQIDLLVKTVHIFSEDIGMEFGIKKCGVLIMKRGKISRCEGIDLPSGEIMKEVEEHGYTYLGIVELDKIREDEMKSKTTKEYKRRLRLILKSKLNAKNKITAINTWAVAIFRYGAGIIGWKESELKTIDRKTRKTMTMHGAFHPKSDVDRLYIKRKDGGRGLSSVEVVVNAEENSLGQYVLSSEEPLLVAVKDARTIQTEGTVNNSEFKKRKREEFQQRWREKNMYGQFARETTDIIDKDKNWDWLTRSDLKVETEALICAAQEQAIRTNYIKHKIDKTSDSPLCRMCGKRGESVQHVISECEKLAQKEYKRRHDGVAKRIHWDLCKKNGLEHQEKWYEHSPEGAIESEEVKILWDINIQCDNVIEARRPDIVLIDKKQKSCFIIDIAVPADKRIEDKEKEKVEKYQDLKREMGRLWGLKKVQVIPVVIGALGSVSKGFKNWVQKLNIEPNIVDMQKTALLGTARILRKFLRCER

SEQ ID NO: 16152 - protein, 831 aa, Morbakka virulenta
MEELKQRIIAKSAKIKRYEQRIKQFRQNRLFNIDQKKVYTELSGGGIRTGDIPDAEVSKKFWGDIWSIEKEHNKEAEWLSTMKEELNGEYHSQNNITVTTAMVKKQCRKMPNWKAPGKDKVQGYWIKNLDILHDRIAKQLNDVLLGEQCIPEWMTYGHTVLCQKDISKGNAVDNYRPITCLPIMYKLLTRVISDEMYNYLERERLLPEEQKGCKRKSRGTKDQLLIDKTILRDCRKRHTNLAMAWIDYRKAYDFVPHSWIQECLEMFGIADNIRNFLRKSMEKWKLSLTSNGTELGDVKVKRGIFQGDSLSPLLFVMCMIPMSLVLRKVSARYELNRRQVSLNHLLFMDDLKLYGKDETQIDLLVKTVHIFSEDIGMEFGIKKCGVLIMKRGKISRCEGIDLPSGEIMKEVEEHGYTYLGIVELDKIREDEMKSKTTKEYKRRLRLILKSKLNAKNKITAINTWAVAIFRYGAGIIGWKESELKTIDRKTRKTMTMHGAFHPKSDVDRLYIKRKDGGRGLSSVEVVVNAEENSLGQYVLSSEEPLLVAVKDARTIQTEGTVNNSEFKKRKREEFQQRWREKNMYGQFARETTDIIDKDKNWDWLTRSDLKVETEALICAAQEQAIRTNYIKHKIDKTSDSPLCRMCGKRGESVQHVISECEKLAQKEYKRRHDGVAKRIHWDLCKKNGLEHQEKWYEHSPEGAIESEEVKILWDINIQCDNVIEARRPDIVLIDKKQKSCFIIDIAVPADKRIEDKEKEKVEKYQDLKREMGRLWGLKKVQVIPVVIGALGSVSKGFKNWVQKLNIEPNIVDMQKTALLGTARILRKVLEM

SEQ ID NO: 16153 - protein, 1141 aa, Morbakka virulenta
MSVKMSDKINENNGVNETGATCEGLSPGRCPLAQQRGPGRHPITARIKWNKDVNKVIMKCYYKSKPFTENGKPVRGYRQRMFNKWKEIGLFESTEQRVCDQARAIRINGWLSEPELEMVRREIERESQLNEGGIDDEIDEREPNVQENENNDEKEQITHVEGAEIGEVEEDGTDQEQKQIIDELKVILLDGKDCDGISFKKVDKKNLKRLTDKVNETISYVNTKNITETNNLIRAVSVWVAEKLGLKKLEKKEKEEPRWKRRIENDIKRLKHDLSLLDRESKGQIGIKKTYKLRKLEEKYRVKRKGIKTVMEELKQRIIAKSAKIKRYEQRIKQFRQNRLFNIDQKKVYTELSGGGIRTGDIPDAEVSKKFWGDIWSIEKEHNKEAEWLSTMKEELNGEYHSQNNITVTTAMVKKQCRKMPNWKAPGKDKVQGYWIKNLDILHDRIAKQLNDVLLGEQCIPEWMTYGHTVLCQKDISKGNAVDNYRPITCLPIMYKLLTRVISDEMYNYLERERLLPEEQKGCKRKSRGTKDQLLIDKTILRDCRKRHTNLAMAWIDYRKAYDFVPHSWIQECLEMFGIADNIRNFLRKSMEKWKLSLTSNGTELGDVKVKRGIFQGDSLSPLLFVMCMIPMSLVLRKVSARYELNRRQVSLNHLLFMDDLKLYGKDETQIDLLVKTVHIFSEDIGMEFGIKKCGVLIMKRGKISRCEGIDLPSGEIMKEVEEHGYTYLGIVELDKIREDEMKSKTTKEYKRRLRLILKSKLNAKNKITAINTWAVAIFRYGAGIIGWKESELKTIDRKTRKTMTMHGAFHPKSDVDRLYIKRKDGGRGLSSVEVVVNAEENSLGQYVLSSEEPLLVAVKDARTIQTEGTVNNSEFKKRKREEFQQRWREKNMYGQFARETTDIIDKDKNWDWLTRSDLKVETEALICAAQEQAIRTNYIKHKIDKTSDSPLCRMCGKRGESVQHVISECEKLAQKEYKRRHDGVAKRIHWDLCKKNGLEHQEKWYEHSPEGAIESEEVKILWDINIQCDNVIEARRPDIVLIDKKQKSCFIIDIAVPADKRIEDKEKEKVEKYQDLKREMGRLWGLKKVQVIPVVIGALGSVSKGFKNWVQKLNIEPNIVDMQKTALLGTARILRKVLEM

SEQ ID NO: 16154 - protein, 1109 aa, Morbakka virulenta
MSVKMSYKINKNNGVNEAGTTCEGLSPGRCPLAQQRGPGRHPITARIKWNKDVNKVIMKCYYKSKPFTENGKPVRGYRQRMFNKWKEIGLFESTEQRVCDQARAIRINGWLSEPELEMVRREIERESQLNEGGIDDEIDEREPNVQENENNDEKEQITHVEGAEIGEVEEDGTDQEQKQIIDELKVILLDGKDCDGISFKKVDKKNLKRLTDKVNETISYVNTKNITETNNLIRAVSVWVAEKLGLKKLEKKEKEEPRWKRRIENDIKRLKHDLSLLDRESKGQIGIKKTYKLRKLEEKYRVKRKGIKTVMEELKQRIIAKSAKIKRYEQRIKQFRQNRLFNIDQKKVYTELSGGGIRTGDIPDAEVSKKFWGDIWSIEKEHNKEAEWLSTMKEELNGEYHSQNNITVTTAMVKKQCRKMPNWKAPGKDKVQGYWIKNLDILHDRIAKQLNDVLLGEQCIPEWMTYGHTVLCQKDISKGNAVDNYRPITCLPIMYKLLTRVISDEMYNYLERERLLPEEQKGCKRKSRGTKDQLLIDKTILRDCRKRHTNLAMAWIDYRKAYDFVPHSWIQECLEMFGIADNIRNFLRKSMEKWKLSLTSNGTELGDVKVKRGIFQGDSLSPLLFVMCMIPMSLVLRKVSARYELNRRQVSLNHLLFMDDLKLYGKDETQIDLLVKTVHIFSEDIGMEFGIKKCGVLIMKRGKISRCEGIDLPSGEIMKEVEEHGYTYLGIVELDKIREDEMKSKTTKEYKRRLRLILKSKLNAKNKITAINTWAVAIFRYGAGIIGWKESELKTIDRKTRKTMTMHGAFHPKSDVDRLYIKRKDGGRGLSSVEVVVNAEENSLGQYVLSSEEPLLVAVKDARTIQTEGTVNNSEFKKRKREEFQQRWREKNLYGQFARETTDIIDKDKNWDWLTRSDLKVETEALICAAQEQAIRTNYIKHKIDKTSDSPLCRMCGKRGESVQHVISECEKLAQKEYKRRHDGVAKRIHWDLCKKNGLEHQEKWYEHSPEGAIESEEVKILWDINIQCDNVIEARRPDIVLIDKKQKSCFIIDIAVPADKRIEDKEKEKVEKYQDLKREMGRLWGLKKVQVIPVVIGALESVSKGFKN

SEQ ID NO: 16155 - protein, 1141 aa, Morbakka virulenta
MSVKMSDKINENNGVNETGATCEGLSPGRCPLAQQRGPGRHPITARIKWNKDVNKVIMKCYYKSKPFTENGKPVRGYRQRMFNKWKEIGLFESTEQRVCDQARAIRINGWLSEPELEMVRREIERESQLNEGGIDDEIDEREPNVQENENNDEKEQITHVEGAEIGEVEEDGTDQEQKQIIDELKVILLDGKDFDGISFKKVDKKNLKRLTDKVNETISYVNTKNITETNNLIRAVSVWVAEKLGLKKLEKKEKEEPRWKRRIENDIKRLKHDLSLLDRESKGQIGIKKTYKLRKLEEKYRVKRKGIKTVMEELKQRIIAKSAKIKRYEQRIKQFRQNRLFNIDQKKVYTELSGGGIRTGDIPDAEVSKKFWGDIWSIEKEHNKEAEWLSTMKEELNGEYHSQNNITVTTAMVKKQCRKMPNWKAPGKDKVQGYWIKNLDILHDRIAKQLNDVLLGEQCIPEWMTYGHTVLCQKDISKGNAVDNYRPITCLPIMYKLLTRVISDEMYNYLERERLLPEEQKGCKRKSRGTKDQLLIDKTILRDCRKRHTNLAMAWIDYRKAYDFVPHSWIQECLEMFGIADNIRNFLRKSMEKWKLSLTSNGTELGDVKVKRGIFQGDSLSPLLFVMCMIPMSLVLRKVSARYELNRRQVSLNHLLFMDDLKLYGKDETQIDLLVKTVHIFSEDIGMEFGIKKCGVLIMKRGKISRCEGIDLPSGEIMKEVEEHGYTYLGIVELDKIREDEMKSKTTKEYKRRLRLILKSKLNAKNKITAINTWAVAIFRYGAGIIGWKESELKTIDRKTRKTMTMHGAFHPKSDVDRLYIKRKDGGRGLSSVEVVVNAEENSLGQYVLSSEEPLLVAVKDARTIQTEGTVNNSEFKKRKREEFQQRWREKNMYGQFARETTDIIDKDKNWDWLTRSDLKVETEALICAAQEQAIRTNYIKHKIDKTSDSPLCRMCGKRGESVQHVISECEKLAQKEYKRRHDGVAKRIHWDLCKKNGLEHQEKWYEHSPEGAIESEEVKILWDINIQCDNVIEARRPDIVLIDKKQKSCFIIDIAVPADKRIEDKEKEKVEKYQDLKREMGRLWGLKKVQVIPVVIGALGSVSKGFKNWVQKLNIEPNIVDMQKTALLGTARILRNVLEM

SEQ ID NO: 16156 - protein, 1139 aa, Morbakka virulenta
MSVKMSDKINENNGVNETGTTCEGLSPGRCPLAQQRGPGRHPITARIKWNKDVNKVIMKCYYKSKPFTENGKPVRGYRQRMFNKWKEIGLFESTEQRVCDQARAIRINGWLSEPELEMVRREIERESQLNEGGIDDEIDEREPNVQENENNDEKEQITHVEGAEIGEVEEDGTDQEQKQIIDELKVILLDGKDCDGISFKKVDKKNLKRLTDKVNETISYVNTKNITETNNLIRAVSVWVAEKLGLKKLEKKEKEEPRWKRRIENDIKRLKHDLSLLDRESKGQIGIKKTYKLRKLEEKYRVKRKGIKTVMEELKQRIIAKSAKIKRYEQRIKQFRQNRLFNIDQKKVYTELSGGGIRTGDIPDAEESKKFWGDIWSIEKEHNKEAEWLSTMKEELNGEYHSQNNITVTTAMVKKQCRKMPNWKAPGKDKVQGYWIKNLDILHDRIAKQLNDVLLGEQCIPEWMTYGHTVLCQKDISKGNAVDNYRPITCLPIMYKLLTRVISDEMYNYLERERLLPEEQKGCKRKSRGTKDQLLIDKTILRDCRKRHTNLAMAWIDYRKAYDFVPHSWIQECLEMFGIADNIRNFLRKSMEKWKLSLTSNGTELGDVKVKRGIFQGDSLSPLLFVMCMIPMSLVLRKVSARYELNRRQVSLNHLLFMDDLKLYGKDETQIDLLVKTVHIFSEDIGMEFGIKKCGVLIMKRGKISRCEGIDLPSGEIMKEVEEHGYTYLGIVELDKIREDEMKSKTTKEYKRRLRLILKSKLNAKNKITAINTWAVAIFRYGAGIIGWKESELKTIDRKTRKTMTMHGAFHPKSDVDRLYIKRKDGGRGLSSVEVVVNAEENSLGQYVLSSEEPLLVAVKDARTIQTEGTVNNSEFKKRKREEFQQRWREKNMYGQFARETTDIIDKDKNWDWLTRSDLKVETEALICAAQEQAIRTNYIKHKIDKTSDSPLCRMCGKRGESVQHVISECEKLAQKEYKRRHDGVAKRIHWDLCKKNGLEHQEKWYEHSPEGAIESEEVKILWDINIQCDNVIEARRPDIVLIDKKQKSCFIIDIAAPADKRIEDKEKAEKYQGLKREMGRLWGLKKVQVIPVVIGTLGSVSKGFKNWVQKLNIEPNIVDMQKTALLGTARILRKVLEM

SEQ ID NO: 16157 - protein, 823 aa, Penaeus chinensis
MIAKSAKIKRYDQRINQFRQNRTFSIDQKKIYKEMNGGEARTNEVPDAEESRRFWGDIWTVEKEHNKGAEWLSELKNEVKGRHSHEGVTISIENVRKQAKKMPNWKAPGKDGVQGYWIKNLTNMHDRIANQLNKILMGTDSLPKWLTHGRTVLCQKDPKKGNAVENYRPITCLPLMWKLMTGIIADQMYDYLEKEHLLPDEQKGCRRKSRGTKDQLLIDKTILKDCRKRHTNLAMAWIDYKKAYDFVPHSWISECMEMFGIAGNVREFLQRSMVQWKLSLTSNGEELGDVDVKRGIFQGDSLSPLLFVLSMIPLSSLLRKVNVCYEWGTKEYKLNHLLFMDDLKLYSKSEEQIDSLIQTTHIFSNDIGMEFGIKKCGVLVLKRGKIVRCEGIELPNDEIIKEVGQEGYTYLGIVELDKVKENEMKEKTMKEYKRRLRLILKSKLNGRNKITAINTWAVAIFRYGAGIICWREKELNSIDRKTRKNLTMYGAMHPKSDVDRLYIKRKEEGRGLISVEQCVKGEENSLGFYVANSEELLIRGVCASGTIQTEETMEKEEFKRRKAEELKQKWTGKAMYGQFVREMPEKVDRVKSWEWLSRSDLKVGTEAVICAAQEQAIRTNYVKHYIDKSNDSPLCRMCGKRGESIQHIVSECEKLAQKEYKKRHDNVAKKVHWDLCRKHGLQHSDKWYEHTPEGVVENEAVKILWDINVQCDNVIQARRPDVIVIHKEKKEALIVDIAVPADTRIAEKELEKVEKYQDLKREIKRLWELRCAKVVPVVIGALGSVTKDLECWIENMDIVPEVGVLQKTALLGTARILRKVLEL

SEQ ID NO: 16158 - protein, 1149 aa, Penaeus chinensis
MSVMSNKNNTDNGVNGAGTLCEGHSPGRCSPVRQRRPGRYPNTVRTKWNKEVNKVVMECFCRSKPFDENGKPIRGYRQRMFREWRNRGGFESTEQRICDQARAIRRNGWLSELELEMIKRSVIEEEEREASNDEEDGREQIYNENFVDVDVEENLVNDVNVEENDQQNGGFVVEDDVLENILSESQRVIVENLRKIYVEKRTAEGISFKKVDKNKLKREINRVNQVIRHIETKNITETNELIRAATVWVAEQLGLKKPEFRAKKDPWWKRRIEDDIKRIRKDVNILERDLRGELSHKKSKTLQRLKEKYRVHKKGIKTVIEELKQRMIAKSAKIKRYDQRINQFRQNRTFSIDQKKIYKEMNGGEARTNEVPDAEESRRFWGDIWTVEKEHNKGAEWLSELKNEVKGRHSQEGVTISIENVRKQAKKMPNWKAPGKDGVQGYWIKNLTNMHDRIANQLNKILMGTDSLPKWLTHGRTVLCQKDPKKGNAVENYRPITCLPLMWKLMTGIIADQMYDYLEKEHLLPDEQKGCRRKSRGTKDQLLIDKTILKDCRKRHTNLAMAWIDYKKAYDFVPHSWISKCMEMFGIAGNVREFLQRSMVQWKLSLTSNGEELGDVDVKRGIFQGDSLSPLLFVLSMIPLSSLLRKVNVCYEWGTKEYKLNHLLFMDDLKLYSKSEEQIDSLIQTTHIFSNDIGMEFGIKKCGVLVLKRGKIVRCEGIELPNDEIIKEVGQEGYTYLGIVELDKVKENEMKEKTMKEYKRRLRLILKSKLNGRNKITAINTWAVAIFRYGAGIICWREKELNSIDRKTRKNLTMYGAMHPESDVDRLYIKRKEGGRGLISVEQCVKGEENSLGFYVANSEELLIRGVCASGTIQTEETMEKEEFKRRKAEELKQKWTGKAMYGQFVREMPEKVDRVKSWEWLSRSDLKVGTEAVICAAQEQAIRTNYVKHYIDKSNDSPLCRMCGKRGESIQHIVSECEKLAQKEYKKRHDNVAKKVHWDLCRKHGLQHSDKWYEHTPEGVVENETVKILWDINVQCDNVIQARRPDVIVIHKEKKEALIVDIAVPADTRIAEKELEKVEKYQDLKREIKRLWELRCAKVVPVVIGALGSVTKDLECWIENMDIVPEVGVLQKTALLGTARILRKVLEL

SEQ ID NO: 16159 - protein, 1066 aa, Penaeus chinensis
MFREWRNRGGFESTEQRICVIRRNGWLSELELEMIKRSVIEEEEREASNDEEDGREQIYNENFVDVDVEENLVNDVNVEENDQQNGGFVVEDDVLENILSESQRVIVENLRKIYVEKRTAEGISFKKVDKNKLKREINRVNQVIRHIETKNITETNELIRAATVWVAEQLGLKKPEFRAKKDPWWKRRIEDDIKRIRKDVNILERDLRGELSHKKSKTLQRLKEKYRVHKKGIKTVIEELKQRMIAKSAKIKRYDQRINQFRQNRTFSIDQKKIYKEMNGGEARTNEVPDAEESRRFWGDIWTVEKEHNKGAEWLSELKNEVKGRHSQEGVTISIENVRKQAKKMPNWKAPGKDGVQGYWIKNMTNMHDRIANQLNKILMGTDSLPKWLTHGRTVLCQKDPKKGNAVENYRPITCLPLMWKLMTGIIADQMYDYLEKEHLLPDEEKGCRRKSRGTKDQLLIDKTILKDCRKRHTNLAMAWIDYKKAYDFVPHSWISECMEMFGIAGNVREFLQRSMVQWKLSLTSNGEELGDVDVKRGIFQGDSLSPLLFVLSMIPLSSLLRKVNVCYEWGTKEYKLNHLLFMDDLKLYSKSEEQIDSLIQTTHIFSNDIGMEFGIKKCGVLVLKRGKIVRCEGIELPNDEIIKEVGQEGYTYLGIVELDKVKENEMKEKTMKEYKRRLRLILKSKLNGRNKITAINTWAVAIFRYGAGIICWREKELNSIDRKTRKNLTMYGAMHPKSDVDRLYVKRKEGGRGLISVEQCVKGEENSLGFYVANSEELLIRGVCASGTIQTEETMEKEEFKRRKAEELKQKWTGKAMHGQFVREMPERVDRVKSWEWLSRSDLKVGTEAVICAAQEQAIRTNYVKHYIDKSNDSPLCRMCGKRGESIQHIVSECEKLAQKEYKKRHDNVAKKVHWDLCRKHGLQHSDKWYEHTPEGVVENEAVKILWDINVQCDNVIQARRPDVIVIHKEKKEALIVDIAVPADTRIAEKELEKVEKYQDLKREIKRLWELRCAKVVPVVIGALGSVTKDLECWIENMDIVPEVGVLQKTALLGTARILRKVLEL

SEQ ID NO: 16160 - protein, 1141 aa, Morbakka virulenta
MSVKMSDKINENNGVNETGATCEGLSPGRCPLAQQRGPGRHPITARIKWNKDVNKVIMKCYYKSKPFTENGKPVRGYRQRMFNKWKEIGLFESTEQRVCDQARAIRINGWLSEPELEMVRREIERESQLNEGGIDDEIDEREPNVQKKENDDEKEQITHVEGAEIGEVEEDGTDQEQKQIIDELKVILLDGKDCDGISFKKVDKKNLKRLTDKVNETISYVNTKNITETNNLIRAVSVWVAEKLGLKKLEKKEKEEPRWKRRIENDIKRLKHDLSLLDRESKGQIGIKKTYKLRKLEEKYRVKRKGIKTVMEELKQRIIAKSAKIKRYEQRIKQFRQNRLFNIDQKKVYTELSGGGIRTGDIPDAEVSKKFWGDIWSIEKEHNKEAEWLSTMKEELNGEYHSQNNITVTTAMVKKQCRKMPNWKAPGKDKVQGYWIKNLDILHDRIAKQLNDVLLGEQCIPEWMTYGHTVLCQKDISKGNAVDNYRPITCLPIMYKLLTRVISDEMYNYLERERLLPEEQKGCKRKSRGTKDQLLIDKTILRDCRKRHTNLAMAWIDYRKAYDFVPHSWIQECLEMFGIADNIRNFLRKSMEKWKLSLTSNGTELGDVKVKRGIFQGDSLSPLLFVMCMIPMSLVLRKVSARYELNRRQVSLNHLLFMDDLKLYGKDETQIDLLVKTVHIFSEDIGMEFGIKKCGVLIMKRGKISRCEGIDLPSGEIMKEVEEHGYTYLGIVELDKIREDEMKSKTTKEYKRRLRLILKSKLNAKNKITAINTWAVAIFRYGAGIIGWKESELKTIDRKTRKTMTMHGAFHPKSDVDRLYIKRKDGGRGLSSVEVVVNAEENSLGQYVLSSEEPLLVAVKDARTIQTEGTVNNSEFKKRKREEFQQRWREKNMYGQFARETTDIIDKDKNWDWLTRSDLKVETEALICAAQEQAIRTNYIKHKIDKTSDSPLCRMCGKRGESVQHVISECEKLAQKEYKRRHDGVAKRIHWDLCKKNGLEHQEKWYEHSPEGAIESEEVKILWDINIQCDNVIEARRPDIVLIDKKQKSCFIIDIAVLADKRIENKEKEKVEKYQDLKREMGRLWGLKKVQVIPVVIEALGSVSKGFKNWVQKLNIEPNIVDMQKTALLRTARILRKVLEI

SEQ ID NO: 16161 - protein, 1149 aa, Penaeus chinensis
MSVMSNKNNTDNGVNGAGTLCEGHSPGRCSPVRQRRPGRYPNTVRTKWNKEVNKVVMECFCRSKPFDENGKPIRGYRQRMFREWRNRGGFESTEQRICDQARAIRRNGWLSELELEMIKRSVIEEEEREASNDEEDGREQIYNENFVDVDVEENVVNDVNVEENDQQNGGFVVEDDVLENILSESQRVIVENLRKIYVEKRTAEGISFKKVDKNKLKREINRVNQVIRHIETKNITETNELIRAATVWVAEQLGLKKPEFRAKKDPWWKRRIEDDIKRIRKDVNILERDLRGELSHKKSKTLQRLKEKYRVHKKGIKTVIEELKQRMIAKSAKIKRYDQRINQFRQNRTFSIDQKKIYKEMNGGEARTNEVPDAEESRRFWGDIWTVEKEHNKGAEWLSELKNEVKGRHSQEGVTISIENVRKQAKKMPNWKAPGKDGVQGYWIKNMTNMHDRIANQLNKILMGTDSLPKWLTHGRTVLCQKDPKKGNAVENYRPITCLPLMWKLMTGIIADQMYDYLEKEHLLPDEQKGCRRKSRGTKDQLLIDKTILKDCRKRHTNLAMAWIDYKKAYDFVPHSWISECMEMFGIAGNVREFLQRSMVQWKLSLTSNGEELGDVDVKRGIFQGDSLSPLLFVLSMIPLSSLLRKVNVCYEWGTKEYKLNHLLFMDDLKLYSKSEEQIDSLIQTTHIFSNDIGMEFGIKKCGVLVLKRGMIVRCEGIELPNDEIIKEVGQEGYTYLGIVELDKVKENEMKEKTMKEYKRRLRLILKSKLNGRNKITAINTWAVAIFRYGAGIICWREKELNSIDRKTRKNLTMYGAMHPKSDVDRLYIKRKEGGRGLISVEQCVKGEENSLGFYVANSEELLIRGVCASGTIQTEETMEKEEFKRRKAEELKQKWTGKAMYGQFVREMPEKVDRVKSWEWLSRSDLKVGTEAVICAAQEQAIRTNYVKHYIDKSNDSPLCRMCGKRGESIQHIVSECEKLAQKEYKKRHDNVAKKVHWDLCRKHGLQHSDKWYEHTPEGVVENEAVKILWDINVQCDNVIQARRPDVIVIHKEKKEALIVDIAVPADTRIAEKELEKVEKYQDLKREIKRLWELRCAKVVPVVIGALGSVTKDLECWIENMDIVPEVGVLQKTALLGTARILRKVLEL

SEQ ID NO: 16162 - protein, 930 aa, Penaeus chinensis
MNRVNQVIRHIETKNITETNELIRAATAWVAKQLGLKKPEFRAKKDPWWKRRIEDDIKRIRKDVNILERDLRGELSHKKSKKLQRLKEKYRVNKKGIKTVIEELKQRMIAKSAKIKRYDQRINQFRQNRTFSIDQNFFYNEMNGGEARTNEVLDAEESRRFWRDIWTVEKEHNKFAEWLSELKDEVKGRHSQERVTISIENVRKQAKKMPNWKAPGKDGVQGYWIKNLTNMHDRIADQLNKILMGTESLPKWLTHGRTVLCQKNPKKGNAVENYRPITCLPLMWKLMTGIIADQMYDYLEKEHLLPDEQKGCRRKSRGTKDQLLIDKTILKDCRKRHTNLAMAWIDYKKAYDFVPHSWISECMEMFGIAGNVREFLQRSMVQWKLSLTSNGEELGDVDVKRGIFQGDSLSPLLFVLSMIPLSSFLRKVNVCYEWGTKEYKLNHLLFMDDLKLYSKSEEQIDSLIQTTHIFSNDIGMEFGIKKCGVLVLKRGKIVRCEGIELPNDEIIKEVGQEGYTYLGIVEFDKVKENEMKEKTMKEYKRRLRLILKSKLNGRNKITAINTWAVAIFRYGAGIICWREKELNSIDRKTRKNLTMYGAMHPKSDVDRLYIKRKEGGRGLISVEQCVKGEENSLGFYVANSEELLIRGVCASGTIQTEETMEKEEFKRRKAEELKQKWTGKAMYGQFVREMPEKVDRVKSWEWLSRSDLKVGTEAVICAAQEQAIRTNYLKHYIDKSSDSPLCRMCGKRGESIQHIVSECEKLAQKEYKKRHDNVAKKVHWDLCRKHGLQHSDKWYEHTPEGVVENEAVKIMWDINVQCDNVIQARRLDVIVIHKEKKEALIVDIAVPADTRIAEKELEKVGKYQDLKREIKGLWELRCAKVVPVVIGALGSVTKDLECWIENMDIVPEVEVLQKTAILGTVRILRKVLEL

SEQ ID NO: 16163 - protein, 1141 aa, Morbakka virulenta
MSVKMSDKINENNGVNETGATCEGLSPGRCPLAQQRGPGRHPITARIKWNKDVNKVIMKCYYKSKPFTENGKPVRGYRQRMFNKWKEIGLFESTEQRVCDQARAIRINGWLSEPELEMVRREIERESQLNEGGIDDEIDEREPNVQENENNDEKEQITHVEGAEIGEVEEDGTDQEQKQIIDELKVILLDGKDCDGISFKKVDKKNLKRLTDKVNETISYVNTKNITETNNLIRAVSVWVAEKLGLKKLEKKEKEEPRWKRRIENDIKRLKHDLSLLDRESKGQIGIKKTYKLRKLEEKYRVKRKGIKTVMEELKQRIIAKSAKIKRYEQRIKQFRQNRLFNIDQKKVYTELSGGGIRTGDIPDAEESKKFWGDIWSIEKEHNKEAEWLSTMKEELNGEYHSQNNITVTTAMVKKQCRKMPNWKAPGKDKVQGYWIKNLDILHDRIAKQLNDVLLGEQCIPEWMTYGHTVLCQKDISKGNAVDNYRPITCLPIMYKLLTRVISDEMYNYLERERLLPEEQKGCKRKSRGTKDQLLIDKTILRDCRKRHTNLAMAWIDYRKAYDFVPHSWIQECLEMFGIADNIRNFLRKSMEKWKLSLTSNGTELGDVKVKRGIFQGDSLSPLLFVMCMIPMSLVLRKVSARYELNRRQVSLNHLLFMDDLKLYGKDETQIDLLVKTVHIFSEDIGMEFGIKKCGVLIMKRGKISRCEGIDLPSGEIMKEVEEHGYTYLGIVELDKIREDEMKSKTTKEYKRRLRLILKSKLNAKNKITAINTWAVAIFRYGAGIIGWKESELKTIDRKTRKTMTMHGAFHPKSDVDRLYIKRKDGGRGLSSVEVVVNAEENSLGQYVLSSEEPLLVAVKDARTIQTEGTVNNSEFKKRKREEFQQRWREKNMYGQFARETTDIIDKDKNWDWLTRSDLKVETEALICAAQEQAIRTNYIKHKIDKTSDSPLCRMCGKRGESVQHVISECEKLAQKEYKRRHDGVAKRIHWDLCKKNGLEHQEKWYEHSPEGAIESEEVKILWDINIQCDNVIEARRPDIVLIDKKQKSCFIIDIAVPADKRIEDKEKEKVEKYQDLKREMGRLWGLKKVQVIPVVIGALGSVSKGFKNWVQKLNIEPNIVDMQKTALLGTARILRKVLEM

SEQ ID NO: 16164 - protein, 1116 aa, Morbakka virulenta
MSVKMSDKINENNGVNETGATCEGLSPGRCPLAQQRGPGRHPITARIKWNKDVNKVIMKCYYKSKPFTENGKPVRGYRQRMFNKWKEIGLFESTEQRVCDQARAIRINGWLSEPELEMVRREIERESQLNEGGIDDEIDEREPNVQENENNDEKEQITHVEGAEIGEVEEDGTDQEQKQIIDELKVILLDGKDCDGISFKKVDKKNLKRLTDKVNETISYVNTKNITETNNLIRAVSVWVAEKLGLKKLEKKEKEEPRWKRRIENDIKRLKHDLSLLDRESKGQIGIKKTYKLRKLEEKYRVKRKGIKTVMEELKQRIIAKSAKIKRYEQRIKQFRQNRLFNIDQKKVYTELSGGGIRTGDIPDAEESKKFWGDIWSIEKEHNKEAEWLSTMKEELNGEYHSQNNITVTTAMVKKQCRKMPNWKAPGKDKVQGYWIKNLDILHDRIAKQLNDVLLGEQCIPEWMTYGHTVLCQKDISKGNAVDNYRPITCLPIMYKLLTRVISDEMYNYLERERLLPEEQKGCKRKSRGTKDQLLIDKTILRDCRKRHTNLAMAWIDYRKAYDFVPHSWIQECLEMFGIADNIRNFLRKSMEKWKLSLTSNGTELGDVKVKRGIFQGDSLSPLLFVMCMIPMSLVLRKVSARYELNRRQVSLNHLLFMDDLKLYGKDETQIDLLVKTVHIFSEDIGMEFGIKKCGVLIMKRGKISRCEGIDLPSGEIMKEVEEHGYTYLGIVELDKIREDEMKSKTTKEYKRRLRLILKSKLNAKNKITAINTWAVAIFRYGAGIIGWKESELKTIDRKTRKTMTMHGAFHPKSDVDRLYIKRKDGGRGLSSVEVVVNAEENSLGQYVLSSEEPLLVAVKDARTIQTEGTVNNSEFKKRKREEFQQRWREKNMYGQFARETTDIIDKDKNWDWLTRSDLKVETEALICAAQEQAIRTNYIKHKIDKTSDSPLCRMCGKRGESVQHVISECEKLAQKEYKRRHDGVAKRIHWDLCKKNGLEHQEKWYEHSPEGAIESEEVKILWDINIQCDNVIEARRPDIVLIDKKQKSCFIIDIAVPADKRIEDKEKEKVEKYQDLKREMGRLWGLKKVQVIPVVIGLLGSVSKGFKNWVQKIEY

SEQ ID NO: 16165 - protein, 1141 aa, Morbakka virulenta
MSVKMSDKINENNGVNETGATCEGLSPGRCPLAQQRGPGRHPITARIKWNKDVNKVIMKCYYKSKPFTENGKPVRGYRQRMFNKWKEIGLFESTEQRVCDQARAIRINGWLSEPELEMVRREIERESQLNEGGIDDEIDEREPNVQENENNDEKEQITHVEGAEIGEVEEDGTDQEQKQIIDELKVILLDGKDCDGISFKKVDKKNLKRLTDKVNETISYVNTKNITETNNLIRAVSVWVAEKLGLKKLEKKEKEEPRWKRRIENDIKRLKHDLSLLDRESKGQIGIKKTYKLRKLEEKYRVKRKGIKTVMEELKQRIIAKSAKIKRYEQRIKQFRQNRLFNIDQKKVYTELSGGGIRTGDIPDAEVSKKFWGDIWSIEKEHNKEAEWLSTMKEELNGEYHSQNNITVTTAMVKKQCRKMPNWKAPGKDKVQGYWIKNLDILHDRIAKQLNDVLLGEQCIPEWMTYGHTVLCQKDISKGNAVDNYRPITCLPIMYKLLTRVISDEMYNYLERERLLPEEQKGCKRKSRGTKDQLLIDKTILRDCRKRHTNLAMAWIDYRKAYDFVPHSWIQECLEMFGIADNIRNFLRKSMEKWKLSLTSNGTELGDVKVKRGIFQGDSLSPLLFVMCMIPMSLVLRKVSARYELNRRQVSLNHLLFMDDLKLYGKDETQIDLLVKTVHIFSEDIGMEFGIKKCGVLIMKRGKISRCEGIDLPSGEIMKEVEEHGYTYLGIVELDKIREDEMKSKTTKEYKRRLRLILKSKLNAKNKITAINTWAVAIFRYGAGIIGWKESELKTIDRKTRKTMTMHGAFHPKSDVDRLYIKRKDGGRGLSSVEVVVNAEENSLGQYVLSSEEPLLVAVKDARTIQTEGTVNNSEFKKRKREEFQQRWREKNMYGQFARETTDIIDKDKNWDWLTRSDLKVETEALICAAQEQAIRTNYIKHKIDKTSDSPLCRMCGKRGESVQHVISECEKLAQKEYKRRHDGVAKRIHWDLCKKNGLEHQEKWYEHSPEGAIESEEVKILWDINIQCDNVIEARRPDIVLIDKKQKSCFIIDIAVPADKRIEDKEKEKVEKYQDLKWEIGRLWGLKKVQVIPVVIGALGSVSKGFKNWVQKLNIEPNIVDMQKTALLGTARILRKVLEM

SEQ ID NO: 16166 - protein, 944 aa, Alatina alata
MFKKVDKSTLRSQTAKVNAAIAHIKTKNITETNNLIRAASVWIAERMGLKKLELKEKKEPWWKRRIEGDIKRLKKDICKLDRKAKGEMGPVKSRKLKDLEEKYRVKKKGIRTVIEELKQRIVAKSAKVKRYEQRITQFRLNRTFNVDQKKVYTELNGVENRTNEVPNDEESRKFWGDIWSVEKEHNNDAEWLKELKEEMKNENHSQNRMSITIDKIRKQCRKMPNWKAPGKDKVQGYWIKNLTKMHSRIAEQLNTILMREDDLPEWMTYGHTVLCQKDVAKGNAVDNYRPITCLPLMWKLMTGVISEEMYSYLENERLLPEEQKGCRRKSRGTKDQLLIDKTVLKDCKRRHTNLAMAWIDYRKAYDFVPHSWIKECMEMFGIADNVKDFLSRSMKHWKLSLCSNGVQLGDVKVNRGIFQGDSLSPLIFVLAMIPMSLILRKVKAKYEWGKKEFSLNHLLFMDDLKLYGKDEDQIDSLVRTVHIFSSDIGMEFGLKKCGVLTLKRGKIAKCEGIVLPNGEVMKEVEEDGYTYLGIVELDKIKEQEMKDKTITEYKRRLRLILKSKLNGKNKITAVNTWAVAIFRYGAGIIDWRDNELKSIDRKTRKTMTMYGALHPKSDVGRLYVKRKNGGRGLSSIEQVVRGEENSLGFYVLTSKETLIKGVRASETINTEGTINSNEFKRQKSQELKDRWSDKTMYGQFIRNRPEEVDREKSWTWLSRGDLKPETEALLCAAQEQALRTNYVKHHIDKTANTPLCRLCGKSGESVQHIVSGCEKLAQREYKRRHDNVARKLHWDLCKKHGLEHHEKWYEHSPEGVIENDDVKILWDINIQCDNVITARRPDIVFINKQERLCTIVDVAIPTDVGVSVKEKEKIEKYQDLKREIARLWKMRKLQVIPIVIGALGSVTKEFDKWIEKLGIPCEFMGMQKTALLGTARILRKVLET

SEQ ID NO: 16167 - protein, 1061 aa, Morbakka virulenta
MFNKWKEIGLFESTEQRVCDQARAIRINGWLSEPELEMVRREIERESQLNEGGIDDEIDEREPNVQENENNDEKEQITHVEGAEIGEVEEDGTDQEQKQIIDELKVILLDGKDCDGISFKKVDKKNLKRLTDKVNETISYVNTKNITETNNLIRAVSVWVAEKLGLKKLEKKEKEEPRWKRRIENDIKRLKHDLSLLDRESKGQIGIKKTYKLRKLEEKYRVKRKGIKTVMEELKQRIIAKSAKIKRYEQRIKQFRQNRLFNIDQKKVYTELSGGGIRTGDIPDAEVSKKFWGDIWSIEKEHNKEAEWLSTMKEELNGEYHSQNNITVTTAMVKKQCRKMPNWKAPGKDKVQGYWIKNLDILHDRIAKQLNDVLLGEQCIPEWMTYGHTVLCQKDISKGNAVDNYRPITCLPIMYKLLTRVISDEMYNYLERERLLPEEQKGCKRKSRGTKDQLLIDKTILRDCRKRHTNLAMAWIDYRKAYDFVPHSWIQECLEMFGIADNIRNFLRKSMEKWKLSLTSNGTELGDVKVKRGIFQGDSLSPLLFVMCMIPMSLVLRKVSARYELNRRQVSLNHLLFMDDLKLYGKDETQIDLLVKTVHIFSEDIGMEFGIKKCGVLIMKRGKISRCEGIDLPSGEIMKEVEEHGYTYLGIVELDKIREDEMKSKTTKEYKRRLRLILKSKLNAKNKITAINTWAVAIFRYGAGIIGWKESELKTIDRKTRKTMTMHGAFHPKSDVDRLYIKRKDGGRGLSSVEVVVNAEENSLGQYVLSSEEPLLVAVKDARTIQTEGTVNNSEFKKRKREEFQQRWREKNMYGQFARETTDIIDKDKNWDWLTRSDLKVETEALICAAQEQAIRTNYIKHKIDKTSDSPLCRMCGKRGESVQHVISECEKLAQKEYKRRHDGVAKRIHWDLCKKNGLEHQEKWYEHSPEGAIESEEVKILWDINIQCDNVIEARRPDIVLIDKKQKSCFIIDIAVPADKRIEDKEKEKVEKYQDLKREMGRLWGLKKVQVIPVVIGALGSVSKGFKNWVQKLNIEPNIVDMQKTALLGTARILRKVLEM

SEQ ID NO: 16168 - protein, 1141 aa, Morbakka virulenta
MSVKMSDKINENNGVSETGTSCEGLSPGRCPLAQQRGPGRHPITARIKWNKDVNKVIMKCYYKSKPFTENGKPVRGYRQRMFNKWKEIGLFESTEQRVCDQARAIRINGWLSEPELEMVRREIERESQLNEGGIDDEIDEREPNVQENENNDEKEQITHVEGAEIGEVEEDGTDQEQKQIIDELKVILLDGKDCDGISFKKVDKKNLKRLTDKVNETISYVNTKNITETNNLIRAVSVWVAEKLGLKKLEKKEKEEPRWKRRIENDIKRLKHDLSLLDRESKGQIGIKKTYKLRKLEEKYRVKRKGIKTVMEELKQRIIAKSAKIKRYEQRIKQFRQNRLFNIDQKKVYTELSGGGIRTGDIPDAEVSKKFWGDIWSIEKEHNKEAEWLSTMKEELNGEYHSQNNITVTTAMVKKQCRKMPNWKAPGKDKVQGYWIKNLDILHDRIAKQLNDVLLGEQCIPEWMTYGHTVLCQKDISKGNAVDNYRPITCLPIMYKLLTRVISDEMYNYLERERLLPEEQKGCKRKSRGTKDQLLIDKTILRDCRKRHTNLAMAWIDYRKAYDFVPHSWIQECLEMFGIADNIRNFLRKSMEKWKLSLTSNGTELGDVKVKRGIFQGDSLSPLLFVMCMIPMSLVLRKVSARYELNRRQVSLNHLLFMDDLKLYGKDETQIDLLVKTVHIFSEDIGMEFGIKKCGVLIMKRGKISRCEGIDLPSGEIMKEVEEHGYTYLGIVELDKIREDEMKSKTTKEYKRRLRLILKSKLNAKNKITAINTWAVAIFRYGAGIIGWKESELKTIDRKTRKTMTMHGAFHPKSDVDRLYIKRKDGGRGLSSVEVVVNAEENSLGQYVLSSEEPLLVAVKDARTIQTEGTVNNSEFKKRKREEFQQRWREKNMYGQFARETTDIIDKDKNWDWLTRSDLKVETEALICAAQEQAIRTNYIKHKIDKTSDSPLCRMCGKRGESVQHVISECEKLAQKEYKRRHDGVAKRIHWDLCKKNGLEHQEKWYEHSPEGAIESEEVKILWDINIQCDNVIEARRPDIVLIDKKQKSCFIIDIAVSADKRIEDKEKEKVEKYQDLKWEIGRLWGLKKVQVIPVVIGALGSVSKGFKNWVQKLNIEPNIVDIQKTALLGTARILRKVLEM

SEQ ID NO: 16169 - protein, 1141 aa, Morbakka virulenta
MSVKMSDKINENNGVNETGTTCEGLSPGRCPLAQQRGPGRHPITARIKWNKDVNKVIMKCYYKSKPFTENGKPVRGYRQRMFNKWKEIGLFESTEQRVCDQARAIRINGWLSEPELEMVRREIERESQLNEGGIDDEIDEREPNVQENENNDEKEQITHVEGAEIGEVEEDGTDQEQKQIIDELKVILLDGKDCDGISFKKVDKKNLKRLTDKVNETISYVNTKNITETNNLIRAVSVWVAEKLGLKKLEKKEKEEPRWKRRIENDIKRLKHDLSLLDRESKGQIGIKKTYKLRKLEEKYRVKRKGIKTVMEELKQRIIAKSAKIKRYEQRIKQFRQNRLFNIDQKKVYTELSGGGIRTGDIPDAEESKKFWGDIWSIEKEHNKEAEWLSTMKEELNGEYHSQNNITVTTAMVKKQCRKMPNWKAPGKDKVQGYWIKNLDILHDRIAKQLNDVLLGEQCIPEWMTYGHTVLCQKDISKGNAVDNYRPITCLPIMYKLLTRVISDEMYNYLERERLLPEEQKGCKRKSRGTKDQLLIDKTILRDCRKRHTNLAMAWIDYRKAYDFVPHSWIQECLEMFGIADNVRNFLRKSMEKWKLSLTSNGTELGDVKVKRGIFQGDSLSPLLFVMCMIPMSLVLRKVSARYELNRRQVSLNHLLFMDDLKLYGKDETQIDLLVKTVHIFSEDIGMEFGIKKCGVLIMKRGKISRCEGIDLPSGEIMKEVEEHGYTYLGIVELDKIREDEMKSKTTKEYKRRLRLILKSKLNAKNKITAINTWAVAIFRYGAGIIGWKESELKTIDRKTRKTMTMHGAFHPKSDVDRLYIKRKDGGRGLSSVEVVVNAEENSLGQYVLSSEEPLLVAVKDARTIQTEGTVNNSEFKKRKREEFQQRWREKNMYGQFARETTDIIDKDKNWDWLTRSDLKVETEALICAAQEQAIRTNYIKHKIDKTSDSPLCRMCGKRGESVQHVISECEKLAQKEYKRRHDGVAKRIHWDLCKKNGLEHQEKWYEHSPEGAIESEEVKILWDINIQCDNVIEARRPDIVLIDKKQKSCFIIDIAVPADKRIEDKEKEKVEKYQDLKREMGRLWGLKKVQVIPVVIGALGSVSKGFKNWVQKLNIEPNIVDMQKTALLGTARILRKVLEM

SEQ ID NO: 16170 - protein, 1079 aa, Morbakka virulenta
MKCYYKSKPFNEDGKPVRGYRQIMFNEWKEIALFESTEQRVCDQARAIRINGWLSEPELEMVRREIERESQLNEGGIDDEIDEREPNVQENENDDEKEQITHVEGAEIGEVEEDGTDQEQKQIIDELKVILLDGKDCDGISFKKVDKKNLKRLTDKVNETISYVNTKNITETNNLIRAVSVWVAEKLGLKKLEKKEKEEPRWKRRIENDIKRLKHDLSLLDRESKGQIGIKKTYKLRKLEEKYRVKRKGIKTVMEELKQRIIAKSAKIKRYEQRIKQFRQNRLFNIDQKKVYTELSGGGIRTGDIPDAEESKKFWGDIWSIEKEHNKEAEWLSTMKEELNGEYHSQNNITVTTAMVKKQCRKMPNWKAPGKDKVQGYWIKNLDILHDRIAKQLNDVLLGEQCIPEWMTYGHTVLCQKDISKGNAVDNYRPITCLPIMYKLLTRVISDEMYNYLERERLLPEEQKGCKRKSRGTKDQLLIDKTILRDCRKRHTNLAMAWIDYRKAYDFVPHSWIQECLEMFGIADNIRNFLRKSMEKWKLSLTSNGTELGDVKVKRGIFQGDSLSPLLFVMCMIPMSLVLRKVSARYELNRRQVSLNHLLFMDDLKLYGKDETQIDLLVKTVHIFSEDIGMEFGIKKCGVLIMKRGKISRCEGIDLPSGEIMKEVEEHGYTYLGIVELDKIREDEMKSKTTKEYKRRLRLILKSKLNAKNKITAINTWAVAIFRYGAGIIGWKESELKTIDRKTRKTMTMHGAFHPKSDVDRLYIKRKDGGRGLSSVEVVVNAEENSLGQYVLSSEEPLLVAVKDARTIQTEGTVNNSEFKKRKREEFQQRWREKNMYGQFARETTDIIDKDKNWDWLTRSDLKVETEALICAAQEQAIRTNYIKHKIDKTSDSPLCRMCGKRGESVQHVISECEKLAQKEYKRRHDGVAKRIHWDLCKKNGLEHQEKWYEHSPEGAIESEEGKILWDINIQCENVIEARRPDTVLIDKKQKSCFIIDIAVPADQRIEDKEKEKVEKYQDLKREMGRLWGLKKVQVIPVVIEALGSVSKGFKNWVQKLNIQPNIVDMQKTALLGTAKKSS

SEQ ID NO: 16171 - protein, 1128 aa, Morbakka virulenta
MSVKMSDKINENNGVNETGTTCEGLSPGRCPLAQQRGPGRHPITARIKWNKDVNKVIMKCYYKSKPFTENGKPVRGYRQRMFNKWKEIGLFESTEQRVCDQARAIRINGWLSEPELEMVRREIERESQLNEGGIDDEIDEREPNVQENENNDEKEQITHVEGAEIGEVEEDGTDQEQKQIIDELKVILLDGKDCDGISFKKVDKKNLKRLTDKVNETISYVNTKNITETNNLIRAVSVWVAEKLGLKKLEKKEKEEPRWKRRIENDIKRLKHDLSLLDRESKGQIGIKKTYKLRKLEEKYRVKRKGIKTVMEELKQRIIAKSAKIKRYEQRIKQFRQNRLFNIDQKKVYTELSGGGIRTGDIPDAEVSKKFWGDIWSIEKEHNKEAEWLSTMKEELNGEYHSQNNITVTTAMVKKQCRKMPNWKAPGKDKVQGYWIKNLDILHDRIAKQLNDVLLGEQCIPEWMTYGHTVLCQKDISKGNAVDNYRPITCLPIMYKLLTRVISDEMYNYLERERLLPEEQKGCKRKSRGTKDQLLIDKTILRDCRKRHTNLAMAWIDYRKAYDFVPHSWIQECLEMFGIADNIRNFLRKSMEKWKLSLTSNGTELGDVKVKRGIFQGDSLSPLLFVMCMIPMSLVLRKVSARYELNRRQVSLNHLLFMDDLKLYGKDETQIDLLVKTVHIFSEDIGMEFGIKKCGVLIMKRGKISRCEGIDLPSGEIMKEVEEHGYTYLGIVELDKIREDEMKSKTTKEYKRRLRLILKSKLNAKNKITAINTWAVAIFRYGAGIIGWKESELKTIDRKTRKTMTMHGAFHPKSDVDRLYIKRKDGGRGLSSVEVVVNAEENSLGQYVLSSEEPLLVAVKDARTIQTEGTVNNSEFKKRKREEFQQRWREKNMYGQFARETTDIIDKDKNWDWLTRSDLKVETEALICAAQEQAIRTNYIKHKIDKTSDSPLCRMCGKRGESVQHVISECEKLAQKEYKRRHDGVAKRIHWDLCKKNGLEHQEKWYEHSPEGAIESEEVKILWDINIQCDNVIEARRPDIVLIDKKQKSCFIIDIAVPADKRIEDKEKEKVEKYQDLKREMGSLWGLKKVQVIPVVIGALGRVSKGFKNWVQKLNIEPNIVTCRRQLY

SEQ ID NO: 16172 - protein, 1141 aa, Morbakka virulenta
MSVKMSDKINENNGVNETGATCEGLSPGRCPLAQQRGPGRHPITARIKWNKDVNKVIMKCYYKSKPFTENGKPVRGYRQRMFNKWKEIGLFESTEQRVCDQARAIRINGWLSEPELEMVRREIERESQLNEGGIDDEIDEREPNVQENENNDEKEQITHVEGAEIGEVEEDGTDQEQKQIIDELKVILLDGKDCDGISFKKVDKKNLKRLTDKVNETISYVNTKNITETNNLIRAVSVWVAEKLGLKKLEKKEKEEPRWKRRIENDIKRLKHDLSLLDRESKGQIGIKKTYKLRKLEEKYRVKRKGIKTVMEELKQRIIAKSAKIKRYEQRIKQFRQNRLFNIDQKKVYTELSGGGIRTGDIPDAEVSKKFWGDIWSIEKEHNKEAEWLSTMKEELNGEYHSQNNITVTTAMVKKQCRKMPNWKAPGKDKVQGYWIKNLDILHDRIAKQLNDVLLGEQCIPEWMTYGHTVLCQKDISKGNAVDNYRPITCLPIMYKLLTRVISDEMYNYLERERLLPEEQKGCKRKSRGTKDQLLIDKTILRDCRKRHTNLAMAWIDYRKAYDFVPHSWIQECLEMFGIADNIRNFLRKSMEKWKLSLTSNGTELGDVKVKRGIFQGDSLSPLLFVMCMIPMSLVLRKVSARYELNRRQVSLNHLLFMDDLKLYGKDETQIDLLVKTVHIFSEDIGMEFGIKKCGVLIMKRGKISRCEGIDLPSGEIMKEVEEHGYTYLGIVELDKIREDEMKSKTTKEYKRRLRLILKSKLNAKNKITAINTWAVAIFRYGAGIIGWKESELKTIDRKTRKTMTMHGAFHPKSDVDRLYIKRKDGGRGLSSVEVVVNAEENSLGQYVLSSEEPLLVAVKDARTIQTEGTVNNSEFKKRKREEFQQRWREKNMYGQFARETTDIIDKDKNWDWLTRSDLKVETEALICAAQEQAIRTNYIKHKIDKTSDSPLCRMCGKRGESVQHVISECEKLAQKEYKRRHDGVAKRIHWDLCKKNGLEHQEKWYEHSPEGAIESEEVKILWDINIQCDNVIEARRPDIVLIDKKQKSCFIIDIAVPADKRIEDKEKEKVEKYQDLKREMGRLWGLKKVQVIPVVIGALGSFSKGFKNWVQKLNIEPNIVDMQKTALLGTARILRKVLEM

SEQ ID NO: 16173 - protein, 1046 aa, Alatina alata
MKWDKEVNKVVMECFYRSKPFNEEGKPIRGYRQRLFREWNERGMFESTEQRVCDQARAIRKNGWLSELELEEIRRKIEHESRGNDLEREEVIEEANDQVNDQADTTTENHIVNEDNIGIDVMADIGEVEEEDGNLSQEHKQIIEELKVITREGKTCEGIMFKKVDKSILRSQTAKVNAAIAHTKTKNITETNNLIRAASVWIAERMGLKKLELKEKKELWWKRRIEGDIKRLKKDICKLDRKAKGEMGPVKSRKLKDLEEKYRVKKKGTRTVIEELKQRIVAKSAKVKRYEKRITQFRLNRTFNVDQKKVYTELNGGENRTNVVPNDEESRKFWGDIWSVEKEHNKDAEWLKELKEEMKNENHSQNRMSITIDKIRKQCRKMPNWKAPGKDKVQGYWIKNLTKMHSRIAEQLNTILMGEDDLPEWMTYGHTVLCQKDVAKGNAVDNYRPITCLPLMWKLMTGVISEEMYSYLENERLLPEEQKGCRRKSRGTKDQLLIDKTVLKDCKRRHTNLEMAWIDYRKAYDFVPHSWIKECMEMFGIADNVRDFLSRSMKHWKLSLCSNGAQLGDVKVNRGIFQGDSLSPLIFVLAMIPMSLILRKVKAKYEWGKKEFSLNHLLFMDDLKLYGKDEDQMDSLVRTVHIFSSDIGMEFGLKKCGVLTLKRGKIAKCEGIVLPNGEVMKEVQEDGYTYLGIVELDKIKEQEMKDKTITEYKRRLRLILKSKLNGKNKITAINTWAVAIFRYGAGIIDWRDNELKSIDRKTRKTMTMHGALHPKSDVDRLYVKRKNGGRGLSSIEQVVRGDENSLGFYVLNSEETLIKGVRASETINTEGTINSNKFKRQKSQELKDRWSEKRMYGQFTRDRPEEVDREKSWTWLSRGDLKPETEALLCAAQEQALRTNYVKNHIDETANTPLCRLCGKSGESVQHIVSGCEKLAQREYKRRHDNVARKLHWDLCKKYGLEHHEKWYEHSPEGVIENDEVKILWDINIQCDNVITARRPDIIPYNLAYRRRSFKGAGAYIRIKAPWRLYPALFFKYQISYIDSEK

SEQ ID NO: 16174 - protein, 1144 aa, Morbakka virulenta
MNLNEITDQGGPELPTGSVTVPEPPGTEVRGNTSATGVSKLPQRKRWDSDVNKVVMECFFRSNPFDENGKVIRGYRQRMFREWKNRGLFESTEQRICDQARVIRKNGYLSELELEMIKRRIDDEEEELLGETLGLESNEVVDRENVGDGVNINDVNIGLLGEQNVGIAVDEEVLVNLNEEQREILESLRKIINEGKTADGIVFRNINRNRLRSQVDKVNQVIQHISTSSITETNNLIRAASVLIAEQLGLKKKNFRAKKDPWWKRRIEGDIKTLKHDVNLLERKLKGEIGQRKNTKVQKLIDKYRVKNKGLKTVIEELKQRMIAKSEKIKRYDQRISQFRINRMYNNDQKKVYQELNGGEVRSNDIPDAEESRKFWGEIWTVEKEHNKDAEWLSELKGEMNREYDQERVTLNVEKVKKQTKKMPNWKAPGRDGVQGYWIKNLTNLHERISEQLNDILSGTKELPHWLTHGRTVLCQKDPNKGNAVDNYRPITCLPLMWKLLTGIIADDMYEYLQIQELLPDEQKGCRRKSRGTKDQLLIDKAILKECRKRHTNLAMAWVDYRKAYDFVPHSWISECMEMLGIAENVRGFLNKSMKQWKLSLSSGGEELGDVDIMRGIFQGDSLSPLLFVLAMIPLSLLLRKVNVCYEWGKKEFKANHLLFMDDLKLFAKSEQQIDSLIQTTHIFSTDVGMEFGIKKCGVLILKRGKVVKCDGIDLPSGEMIKEVDEEGYTYLGIVELDKIKEKEMKERTITEYKRRLRLILKSGLNGRNKITAVNTWAVAIFRYGAGIISWKESELKSVDRKTRKYLTMYGAMHPKSDVDRLYVKRKEGGRGLIGVEQCVRSEENSLGFYVANSEELLIRGVYAVDVIKTENTMEKADFKKIRSEELKQKWTDKVMHGQFVRQIPEQADKEKTWQWLSKGDLKIGTEALLCAAQEQALRTNYVKHHIDKSIDNPMCRLCGKRGETVQHVICECEKLTQKEYKRRHDNVAKKVHWDLCRINGLESADKWYEHTPAGVVENDVVKILWDINVQCDNVIQARRPDIIVIDKKKKEAFIVDIAVPADKRINDKEQEKIEKYQDLKREIKRLWKLRAVKVVPVVIGALGSVTKEFENWIGKLNIKAGVEVIQKTALLGTARILRRVFEN

SEQ ID NO: 16175 - protein, 924 aa, Penaeus indicus
MNRVNQVIRHIETKNTTETNELIKAVIVWVGEQLGLKKPEFRAKKAPWWKRRIEDDIKRIRKARELRGELKHKKSEKLQRLEEKYRVNKKGIKTVVEELKQRMIAKSAKIKRYDQRINQFRQNRIFSVDQNFFYKELNGGEIRTNEVPDAEESRRFWGDIWSVEKEHNKGAEWLSELKDEVKGRHSQEAVNISIESVRKQAKKIPNWKCPGKDGVQGYRIKNLTNMHGRIADQLNNILMGTDTLPKWLTHGRTVLCQKDPRKGNAVENYRPITCLPLMWKLMTGIIADQMYDYLEREYLLPDEQKGCRRRSRGTKDQLLIDKTTLKDCKKRHTNLAMAWIDYKKAYDFLPHSWISECMEMFGIAGNVTEFLQRSMLQWKLSLTSNGEELGDVDVKRGIFQGDTLSPLLFVLSMIPLSSLLRKVNVCYEWGKKEYKLNHLLFMDDLKLYSKSEEQIDSLIQTTHIFSTDIGMEFGIKKCGVLVLKRRKIVRCEGIELPNDEIIKVGQEGYTYLGIVELEKVKEKEMKEKTIKEYKRRLRLILKSKLNGRNKITAINTWVVAIFRYGAGIISWRESELKSIDRKTRKNLTMYGAMHPKSNVDRLYMKRKEGGRGLISVEHCVKGEENSLGYYVANSEELLIRGVCASGIIQTEETMEKEEFKRRNAEELKQKWIGKTMYGQYVREMPEKVDRVKSWEWLSRSDLKVGTEALLCAAQEQAIRTNYVKHYIDMSSDSLLCRMCGKRGESIQHIVSECEKLAQKEYKRRHDNVAKKTHWDLCRKHGLEHSHKCYEHIPEGVVENEAVKILWDINVQCDNVIQERRPDVIVIQKEKKEALIVDIAVPADTRITEKELEKVIKYQDLKMEIKRLWELRCAKVTPVVIGALGSVTKDLERWIENMDIVPEVGVLQKTALLGTARILRKVLEL

SEQ ID NO: 16176 - protein, 1029 aa, Philornis downsi
MNKDVMRCHYKATRCGTNMLGYRNRQYMYFVTQYSHLRNRLNEQNIASRVRAIMINRMISQVEMSEILRAIQEEVRSSNRVSLPRLSVDNGHNIGLDSTSNTDGVQVDQNRESLGTRREIYLQLENNDDRGIESRQSSTLWDEVHFQTVVEAFEESKLEYGTLDPLCRPQIPKIRYNKKVGKSLEYLNSILSTLLGEHPTFEDVHSAIYCAAITVSKMCGVSIRSDASGNQRGNDKPVWQRRLEGKKSKLRAEIGRLTQYQRGIRSQHLIRMVRRIIGSENIGTITYGMLDDIIDRRTQILQAVSSRLKRYLTSRKRRIDNTLFVFNQRKFYRELEKRNSVELGIPQTPVQSEIEQFWGGLWETPATFHENPIWTESLHTREMRGSTISESDLGAALSKAKNWKAPGVDGIQNFWLKHFTCVHPHLVSIFNEFLNGGTPMPSFLTMGKTFLLYKSGDTTDPRNYRPITCLPTIYKLLTGIISEKIYSHCAENNLLPLEQRGCAKNSRGCKELVTIDAIVTRNSICHQRNLSVAYIDYKKAFDSVPHTYLIRTLENNGVDRRIVAFFERTMPSWRTHIILNGICTREIRINRGIFQGDAFSPLWFCLSLTPLSRALNNSPNGYRIKHQQRQSAITHLLYMDDLKLFARSRYHLSNLLDIVEKFSNDISMQFGFDKCKSIEMVRGQVIHSDGFSLNEGVIQMLDSDQSYKYLGVEEMRGIHHAVIRDSLRTQCEVRIRRLCRTKLNARNMIKAINTYAIPILLHSFGVIVWCDTDLDSLQRKIRTILTSFGQHHPQAAVERVMLPRRLGGQGIMNIKNQHFNQVHKLREFFYMNAAEIEQYSVLVNLDENHTPLKLSTPQYNPLESISSDADIVEQWKRKAIHGRFPHQLEVDNVDRNASTICFQYGQLFPETEAFLMAIQDGIIHSRQYRRVILHEDVDNRCRRCGQAPETTYHIINGCSVMASTAYLRRHNNVARVIHQILAIRSGFVEERVPHYMYHPEEVLLSTEYKLYWDRTISTDRTVIANRPDI

SEQ ID NO: 16177 - protein, 1221 aa, Philornis downsi
MERVLRNRIVQLSPTGGARANSGATAGGSSMRAGSGGAIMQTLPTGTSRTNRSLQIHNDRTSPEPAPTVSRNSLSSTTRAGLPRQRIRWTNEMNKDVMRCHYKATRCGTNMLGYRNRQYMYFVTQYSHLRNRLNEQNIASRVRAIMINRMISQVEMSEILRAIQEEVRSSNRVSLPRLSVDNGHNIGLDSTSNTDGVQVDQNRESLGTRREIYLQLENNDDRGIESRQSSTLWDEVHFQTVVEAFEESKLEYGTLDPLCRPQIPKIRYNKKVGKSLEYLNSILSTLLGEHPTFEDVHSAIYCAAITVSKMCGVSIRSDASGNQRGNDKPAWQRRLEGKKSKLRAEIGRLTQYQRGIRSQHLIRMVRRIIGSENIGTITYGMLDDIIDRRTQILQAVSSRLKRYLTSRKRRIDNTLFVFNQRKFYRELEKRNSVELGIPQTPVQSEIEQFWGGLWETPATFHENPIWTESLHTREMRGSTISESDLGAALSKAKNWKAPGVDGIQNFWLKHFTCVHPHLVSIFNEFLNGGTPMPSFLTMGKTFLLYKSGDTTDSRNYRPITCLPTTYKLLTGIISEKIYSHCAENNLLPLEQRGCAKNSRGCKELVTIDAIVTRNSICHQRNLSVAYIDYKKAFDSVPHTYLIRTLENNGVDRRIVAFFERTMPSWRTHIILNGICTREIRINRGIFQGDAFSPLWFCLSLAPLSRALNNSPNGYRIKHQQRQSAITHLLYMDDLKLFARSRYHLSNLLDIVEKFSNDISMQFGFDKCKSIEMVRGQVIHSDGFSLNEGVIQMLDSDQSYKYLGVEEMRGIHHAVIRDSLRTQCEVRIRRLCRTKLNARNMIKAINTYAIPILLHSFGVIVWCDTDLDSLQRKIRTILTSFGQHHPQAAVERVMLPRRLGGQGIMNIKNQHFNQVHKLREFFYMNAAEIEHYSVLVNLDENHTPLKLSTPQYNPLESISSDADIVEQWKRKAIHGRFPHQLEVDNVDRNASTICFQYGQLFPETEAFLMAIQDGIIHSRHYRRVILHEDVDNRCRRCGQAPETTDHIINGCSVMASTAYLRRHNNVARVIHQILAIRSGFVEERVPHYMYHPEEVLLSTEYKLYWDRTISTDRTVIANRPDIVWINKRGKVAYIFDVAVPLSENVNRTIAEKISKYTDLAFEIKQREHLRRVEIIPIVISSTGIVVNSVSQHVSELGLSGHLHEMCKSVVLDTCRIMRTFLG

SEQ ID NO: 16178 - protein, 1076 aa, Philornis downsi
MINRMISQVEMSEILRAIQEEVRSSNRVSLPRLSVDNGHNIGLDSTSNTDGVQVDQNRESLGTRREIYLQLENNDDRGIESRQSSTLWDEVHFQTVVEAFEESKLEYGTLDPLCRPQIPKIRYNKKVGKSLEYLNSILSTLLGEHPTFEDVHSAIYCAAITVSKMCGVSIRSDASGNQRGNDKPAWQRRLEGKKSKLRAEIGRLTQYQRGIRSQHLIRMVRRIIGSENIGTITYGMLDDIIDRRTQILQAVSSRLKRYLTSRKRRIDNTLFVFNQRKFYRELEKRNSVELGIPQTPVQSEIEQFWGGLWETPATFHENPIWTESLHTREMRGSTISESDLGAALSKAKNWKAPGVDGIQNFWLKHFTCVHPHLVSIFNEFLNGGTPMPSFLTMGKTFLLYKSGDTTDPRNYRPITCLPTIYKLLTGIISEKIYSHCAENNLLPLEQRGCAKNSRGCKELVTIDAIVTRNSICHQRNLSVAYIDYKKAFDSVPHTYLIRTLENNGVDRRIVAFFERTMPSWRTHIILNGICTREIRINRGIFQGDAFSPLWFCLSLTPLSRALNNSPNGYRIKHQQRQSAITHLLYMDDLKLFARSRYHLSNLLDIVEKFSNDISMQFGFDKCKSIEMVRGQVIHSDGFSLNEGVIQMLDSDQSYKYLGVEEMRGIHHAVIRDSLRTQCEVRIRRLCRTKLNARNMIKAINTYAIPILLHSFGVIVWCDTDLDSLQRKIRTILTSFGQHHPQAAVERVMLPRRLGGQGIMNIKNQHFNQVHKLREFFYMNAAEIEQYSVLVNLDKNHTPLKLSTPQYNPLESISSDADIVEQWKRKAIHGRFPHQLEVDNVDRNASTICFQYGQLFPETEAFLMAIQDGIIHSRHYRRVILHEDVDNRCRRCGQAPETTDHIINGCSVMASTAYLRRHNNVARVIHQILAIRSGFVEERVPHYMYHPEEVLLSTEYKLYWDRTISTDRTVIANRPDIVWINKRGKVAYIFDVAVPLSENVNRTIAEKISKYTDLAFEIKQREHLRRVEIIPIVISSTGIVVNSVSQHVSELGLSGHLHEMCKSVVLDTCRIMRTFLG

SEQ ID NO: 16179 - protein, 1170 aa, Philornis downsi
MQTLPTGTSRTNRSLQIHNDRTSPEPAPTVSRNSLSSTTRAGLPRQRIRWTNEMNKDVMRCHYKATRCGTNMLGYRNRQYMYFVTQYSHLRNRLNEQNIASRVRAIMINRMISQVEMSEILRAIQEEVRSSNRVSLPRLSVDNGHNIGLDSTSNTDGVQVDQNRESLGTRREIYLQLENNDDRGIESRQSSTLWDEVHFQTVVEAFEESKLEYGTLDPLCKPQIPKIRYNKKVGKSLEYLNSILSTLLGEHPTFEDVHSAIYCAAITVSELCGVSIRSDASGNQRGNDKPAWQRRLEGKKSKLRAEIGRLTQYQRGIRSQHLIRMVRRIIGSENIGTITYGMLDDIIDRRTQILQAVSSRLKRYLTSRKRRIDNTLFVFNQRKFYRELEKRNSVELGIPQTPVQSEIEQFWGGLWETPATFHENPIWTESLHTREMRGSTISESDLGAALSKAKNWKAPGVDGIQNFWLKHFTCVHPHLVSIFNEFLNGGTPMPSFLTMGKTFLLYNSGDTTDPRNYRPITCLPTIYKLLTGIISEKIYSHCAENNLLPLEQRGCAKNSRGCKELVTIDAIVTRNSICHQRNLSVAYIDYKKAFDSVPHTYLIRTLENNGVDRRIVAFFERTMPSWRTHIILNGICTREIRINRGIFQGDAFSPLWFCLSLTPLSRALNNSPNGYRIKHQQRQSAITHLLYMDDLKLFARSRYHLSNLLDIVEKFSNDISMQFGFDKCKSIEMVRGQVIHSDGFSLNEGVIQMLDSDQSYKYLGVEEMRGIHHAVIRDSLRTQCEVRIRRLCRTKLNARNMIKAINTYAIPILLHSFGVIVWCDTDLDSLQRKIRTILTSFGQHHPQAAVERVMLRQMLGGQVHKLREFFYMNAAEIEQYSVLVNLDENHTPLKLSTPQYNPLESISSDADIVEQWKRKAIHGRFPHQLEVDNVDRNASTICFQYGQLFPETEAFLMAIQDGIIHSRHYRRVILHEDVDNRCRRCGQAPETTDHIINGCSVMASTAYLRRHNNVARVIHQILAIRSGFVEERVPHYMYHPEEVLLSTEYKLYWDRTISTDRTVIANRPDIVWINKRGKVAYIFDVAVPLSENVNRTIAEKISKYTDLAFEIKQREHLRRVEIIPIVISSTGIVVNSVSQHVSELGLSGHLHEMCKSVVLDTCRIMRTFLG

SEQ ID NO: 16180 - protein, 1226 aa, Philornis downsi
MERVLRSRIIQLSPTGGARANSGATAGGSSMRTGSGGAIMQTLPTGTTRTNRSLQTHNDRTSPEPAPTVSRNSLSSTTRAGLPRQRIRWTNEMNKDVMRCHYKATRCGTNMIGYRNRQYLYFTSLLQYSHLQNRVNEQNIASRVRAIITNRMISQVEMTEISREVQNEIRSFNRLSLSGSSANNGDNVVLDSTSGTNGVQITRIRGSLDIQGGEGHVRSEDEDDRVIGPDTSLSPREDVHFQTVLDEFERTSLEYGMLDPLCRPQIPKIRLNRKVEKNLEYLNGIINMILGEHPTFECVHSVLYCAAMTVCKMCGVRIGTDVSGSRRGDNKPLWQRRLEGKKSRLRAEIGRLTQYQRGIRSQHLIRRVRQILGPENMEMLTPRILSDIIDRRTQILQAVSSRLRRYLVSRKRRIDNTLFVVNQQKFYRDLEREENIGLGNHQTTIPDRSEVELFWGGLWETAATYHENAIWTDSMGTDKMQDSTMTESDLKAALSKAKNWKAPGVDGIQNFWLKPLTSIHPYLVSLLNEFLNGETTMPPFLTMGRTFLLYKSGDTKDPQNYRPITCLPTMYKLLTGMVSEKIYNHCVENNLLPPEQMGCARNSRGCKEVISIDAIITRNSVCHQRNLSVAYIDYEKAFDSVPHVYLLRTLRVNGVNRNIIAFFERIMPMWRTQIILNDICTREIRVNRGIFQGDSFSPLWFCLALGPLSKALNESPNGYRIGHQQRQTAITHLLYMDDLKLFARSRYHLSNLLDIVERFSSDICMRFGFEKCKSVEMVRGQVVHSEGFTLNEGVIQMLRSDQSYRYLGVDEMRGIHHTLIRDALKVQCEMRIKKLCSTKLNAKHMIRAINTYAIPVLTYSFGIIVWSDTELDSAQRKVRTTMTRFGQHHPQAAVERVMLPRKLGGQGIINLKNQYYIQTQKLREFFYAKALESEQYSILVNLDENYTPLKLSTPLFDPLEFVSSDVDIVEKWKRKAIHGRFPHQLDMDNVDKNLSTICFQYGQLFPETEAFLMAIQDGVIHSRHFRRVILHENINNMCRRCGQAPETTDHIINGCSILASTDYLRRHNNVARIIHQTLAIRSGFLEDRLPHYMYRPEEVLINTDFKLYWDRTISTDRTVIANRPDIVWVNKRSRTGYIVDVAVPLSENVNRTIAEKISKYTDLAFEMRQREHLRSVEIIPVVISSTGIVVQSVAQHLEELELSRHVHDMCKTVVLETCRIMRKFLG

SEQ ID NO: 16181 - protein, 1102 aa, Philornis downsi
MYFVTQYSHLRNRLNEQNIASRVRAIMINRMISQVEMSEILRAIQEEVRSSNRVSLPRLSVDNGHNIGLDSTSNTDGVQVDQNRESLGTRREIYLQLENNDDRGIESRQSSTLWDEVHFQTVVEAFEESKLEYGTLDPLCRPQIPKIRYNKKVGKSLEYLNSILSTLLGEHPTFEDVHSAIYCAAITVSKMCGVSIRSDASGNQRGNDKPAWQRRLEGKKSKLRAEIGRLTQYQRGIRSQHLIRMVRRIIGSENIGTITYGMLDDIIDRRTQILQAVSSRLKRYLTSRKRRIDNTLFVFNQRKFYRELEKRNSVELGIPQTPVQSEIEQFWGGLWETPATFHENPIWTESLHTREMRGSTISESDLGAALSKAKNWKAPGVDGIQNFWLKHFTCVHPHLVSIFNEFLNGGTPMPSFLTMGKTFLLYKSGDTTDPRNYRPITCLPTIYKLLTGIISEKIYSHCAENNLLPLEQRGCAKNSRGCKELVTIDAIVTRNSICHQRNLSVAYIDYKKAFDSVPHTYLIRTLENNGVDRRIVAFFERTMPSWRTHIILNGICTREIRINRGIFQGDAFSPLWFCLSLTPLSRALNNSPNGYRIKHQQRQSAITHLLYMDDLKLFARSRYHLSNLLDIVEKFSNDISMQLGFDKCKSIEMVRGQVIHSDGFSLNEGVIQMLDSDQSYKYLGVEEMRGIHHAVIRDSLRTQCEVRIRRLCRTKLNARNMIKAINTYAIPILLHSFGVIVWCDTDLDSLQRKIRTILTSFGQHHPQAAVERVMLPRRLGGQGIMNIKNQHFNQVHKLREFFYMNAAEIEQYSVLVNLDENHTPLKLSTPQYNPLESISSDADIVEQWKRKAIHGRFPHQLEVDNVDRNASTICFQYGQLFPETEAFLMAIQDGIIHSRHYRRVILHEDVDNRCRRCGQAPETTDHIINGCSVMASTAYLRRHNNVARVIHQILAIRSGFVEERVPHYMYHPEEVLLSTEYKLYWDRTISTDRTVIANRPDIVWINKRGKVAYIFDVAVPLSENVNRTIAEKISKYTDLAFEIKQREHLRRVEIIPIVISSTGIVVNSVSQHVSELGLSGHLHEMCKSVVLDTCRIMRTFLG

SEQ ID NO: 16182 - protein, 912 aa, Philornis downsi
MCGVSIRSDASGNQRGNDKPAWQRRLEGKKSKLRAEIGRLTQYQRGIRSQHLIRMVRRIIGSENIGTITYGMLDDIIDRRTQILQAVSSRLKRYLTSRKRRIDNTLFVFNQRKFYRELEKRNSVELGIPQTPVQSEIEQFWGGLWETPATFHENPIWTESLHTREMRGSTISESDLGAALSKAKNWKAPGVDGIQNFWLKHFTCVHLHLVSIFNEFLNGGTPMPSFLTMGKTFLLYKSGDTTDPRNYRPITCLPTIYKLLTGIISEKIYSHCAENNLLPLEQRGCAKNSRGCKELVTIDAIVTRNSICHQRNLSVAYIDYKKAFDSVPHTYLIRTLENNGVDRRIVAFFERTMPSWRTHIILNGICTREIRINRGIFQGDAFSPLWFCLSLTPLSRALNNSPNGYRIKHQQRQSAITHLLYMDDLKLFARSRYHLSNLLDIVEKFSNDISMQFGFDKCKSMEMVRGQVIHSDGFSLNEGVIQMLDSDQSYKYLGVEEMRGIHHAVIRDSLRTQCEVRIRRLCRTKLNARNVIKAINTYAIPILLHSFGVIVWCDTDLDSLQRKIRTILTSFGQHHPQAAVERVMLPRRLGGQGIMNIKNQHFNQVHKLREFFYMNAAEIEQYSVLVNLDENHTPLKLSTPQYNPLESISSDADIVEQWKRKAIHGRFPHQLEVDNVDRNASTICFQYGQLFPETEAFLMAIQDGIIHSRHYRRVILHEDVDNRCRRCGQAPETTDHIINGCSVMASTAYLRRHNNVARVIHQILAIRSGFVEERVPHYMYHPEEVLLSTEYKLYWDRTISTDRTVIANRPDIVWINKRGKVGYIFDVAVPLSENVNRTIAEKISKYTDLAFEIKQREHLRRVEIIPIVISSTGIVVNSVSQHVSELGLSGHLHEMCKSVVLDTCRIMRTFLG

SEQ ID NO: 16183 - protein, 957 aa, Philornis downsi
MLDPLCRPQIPKIRLNRKVEKNLEYLNGIINMILGEHPTFECVHSVLYCAAVTVCKMCGVRIGTDVSGSRRGDNKPLWQRRLEGEKSRLRAEIGRLTQYQRGIRSQHLIRRVRQILGPENMEMLTPRILSDIIDRRTQILQAVSNRLRRYLVSRKRRIDNTLFVVNQQKFYRDLEREENIGLGNHQTTIPDRSEVELFWGGLWETAATYHENPIWTDTMGTDEMQDSTMTESDLKAALGKAKNWKAPGVDGIQNFWLKRLTSIHPYLVSLLNEFLNGETTMPPFLTMGRTFLLYKSGDSKDPQNYRPITCLPTIYKLLTGMVSEKIYNHCVENNLLPPEQMGCARNSRGCKEVISIDAIITRNSVCHQRNLSVAYIDYEKAFDSVPHVYLLRTLRVNGVNRNIIAFFERIMPMWRTQIILNNICTREIRVNRGIFQGDSFSPLWFCLALGPLSKALNESPNEYRIGHQQRQTAITHLLYMDDLKLFARSRYHLSNLLDIVERFSSDICMRFGFEKCKSVEMVRGQVVHSEGFTLNEGVIQMLRSDQSYRYLGVDEMRGIHHTLIRDALKVQCEMRIKKLCSTKLNAKHMIRAINTYAIPVLTYSFGIIVWSDTELDSAQRKVRTTMTRFGQHHPQAAVERVMLPRKLGGQGIINLKNQYYIQTQKLREFFYAKALESEQYSILVNLDENYTPLKLSTPLFDPLEFVSSDVDIVEKWKRKAIHGRFPHQLDMDNVDKNLSTISFQYGQLFPETEAFRMAIQDGVIHSRHFRRVILHENINNMCRRCGQAPETTDHIINGCSILASTDYLRRHNNVARIIHQTLAIRSGFLEDRLPHYMYRPEEVLINTDFKLYWDRTISTDRTVIANRPDIVWVNKRSRTGYIVDVAVPLSENVNRTIAEKISKYTDLAFEMRQREHLRSVEIIPVVISSTGIVVQSVAQHLEELELSRHVHDMCKTV

SEQ ID NO: 16184 - protein, 1226 aa, Philornis downsi
MERVLRSRIIQLSPTGGARANSGATAGGSSMRTGSGGAIMQTLPTGTTRTNRSLQTHNDRTSPEPAPTVSRNSLSSTTRAGLPRQRIRWTNEMNKDVMRCHYKATRCGTNMIGYRNRQYLYFTSLLQYSHLQNRVNEQNIASRVRAIITNRMISQVEMTEISREVQNEIRSFNRLSLSGSSANNGDNVVLDSTSGTNGVQITRIRGSLDIQGGEGHVRSEDEDDRVIGPGTSLSPREDVHFQTVLDEFERTSLEYGMLDPLCRPQIPKIRLNRKVEKNLEYLNGIINMILGEHPTFECVHSVLYCAAMTVCKMCGVRIGTDVSGSRRGDNKPLWQRRLEGKKSRLRAEIGRLTQYQRGIRSQHLIRRVRQILGPENMEMLTPRILSDIIDRRTQILQAVSSRLRRYLVSRKRRIDNTLFVVNQQKFYRDLEREENIGLGNHQTTIPDRSEVELFWGGLWETAATYHENPIWTDSMGTDEMQDSTMTESDLEAALSKAKNWKAPGVDGIQNFWLKRLTSIHPYLVSLLNEFLNGETTMPPFLTMGRTFLLYKSGDTKDPQNYRPITCLPTIYKLLTGMVSEKIYNHCVENNLLPPEQMGCARNSRGCKEVISIDAIITRNSVCHQRNLSVAYIDYEKAFDSVPHVYLLRTLRVNGVNRNIIAFFERIMPMWRTQIILNDICTREIRVNRGIFQGDSFSPLWFCLALGPLSKALNESPNGYRIGHQQRQTAITHLLYMDDLKLFARSRYHLSNLLDIVEKFSSDICMRFGFEKCKSVEMVRGQVVHSEGFTLNEGVIQMLRSDQSYRYLGVDEMRGIHHTLIRDALKVQCEMRIKKLCSTKLNAKHMIRAINTYAIPVLTYSFGIIVWSDTELDSAQRKVRTTMTRFGQHHPQAAVERVMLPRKLGGQGIINLKNQYYIQTQKLREFFYAKALESEQYSILVNLDENYTPLKLSTPLFDPLEFVSSDVDIVDKWKRKAIHGRFPHQLDMDNVDKNLSTICFQYGQLFPETEAFLMAIQDGVIYSRHFRRVILHENINNMCRRCGQAPETTDHIINGCSILASTDYLRRHNNVARIIHQTLAIRSGFLEDRLPHYMYRPEEVLINTDFKLYWDRTISTDRTVIANRPDIVWVNKRSRTGYIVDVAVPLSENVNRTIAEKISKYTDLAFEMRQREHLRSVEIIPVVISSTGIVVQSVAQHLEELELSRHVHDMCKTVVLETCRIMRKFLG

SEQ ID NO: 16185 - protein, 970 aa, Philornis downsi
MLDPLCRPQIPKIRLNRKVEKNLEYLNGIINMILGEHPTFECVHSVLYCAAMTVCKMCGVRIGTDVSGSRRGDNKPLWQRRLEGKKSRLRAEIGRLTQYQRGIRSQHLIRRVRQILGPENMEMLTPRILSDIIDRRTQILQAVSSRLRRYLVSRKRRIDNTLFVVNQQKFYRDLEREENIGLGNHQTTIPDRSEVELFWGGLWETAATYHENPIWTDSMGTDEMQDSTMTESDLKAALSKAKNWKAPGVDGIQNFWLKRLTSIHPYLVSLLNEFLNGETTMPPFLTMGRTFLLYKSGDTKDPQNYRPITCLPTIYKLLTGMVSEKIYNHCVENNLLPPEQMGCARNSRGCKEVISIDAIITRNSVCHQRNLSVAYIDYEKAFDSVPHVYLLRTLRVNGVNRNIIAFFERIMPMWRTQIILNDICTREIRVNRGIFQGDSFSPLWFCLALGPLSKALNESPNGYRIGHQQRQTAITHLLYMDDLKLFARSRYHLSNLLDIVEKFSSDICIRFGFEKCKSVEMVRGQVVHSEGFTLNEGVIQMLRSDQSYRYLGVDEMRGIHHTLIRDALKVQCEMRIKKLCSTKLNAKHMIRAINTYAIPVLTYSFGIIVWSDTELDSAQRKVRTTMTRFGQHHPQAAVERVMLPRKLGGQGIINLKNQYYIQTQKLREFFYAKALESEQYSILVNLDENYTPLKLSTPLFDPLEFVSSDVDIVDKWKRKAIHGRFPHQLDMDNVDKNLSTICFQYGQLFPETEAFLMAIQDGVIHSRHFRRVILHENINNMCRRCGQAPETTDHIINGCSILASTDYLRRHNNVARIIHQTLAIRSGFLEDRLPHYMYRPEEVLINTDFKLYWDRTISTDRTVIANRPDIVWVNKRSRTGYIVDVAVPLSENVNRTIAEKISKYTDLAFEMRQREHLRSVEIIPVVISSTGIVVQSVAQHLEELELSRHVHDMCKTVVLETCRIMIKFLG

SEQ ID NO: 16186 - protein, 1221 aa, Philornis downsi
MERVLRNRIVQLSPTGGARANSGATAGGSSMRTGSGGAIMQTLPTGTSRTNRSLQIHNDRTSPEPAPTVSRNSLSSTTRAGLPRQRIRWTNEMNKDVMRCHYKATRCGTNMLGYRNRQYMYFVTQYSHLRNRLNEQNIASRVRAIMINRMISQVEMSEILRAIQEEVRSSNRVSLPRLSVDNGHNIGLDSTSNTDGVQVDQNRESLGTRREIYLQLENNDDRGIESRQSSTLWDEVHFQTVVEAFEESKLEYGTLDPLCRPQIPKIRYNKKVGKSLEYLNSILSTLLGEHPTFEDVHSAIYCAAITVSKMCGVSIRSDASGNQRGNDKPAWQRRLEGKKSKLRAEIGRLTQYQRGIRSQHLIRMVRRIIGSENIGTITYGMLDDIIDRRTQILQAVSSRLKRYLTSRKRRIDNTLFVFNQRKFYRELEKRNSVELGIPQTPVQSEIEQFWGGLWETPATFHENPIWTESLHTREMRGSTISESDLGAALSKAKNWKAPGVDGIQNFWLKHFTCVHPHLVSIFNEFLNGGTPMPSFLTMGKTFLLYKSGDTTDPRNYRPITCLPTIYKLLTGIISEKIYSHCAENDLLPLEQRGCAKNSRGCKELVTIDAIVTRNSICHQRNLSVAYIDYKKAFDSVPHTYLIRTLENNGVDRRIVAFFERTMPSWRTHIILNGICTREIRINRGIFQGDAFSPLWFCLSLTPLSRALNNSPNGYRIKHQQRQSAITHLLYMDDLKLFARSRYHLSNLLDIVEKFSNDISMQFGFDKCKSIEMVRGQVIHSDGFSLNEGVIQMLDSDQSYKYLGVEEMRGIHHAVIRDSLRTQCEVRIRRLCRTKLNARNMIKAINTYAIPILLHSFGVIVWCDTDLDSLQRKIRTILTSFGQHHPQAAVERVMLPRRLGGQGIMNIKNQHFNQVHKLREFFYMNAAEIEQYSVLVNLDENHTPLKLSTPQYNPLESISSDADIVEQWKRKAIHGRFPHQLEVDNVDRNASTICFQYGQLFPETEAFLMAIQDGIIHSRHYQRVILHEDVDNRCRRCGQAPETTDHIINGCSVMASTAYLRRHNNVARVIHQILAIRSGFVEERVPHYMYHPEEVLLSTEYKLYWDRTISTDRTVIANRPDIVWINKRGKVAYIFDVAVPLSENVNRTIAEKISKYTDLAFEIKQREHLRRVEIIPIVISSTGIVVNSVSQHVSELGLSGHLHEMCKSVVLDTCRIMRTFLG

SEQ ID NO: 16187 - protein, 850 aa, Philornis downsi
MEMLTPRILSDIIDRRTQILQAVSSRLRRYLVSRKRRIDNTLFVVNQQKFYRDLEGEENIGLGNHQTTIPDRSEVELFWGGLWETAATYHKNPIWTDSMGTDEMQDSTMTESNLKAALSKAKNWKAPGVDGIQNFWLKRLTSIHPYLVSLLNKFLNGETTMLPFLTMGRTFLLYKSGDTKDPQNYRPITCLPTIYKLLTGMVSEKIYNHCVENNLLPPEQMGCARNSRGCKEVISIDAIITRNSVCHQRNLSVAYIDYEKAFDSAPHVYLLRTLRVNGVNRNIIAFFERIMPMWRTQIILNDICTREIRVNRGIFQGDSFSPLWFCLALGPLNKALNESPNGYRIGHQQRQIAITHLLYMDDLKLFARSRYHLSNLLDIVERFSSDICMRFGFEKCKSVEMVRGQVVHSEGFTLNEGVIQMLRSDQSYRYLGVDEMRGIHHTLIRDALKVQCEMRIKKLCSTKLNAKHMIRAINTYAIPVLTYSFGIIVWSDTELDSAQRKVRTTMTRFGQHHPQAAVERVMLPRKLGGQGIINLKNQYYVQTQKLREFFYAKALESEQYSILVNLDENYTPLKLSTPLFDPLEFVSSDVDIVEKWKRKAIHGRFPHQLDMDNVDKNLSTICFQYGQLFPETEAFLMAIQDGVIHSRHFRRVILHENINNRCRRCGQAPETTDHIINGCSILASTDYLRRHNNVARIIHQTLAIRSGFLEDRLPHYMYRPEEVLINTDFKLYWDRTISTDRTVIANRPDIVWVNKRSRTGYIVDVAVPLSENVNRTIAEKISKYTDLAFEMRQREHLRSVEIIPVVISSTGIVVQSVAQHLEELELSRHVHDMCKTVVLETCRIMRKFLG

SEQ ID NO: 16188 - protein, 1221 aa, Philornis downsi
MERVLRNRIVQLSPTGGARANSGATAGGSSMRTGSGGAIMQTLPTGTSRTNRSLQIHNDRTSPEPAPTVSRNSLSSTTRAGLPRQRIRWTNEMNKDVMRCHYKATRCGTNMLGYRNRQYMYFVTQYSHLRNRLNEQNIASRVRAIMINRMISQVEMSEILRAIQEEVRSSNRVSLPRLSVDNGHNIGLDSTSNTDGVQVDQNRESLGTRREIYLQLENNDDRRIESRQSSTLWDEVHFQTVVEAFEESKLEYGTLDPLCRPQIPKIRYNKKVGKSLEYLNSILSTLLGEHPTFEDVHSAIYCAAITVSKMCGVSIRSDASGNQRGNDKPAWQRRLEGKKSKLRAEIGRLTQYQRGIRSQHLIRMVRRIIGSENIGTITYGMLDDIIDRRTQILQAVSSRLKRYLTSRKRRIDNTLFVFNQRKFYRELEKRNSVELGIPQTPVQSEIEQFWGGLWETPATFHENPIWTESLHTREMRGSTISESDLSAALSKAKNWKAPGVDGIQNFWLKHFTCVHPHLVSIFNEFLNGGTPMPSFLTMGKTFLLYKSGDTTDPRNYRPITCLPTIYKLLTGIISEKIYSHCAENNLLSLEQRGCAKNSRGCKELVTIDAIVTRNSICHQRNLSVAYIDYKKAFDSVPHTYLIRTLENNGVDRRIVAFFERTMPSWRTHIILNGICTREIRINRGIFQGDAFSPLWFCLSLTPLSRALNNSPNGYRIKHQQRQSAITHLLYMDDLKLFARSRYHLSNLLDIVEKFSNDISMQFGFDKCKSIEMVRGQVIHSDGFSLNEGVIQMLDSDQSYKYLGVEEMRGIHHAVIRDSLRTQCEVRIRRLCRTKLNARNMIKAINTYAIPILLHSFGVIVWCDTDLDSLQRKIRTILTSFGQHHPQAAVERVMLPRRLGGQGIMNIKNQHFNQVHKLREFFYMNAAEIEQYSVLVNLDENHTPLKLSTPQYNPLESISSDADIVEQWKRKAIHGRFSHQLEVDNVDRNASTICFQYGQLFPETEAFLMAIQDGIIHSRHYRRVILHEDVDNRCRRCGQAPETTDHIINGCSVMASTAYLRRHNNVARVIHQILAIRSGFVEERVPHYMYHPEEVLLSTEYKLYWDRTISTDRTVIANRPDIVWINKRGKVAYIFDVAVPLSENVNRTIAEKISKYTDLAFEIKQREHLRRVEIIPIVISSTGIVVNSVSQHVSELGLSGHLHEMCKSVVLDTCRIMRTFLG

SEQ ID NO: 16189 - protein, 1191 aa, Philornis downsi
MRAGSGGAIMQTLPTGTSRTNRSLQIHNDRTSPEPAPTVSRNSLSSTTRAGLPRQRIRWTNEMNKDVMRCHYKATRCGTNMLVYRNRQYMYFVTQYSHLRNRLNEQNIASRVRAIMINRMISQVEMSEILRAIQEEIRSSNRVSLPRLSLDNGHNIGLDSTSNTDGVQVDQNRESLGTRREIYLQLENNDDRGIESRQSSTLWDEVHFQTVMEAFEESKLEYGTLDPLCRPQIPKIRYNKKVGKSLEYLNSILSTLLGEHPTFEDVHSAIYCAAITVSKMCGVSIRSDANGNQRRNDKPAWQRRLEGKKSKLRAEIGRLTQYQRGIRSQHLIRMVRRIIGSENIGTITYGMLDDIIDRRNQILQAVSSRLKRYLTSRKRRIDNTLFVFNQRKFYRELEKRNSVELGIPQTPVQSEIEQFWGGLWETPATFHENPIWTESLHTREMRGSTISESDLGAALSKAKIWKAPGVDGIQNFWLKHFTCVHPHLVSIFNEFLNGGTPMLSFLTMGKTFLLYKSGDTTDPRNYRPITCLPTIYKLLTGIISEKIYSHCAENNLLPLEQRGCAKNSRGCKELVTIDAIVTRNSICHQRNLSVAYIDYKKAFDSVPHTYLIRTLENNGVDRRIVAFFERTMPSWRTHIVLNGICTREIRINRGIFQGDAFSPLWFCLSLTPLSRALNNSPNGYRIKHQQRQSAITHLLYMDDLKLFARSRYHLSNLLDIVEKFINDISMQFGFDKCKSIEMVRGQVIHSDGFSLNEGVIQMLDSDQSYKYLGVEEMRGIHHAVIRDSLRTQCEVRIRRLCRNKLNARNMIKAINTYAIPILLHSFGVIVWCDTDLDSLQRKIRTILTSFGQHHPQAAVERVMLPRRLGGQGIMNIKNQHFNQVHKLREFFYMNAAEIEQYSVLVNLDENHTPLKLSTPQYNPLESISSDADIVEQWKRKAIHGRFPHQLEVDNVDRNASTICFQYGQLFPETEAFLMAIQDGIIHSRHYRRVILHEDVDNRCRRCGQAPETTDHIINGCSVMASTAYLRRHNNVARVIHQILAIRSGFVEERVPHYMYHPEEVLLSTEYKLYWDRTISTDRTVIANRPDIVWINKRGKVAHIFDVAVPLSENVNRTIAEKISKYTDLAFEIKQREHLRRVEIIPIVISSTGIVVNSVSQHVSELGLSGHLHEMCKSVVLDTCRIMRTFLG

SEQ ID NO: 16190 - protein, 1202 aa, Philornis downsi
MERVLRSRIIQLSPTGGARANSGATAGGSSMRTGSGGAIMQTLPTGTTRTNRSLQTHNDRTSPEPAPTVSRNSLSSTTRAGLPRQRIRWTNEMNKDVMRCHYKATRCGTNMIGYRNRQYLYFTSLLQYSHLQNRVNEQNIASRVRAIITNRMISQVEMTEISREVQNEIRSFNRLSLSGSSANNGDNVVLDSTSGTNGVQITRIRGSLDIQGGEGHVRSEDEDDRVIGPGTSLSPREDVHFQTVLDEFERTSLEYGMLDPLCRPQIPKIRLNRKVEKNLEYLNGIINMILGEHPTFECVHSVLYCAAMTVCKMCGVRIGTDVSGSRRGDNKPLWQRRLEGKKSRLRAEIGRLTQYQRGIRSQHLIRRVRQILGPENMEMLTPRILSDIIDRRTQILQAVSSRLRRYLVSRKRRIDNTLFVVNQQKFYRDLEREENIGLGNHQTTIPDRSEVELFWGGLWETAATYHENPIWTDSMGTDEMQDSTMTESDLEAALSKAKNWKAPGVDGIQNFWLKRLTSIHPYLVSLLNEFLNGETTMPPFLTMGRTFLLYKSGDTKDPQNYRPITCLPTIYKLLTGMVSEKIYNHCVENNLLPPEQMGCARNSRGCKEVISIDAIITRNSVCHQRNLSVAYIDYEKAFDSVPHVYLLRTLRVNGVNRNIIAFFERIMPMWRTQIILNDICTREIRVNRGIFQGDSFSPLWFCLALGPLSKALNESPNGYRIGHQQRQTAITHLLYMDDLKLFARSRYHLSNLLDIVEKFSSDICMRFGFEKCKSVEMVRGQVVHSEGFTLNEGVIQMLRSDQSYRYLGVDEMRGIHHTLIRDALKVQCEMRIKKLCSTKLNAKHMIRAINTYAIPVLTYSFGIIVWSDTELDSAQRKVRTTMTRFGQHHPQAAVERVMLPRKLGGQGIINLKNQYYIQTQKLREFFYAKALESEQYSILVNLDENYTPLKLSTPLFDPLEFVSSDVDIVDKWKRKAIHGRFPHQLDMDNVDKNLSTICFQYGQLFPETEAFLMAIQDGVIYSRHFRRVILHENINNMCRRCGQAPETTDHIINGCSILASTDYLRRHNNVARIIHQTLAIRSGFLEDRLPHYMYRPEEVLINTDFKLYWDRTISTDRTVIANRPDIVWVNKRSRTGYIVDVAVPLSENVNRTIAEKISKYTDLAFEMRQREHLRSVEIIPVVISSTGIVVQSVAQHLEELEL

SEQ ID NO: 16191 - protein, 1226 aa, Philornis downsi
MERVLRSRIIQLSPTGGARANSGATAGGSSMRTGSGGAIMQTLPTGTTRTNRSLQTHNDRTSPEPAPTVSRNSLSSTTRAGLPRQRIRWTNEMNKDVMRCHYKATRCGTNMIGYRNRQYLYFTSLLQYSHLQNRVNEQNIASRVRAIITNRMISQVEMTEISREVQNEIRSFNRLSLSGSLANNGDNVVLDSTSGTNGVQITRIRGSLDIQGGEGHVRSEDEDDRVIGPGTSLSPREDVHFQTVLDEFERTSLEYGMLDPLCRPQIPKIRLNRKVEKNLEYLNGIINMILGEHPTFECVHSVLYCAAMTVCKMCGVRIGTDVSGSRRGDNKPLWQRRLEGKKSRLRAEIGRLTQYQRGIRSQHLIRRVRQILGPENMEMLTPRILSNIIDRRTQILQAVSSRLRRYLVSRKRRIDNTLFVVNQQKFYRDLEREENIGLGNHQTTIPDRSEVELFWGGLWETAATYHENPIWTDSMGTDEMQDSTMTESDLKAALSKAKNWKAPGVDGIQNFWLKRLTSTHPYLVSLLNEFLNGETTMPPFLTMGRTFLLYKSGDTKDPQNYRPITCLPTIYKLLTGMVSEKIYNHCVENNLLPPEQMGCARNSRGCKEVISIDAIITRNSVCHQRNLSVAYIDYEKAFDSVPHVYLLRTLRVNGVNRNIIAFFERIMPMWRTQIILNDICTREIRVNRGIFQGDSFSPLWFCLALGPLSKALNESPNGYRIGHQQRQTAITHLLYMDDLKLFARSRYHLSNLLDIVERFSSDICMRFGFEKCKSVEMVRGQVVHSEGFTLNEGVIQMLRSDQSYRYLGVDEMRGIHHTLIRDALKVQCEMRIKKLCSTKLNAKHMIRAINTYAIPVLTYSFGIIVWSDTELDSAQRKVRTTMTRFGQHHPQAAVERVMLPRKLGGQGIINLKNQYYIQTQKLREFFYAKALESEQYSILVNLDENYTPLKLSTPLFDPLEFVSSDVDIVEKWKRKAIHGRFPHQLDMDNVDKNLSTICFQYGQLFPETEAFLMAIQDGVIHSRHFRRVILHENINNMCRRCGQAPETTDHIINGCSILASTDYLRRHNNVARIIHQTLAIRSGFLEDRLPHYMYRPEEVLINTDFKLYWDRTISTDRTVIANRPDIVWVNKRSRTGYIVDVAVPLSENVNRTIAEKISKYTDLAFEMRQREHLRSVEIIPVVISSTGIVVQSVAQHLEELELSRHVHDMCKTVVLETCRIMRKFLG

SEQ ID NO: 16192 - protein, 1221 aa, Philornis downsi
MERVLRNRIVQLSPTGGARANSGATAGGSSMRAGSGGAIMQTLPTGTSRTNRSLQIHNDRTSPEPAPTVSRNSLSSTTRAGLPRQRIRWTNEMNKDVMRCHYKATRCGTNMLGYRNRQYMYFVTQYSHLRNRLNEQNIASRVRAIMINRMISQVEMSEILTAIQEEVRSSNRVSLPRLSVDNGHNIGLDSTSNTDGVQVDQNRESLGTRREIYLQLENNDDRGIESRQSSTLWDEVHFQTVVEAFEESKLEYGTLDPLCRPQIPKIRYNKKVGKSLEYLNSILSTLLGEHPTFEDVHSAIYCAAITVSKMCGVSIRSDASGNQRGNDKPAWQRRLEGKKSKLRAEIGRLTQYQRGIRSQHLIRMVRRIIGSENIGTITYGMLDDIIDRRTQILQAVSSRLKRYLTSRKRRIDNTLFVFNQRKFYRELEKRNSVELGIPQTPVQSEIEQFWGGLWETPATFHENPIWTESLHTREMRGSTISESDLGAALSKAKNWKAPGVDGIQNFWLKHFTCVHPHLVSIFNEFLNGGTPMPSFLTMGKTFLLYKSGDTTDPRNYRPITCLPTIYKLLTGIISEKIYSHCAENNLLPLEQRGCAKNSRGCKELVTIDAIVTRNSICHQRNLSVAYIDYKKAFDSVPHTYLIRTLENNGVDRRIVAFFERTMPSWRTHIILNGICTREIRINRGIFQGDAFSPLWFCLSLTPLSRALNNSPNGYRIKHQQRQSAITHLLYMDDLKLFARSRYHLSNLLDIVEKFSNDISMQFGFDKCKSIEMVRGQVIHSDGFSLNEGVIQMLDSDQSYKYLGVEEMRGIHHAVIRDSLRTQCEVRIRRLCRTKLNARNMIKAINTYAIPILLHSFGVIVWCDTDLDSLQRKIRTILTSFGQHHPQAAVERVMLPRRLGGQGIMNIKNQHFNQVHKLREFFYMNAAEIEQYSVLVNLDENHTPLKLSTPQYNPLESISSDADIVEQWKRKAIHGRFPHQLEVDNVDRNASTICFQYGQLFPETEAFLMAIQDGIIHSRHYRRVILHEDVDNRCRRCGQAPETTDHIINGCSVMASTAYLRRHNNVARVIHQILAIRSGFVEERVPHYMYHPEEVLLSTEYKLYWDRTISTDRTVIANRPDIVWINKRGKVAYIFDVAVPLSENVNRTIAEKISKYTDLAFEIKQREHLRRVEIIPIVISSTGIVVNSVSQHVSELGLSGHLHEMCKSVVLDTCRIMRTFLG

SEQ ID NO: 16193 - protein, 1221 aa, Philornis downsi
MERVLRNRIVQLSPTGGARANSGATAGGSSMRAGSGGAIMQTLPTGTSRTNRSLQIHNDRTSPEPAPTVSRNSLSSTTRAGLPRQRIRWTNEMNKDVMRCHYKATRCGTNMLGYRNRQYMYFVTQYSHLRNRLNEQNIASRVRAIMINRMISQVEMSEILRAIQEEVRSSNRVSLPRLSVDNGHNIGLDSTSNTDGVQVDQNREPLGTRREIYLQLENNDDRGIESRQPSTLWDEVHFQTVVEAFEESKLEYGTLDPLCRPQIPKIRYNKKVGKSLEYLNSILSTLLGEHPTFEDVHSAIYCAAITVSKMCGISIRSDASGNQRGNDKPAWQRRLEGKKSKLRAEIGRLTQYQRGIRSQHLIRMVRRIIGSENIGTITYGMLDDIIDRRTQILQAVSSRLKRYLTSRKRRIDNTLFVFNQRKFYRELEKRNSVELGIPQTPVQSEIEQFWGGLWETPATFHENPIWTESLHTREMRGSTISESDLGAALSKAKNWKAPGVDGIQNFWLKHFTCVHPHLVSIFNEFLNGGTPMPSFLTMGKTFLLYKSGDTTDPRNYRPITCLPTIYKLLTGIISEKIYSHCAENNLLPLEQRGCAKNSRGCKELVTIDAIVTRNSICRQRNLSVAYIDYKKAFDSVPHTYLIRTLENNGVDRRIVAFFERTMPSWRTHIILNGICTREIRINRGIFQGDAFSPLWFCLSLTPLSRALNNSPNGYRIKHQQRQSAITHLLYMDDLKLFARSRYHLSNLLDIVEKFSNDISIQFGFDKCKSIEMVRGQVIHSDGFSLNEGVIQMLDSDQSYKYLGVEEMRGIHHAVIRDSLRTQCEVRIRRLCRTKLNARNMIKAINTYAIPILLHSFGVIVWCDTDLDSLQRKIRTILTSFGQHHPQAAVERVMLPRRLGGQGIMNIKNQHFNQVHKLREFFYMNAAEIEQYSVLVNLDENHTPLKLSTPQYNPLESISSDADIVEQWKRKAIHGRFPHQLEVDNVDRNASTICFQYGQLFPETEAFLMAIQDGIIHSRHYRRVILHEDVDNRCRRCGQAPETTDHIINGCSVMASTAYLRRHNNVARVIHQILAIRSGFVEERVPHYMYHPEEVLLSTEYKLYWDRTISTDRTVIANRPDIVWINKRGKVAYIFDVAVPLSENVNRTIAEKISKYTDLAFEIKQREHLRRVEIIPIVISSTGIVVNSVSQHVSELGLSGHLHEMCKSVVLDTCRIMRTFLG

SEQ ID NO: 16194 - protein, 1106 aa, Philornis downsi
MPIVSQQPHIYTCSFHNNSNNNNNDNNNNNNNNNNNNNNNKSEILRAIQEEVRSSNRVSLPRLSVDNGHNIGLDSTSNTDGVQVDQNRESLGTRREIYLQLENNDDRGIESRQSSTLWDEVHFQTVVEAFEESKLEYGTLDPLCRPQIPKIRYNKKVGKSLEYLNSILSTLLGEHPTFEDVHSAIYCAAITVSKMCGVSIRSDASGNQRGNDKPAWQRRLEGKKSKLRAEIGRLTQYQRGIRSQHLIRMVRRIIGSENIGTITYGMLDDIIDRRTQILQAVSSRLKRYLTSKKRRIDNTLFVFNQRKFYCELEKRNSVELGIPQTPVQSEIEQFWGGLWETPATFHENPIWTESLHTREMRGSTISESDLGAALSKAKNWKAPGVDGIQNFWLKHFTCVHPHLVSIFNEFLNGGTPMPSFLTMGKTFLLYKSGDTTDPRNYRPITCLPTIYKLLTGIISEKIYSHCAENNLLPLEQRGCAKNSRGCKELVTIDAIVTRNSICHQRNLSVAYIDYKKAFDSVPHTYLIRTLENNGVDRRIVAFFERTMPSWRTHIILNGICTREIRINRGIFQGDAFSPLWFCLSLTPLSRALNNSPNGYRIKHQQRQSAITHLLYMDDLKLFARSRYHLSNLLDIVEKFSNDISMQFGFDKCKSIEMVRGQVIHSDGFSLNEGVIQMLDSDQSYKYLGVEEMRGIHHAVIRDSLRTQCEVRIRRLCRTKLNARNMIKAINTYAIPILLHSFGVIVWCDTDLDSLQRKIRTILTSFGQHHPQAAVERVMLPRRLGGQGIMNIKNQHFNQVHKLREFFYMNAAEIEQYSVLVNLDENHTPLKLSTPQYNPLESISSDADIVEQWKRKAIHGRFPHQLEVDNVDRNASTICFQYGQLFPETEAFLMAIQDGIIHSRHYRRVILHEDVDNRCRRCGQAPETTDHIINGCSVMASTAYLRRHNNVARVIHQILAIRSGFVEERVPHYMYHPEEVLLSTEYKLYWDRTISTDRTVIANRPDIVWINKRGKVAYIFDVAVPLSENVNRTIAEKISKYTDLAFEIKQREHLRRVEIIPIVISSTGIVVNSVSQHVSELGLSGHLHEMCKSVVLDTCRIMRTFLG

SEQ ID NO: 16195 - protein, 912 aa, Philornis downsi
MCGVSIRSDASGNQRGNDKPAWQRRLEGKKSKLRAEIGRLTQYQRGIRSQHLIRMVRRIIGSENIGTITYGMLDDIIDRRTQILQAVSSRLKRYLTSRKRRIDNTLFVFNQRKFYRELEKRNSVELGIPQTPVQSEIEQFWGGLWETPATFHENPIWTESLHTREMRGSTISESDLGAALSKAKNWKAPGVDGIQNFWLKHFTCVHPHLVSIFNEFLNGGTPMPSFLTMGKTFLLYKSGDTTDPRNYRPITCLPTIYKLLTGIISEKIYSHCAENNLLPLEHRGCAKNSRGCKELVTIDAIVTRNSICHQRNLSVAYIDYKKAFDSVPHTYLIRTLENNGVDRRIVAFFERTMPSWRTHIILNGICTREIRINRGIFQGDAFSPLWFCLSLTPLSRALNNSPNGYRIKHQQRQSAITHLLYMDDLKLFARSRYHLSNLLDIVEKFSNDISMQFGFDKCKSIEMVRGQVIHSDGFSLNEGVIQMLDSDQSYKYLGVEEMRGIHHAVIRDSLRTQCEVRIRRLCRTKLNARNMIKAINTYAIPILLHSFGVIVWCDTDLDSLQRKIRTILTSFGQHHPQAAVERVMLPRRLGGQGIMNIKNQHFNQVHKLREFFYMNAAEIEQYSVLVNLDENHTPLKLSTPQYNPLESISSDADIVEQWKRKAIHGRFPHQLEVDNVDRNASTICFQYGQLFPETEAFLMAIQDGIIHSRHYRRVILHEDVDNRCRRCGQAPETTDHIINGCSVMASTAYLRRHNNVARVIHQILAIRSGFVEERVPHYMYHPEEVLLSTEYKLYWDRTISTDRTIIANRPDIVWINKRGKVAYIFDVAVPLSENVNRTIAEKISKYTDLAFEIKQREHLRRVEIIPIVISSTGLVVNSVSQHVSELGLSGHLHEMCKSVVLDTCRIMRTFLG

SEQ ID NO: 16196 - protein, 1221 aa, Philornis downsi
MERVLRNRIVQLSPTGGARANSGATAGGSSMRAGSGGAIMQTLPTGTSRTNRSLQIHNDRTSPEPAPTVSRNSLSSTTRAGLPRQRIRWTNEMNKDVMRCHYKATRCGTNMLGYRNRQYMYFVTQYSHLRNRLNEQNIASRVRAIMINRMISQVEMSEILRAIQEEVRSSNRVSLPRLSVDNGHNIGLDSTSNTDGVQVDQNRESLGTRREIYLQLENNDDRGIESRQSSTLWDEVHFQTVVEAFEESKLEYGTLDPLCRPQIPKIRYNKKVGKSLEYLNSILSTLLGEHPTFEDVHSAIYCAAITVSKMCGISIRSDASGNQRGNDKPAWQRRLEGKKSKLRAEIGRLTQYQRGIRSQHLIRMVRRIIGSENIGTITYGMLDDIIDRRTQILQAVSSRLKRYLTSRKRRIDNTLFVFNQRKFYRELEKRNSVELGIPQTPVQSEIEQFWGGLWETPATFHENPIWTESLHTREMRGSTISESDLGAALSKAKNWKAPGVDGIQNFWLKHFTCVHPHLVSIFNEFLNGGTPMPSFLTMGKTFLLYKSGDTTDPRNYRPITCLPTIYKLLTGIISEKIYSHCAENNLLPLEQRGCAKNSRGCKELVTIDAIVTRNSICHQRNLSVAYIDYKKAFDSVPHTYLIRTLENNGVDRRIVAFFERTMPSWRTHIILNGICTREIRINRGIFQGDAFSPLWFCLSLTPLSRALNNSPNGYRIKHQQRQSAITHLLYMDDLKLFARSRYHLSNLLDIVEKFSNDISIQFGFDKCKSIEMVRGQVIHSDGFSLIEGVIQMLDSDQSYKYLGVEEMRGIHHAVIRDSLRTQCEVRIRRLCRTKLNARNMIKAINTYAIPILLHSFGVIVWCDTDLDSLQRKIRTILTSFGQHHPQAAVERVMLPRRLGGQGIMNIKNQHFNQVHKLREFFYMNAAEIEQYSVLVNLDENHTPLKLSTPQYNPLESISSDADIVEQWKRKAIHGRFPHQLEVDNVDRNASTICFQYGQLFPETEAFLMAIQDGIIHSRHYRRVILHEDVDNRCRRCGQAPETTDHIINGCSVMASTAYLRRHNNVARVIHQILAIRSGFVEERVPHYMYHPEEVLLSTEYKLYWDRTISTDRTVIANRPDIVWINKRGKVAYIFDVAVPLSENVNRTIAEKISKYTDLAFEIKQREHLRRVEIIPIVISSTGIVVNSVSQHVSELGLSGHLHEMCKSVVLDTCRIMRTFMG

SEQ ID NO: 16197 - protein, 909 aa, Philornis downsi
MCGVRIGTDVSGSRRGDNKPLWQRRLEGKKSRLRAEIGRLTQYQRGIRSQHLIRRVRQILGPENMEMLTPRILSDIIDRRTQILQAVSSRLRRYLVSRKRRIDNTLFVVNQQKFYRDLEREENIGLGNHQTTIPDRSEVELFWGGLWETAATYHENPIWTDSMGTDEMQDSTMTESDLKAALSKAKNWKAPGVDGIQNFWVKRLTSIHPYLVSLLNEFLNGETTMPPFLTMGRTFLLYKSGDTKDPQNYRPITCLPTIYKLLTGMVSEKIYNHCVENNLLPPEQMGCARNSRGCKEVISIDAIITRNSVCHQRNLSVAYIDYEKAFDSVPHVYLLRTLRVNGVNRNIIAFFERIMPMWRTQIILNDICTREIRVNRGIFQGDSFSPLWFCLALGPLSKALNESPNGYRIGHQQRQTAITHLLYMDDLKLFARSRYHLSNLLDIVEKFSSDICMRFGFEKCKSVEMVRGQVVHSEGFTLNEGVIQMLRSDQSYRYLGVDEMRGIHHTLIRDALKVQCEMRIKKLCSTKLNAKHMIRAINTYAIPVLTYSFGIIVWSDTELDSAQRKVRTTMTRFGQHHPQAAVERVMLPRKLGGQGIINLKNQYYIQTQKLREFFYAKALESEQYSILVNLDENYTPLKLSTPLFDPLEFVSSDVDIVDKWKRKAIHGRFPHQLDMDNVDKNLSTICFQYGQLFPETEAFLMAIQDGVIHSRHFRRVILHENINNMCRRCGQAPETTDHIINGCSILASTDYLRRHNNVARIIHQTLAIRSGFLEDRLPHYMYRPEEVAKLYWDRTISTDRTVIANRPDIVWVNKRSRTGYIVDVAVPLSENVNRTIAEKISKYTDLAFEMRQREHLRSVEIIPVVISSTGIVVQSVAQHLEELELSRHVHDMCKTVVLETCRIMRKFLG

SEQ ID NO: 16198 - protein, 1221 aa, Philornis downsi
MERVLRNRIVQLSPTGGARANSGATAGGSSMRAGSGGAIMQTLPTGTSRTNRSLQIHNDRTSPEPAPTVSRNSLSSTTRAGLPRQRIRWTNEMNKDVMRCHYKATRCGTNMLGYRNRQYMYFVTQYSHLRNRLNEQNIASRVRAIMINRMISQVEMSEILRAIQEEVRSSNRVSLPRLSVDNGHNIGLDSTSNTDGVQVDQNRESLGTRREIYLQLENNDDRRIESRQSSTLWDEVHFQTVVEAFEESKLEYGTLDPLCRPQIPKIRYNKKVGKSLEYLNSILSTLLGEHPTFEDVHSAIYCAAITVSKMCGVSIRSDASGNQRGNDKPAWLRRLEGKKSKLRAEIGRLTQYQRGIRSQHLIRMVRRIIGSENIGTITYGMLDDIIDRRTQILQAVSSRLKKYLTSRKRRIDNTLFVFNQRKFYRELEKRNSVELGIPQTPVQSEIEQFWGGLWETPATFHENPIWTESLHTREMRGSTISESDLGAALSKAKNWKAPGVDGIQNFWLKHFTCVHPHLVSIFNEFLNGGTPMPSFLTMGKTFLLYKSGDTTDPRNYRPITCLPTIYKLLTGIISEKIYSHCAENNLLPLEQRGCAKNSRGCKELVTIDAIVTRNSICHQRNLSVAYIDYKKAFDSVPHTYLIRTLENNGVDRRIVAFFERTMPSWRTHIILNGICTREIRINRGIFQGDAFSPLWFCLSLTPLSRALNNSPNGYRIKHQQRQSAITHLLYMDDLKLFARSRYHLSNLLDIVEKFSNDISMQFGFDKCKSIEMVRGQVIHSDGFSLNEGVIQMLDSDQSYKYLGVEEMRGIHHAVIRDSLRTQCEVRIRRLCRTKLNARNMIKAINTYAIPILLHSFGVIVWCDTDLDSLQRKIRTILTSFGQHHPQAAVERVMLPRRLGGQGIMNIKNQHFNQVHKLREFFYMNAAEIEQYSVLVNLDENHTPLKLSTPQYNPLESISSDADIVEQWKRKAIHGRFPHQLEVDNVDRNASTICFQYGQLFPETEAFLMAIQDGIIHSRHYRRVILHEDVDNRCRRCGQAPETTDHIINGCSVMASTAYLRRHNNVARVIHQILAIRSGFVEERVPHYMYHPEEVLLSTEYKLYWDRTISTDRTVIANRPDIVWINKRGKVAYIFDVAVPLSENVNRTIAEKISKYTDLAFEIKQREHLRRVEIIPIVISSTGIVVNSVSQHVSELGLSGHLHEMCKSVVLDTCRIMRTFLG

SEQ ID NO: 16199 - protein, 1221 aa, Philornis downsi
MERVLRNRIVQLSPTGGARANSGATAGGSSMRAGSGGAIMQTLPTGTSRTNRSLQIHNDRTSPEPAPTVSRNSLSSTTRAGLPRQRIRWTNEMNKDVMRCHYKATRCGTNMLGYRNRQYMYFVTQYSHLRNRLNEQNIASRVRAIMINRMISQVEMSEILRAIQEEVRSSNRVSLPRLSVDNGHNIGLDSTSNTDGVQVDQNRESLGTRREIYLQLENNDDRGIESRQSSTLWDEVHFQTVVEAFEESKLEYGTLDPLCRPQIPKIRYNKKVGKSLEYLNSILSTLLGEHPTFEDVHSAIYCAAITVSKMCGISIRSDASGNQRGNDKPAWQRRLEGKKSKLRAEIGRLTQYQRGIRSQHLIRMVRRIIGSENIGTITYGMLDDIIDRRTQILQAVSSRLKRYLTSRKRRIDNTLFVFNQRKFYRELEKRNSVELGIPQTPVQSEIEQFWGGLWETPATFHENPIWTESLHTREMRGSTISESDLGAALSKAKNWKAPGVDGIQNFWLKHFTCVHPHLVSIFNEFLNGGTPMPSFLTMGKTFLLYKSGDTTDPRNYRPITCLPTIYKLLTGIISEKIYSHCAENNLLPLEQRGCAKNSRGCKELVTIDAIVTRNSICHQRNLSVAYIDYKKAFDSVPHTYLIRTLENNGVDRRIVAFFERTMPSWRTHIILNGICTREIRINRGIFQGDAFSPLWFCLSLTPLSRALNNSPNGYRIKHQQRQSAITHLLYMDDLKLFARSRYHLSNLLDIVEKFSNDISIQFGFDKCKSIEMVRGQVIHSDGFSLNEGVIQMLDSDQSYKYLGVEEMRGIHHAVIRDSLRTQCEVRIRRLCRTKLNARNMIKAINTYAIPILLHSFGVIVWCDTDLDSLQRKIRTILTSFGQHHPQAAVERVMLPRRLGGQGIMNIKNQHFNQVHKLREFFYMNAAEIEQYSVLVNLDENHTPLKLSTPQYNPLESISSDADIVEQWKRKAIHGRFPHQLEVDNVDRNASTICFQYGQLFPETEAFLMAIQDGIIHSRHYRRVILHEDVDNRCRRCGQAPETTDHIINGCSVMASTAYLRRHNNVARVIHQILAIRSGFVEERVPHYMYHPEEVLLSTEYKLYWDRTISTDRTVIANRPDIVWINKRGKVAYIFDVAVPLSENVNRTIAEKISKYTDLAFEIKQREHLRRVEIIPIVISSTGIVVNSVSQHVSELGLSGHLHEMCKSVVLDTCRIMRTFMG

SEQ ID NO: 16200 - protein, 930 aa, Philornis downsi
MFSYKWTPARAVSGGDRGVGIIIIIISGSRRGDNKPLWQRRLEGKKSRLRAEIGRLTQYQRGIRSQHLIRRVRQILGPENMEMLTPRILSDIIDRRTQILQAVSSRLRRYLVSRKRRIDNTLFVVNQQKFYRDLEREENIGLGNHQTTIPDRSEVELFWGGLWETAATYHENPIWTDSMGTDEMQDSTMTESDLKAALSKAKNWKAPGVDGIQNFWLKRLTSIHPYLVSLLNEFLNGETTMPPFLTMGRTFLLYKSGDTKDPQNYRPITCLPTIYKLLTGMVSEKIYNHCVENNLLPPEQMGCARNSRGCKEVISIDAIITRNSVCHQRNLSVAYIDYEKAFDSVPHVYLLRTLRVNGVNRNIIAFFERIMPMWRTQIILNDICTREIRVNRGIFQGDSFSPLWFCLALGPLSKALNESPNGYRIGHQQRQTAITHLLYMDDLKLFARSRYHLSNLLDIVEKFSSDICMRFGFEKCKSVEMVRGQVVHSEGFTLNEGVIQMLRSDQSYRYLGVDEMRGIHHTLIRDALKVQCEMRIKKLCSTKLNAKHMIRAINTYAIPVLTYSFGIIVWSDTELDSAQRKVRTTMTRFGQHHPQAAVERVMLPRKLGGQGIINLKNQYYIQTQKLREFFYAKALESEQYSILVNLDENYTPLKLSTPLFDPLEFVSSDVDIVEKWKRKAIHGRFPHQLDMDNVDKNLSTICFQYGQLFPETEAFLMAIQDGVIHSTHFRRVILHENINNMCRRCGQAPETTDHIINGCSILASTDYLRRHNNVARIIHQTLAIRSGFLEDRLPHYMYRPEEVLINTDFKLYWDRTISTDRTVIANRPDIVWVNKRSRTGYIVDVAVPLSENVNRTIAEKISKYTDLALEMRQREHLRSVEIIPVVISSTGIVVQSVAQHLEELELSRHVHDMCKTVVLETCRIMRKFLG

SEQ ID NO: 16201 - protein, 1131 aa, Philornis downsi
MNKDVMRCHYKATRCGTNMIGYRNRQYLYFTSLLQYSHLQNRVNEQNIASRVRAIITNRMISQVEMTEISREMQNEIRSFNRLSLSGSSANNGDNVVLDSTSGTNGVQITRIRGSLDIQGGEGHVRSEDEDDRVIGPGTSLSPREDVHFQTVLDEFERTSLEYGMLDPLCRPQIPKIRLNRKVEKNLEYLNGIINMILGEHPTFECVHSVLYCAAMTVCKMCGVRIGTDVSGSRRGDNKPLWQRRLEGKKSRLRAEIGRLTQYQRGIRSQHLIRRVRQILGPENMEMLTPRILSDIIDRRTQILQAVSSRLRRYLVSRKRRIDNTLFVVNQQKFYRDLEGEENIGLGNHQTTIPDRSEVELFWGGLWETAATYHENPIWTDSMGTDEMQDSTMTESDLKAALSKAKNWKAPGVDGIQNFWLKRLTSIHPYLVSLLNEFLNGETTMPPFLTMGRTFLLYKSGDTKDPQNYRPITCLPTIYKLLTGMVSEKIYNHCVENNLLPPEQMGCARNSRGCKEVISIDARNSVCHQRNLSVAYIDYEKAFDSVPHVYLLRTLRVNGVNRNIIAFFERIMPMWRTQIILNDICTREIRVNRGIFQSDSFSPLWFCLALGPLNKALNESPNGYRIGHQQRQTAITHLLYMDDLKLFARSRYHLSNLLDIVERFSSDICMRFGFEKCKSVEMVRGQVVHSEGFTLNEGVIQMLRSDQSYRYLGVDEMRGIHHTLIRDALKVQCEMRIKKLCSTKLNAKHMIRAINTYAIPVLTYSFGIIVWSDTELDSAQRKVRTTMTRFGQHHPQAAVERVMLPRKLGGQGIINLKNQYYVQTQKLREFFYAKALESEQYSILVNLDENYTPLKLSTPLFDPLEFVSSDVDIVEKWKRKAIHGRFPHQLDMDNVDKNLSTICFQYGQLFPETEAFLMAIQDGVIHSRHFRRVILHENINNRCRRCGQAPETTDHIINGCSILASTDYLRRHNNVARIIHQTLAIRSGFLEDRLPHYMYRPEEVLINTDFKLYWDRTISTDRTVIANRPDIVWVNKRSRTGYIVDVAVPLSENVNRTIAEKISKYTDLAFEMRQREHLRSVEIIPVVISSTGIVVQSVAQHLEELELSRHVHDMCKTVVLETCRIMRKFLG

SEQ ID NO: 16202 - protein, 1221 aa, Philornis downsi
MERVLRNRIVQLSPTGGARANSGATAGGSSMRTGSGGAIMQTLPTGTSRTNRSLQIHNDRTSPEPAPTVSRNSLSSTTRAGLPRQRIRWTNEMNKDVMRCHYKATRCGTNMLGYRNRQYMYFVTQYSHLRNRLNEQNIASRVRAIMINRMISQVEMSEILRAIQEEVRSSNRVSLPRLSVDNGHNIGLDSTSNTDGVQVDQNRESLGTRREIYLQLENNDDRGIESRQSSTLWDEVHFQTVVEAFEESKLEYGTLDPLCRPQIPKIRYNKKVGKSLEYLNSILSTLLGEHPTFEDVHSAIYCAAITVSKMCGVSIRSDASGNQRGNDKPAWQRRLEGKKSKLRAEIGRLTQYQRGIRSQHLIRMVRRIIGSENIGTITYGMLDDIIDRRTQILQAVSSRLKRYLTSRKRRIDNTLFVFNQRKFYRELEKRNSVELGIPQTPVQSEIEQFWGGLWETPATFHENPIWTESLHTREMRGSTISESDLGAALSKAKNWKAPGVDGIQNFWLKHFTCVHPHLVSIFNEFLNGGTPMPSFLTMGKTFLLYKSGDTTDPRNYRPITCLPTIYKLLTGIISEKIYSHCAENNLLPLEQRGCAKNSRGCKELVTIDAIVTRNSICHQRNLSVAYIDYKKAFDSVPHTYLIRTLENNGVDRRIVAFFERTMPSWRTHIILNGICTREIRINRGIFQGDAFSPLWFCLSLTPLSRALNNSPNGYRIKHQQRQSAITHLLYMDDLKLFARSRYHLSNLLDIVEKFSNDISMQFGFDKCKSIEMVRGQVIHSDGFSLNEGVIQMLDSDQSYKYLGVEEMRGIHHAVIRDSLRTQCEVRIRRLCRTKLNARNMIKAINTYAIPILLHSFGVIVWCDTDLDSLQRKIRTILTSFGQHHPQAAVERVMLPRRLGGQGIMNIKNQHFNQVHKLREFFYMNAAEIEQYSVLVNLDENHTPLKLSTPQYNPLESISSDADIVEQWKRKAIHGRFPHQLEVDNVDRNASTICFQYGQLFPETEAFLMAIQDGIIHSRHYRRVILHEDVDNRCRRCGQAPETTDHIINGCSVMASTAYLRRHNNVARVIHQILAIRSGFVEERVPHYMYHPEEVLLSTEYKLYWDRTISTDRTVIANRPDIVWINKRGKVAYIFDVAVPLSENVNRTIAEKISKYTDLAFEIKQREHLRRVEIIPIVISSTGIVVNSVSQHVSELGLSGHLHEMCKSVVLDTCRIMRTFLG

SEQ ID NO: 16203 - protein, 1221 aa, Philornis downsi
MERVLRNRIVQLSPTGGARANSGATAGGSSMRAGSGGAIMQTLPTGTSRTNRSLQIHNDRTSPEPAPTVSRNSLSSTTRAGLPRQRIRWTNEMNKDVMRCHYKATRCGTNMLGYRNRQYMYFVTQYSHLRNRLNEQNIASRVRAIMINRMISQVEMSEILRAIQEEVRSSNRVSLPRLSVDNGHNIGLDSTSNTDGVQVDQNRESLGTRREIYLQLENNDDRGIESRQSSTLWDEVHFQTVVEAFEESKLEYGTLDPLCRPQIPKIRYNKKVGKSLEYLNSILSTLLGEHPTFEDVHSAIYCAAITVSKMCCVSIRSDASGNQRGNDKPAWQRRLEGKKSKLRAEIGRLTQYQRGIRSQHLIRMVRLIIGSENIGTITYGMLDDIIDRRTQILQAVSSRLKRYLTSRKRRIDNTLFVFNQRKFYRELEKRNSVELGIPQTPVQSEIEQFWGGLWETPATFHENPIWTESLHTREMRGSTISESDLGAALSKAKNWKAPGVDGIQNFWLKHFTCVHPHLVSIFNEFLNGGTPMPSFLTMGKTFLLYKSGDTTDPRNYRPITCLPTIYKLLTGIISEKIYSHCAENNLLPLEQRGCAKNSRGCKELVTIDAIVTRNSICHQRNLSVAYIDYKKAFDSVPHTYLIRTLENNGVDRRIVAFFERTMPSWRTHIILNGICTREIRINRGIFQGDAFSPLWFCLSLTPLSRALNNSPNGYRIKHQQRQSAITHLLYMDDLKLFARSRYHLSNLLDIVEKFSNDISMQLGFDKCKSIEMVRGQVIHSDGFSLNEGVIQMLDSDQSYKYLGVEEMRGIHHAVIRDSLRTQCEVRIRRLCRTKLNARNMIKAINTYAIPILLHSFGVIVWCDTDLDSLQRKIRTILTSFGQHHPQAAVERVMLPRRLGGQGIMNIKNQHFNQVHKLREFFYMNAAEIEQYSVLVNLDENHTPLKLSTPQYNPLESISSDADIVEQWKRKAIHGRFPHQLEVDNVDRNASTICFQYGQLFPETEAFLMAIQDGIIHSRHYRRVILHEDVDNRCRRCGQAPETTDHIINGCSVMASTAYLRRHNNVARVIHQILAIRSGFVEERVPHYMYHPEEVLLSTEYKLYWDRTISTDRTVIANRPDIVWINKRGKVAYIFDVAVPLSENVNRTIAEKISKYTDLAFEIKQREHLRRVEIIPIVISSTGIVVNSVSQHVSELGLSGHLHEMCKSVVLDTCRIMRTFLG

SEQ ID NO: 16204 - protein, 1226 aa, Philornis downsi
MERVLRSRIIQLSPTGGARANSGATAGGSSMRTGSGGAIMQTLPTGTTRTNRSLQTHNDRTSPEPAPTVSRNSLSSTTRAGLPRQRIRWTNEMNKDVMRCHYKATRCGTNMIGYRNRQYLYFTSLLQYSHLQNRVNEQNIASRVRAIITNRMISQVEMTEISREVQNEIRSFNRLSLSGSSANNGDNVVLDSTSGTNGVQITRIRGSLDIQGGEGHVRSEDEDDRVIGPGTSLSPREDVHFQTVLDEFERTSLEYGMLDPLCRPQIPKIRLNRKVEKNLEYLNGIINMILGEHPTFECVHSVLYCAAMTVCKMCGVRIGTDVSGSRRGDNKPLWQRRLEGKKSRLRAEIGRLTQYQRGIRSQHLIRRVRQILGPENMEMLTPRILSDIIDRRTQILQAVSSRLRRYLVSRKRRIDNTLFVVNQQKFYRDLEREENIGLGNHQTTIPDRSEVELFWGGLWETAATYHENPIWTDSMGTDEMQDSTMTESDLKAALSKAKNWKAPGVDGIQNFWLKRLTSIHPYLVSLLNEFLNGETTMPPFLTMGRTFLLYKSGDTKDPQNYRPITCLPTIYKLLTRMVSEKIYNHCVENNLLPPEQMGCARNSRGCKEVISIDAIITRNSVCHQRNLSVAYIDYEKAFDSVPHVYLLRTLRVNGVNRNIIAFFERIMPMWRTQIILNDICTREIRVNRGIFQGDSFSPLWFCLALGPLSKALNESPNGYRIGHQQRQTAITHLLYMDDLKLFARSRYHLSNLLDIVEKFSSDICMRFGFEKCKSVEMVRGQVVHSEGFTLNEGVIQMLRSDQSYRYLGVDEMRGIHHTLIRDALKVQCEMRIKKLCSTKLNAKHMIRAINTYAIPVLTYSFGIIVWSDTELDSAQRKVRTTMTRFGQHHPQAAVERVMLPRKLGGQGIINLKNQYYIQTQKLREFFYAKALESEQYSILVNLDENYTPLKLSTPLFDPLEFVSSDVDIVDKWKRKAIHGRFPHQLDMDNVDKNLSTICFQYGQLFPETEAFLMAIQDGVIHSRHFRRVILHENINNMCRRCGQAPETTDHIINGCSILASTDYLRRHNNVARIIHQTLAIRSGFLEDRLPHYMYRPEEVLINTDFKLYWDRTISTDRTAIANRPDIVWVNKRSRTGYIVDVAVPLSENVNRTIAEKISKYTDLAFEMRQREHLRSVEIIPVVISSTGIVVQSVAQHLEELELSRHVHDMCKTVVLETFRIMRKFLG

SEQ ID NO: 16205 - protein, 1221 aa, Philornis downsi
MERVLRNRIVQLSPTGGARANSGATAGGSSMRAGSGGAIMQTLPTGTSRTNHSLQIHNDRTSPEPAPTVSRNSLSSTTRAGLPRQRIRWTNEMNKDVMRCHYKATRCGTNMLGYRNRQYMYFVTQYSHLRNRLNEQNIASRVRAIMINRMISQVEMSEILRAIQEEVRSSNRVSLPRLSVDNGHNIGLDSTSNTDGVQVDQNRESLGTRREIYLQLENNDDRGIESRQSSTLWDEVHFQTVVEAFEESKLEYGTLDPLCRPQIPKIRYNKKVGKSLEYLNSILSTLLGEHPTFKDVHSAIYCAAITVSKMCGVSIRSDASGNQRGNDKPAWQRRLEGKKSKLRAEIGRLTQYQRGIRSQHLIRMVRRIIGSENIGTITYGMLDDIIDRRTQILQAVSSRLKRYLTSRKRRIDNTLFVFNQRKFYRELEKRNSVELGIPQTPVQSEIEQFWGGLWETPATFHENPIWTESLHTREMRGSTISESDLGAALSKAKNWKAPGVDGIQNFWLKHFTCVHPHLVSIFNEFLNGGTPMPSFLTMGKTFLLYKSGDTTDPRNYRPITCLPTIYKLLTGIISEKIYSHCAENNLLPLEQRGCAKNSRGCKELVTIDAIVTRNSICHQRNLSVAYIDYKKAFDSVPHTYLIRTLENNGVDRRIVAFFERTMPSWRTHIILNGICTREIRINRGIFQGDAFSPLWFCLSLTPLSRALNNSPNGYRIKHQQRQSAITHLLYMDDLKLFARSRYHLSNLLDIVEKFSNDISMQFGFDKCKSIEMVRGQVIHSDGFSLNEGVIQMLDSDQSYKYLGVEEMRGIHHAVIRDSLRTQCEVRIRRLCRTKLNARNMIKAINTYAIPILLHSFGVIVWCDTDLDSLQRKIRTILTSFGQHHPQAAVERVMLPRRLGGQGIMNIKNQHFNQVHKLREFFYMNAAEIEQYSVLVNLDENHTPLKLSTPQYNPLESISSDADIVEQWKRKAIHGRFPHQLEVDNVDRNASTICFQYGQLFPETEAFLMAIQDGIIHSRHYRRVILHEDVDNRCRRCGQAPETTDHIINGCSVMASTAYLRRHNNVARVIHQILAIRSGFVEERVPHYMYHPEEVLLSTEYKLYWDRTISTDRTVIANRPDIVWINKRGKVAYIFDVAVPLSENVNRTIAEKIPKYTDLAFEIKQREHLRRVEIIPIVISSTGIVVNSVSQHVSELGLSGHLHEMCKSVVLDTCRIMRTFLG

SEQ ID NO: 16206 - protein, 1129 aa, Philornis downsi
MNKDVMRCHYKATRCGTNMLGYRNRQYMYFVTQYSHLRNRLNEQNIASRVRAIMINRMISQVEMSEILRAIQEEVRSSNRVSLPRLSVDNGHNIGLDSTSNTDGVQVDQNRESLGTRREIYLQLENNDDRGIESRQSSTLWDEVHFQTVVEAFEESKLEYGTLDPLCRPQIPKIRYNKKVGKSLEYLNSILSTLLGEHPTFEDVHSAIYCAAITVSKMCGVSIRSDASGNQRGNDKPAWQRRLEGKKSKLRAEIGRLTQYQRGIRSQHLIRMVRRIIGSENIGTITYGMLDDIIDRRTQILQAVSSRLKRYLTSRKRRIDNTLFVFNQRKFYRELEKRNSVELGIPQTPVQSEIEQFWGGLWETPATFHENPIWTESLHTREMRGSTISESDLGAALSKAKNWKAPGVDGIQNFWLKHFTCVHPHLVSIFNEFLNGGTPMPSFLTMGKTFLLYKSGDTTDPRNYRPITCLPTIYKLLTGIISEKIYSHCAENNLLPLEQRGCAKNSRGCKELVTIDAIVTRNSICHQRNLSVAYIDYKKAFDSVPHTYLIRTLENNGVDRRIVAFFERTMPSWRTHIILNGICTREIRINRGIFQGDAFSPLWFCLSLTPLSRALNNSPNGYRIKHQQRQSAITHLLYMDDLKLFARSRYHLSNLLDIVEKFSNDISMQFGFDKCKSIEMVRGQVIHSDGFSLNEGVIQMLDSDQSYKYLGVEEMRGIHHAVIRDSLRTQCEVRIRRLCRTKLNARNMIKAINTYAIPILLHSFGVIVWCDTDLDSLQRKIRTILTSFGQHHPQAAVERVMLPRRLGGQGIMNIKNQHFNQVHKLREFFYMNAAEIEQYSVLVNLDENHTPLKLSTPQYNPLESISSDADIVEQWKRKAIHGRFPHQLEVDNVDRNASTICFQYGQLFPETEAFLMAIQDGIIHSRHYRRVILHEDVDNRCRRCGQAPETTDHIINGCSVMASTAYLRRHNNVARVIHQILAIRSGFVEERVPHYMYHPEEVLLSTEYKLYWDRTISTDRTVIANRPDIVWINKRGKVAYIFDVAVPLSENVNRTIAEKISKYTDLAFEIKQREHLRRVEIIPIVISSTGIVVNSVSQHVSELGLSGHLHEMCKSVVLDTCRIMRTFLG

SEQ ID NO: 16207 - protein, 1169 aa, Ceratina japonica
MWWAPLLDGNIVDEPARNRTMNWIMDGILIQNAKRNTMEKTTLAEASDTGDPGSGSPVADLSAEGQRATYDDQGNASGHDYGQTIDVPLSGQITCLFCRTAGRNILFLTEKDFLSHQESQHAREIIKWRCSACRKEYLKLHAWRCHFPKCKGATQRETRGEHECNECGLAFSSSRGLSQHERIRHPTIRNEKRSRAATSSSDNRPGRRATAWSDEETELLIQLNERFKNERFPNVRIREFLPDKTLKQISDKRRQLPAQRTDTLNEAAELSSDSSSASFEDALEGPDEDPEELDIWRESLKLAINAYSLKEDNVFKNIEIQIKELAMGCPSAMDIQEVEDRLTKKLVDGDEEAATTKVSAPNRRGPNRRVSDRTRQQKFTYARYQDIYKKCPRKLADMTVAGRIEELKSAPEPPDDDETRALYTELWGTAGPESGIPRVTNRAQTSLPISEVMIPITPSDLVAKMRTIKADTAEGVDGVRKAHLRKEGALQVTALLYNLLLLNQCYPESWKLNRTTLIPKPGKDTRDVRNWRPITIGSLMGRIFSSMIDMRLRKRISQHKMQKGFTHEDGCKNNVSILESTMKTMKEGCGGIVTIVDISKAFDTVPHGVIQGCLTRKGVPTPIADFIRKSYDGCRTKIRTRRSEFDIVLKRGVKQGDPLSPLLFNLSMEPIIESISETTRGIRLDEENVPILAFADDIVLLADGKEEAEHQIKKLWKYLRDLGMSMQPGKCSSFQIVPRHKTWYLQDPQLELDGLKIPAAQPEDLIPYLGIRIDPWKGLRHTRADEIIRAVSNVQYMKLKRHQKLNLIRTHILPKYIHQLVASPPPLKTLDAIDHGVKQVVKRILHLHHSTTDGILYTLKGHGGLGLQRVADIVKLAMLRHAVKMSRSDDMAVKSAYESQEAIIKKYANAIGVQWPVSLEDLEEARIRLKKSDTDRWKELVSQGQGVTYFAADKVGNAWLYRPELLKPSRFLDALKLRTNTFGTRVALKRAKNETDVLCRKCSGQVETLAHVLGNCINTKPLRIKRHNEICKLIEEKASKRSAVFVEPSINVVGDLKKPDLVIKDQEKVYVVDVTVRYEEKDSLRRAHKEKLDKYADTAEFVKRRLSCQAAEVLPIVVGSRGALPQETKTNLKKLGFNVGEMPTVALIARRSSIELANAFLDYDQIPTG

SEQ ID NO: 16208 - protein, 959 aa, Oncopeltus fasciatus
MTTSVVNQAYAWPTRGPTRGCWSRPSIMVDSEAFLWRHCDRTIGSANGRGLHEKRAHPVEHNAALAGSQRSRQWNPEELEILADSEARLRATGYAGQLNARLAEILGRTLDAVKCARSGPRCRELLEVRRAEGVAGVPLPVETDPVGFARDCGASIRGSLRGLMREISSSHTDLAEDRLLLIASDAADGRSVRGALVGWVLTHLASGPAAGRPSAAEGPSGDATVLRVGRPAARRYRYAALQRLWRVDRPAAAREVLEGGSAVASHTVEELAQYWTPVVEEESSPWDAEAVRGPKVESGVNLWEPVSRDEVVRMCLSGRSSPGLDRVSPAVWAGLPWRIRAVILDILLLEGQLPPELLMASVTMIPKTHDPVSPGDYRPISVASVIVRHLHRILASRLESVVRHVPEQNGFRRGYDGVAHNVLLLDAVLRTAWRKKRSLSMAELDVRKAFDSVSHSAILRILRDRGVQAEFYEYVERLYSNACSRISIGGIQSPVMRPRRGVRQGDPLSLLLFNKVMDHVIAGLSQRLGFRFRNGRIRALAYADDLVLFASSPQGLTALLRQVAEGLRDCGLEINPDKSRALTLTAIGGRGLIRLEDDCSYIVGERRIGAVAVNETWDYLGIMFGPTGIVRNPCDMVMKLERINRAPLKPQQKMECLRTFLLPSVLHRVTFGLTVASALKPLDVAVRAYARRWLRLPHDVPNALIHTPLRFGGLGIFRLAGQAPYLRTKRFLRVKDDMGLGNGDLFPELGGGFPSDSLPVDPRLADFEKLGSAVDGRDLVGAGEVPASTAWMSRASSSLSGREFVQFVRLYAGAVPTRVRTSRGLGRRTPESVLCRNCREAQETPAHAINRCPSVRGGVILRHHAVVRFLSECLRRRGHSTFLERALTHGQKSCRPDLIVHTGEELLIVDVSIASGRMDMDQVGLAKVRRYGRDWIFRAAVELTGSNAPRRRVLPVILT

SEQ ID NO: 16209 - protein, 978 aa, Oncopeltus fasciatus
MVDSEAFPCRHCDRTFGSANGRGLHEKRAHPVEHNAALAGSQRSRQWDPEELEILADSEARLRATGYAGQLNARLAEILGRTFDAVKCARSGPRYRELLEVRRAEGVAGVPLPVEADPVGYARDCGASIRGSLRGLMREISSSHTDLAEDRLLLIASDAADGRSVGGALVGWVMTHLASGPAPGRPSAAEGPSGDATVLRVGRPAARRFRYAALQRLWRVDRPAAAREVLEGGSAVASHTVEELAQYWTPVVEEESSPWDAEAVRGPKVDGGVNLWEPVSRDEVVRMCPSGRSSPGLDRVSPAVWGGLPWRIRAVILDILLLEGQLPHEFLMARVTMIPKTHDPVSPGDYRPISVASVIVRHLHRILASRLESVVRHVPEQNGFRRGYDGVAHNVLLLDAVLRTAWKKKRSLSMAVLDVRKAFDSVSHSAILRILRDRGVQAEFYEYVERLYSNACSRISIGGIQSPVMRPRRGVRQGDPLSSLLFNMVMDHVIAGLSQRLGFRFRNGRIRALAYADDLVLFASSPQGLTALLRQVAEGLRDCGLEINPDKSRALTLTAIGGRGLIRLEDDCSYIVGERRIGAVAVNETWDYLGIMFGPTGIVRNPCDMVMKLERINRAPLKPQQKMECLRTFLLPSVLHRVTFGLTVASALKPLDVAVRAYVRRWLRLPHDVPNALIHTPLRFGGLGIFRLAGLAPYLRTKRFLRVKDDMGLGNGDLFPELGGGFPSDSLPVDPRLADFEKLGSAVDGRDLVGAGEVPASTAWMSRASSSLSGREFVQFVRLYAGAVPTRVRTSRGLGRRTPESVLCRNCKEAQETPAHAINRCPSVQGGVILRHHAVVRFLSECLRRRGHSTFLERALTHGQKSCRPDLIVHTGEELLIVDVSIASGRMDMDQVGLAKVRRYGRDWIFRAAVELTGSNAPRRRVLPVILTWKGIWSRTSAAELSRLGVTNRALGWTTCRVLRGGCLNFSAFMRRSS

SEQ ID NO: 16210 - protein, 1005 aa, Oncopeltus fasciatus
MTTSVVNQAYAWPTRGPTRGCWSRPSIMVDSETFPCRYCDRTFGSANGRGLHEKRAHPVEHNAALAGSQRSRQWDPEELEILADSEARLRATGYAGQLNAQLAEILGRTFDAVKCARSGPRYRELLEIRRAEGVAGPLPAEADPVGFARDCGASIRGSLRGLMQEISSSHTDLAEDRLLLIASDAADGRSVAGALVGWVLTHLASGPAPGRPSAVGRPSDDATVLRVGRPTARRFRYAALQRLWRVDRPAAAREVLEGGSAVASHTVEELARYWTPVVEEESSLWDAESVRGPRVDGSVNLWEPVSRAEVMRMCPSGRSSPGLDRVSPAVWAGLPWRIRAVILDILLLEGQLPPELLVARVTMIPKTHDPVSPGDYRPISVASVIVRHLHRILASRLESVVRHVPEQNGFRRGYDGVAHNVLLLDAVLRTAWRKKRSLSMAVLDVKKAFDSVSHSAILRILRDRGVQAEFCEYVERLYSNACSRISIGGIQSPVMRPRRGVRQGDPLSSLLFNMVMDHVIAGLSQRLGFRFRNDRIRALAYADDLVLFASSPQGLTALLRQVAEGLRDCGLEINPDKSRALTLTAIGGRGLIRLEDDCSYIVGERRIGAVTVNETWDYLGIMFGPTGIVRNPCDMVTKLERINRAPLKPQQKMECLRTFLLPSVLHRVTFGLTVASALKPLDVAVRAYVRRWLRLPHDVPNALIHTPLRFGGLGIFRLAGLAPYLRTKRFLRVKDDMGLGNGDLFPDLGGGFPSDSLPVDPRLADFEKLGLAVDGRDLVGAGEVPASTAWISRTSSSLSGREFVQFVRLYAGAVPTRVRTSRGLGRRTPGSVLCRNCREAQETPAHAINRCPSVQGGVILRHHAVVRFLSECLRRSGHSTFLERALTDGQRSCRPDLIVHTGEELLILDVSIASGRMDMDQVGLAKVRRYGRDWIFRAAVELTGSSAPRRRVLPVVLTWKGIWSRTSAAELSRLGVSRRALGWTTCRVLRGGCLNFSAFMRRALQ

SEQ ID NO: 16211 - protein, 1152 aa, Piezodorus guildinii
MELRNRRLASDEPGIEAAPGGNLRQLPSGDGGASGATLSQRTTRLQEPATSSSSGLGEIPSPPARARQQRPRGARRMKWTPEMNKAVIQAYLLATKLETDKTGYLSRIQQYWQESYPQMTMSTQRLSDQVRVIRSRKFLSDHEMEHIKGVVSERLGLLSTVNEEQPPESQHLEISLAAEATSPEGEDKETQRLTQSLLSQHILFEGIPHHARPSLPRVPYSFKSRITVKHVNDALSQLVSDYPDMKIEAACHWAYVAARVVIIELGLEQREPKKDKGQIIPRWQRRLENKICSLRASIGTITAYINNPAKASVKLKRKIDEIIVQQLGTVLESQLTEKLALHADTLKQKLAVYANRLRRYKKSMLRKQQNKWFINNEKQFYRNLASDKKACVKVSLTENIVDYWRELWENNEIHNNEAEWLTLVYNETQEIPYMPEFNITKEDVAIALNKMKNWKSPGSDRIQNYWLKYLTCLHEILAINYQKMITGRLDIPDTFCQGITVLIPKKEGTQLEPQDFRPITCLNGVYKILTSILTTRIEHHLRTNNLIPLEQLGCRKGAQGCKELLVIDSVIAGQTTLNKRNLSMAWIDYKKAFDSVPHSWLLNVLDIYKVHPQVKELLRKFMSNWKTRLRLGHERSLDSSEYIPISRGIYQGDCLSPLWFCLAMAPLSTLLNKQGYGYKLKCSELTAVISHSFYMDDLKLYATNKSQLQSMVNTVSKFSNSIKMSLGIEKCAVLHVIKGKSHIFENIFDDDSRIKQLQLEETYKYLGIEQHVKVARNDVKLRMTTSLKNRLKTILATHLSSGSKIKAINTWVIPAISYSFGVLKWSTTSLQELDRLIRTSMTRSRMHHPTSSTARLYLSRKEGGRGLKNIEEACRKQEMMLGQYFRQSEVPLHKMICNLDHSHTALKLDSLSAAPTIVTDSDRLEEWKTKTLHGRFFHQLQQAEIDKTFSTHWLVRGDLFPETEGFLMAIQDQVIATRSYCRHVLKLQNTSDKCRLCASTYESIQHITGGCGALAGTEYLKRHDDVAKVYHQAIGLKRKLLNDSIPYYQYKPKDLIQNEGIKLYWNQSFITDHTVIHNRPDIVLIDSNKKNAELIDIAVPNDGNTSSVCAEKIRKYQALAAELKELYRLDSVIVRAIVISSNGLIPKSTGPI

SEQ ID NO: 16212 - protein, 995 aa, Cimex lectularius
MVLMLLGLMSVLNMLGCCDGLRSIPTMERRLYPCPECPREFGTATGLGVHAKRAHPEFFNRRIHLERSRKRWSDEELRLLARQEVDLIRRGVRGVLAELVRLFPGRTIDGIKGARRKHDYSVYLREAREEDEMEFVVSSGPLTACGSSSLAARECMLQSSYSDLDNCDPSWNVLMLKEMIGLALAGQRFDDVFSLWVEITFPPELSSIGEEDFGPPCRNTLNTRPVFCSGRRRDRRTAFADIQELWRRDRRAAVSVILDGDRSGCRVSMDDMAEHWLPVFQEESVEWTGADLRFDRVEDFGDLMDDFPDDEIRASSVDLRSAPGVDGVTSRMWFSVPVCIKRTLFNLFLFKSSVPLPLCSVRVTWVPKTESPRLPSDYRPIAVASVMVRHLHKILANRFARGVSFHGSQRGFLAGRDGVAESVVLLNRVLKSATVKRRELHLAVLDIAKAFDSVSHKSLFALLRARGLPSEFIQYIERVYSVSGVVFGKGNSVHRTLVRRGVRQGDPLSPLLFNIAMDFVLDRLPKNIGYFMDGSLVGSMAYADDLVLCATSRAGMNTLLQSAVESLGHLGLRVNASKSRSLSLVPSGRQKLIGVSGETGFYIGEVALRPLTVLDSFRYLGVDFGFDGVLPGDAPIERLLVRVDAAPLKPRQKVMILKDYVLPRFHHALVLGGVAPARLRGWDVVIRSYLRKWLHLPHDSPNAFFHAAMRFGGLGVSSLSHWVPLWRRRRIRAALLGLGVETDEQVICSRNEVRKALADRLYGMVDGRDLLRSSDVPASTFWLRSDSAVLSREYVQFMRMWTGSLPTRVRTSRGSLRMLRSNICRRCHSAAETLAHVVQVCSATHGGRCLRHDACVIILCGALQRAGWTVVREARLPRGDSFLKPDIVAYRNGAVYLLDFQIVSGLASLEDLNRRKERKYSGEELALAVRRMMRMGPSAPVQVVGVTITWKGVWFGASAARLKRMGLLDLHLCWISERALRGSHMNWSRFNADGV

SEQ ID NO: 16213 - protein, 1223 aa, Teleopsis dalmanni
MQSQNNVNLGRSDNPTASGSHNSRVQDLVPGSCSTSMPQNNRNRTPLQSGEQHIHSDIALTVAGRPRQRRKWTNTINEDLLRAYYIATNNERDMTAYRTTLHTIFVGHHPDYNVSEQRLADQVRVIHRNNLIPESRRNAIKESVAEVSNDQSTETAENEQVQFESTNTSTNVHVPGTRNNVNTIEVENEQPPPALNVNLIDVDETTDQQEDVSNEQMRLRSNQHSLNEIFEQQFDIYSNLNPLLRPRIPKINTSKKLSFLIETLNNDAILTKLNNVSNLQELHTIVYVSAITIATTMGCKIGQPRDGPRRAAIYGNKSNTLRRIQIKIDHLRGDLERINKYIEGNPTRRLKNRINKILKTYNLHTRYETNHTNIINTRDTIKQKLCVQVARQRKYKLSNQRRENNRLFNNNEKQFYRKIRSNANTSDDVYPSKNSAENYWSSLWSNTQKHNESALWIEKEKEKYQEKKMSTCLITCDQVKRIIAKTHNWKSPGPDHIQNFWFKRFTAVHQKLTELLNECLQNPATFPIIFTKGKTYLMAKNNGFKGNPANGRPITCLPTIYKILTACIGDLINTYLTQNDIMCVEQKGCKKHAKGCKEQLIIDQIILEQAAKKNRNLHMCFIDYMKAFDSIPHSWLIEVLNIYGIHSTIVNFLEHNMTRWRTNIEMFTQNGVIRTDEISIRQGIFQGDCLSALWFCMALNPLSNLLRNAKYGFKIKGNSRECKINHLMYMDDLKIYASTRETLDKLIKIVEDFSNDIRMKFGIEKCRKISIVRGKIVKFENFEQNESIIKDMEEDELYKYLGVSQSRRIAHKAVKDKVYSEFKGRIHKIAKTNLQGKSLIKAINTFAIPILTYCFGIIQWTTTEIQAMQRKIRTMLTEYKFHHPKSCCERMTMPRKEGGRGLIDLQELHDNQIISMREYFLKNAENDILFKILTEADKHYTPLNLEGTFERKAQDRQCKEQAWAIKPLHGRYYRSTNADNVDKIMSHKWLTCGTLFAETEAFMIAIQDQVIPTRNYCKFIMSDPSLISDKCRQCGEQTETVDHILAGCTCLAQREYTKRHNNVVNILHKQICNKYRLIDRENVPYYKYTPQAVYDNPDVKIYYDRTIYSDHTRLHNRPDITIVDKRRREGLFIDVAIPMTKNMDRTYFEKCSRYAELAVETKRNWNLNKIEILPIIISAEGVTPKSLLSHIRRLELNQRIIDDIQKSVIIDSCHITRKFLNIN

SEQ ID NO: 16214 - protein, 1223 aa, Teleopsis dalmanni
MQSQNNVNLGRSDNPTASGSHNSRVQDLVPGSCSTSMPQNNRNRTPLQSGEQHIHSDIALTVAGRPRQRRKWTNTINEDLLRAYYIATNNERDMTAYRTTLHTIFVGHHPDYNVSEQRLADQVRVIHRNNLIPESRRNAIKESVAEVSNDQSTETAENEQVQFESTNTSTNVHVPGTRNNVNTIEVENEQPPPALNVNLIDVDETTDQQENVSNEQMRLRSNQHSLNEIFEQQFDIYSNLNPLLKPRIPKINTSKKLSFLIETLNNDAILTKLNNVSNLQELHTIVYVSAITIATTMGCKIGQPRDGPRRAAIYGNKSNTLRRIQIKIDHLRGDLERINKYIEGNPTRRLKNRINKILKTYNLHTRYETNHTNIINTRDTIKQKLCVQVARQRKYKLSNQRRENNRLFNNNEKQFYRKIRSNANTSDDVYPSKNSAENYWSSLWSNTQKHNESALWIEKEKEKYQEKKMSTCLITCDQVKRIIAKTHNWKSPGPDHIQNFWFKRFTAVHQKLTELLNECLQNPATFPIIFTKGKTYLMAKNNGFKGNPANGRPITCLPTIYKILTACIGDLINTYLTQNDIMCVEQKGCKKHAKGCKEQLIIDQIILEQAAKKNRNLHMCFIDYMKAFDSIPHSWLIEVLNIYGIHSTIVNFLEHNMTRWRTNIEMFTQNGVIRTDEISIRQGIFQGDCLSALWFCMALNPLSNLLRNAKYGFKIKGNSRECKINHLMYMDDLKIYASTRETLDKLIKIVEDFSNDIRMKFGIEKCRKISIVRGKIVKFENFEQNESIIKDMEEDELYKYLGVSQSRRIAHKAVKDKVYSEFKGRIHKIAKTNLQGKSLIKAINTFAIPILTYCFGIIQWTTTEIQAMQRKIRTMLTEYKFHHPKSCCERMTMPRKEGGRGLIDLQELHDNQIISMREYFLKNAENDILFKILTEADKHYTPLNLEGTFERKAQDRQCKEQAWAIKPLHGRYYRSTNADNVDKIMSHKWLTCGTLFAETEAFMIAIQDQVIPTRNYCKFIMSDPSLISDKCRQCGEQTETVDHILAGCTCLAQREYTKRHNNVVNILHKQICNKYRLIDRENVPYYKYTPQAVYDNPDVKIYYDRTIYSDHTRLHNRPDITIVDKRRREGLFIDVAIPMTKNMDRTYFEKCSRYAELAVETKRNWNLNKIEILPIIISAEGVTPKSLLSHIRRLELNQRIIDDIQKSVIIDSCHITRKFLNIN

SEQ ID NO: 16215 - protein, 1223 aa, Teleopsis dalmanni
MQSQNNVNLGRSDNPTASGSHNSRVQDLVPGSCSTSMPQNNRNRTPLQSGEQHIHSDIALTVAGRPRQRRKWTNTINEDLLRAYYIATNNERDMTAYRTTLHTIFVGHHPDYNVSEQRLADQVRVIHRNNLIPESRRNAIKESVAEVSNDQSTETAENEQVQFESTNTSTNVHVPGTRNNVNTIEVENEQPPPALNVHLIDVDETTDQQEDVSNEQMRLRSNQHSLNEIFEQQFDIYSNLNPLLRPRIPKINTSKKLSFLIETLNNDAILTKLNNVSNLQELHTIVYVSAITIATTMGCKIGQPRDGPRRAAIYGNKSNTLRRIQIKIDHLRGDLERINKYIEGNPTRRLKNRINKILKTYNLHTRYETNHTNIINTRDTIKQKLCVQVARQRKYKLSNQRRENNRLFNNNEKQFYRKIRSNTNTSDDVYPSKNSAENYWSSLWSNTQKHNESAHWIEKEKEKYQEKKMSTCLITCDQVKRIIAKTHNWKSPGPDHIQNFWFKRFTAVHQKLTELLNECLQNPATFPIIFTKGKTYLMAKNNGFKGNPANGRPITCLPTIYKILTACIGDLINTYLTQNDIMCVEQKGCKKHAKGCKEQLIIDQIILEQAAKKNRNLHMCFIDYMKAFDSIPHSWLIEVLNIYGIHSTIVNFLEHNMTRWRTNIEMFTQNGVIRTDEISIRQGIFQGDCLSALWFCMALNPLSNLLRNAKYGFKIKGNSRECKINHLMYMDDLKIYASTRETLDKLIKIVEDFSNDIRMKFGIEKCRKISIVRGKIVKFENFEQNESIIKDMEEDELYKYLGVSQSRRIAHKAVKDKVYSEFKGRIHKIAKTNLQGKSLIKAINTFAIPILTYCFGIIQWTTTEIQAMQRKIRTMLTEYKFHHPKSCCERMTMPRKEGGRDLIDLQELHDNQIISMREYFLKNAENDILFKILNKADKHYTPLNLEGTFERKAQDRQCKEQAWAIKPLHGRYYRSTNADNVDKIMSHKWLTCGTLFAETEAFMIAIQDQVIPTRNYCKFIMSDPSLISDKCRQCGEQTETVDHILAGCTCLAQREYTKRHNNVVNILHKQICNKYRLIDRENVPYYKYTPQAVYDNPDVKIYYDRTIYSDHTRLHNRPDITIVDKRRREGLFIDVAIPMTKNMDRTYFEKCSRYAELAVETKRNWNLNKIENLPIIISAEGVTPKSLLSHIRRLELNQRIIDDIQKSVIIDSCHITRKFLNIN

SEQ ID NO: 16216 - protein, 927 aa, Teleopsis dalmanni
MGCKIGQPRDGPRRAAIYGNKSNTLRRIQIKIDHLRGDLERINKYIEGNPTRRLKNRINKILKTYNLHTRYETNHTNIINTRDTIKQKLCVQVARQRKYKLSNQRRENNRLFNNNEKQFYRKIRSNANTSDDVYPSKNSAENYWSSLWSNTQKHNESALWIEKEKEKYQEKKMSTCLITCDQVKRIIAKTHNWKSPGPDHIQNFWFKRFTAVHQKLTELLNECLQNPATFPIIFTKGKTYLMAKNNGFKGNPANGRPITCLPTIYKILTACIGDLINTYLTQNDIMCVEQKGCKKHAKGCKEQLIIDQIILEQAAKKNRNLHMCFIDYMKAFDSIPHSWLIEVLNIYGIHSTIVNFLEHNMTRWRTNIEMFTQNGVIRTDEISIRQGIFQGDCLSALWFCMALNPLSNLLRNAKYGFKIKGNSRECKINHLMYMDDLKIYASTRETLDKLIKIVEDFSNDIRMKFGIEKCRKISIVRGKIVKFENFEQNESIIKDMEEDELYKYLGVSQSRRIAHKAVKDKVYSEFKGRIHKIAKTNLQGKSLIKAINTFAIPILTYCFGIIQWTTTEIQAMQRKIRTMLTEYKFHHPKSCCERMTMPRKEGGRGLIDLQELHDNQIISMREYFLKNAENDILFKILTEADKHYTPLNLEGTFERKAQDRQCKEQAWAIKPLHGRYYRSTNADNVDKIMSHKWLTCGTLFAETEAFMIAIQDQVIPTRNYCKFIMSDPSLISDKCRQCGEQTETVDHILAGCTCLAQREYTKRHNNVVNILHKQICNKYRLIDRENVPYYKYTPQAVYDNPDVKIYYDRTIYSDHTRLHNRPDITIVDKRRREGLFIDVAIPMTKNMDRTYFEKCSRYAELAVETKRNWNLNKIEILPIIISAEGVTPKSLLSHIRRLELNQRIIDDIQKSVIIDSCHITRKFLNIN

SEQ ID NO: 16217 - protein, 937 aa, Ligia exotica
MLAHLEADNQGVLAMNQFLRARHSARSLEAIKGLRRQAKYRRAVQARLDDARTEREGGFSTPPGGGHGPEPVPEQAPVRPGVSTPVHYDETADSAVPSSSAVLNDRETVDTPVNSEARGTDLTTELPVEQVVDEPLGTLLSRFERKEVKRGGEHLRVPIPQRRRERRRLEYKWTQRRFKTKRSEAAKAILDGISLIPSDSPPGNLHEFWSNYFSRESELGDTRITIPGRVRGRQPSAMLQRVFDDVSRAEVSSALAGTRTGTATGVDGIGLAEIKRVPIDVVVKTINMIKNTRELPAELLTGRVTLLPKATKPIMTAGDYRPITVLPVLLRLLNRILAKRLSGAVDLNPQQRGFREGGSTSDNLCLLDALLRDARREVREVYVTLLDFSKAFDSVDHKALFKILAAYGVPEQMRKYVRRIYRGIQLTVGEHTVSLGRGVLQGDPLSPILFNIVMDYIGDRQPSYLGYAFKARNVHLLAYADDVALVTSSRVGMERAIESFSRTAEEIGLSLGVSKCHSLGYMKLGKQKKWVLDNAPFRVGNEEIPVGTTSSLYKYLGIHLQYRGLLNNYRKEWLTLLERIHRAPLKPQQKIYVLKRNAVPKIVYKLVNTRNSKGILRSLDVLTRRYVRLMLHLPKDTPTPMFHHPVAEGGLEIPSLEALVSIQRNNMLTRLLEADSPAIGEAARGELGELHAPPPTLRPVTDFLDGRGLAESTKRPSCHTWLTDGTTLMPGAVFVEAVKVRLGVCTTRMRQSRGREVPPSELNCDLGCPRRETLGHILQECPHVAPQRTKRHDGILDLLYKELTSSHFKVEREPRIPTEAGIRRPDLALLDIKSKKSWVVDVTCCADATVTSLSAVHAFKVAYYNKADVIRWTEKEYGPRPAFGTLTINWRGDLATESYNMLREWGMLHLIPRIEAALMLGSVRTLRTFKGASGHWG

SEQ ID NO: 16218 - protein, 1353 aa, Tinea semifulvella
METRLMRKKRLMLLPEGDHRGTSGAGARCLSMRSTGGEELSRRALVEQINATAEIHHSSSSPESSISSIFPSCSSSPNPYQNSSPSSRSTTLSPLSVDVTQEAVANNLVPTTGNIRARTKWTVEMNKFIWRTYLTITSFETNTKNYLSSLYEHFIIKFPEIKATKQRIGDQRRAIIRNKLLTNETLNEIKEEVTNTISNYPINTLTNTLINSKTRMSWSNSINEAIIKLYYIITELETNKSAYRKQLHEKFIEQFPHLSHLSEQRIADQRRVIVNNKLITEERLQEIRTEVNTNRNETANNNNITPIAETTESTQVPNLHRETFTETLTFTTEACNEENAIDRNIANIMKTFDETYKKYINSNPTQRPYIPKQKTSRSLANIVNNINTLILPKFINLDHDFPTLQTIIYSAAYTAAVCNGAKIKELNQINLPTKRKPAWQRRLEKKIDTLRKDIGRLTRYISGNRSRKLNRLVEDIKSRHIIHSRHEELNSTDIHILDTLKQKLSVFKNRITRYINCTLRKQQNTKFINSEKQFYRNLSNNTHNTNDSANTKRPSVQALHQFWSNIWSNPSQHNSSAEWIQKHLQTTQSIPDMQFQHIPLDIFIQVIKKSHNWKAPGTDHIHNYWYKKFTTIYPLLHNHINKFLQSPDNLPAYIMEGITYMIPKDTDYENPAKYRPITCLQTIYKIFTACISELIYNHVTSNNILAEEQKGCRKLSQGCKEQLTIDSVLMKQAYTHKKDISTMYIDYKKAFDSVPHSWLICILHNYKIHPTIVTFLENIMTHWRTKLKIATIAEQTDSPSFIHIRRGIFQGDALSPLWFCLALNPLSHMLNDSNNGFLITNNNSSTPLTHLMYMDDIKLYSTKTHLLHHLADITQTFSNDIQMEFGIDKCKAFTVEQGVIRHNDYILHSGVHIESIDPNNSYKYLGFQQTRQINIKQTKTELTKKFKHRLNILLKTQLNSRNLIKAINTFAVPVLTYSFGIINWSQTDLKNLQRLINTNMTTHRKHHPRSCVQRLTLTRDEGGRGIIDIVNLHNKQILSLRQFFHKRAEHSTLHTTISNADVRLTPLNLHDHTIQCNKHITEPMEKIASWMQKTLHGRHRHDLLLPNVDKKASNAWLRSGDLFPETEGFMIAIQDQVIETKNYLKYIIKKPNVIDTCRRCRSSPENIQHITGACRAIVQTDYKHRHDQVANIIHQKLAHKYKLSSEAFMPYYKYTPDVVLENKTHKLYFDRAILTDKTIHYNRPDITLVDKINKTTHIIDIAIPNTHNLQSTIVEKIRKYTDLKDEISRMWHMRHVTIVPIVLSSTGVIPKNLQQSLQLLDLSPHTYISLQKATILNTCRIVRKFLQTEPDHN

SEQ ID NO: 16219 - protein, 1353 aa, Tinea semifulvella
METRLMRKKRLMLLPEGDHRGTSGAGARCLSMRSTGGEELSRRALVEQINATAEIHHSSSSPESSISSIFPSCSSSPNPYQNSSPSSRSTTLSPLSVDVTQEAVANNLVPTTGNIRARTKWTVEMNKFIWRTYLTITSLETNTKNYLSSLYEHFIIKFPEIKATKQRIGDQRRAIIRNKLLTNETLNEIKEEVTNTISNYPINTLTNTLINSKTRMSWSNSINEAIIKLYYIITELETNKSAYRKQLHEKFIEQFPHLSHLSEQRIADQRRVIVNNKLITEERLQEIRTEVNTNRNETANNNNITPIAETTESTQVPNLHRETFTETLTFTTEACNEENAIDRNIANIMKTFDETYKKYINSNPTQRPYIPKQKTSRSLANIVNNINTLILPKFINLDHDFPTLQTIIYSAAYTAAVCNGAKIKELNQINLPTKRKPAWQRRLEKKIDTLRKDIGRLTRYISGNRSRKLNRLVEDIKSRHIIHSRHEELNSTDIHILDTLKQKLSVFKNRITRYINCTLRKQQNTKFINSEKQFYRNLSNNTHNTNDSANTKRPSVQALHQFWSNIWSNPSQHNSSAEWIQKHLQTTQSIPDMQFQHIPLDIFIQVIKKSHNWKAPGTDHIHNYWYKKFTTIYPLLHNHINKFLQSPDNLPAYIMEGITYMIPKDTDYENPAKYRPITCLQTIYKIFTACISELIYNHVTSNNILAEEQKGCRKLSQGCKEQLTIDSVLMKQAYTHKKDISTMYIDYKKAFDSVPHSWLICILHNYKIHPTIVTFLENIMTHWRTKLKIATIAEQTDSPSFIHIRRGIFQGDALSPLWFCLALNPLSHMLNDSNNGFLITNNNSSTPLTHLMYMDDIKLYSTKTHLLHHLADITQTFSNDIQMEFGIDKCKTFTVEQGVIRHNDYILHSGVHIESIDPNNSYKYLGFQQTRQINIKQTKTELTKKFKHRLNILLKTQLNSRNLIKAINTFAVPVLTYSFGIINWSQTDLKNLQRLINTNMTTHRKHHPRSCVQRLTLTRDEGGRGIIDIVNLHNKQILSLRQFFHKRAEHSTLHTTISNADVRLTPLNLHDHTIQCNKHITEPMEKIASWMQKTLHGRHRHDLLLPNVDKKASNAWLRSGDLFPETEGFMIAIQDQVIETKNYLKYIIKKPNVIDTCRRCRSSPENIQHITGACRAIVQTDYKHRHDQVANIIHQKLAHKYKLSSEAFMPYYKYTPDVVLENKTHKLYFDRAILTDKTIHYNRPDITLVDKINKTTHIIDIAIPNTHNLQSTIVEKIRKYTDLKDEISRMWHMRHVTIVPIVLSSTGVIPKNLQQSLQLLDLSPHTYISLQKATILNTCRIVRKFLQTEPDHN

SEQ ID NO: 16220 - protein, 1353 aa, Tinea semifulvella
METRLMRKKRLMLLPEGDHRGTSGAGARCLSMRSTGGEELSRRALVEQINATAEIHHSSSSPESSISSIFPSCSSSPNPYQNSSPSSRSTTLSPLSVDVTQEAVANNLVPTTGNIRARTKWTVEMNKFIWRTYLTITYLETNTKNYLSSLYEHFIIKFPEIKATKQRIGDQRRAIIRNKLLTNETLNEIKEEVTNTISNYPINTLTNTLINSKTRMSWSNSINEAIIKLYYIITELETNKSAYRKQLHEKFIEQFPHLSHLSEQRIADQRRVIVNNKLITEERLQEIRTEVNTNRNETANNNNITPIAETTESTQVPNLHRETFTETLTFTTEACNEENAIDRNIANIMKTFDETYKKYINSNPTQRPYIPKQKTSRSLANIVNNINTLILPKFINLDHDFPTLQTIIYSAAYTAAVCNGAKIKELNQINLPTKRKPAWQRRLEKKIDTLRKDIGRLTRYISGNRSRKLNRLVEDIKSRHIIHSRHEELNSTDIHILDTLKQKLSVFKNRITRYINCTLRKQQNTKFINSEKQFYRNLSNNTHNTNDSANTKRPSVQALHQFWSNIWSNPSQHNSSAEWIQKHLQTTQSIPDMQFQHIPLDIFIQVIKKSHNWKAPGTDHIHNYWYKKFTTIYPLLHNHINKFLQSPDNLPAYIMEGITYMIPKDTDYENPAKYRPITCLQTIYKIFTACISELIYNHVTSNNILAEEQKGCRKLSQGCKEQLTIDSVLMKQAYTHKKDISTMYIDYKKAFDSVPHSWLICILHNYKIHPTIVTFLENIMTHWRTKLKIATIAEQTDSPSFIHIRRGIFQGDALSPLWFCLALNPLSHMLNDSNNGFLITNNNSSTPLTHLMYMDDIKLYSTKTHLLHHLADITQTFSNDIQMEFGIDKCKTFTVEQGVIRHNDYILHSGVHIESIDPNNSYKYLGFQQTRQINIKQTKTELTKKFKHRLNILLKTQLNSRNLIKAINTFAVPVLTYSFGIINWSQTDLKNLQRLINTNMTTHRKHHPRSCVQRLTLTRDEGGRGIIDIVNLHNKQILSLRQFFHKRAEHSTLHTTISNADVRLTPLNLHDHTIQCNKHITEPMEKIASWMQKTLHGRHRHDLLLPNVDKKASNAWLRSGDLFPETEGFMIAIQDQVIETKNYLKYIIKKPNVIDTCRRCRSSPENIQHITGACRAIVQTDYKHRHDQVANIIHQKLAHKYKLSSEAFMPYYKYTPDVVLENKTHKLYFDRAILTDKTIHYNRPDITLVDKINKTTHIIDIAIPNTHNLQSTIVEKIRKYTDLKDEISRMWHMRHVTIVPIVLSSTGVIPKNLQQSLQLLDLSPHTYISLQKATIVNTCRIVRKFLQTEPDHN

SEQ ID NO: 16221 - protein, 761 aa, Tinea semifulvella
MQFQHIPLDIFIQVIKKSHNWKAPGTDHIHNYWYKKFTTIYPLLHNHINKFLQSPDNLPAYIMEGITYMIPKDTDYENPAKYRPITCLQTIYKIFTACISELIYNHVTSNNILAEEQKGCRKLSQGCKEQLTIDSVLMKQAYTHKKDISTMYIDYKKTFDSVPHSWLICILHNYKIHPTIVTFLENIMTHWRTKLKIATIAEQTDSPSFIHIRRGIFQGDALSPLWFCLALNPLSHMLNDSNNGFLITNNNSSTPLTHLMYMDDIKLYSTKTHLLHHLADITQTFSNDIQMEFGIDKCKTFTVEQGVIRHNDYILHSGVHIESIDPNNSYKYLGFQQTRQINIKQTKTELTKKFKHRLNILLKTQLNSRNLIKAINTFAVPVLTYSFGIINWSQTDLKNLQRLINTNMTTHRKHHPRSCVQRLTLTRDEGGRGIIDIVNLHNKQILTLRQFFHKRAEHSTLHTTISNADVRLTPLNLHDHTIQCNKHITEPMEKIASWMQKTLHGRHRHDLLLPNVDKKASNAWLRSGDLFPETEGFMIAIQDQVIETKNYLKYIIKKPNVIDTCRRCRSSPENIQHITGACRAIVQTDYKHRHDQVANIIHQKLAHKYKLSSEAFMPYYKYTPDVVLENKTHKLYFDRAILTDKTIHYNRPDITLVDKINKTTHIIDIAIPNTHNLQSTIVEKIRKYTDLKDEISRMWHMRHVTIVPIVLSSTGVIPKNLQQSLQLLDLSPHTYISLQKATILNTCRIVRKFLQTEPDHN

SEQ ID NO: 16222 - protein, 1353 aa, Tinea semifulvella
METRLMRKKRLMLLPEGDHRGTSGAGARCLSMRSTGGEELSRRALVEQINATAEIHHSSSSPESSISSIFPSCSSSPNPYQNSSPSSRSTTLSPLSVDVTQEAVANNLVPTTGNIRARTKWTVEMNKFIWRTYLTITSLETNTKNYLSSLYEHFIIKFPEIKATKQRIGDQRRAIIRNKLLTNETLNEIKEEVTNTISNYPINTLTNTLINSKTRMSWSNSINEAIIKLYYIITELETNKSAYRKQLHEKFIEQFPHLSHLSEQRIADQRRVIVNNKLITEERLQEIRTEVNTNRNETANNNNITPIAETTESTQVPNLHRETFTETLTFTTEACNEENAIDRNIANIMKTFDETYKKYINSNPTQRPYIPKQKTSRSLANIVNNINTLILPKFINLDHDFPTLQTIIYSAAYTAAVCNGAKIKELNQINLPTKRKPAWQRRLEKKIDTLRKDIGRLTRYISGNRSRKLNRLVEDIKSRHIIHSRHEELNSTDIHILDTLKQKLSVFKNRITRYINCTLRKQQNTKFINSEKQFYRNLSNNTHNTNNSANTKRPSVQALHQFWSNIWSNPSQHNSSAEWIQKHLQTTQSIPDMQFQHIPLDIFIQVIKKSHNWKAPGTDHIHNYWYKKFTTIYPLLHNHINKFLQSPDNLPAYIMEGITYMIPKDTDYENPAKYRPITCLQTIYKIFTACISELIYNHVTSNNILAEEQKGCRKLSQGCKEQLTIDSVLMKQAYTHKKDISTMYIDYKKAFDSVPHSWLICILHNYKIHPTIVTFLENIMTHWRTKLKIATISEQTDSPSFIHIRRGIFQGDALSPLWFCLALNPLSHMLNDSNNGFLITNNNSSTPLTHLMYMDDIKLYSTKTHLLHHLADITQTFSNDIQMEFGIDKCKTFTVEQGVIRHNDYILHSGVHIESIDPNNSYKYLGFQQTRQINIKQTKTELTKKFKHRLNILLKTQLNSRNLIKAINTFAVPVLTYSFGIINWSQTDLKNLQRLINTNMTTHRKHHPRSCVQRLTLTRDEGGRGIIDIVNLHNKQILSLRQFFHKRAEHSTLNTTISNADVRLTPLNLHDHTIQCNKHITEPIEKIASWMQKTLHGRHRHDLLLPNVDKKASNAWLRSGDLFPETEGFMIAIQDQVIETKNYLKYIIKKPNVIDTCRRCRSSPENIQHITGACRAIVQTDYKHRHDQVANIIHQKLAHKYKLSSEAFMPYYKYTPDVVLENKTHKLYFDRAILTDKTIHYNRPDITLVDKINKTTHIIDIAIPNTHNLQSTIVEKIRKYTDLKDEISRMWHMRHVTIVPIVLSSTGVIPKNLQQSLQLLDLSPHTYISLQKATILNTCRIVRKFLQTEPDHN

SEQ ID NO: 16223 - protein, 1004 aa, Melanostoma mellinum
MESRNLRSRQASVSAMPPSPIATQRYQHICEGCGKSYATEKGKLQHLRRYCRGPTAPEDNTCTICSRSFTTYIGLRQHIKRAHTVAYNAEQEAEAGTSSRRFWTEDEQNELARAEAELGSSDRTEIINHLAAISSRSREAIKRRRQRQSFGARVERFRETLAAISDESGNSEYESANEEEVNIQEDAEEEVNNSLNNSLLEYIRGIAGLDERDEELRISLLSVNDTSRNALDEWYQRLSQQYGRENNRRQQQPNPIASAIRRIRATTSARRRRAIEFGLVQTEYVRDTRRCAQRILSGQNFDSIPELPLPPDALRAHFSSVMSTPSKEDNAPTTNPRNQTVVSAPVTVEEISMTRQRMSSDSPGADGVTLRKLRAIPAKKLALLFNAMLLLESTPSALKVIPKKEHPADPGDYRPITISSIVIRLLHKIIANRISAVELNLCQRCFSNVDGCFANIITLHTVIKSRRRTGRPVCILALEVAKAFDTVSHHSLVRAMKRVALDTKFISYMAENLKDAATQISSGNETVTVEVNRGVKQGDPLSPALFNILLDELLEDLNCHTGIQLTPNGRLRCLAYADDVLLFADSKEDIERMLGTVNKFLKERGMMLNAEKSCMLDLRAVPAKKKVFAASQPARSGELEIKALGIEESMRYLGNVFTAMGDNEANPGKLLADLQAVKRAPLKPHQKLNILKKYIIPRYISALQKPTTTRKVLKDVDQKIRMFARKALHLPTHSSNHILYAPVKNGGLGLFEFRTRIPVIISERIEKLTQDPIIHQIAAIGQDWIQRIRSMIAADKANKTACLNYIIAILLRFNLLPTRGIPSNPPAERRCRGNCNRVETLCHVLQACPATHWERISRHNWVQKRMETAAREGGWRVEVEPRIRGRDGSLRKPDVFFSKDDLVVICDVGVHWEGPEPLALQNQNKSAYYGTSDFIYAVQRRYPYKRIRISPLIVGARGAWCPLNKFLVDQFRINNNHIRDIITTAIRGSWLIHQTFMRRTWQQR

SEQ ID NO: 16224 - protein, 1043 aa, Melanostoma mellinum
MESRNLRSRQASVSAMLPSPITTQRYQHICEGCGKSYATEKGKLQHLRRYCRGPTAPEDNTCTICSRSFTTYIGLRQHIKRAHTVAYNAEQEAEAGTSSRRFWTEDEQNELARAEAELGSSDRTEIINHLAAISSRSIEAIKRRRQRQSFGARVERFRETLAAISDESGNLEYESANEEEVSIKEDAEEEVNNSLNNSLLDYIGGIAGLDERDEELRISLLSANDASRNALDEWYQRLSQQYGRENNRRQQQPSPIASAIRRIRATTSARRRRAIEFGLVQREYARDTRRCAQRILSGQNFDSIPEQPLPRDALRAHFSSVMSTQSKEDNAPTTNPRNQTVVSAPVTVEEISMTRQKMSSDCPGANGVTLRKLRAIPVKKLALLFNAMLLLETTPSALKVSRTTLIQKKEHPADPGDYRPITISSIVIRLLHKIIANRISAVELNLCQRCFSNVDGCFANIITLHTVIKSRRRTGRPVCILALDVAKAFDTVSHHSLVRAMKRVGLDMKFISYMAENLKDAATQISSGNETVTVEVNRGVKQGDPLSPALFNLLLDELLEDLNHHTGIQLTPNGRLRCLAYADDILLFADCKEDIERMLGTANKFLKERGMMLNAEKSCMLDLRAVPAKKKVFAASQPARSGELEIKALGIEESMRYLGNVFTAMGDSEANPGKLLADLQAVKRAPLKPHQKLKILKKYIIPRYISALQKPTTTRKVLKDVDQKIRMFARKALHLPTHSSNHILNAPVKNGGLGLFELRTRISVIISERIEKLTQDPIIHQIAAIGQDWIQRVRSMIVADKANKTACLNFHADRLETSFSGNGIRQVSTLGSCTSFVYNPPRYWSGEDYIKAILLRFNLLPTRGIPSNPPAERRCRGNCNRVETLCHVLQACPATHWERISRHNWVQKRLETAAREGGWRVEVEPRIRKLDGTLRKPDVIFSKDDLVVICDVGVHWEGPEPLALQYQNKTAYYGTSDFIDAVQRRYPNKRIRILPLIVGARGAWCPLKFLVDQLKINNNHIRDIITTAIRGSWLIHQTFMRRT

SEQ ID NO: 16225 - protein, 1032 aa, Harmonia axyridis
MPFPCVCGKSYALERNLRDHQRRFCRGPVTGDEGTCPVCKNEYASYRSMRQHMRLAHPDDYNADLESEVEDRTRKGRWTTGELQEMARLELEYEGDSILDFLASALNRPKEGVRKKRYAQEYADVVEQLRTLRERELVSLIPDIGDPADADLTAASGSAAVDGDLTGHIEPSEGVELIDDPVLLHILALCSQLSHDQDAIATCQAVCMRIEGHERVFDEWVEKICGLYGRTPSTRTRAGPVKPIRQESGRRYRAQLYKYMQSKYTHQKRELADELIDGEDSNNGDIRPTTEAIKEHFEGIFSSESPRDDTPVRDFAPSPCDIYSPISSPEIADSIKKMGKTTGGPDGIDSTRLSRIPIVTLELLANLVLFSQYIPKPLRRSRTILIPKSNENLELAGNWRPITITSILIRLVNRIIAQRLSNSITLDECQRGFTRLDGCFANNITMQSIIKERRKQGRPFTILSLDVQKAFDRVSHHSIDRALRRFRVDKNTANYIMATFFEQTTTIYCGGVEVVTLSLRRGVKQGDPLAPIIFNMVLDELISGLRIRKGIGFGDLNISVLGYADDLLLLSENNKDAQFLLRLTCEFMESRSLTLNPAKCRSISMAVVPSKKKLYLQTTSKFYISSAPIPAIKSVKDTYRYLGYHFTNSGATPCSIASLDAQLGRIHGAPLKPQQKMTLIREHLVPRYIFSLQSPSVGLGVLKKADQLIRRTVKKILKMPTHIIDEALYTPAKLGGIGLFSFTRKIPIIMNGRLRKVKLRSPLFASLIRNTEYWENKMSRMMGSQLNTKEAVDRANAIKLEESFYGGGTQQTSNDSASSAFISSPPASWTGEDYVRAIKLRTNCLPTRGLPYGPREERMCRAGCGRVESLSHVLQKCPLGHTKRIIRHNYIVRRICRMARGKGWEVSEEPHIRDSRGVLNKPDMVCVKNNIVIIADVGVSWEAPRSLTESYLCKKAVYEQPEFLTILEQRYPGNDIKVLPFIIGARGIWCRESSCLLEELSINTPNNRRELVSTTMRGSWSIHSDVVRRYWS

SEQ ID NO: 16226 - protein, 1032 aa, Harmonia axyridis
MPFPCVCGKSYALERNLRDHQRRFCRGPVTGDEGTCPVCKNEYASYRSMRQHMRLAHPDDYNADLESEVEDRTRKGRWTTGELQEMARLELEYEGDSILDFLASALNRPKEGVRKKRYAQEYADVVEQLRTLRERELVSLIPDIGDPADADLTAASGSAAVDGDLTGHIEPSEGVESIDDPVLLHILALCSQLSHDQDAIATCQAVCMRIEGHERVFDEWVEKICGLYGRTPSTRTRAGPVKPIRQESGRRYRAQLYKYMQSKYTHQKRELADELIDGEDSNNGDIRPTTEAIKEHFEGIFSSESPRDDTPVRDFAPSPCDIYSPISSPEIADSIKKMGKTTGGPDGIDSTRLSRIPIVTLELLANLVLFSQYIPKPLRRSRTILIPKSNENLELAGNWRPITITSILIRLVNRIIAQRLSNSITLDECQRGFTRLDGCFANNITLQSIIKERRKQGRPFTILSLDVQKAFDRVSHHSIDRALRRFRVDKNTANYIMATFFEQTTTIYCGGVEVVTLSLRRGVKQGDPLAPIIFNMVLDELISGLRIRRGIGFGDLNISVLGYADDLLLLSENNKDAQFLLRLTCEFMESRSLTLNPAKCRSISMAVVPSKKKLYLQTTSKFYISSAPIPAIKSVKDTYRYLGYHFTNSGATPCSIASLDAQLGRIQGAPLKPQQKMTLIREHLVPRYIFSLQSPSVGLGVLKKADQLIRRTVKKILKMPTHIVDEALYTPAKLGGIGLFSFTRKIPIIMNGRLRKVKLRSPLFASLIRNTEYWENKMSRMMGSQLNTKEAVDRANAVKLEESFYGGGTQQTSNDSASSAFISSPPASWTGEDYVRAIKLRTNCLPTRGLPYGPREERMCRAGCGRVESLSHVLQKCPLGHTKRIIRHNYIVRRICRMARGKGWEVSEEPHIRDSRGVLNKPDMVCVKNNIVIIADVGVSWEAPRSLSESYLCKKAVYEQPEFLTIMEQRYPGNDIKVLPFIIGARGIWCRESSCLLEELSINTPNNRRELVSTTMRGSWSIHSDVVRRYWS

SEQ ID NO: 16227 - protein, 1032 aa, Harmonia axyridis
MPFPCVCGKSYALERNLRDHQRRFCRGPVTGDEGTCPVCKNEYASYRSMRQHMRLAHPDDYNADLESEVEDRTRKGRWTTGELQEMARLELEYEGDSILDFLASALNRPKEGVRKKRYAQEYADVVEQLRTLRERELVSLIPDIGDPADADLTAASGSAAVDGDLTGHIEPSEGVELIDDPVLLHILALCSQLSHDQDAIATCQAVCMRIEGHERVFDEWVEKICGLYGRTPSTRTRAGPVKPLRQESGRRYRAQLYKYMQSKYTHQKRELADELIDGEDSNNGDIRPTTEAIKEHFEGIFSSESPRDDTPVRDFAPSPCDLYSPISSPEIADSIKKMGKTTGGPDGIDSTRLSRIPIVTLELLANLVLFSQYIPKPLRRSRTILIPKSNENLELAGNWRPITITSILIRLVNRIIAQRLSNSITLDECQRGFTRLDGCFANNITLQSIIKERRKQGRPFTILSLDVQKAFDRVSHHSIDRALRRFRVDKNTANYIMATFFEQTTTIYCGGVEVVTLSLRRGVKQGDPLAPIIFNMVLDELISGLRIRRGIGFGDLNISVLGYADDLLLLSENNKDAQFLLRLTCEFMESRSLTLNPAKCRSISMAVVPSKKKLYLQTTSKFYISSAPIPAIKSVKDTYRYLGYHFTNSGATPCSIASLDAQLGRIQGAPLKPQQKMTLIREHLVPRYIFSLQSPSVGLGVLKKADQLIRRTVKKILKMPTHIVDEALYTPAKLGGIGLFSFTRKIPIIMNGRLRKVKLRSPLFASLIRNTEYWENKMSRMMGSQLNTKEAVDRANAIKLEESFYGGGTQQTSNDSASSAFILSPPASWTGEDYVRAIKLRTNCLPTRGLPYGPREERMCRAGCGRVESLSHVLQKCPLGHTKRIIRHNYIVRRICRMARGKGWEVSEEPHIRDSRGVLNKPDMVCVKNNIVIIADVGVSWEAPRSLSESYLCKKAVYEQPEFLTIMEQRYPGNDIKVLPFIIGARGIWCRESSCLLEELSINTPNNRRELVSTTMRGSWSIHSDVVRRYWS

SEQ ID NO: 16228 - protein, 1032 aa, Harmonia axyridis
MPFPCVCGKSYALERNLRDHQRRFCRGPVTGDEGTCPVCKNEYASYRSMRQHMRLAHPDDYNADLESEVEDRTRKGRWTTGELQEMARLELEYEGDSILDFLASALNRPKEGVRKKRYAQEYADVVEQLRTLRERELVSLIPDIGDPADADLTAASGSAAVDGDLTGHIEPSEGVELIDDPVLLHILALCSQLSHDQDAIATCQAVCMRIEGHERVFDEWVEKICGLYGRTPSTRTRAGPVKPMRQESGRRYRAQLYKYMQSKYTHQKRELADELIDGEDSINGDIRPTTEAIKEHFEGIFSSESPRDDTPVRDFAPSPCDIYSPISSPEIADSIKKMGKTTGGPDGIDSTRLSRIPIVTLELLANLVLFSQYIPKPLRRSRTILIPKSNENLELAGNWRPITITSILIRLVNRIIAQRLSNSITLDECQRGFTRLDGCFANNITMQSIIKERRKQGRPFTILSLDVQKAFDRVSHHSIDRALRRFRVDKNTANYIMATFFEQTTTIYCGGVEVVTLSLRRGVKQGDPLAPIIFNMVLDELISGLRIRRGIGFGDLNISVLGYADDLLLLSENNKDAQFLLRLTCEFMESRSLTLNPAKCRSISMAVVPSKKKLYLQTTSKFYISSAPIPAIKSVKDTYRYLGYHFTNSGATPCSIASLDAQLGRIHGAPLKPQQKMTLIREHLVPRYIFSLQSPSVGLGVLKKADQLIRRTVKKILKMPTHIIDEALYTPAKLGGIGLFSFTRKIPIIMNGRLRKVKLRSPLFASLIRNTEYWENKMSRMMGSQLNTKEAVDRANAIKLEESFYGGGTQQTSNDSASSAFISSPPASWTGEDYVRAIKLRTNCLPTRGLPYGPREERMCRAGCGRVESLSHVLQKCPLGHTKRIIRHNYIVRRICRMARGKGWEVSEEPHIRDSRGVLNKPDMVCVKNNIVIIADVGVSWEAPRSLSESYLCKKAVYEQPEFLTILEQRYPGNDIKVLPFIIGARGIWCRESSCLLEELSINTPNNRRELVSTTMRGSWSIHSDVVRRCWS

SEQ ID NO: 16229 - protein, 1032 aa, Harmonia axyridis
MPFPCVCGKSYALERNLRDHQRRFCRGPVTGDEGTCPVCKNEYASYRSMRQHMRLAHPDDYNADLESEVEDRTRKGRWTTGELQEMARLELEYEGDSILDFLASALNRPKEGVRKKRYAQEYADVVEQLRTLRERELVSLIPDIGDPADADLTAASGSAAVDGDLTGHIEPSEGVELIDDPVLLHILALCSQLSHDQDAIATCQAVCMRIEGHERVFDEWVEKICGLYGRTPSTRTRAGPVKPIRQESGRRYRAQLYKYMQSKYTHQKRELADELIDGEDSNNGDIRPTTEAIKEHFEGIFSSESPRDDTPVRDFAPSPCDIYSPISSPAIADSIKKMGKTTGGPDGIDSTRLSRIPIVTLELLANLVLFSQYIPKPLRRSRTILIPKSNENLELAGNWRPITITSILIRLVNRIIAQRLSNSITLDECQRGFTRLDGCFANNITMQSIIKERRKQGHPFTILSLDVQKAFDRVSHHSIDRALRRFRVDKNTANYIMATFFEQTTTIYCGGVEVVTLSLRRGVKQGDPLAPIIFNMVLDELISGLRIRKGIGFGDLNISVLGYADDLLLLSESNKDAQFLLRLTCEFMESRSLTLNPAKCRSISMAVVPSKKKLYLQTTSKFYISSAPIPAIKSVKDTYRYLGYHFTNSGATPCSIASLDAQLGRIHGAPLKPQQKMTLIREHLVPRYIFSLQSPSVGLGVLKKADQLIRRTVKKILKMPTHIIDEALYTPAKLGGIGLFSFTRKIPIIMNGRLRKVKLRSPLFASLIRNTEYWENKMSRMMGSQLNTKEAVDRANAIKLEESFYGGGTQQTSNDSASSAFISSPPASWTGEDYVRAIKLRTNCLPTRGLPYGPREERMCRAGCGRVESLSHVLQKCPLGHTKRIIRHNYIVRRICRMARGKGWEVSEEPHIRDSRGVLNKPDMVCVKNNIVIIADVGVSWEAPRSLSESYLCKKAVYEQPEFLTIMEQRYPGNDIKVLPFIIGARGIWCRESSCLLEELSINTPNNRRELVSTTMRGSWSIHSDVVRRYWS

SEQ ID NO: 16230 - protein, 1032 aa, Harmonia axyridis
MPFPCVCGKSYALERNLRDHQRRFCRGPVTGDEGTCPVCKNEYASYRSMRQHMRLAHPDDYNADLESEVEDRTRKGRWTTGELQEMARLELEYEGDSILDFLASALNRPKEGVRKKRYAQEYADVVEQLKTLRERELVSLIPDIGDPADADLTAASGSAAVDDDLTGHIEPSEGVELIDDPVLLHILALCSQLSHDQDAIATCQAVCMRIEGHERVFDEWVEKICGLYGRTPSTRTRAGPVKPIRQESGRRCRAQLYKYMQSKYTHQKRELADELIDGEDSNNWDIRPTTEAIKEHFEGIFSSESPRDDTPVRDFAPSPCDIYSPISSPEIADSIKKMGKTTGGPDGIDSTRLSRIPIVTLELLANLVLFSQYIPKPLRRSRTILIPKSNENLELAGNWRPITITSILIRLVNRIIAQRLSNSITLDECQRGFTRLDGCFANNITLQSIIKERRKQGRPFTILSLDVQKAFDRVSHHSIDRALRRFRVDKNTANYIMATFFEQTTTIYCGGVEVVTLSLRRGVKQGDPLAPIIFNMVLDELISGLRIRKGIGFGDLNISVLGYADDLLLLSENNKDAQFLLRLTCEFMESRSLTLNPAKCRSISMAVVPSKKKLYLQTTSKFYISSAPIPAIKSVKDTYRYLGYHFTNSGATPCSIASLDAQLGRIQGAPLKPQQKMTLIREHLVPRYIFSLQSPSVGLGVLKKADQLIRRTVKKILKMPTHIVDEALYTPAKLGGIGLFSFTRKITIIMNGRLRKVKLRSPLFASLIRNTEYWENKMSRMMGSQLNTKEAVDRANAVKLEESFYGGGTQQTSNDSASSAFISSPPASWTGEDYVRAIKLRTNCLPTRGLPYGPREERMCRAGCGRVESLSHVLQKCPLGHTKRIIRHNYIVRRICRMARGKGWEVSEEPHIRDSRGVLNKPDMVCVKNNIVIIADVGVSWEAPRSLSESYLCKKAVYEQPEFLTIMEQRYPGNDIKVLPFIIGARGIWCRESSCLLEELSINTPNNRRELVSTTMRGSWSIHSDVVRRYWS

SEQ ID NO: 16231 - protein, 1032 aa, Harmonia axyridis
MPFPCVCGKSYALERNLRDHQRRFCRGPVTGDEGTCPVCKNEYASYRSMRQHMRLAHPDDYNADLESEVEDRTRKGRWTTGELQEMARLELEYEGDSILDFLASALNRPKEGVRKKRYAQEYADVVEQLGTLRERELVSLIPDIGHPADADLTAASGSAAVDGDLTGHIEPSEGVELIDDPVLLHILALCSQLSHDQDAIATCQAVCMRIEGHERVFDEWVEKICGLYGRTPSTRTRAGPVKPIRQESGRRYRAQLYKYMQSKYTHQKRELADELIDGEDSNNGDIRPTTEAIKEHFEGIFSSESPRDDTPVRDFAPSPCDIYSPISSPEIADSIKKMGKTTGGPDGIDSTRLSRIPIVTLELLANLVLFSQYIPKPLRRSRTILIPKSNENLELAGNWRPITITSILIRLVNRIIAQRLSNSINLDECQRGFTRLDGCFANNITMQSIIKERRKQGRPFTILSLDVQKAFDRVSHHSIDRALRRFRVDKNTANYIMATFFEQTTTIYCGGVEVVTLSLRRGVKQGDPLAPMIFNMVLDELISGLRIRRGIGFGDLNISVLGYADDLLLLSENNKDAQFLLRLTCEFMESRSLTLNPAKCRSISMAVVPSKKKLYLQTTSKFYISSAPIPAIKSVKDTYRYLGYHFTNSGATPCSIASLDAQLGRIHGAPLKPQQKMTLIREHLVPRYIFSLQSPSVGLGVLKKADQLIRRTVKKILKMPTHIIDEALYTPAKLGGIGLFSFTRKIPIIMNGRLRKVKLRSPLFASLIRNTEYWENKMSRMMGSQLNTKEAVDRANAVKLEESFYGGGTQQTSNDSASSAFISSPPASWTGEDYVRAIKLRTNCLPTRGLPYGPREERMCRAGCGRVESLSHVLQKCPLGHTKRIIRHNYIVRRICRMARGKGWEVSEEPHIRDSRGVLNKPDMVCVKNNIVIIADVGVSWEAPRSLSESYLCKKAVYEQPEFLTIMEQRYPGNDIKVLPFIIGARGIWCRESSCLLEELSINTPNNRRELVSTTMRGSWSIHSDVVRRYWS

SEQ ID NO: 16232 - protein, 1006 aa, Anoplius nigerrimus
MITGTTKKKTPRNRTDFYGETSGSTDPAYKIGRCVEPAPAFRCKFPGCEKTFTTERGRGVHHSRAHKDWHDDQANIEHKKAPWTLEETRLMARCEAGLVRKGERFINQALIKHFTDRTLEGIKGKRRDPKYKAIVAEYLNAKVEIPTMPPERASGLARSRIVQYIKDISVQQNQNTKCVQLLNICSAMEGWTEERILQEISLYLAKYQTKKPDKQETRTITPKVLSKRKQRRVDYAKVQKLWTRNAGLCIRSILKDLRTNSPPPVDLLWDYWCNTMTQASVGRPKVVDRRNAYPQIWEPISAKEVKIAMPSNSSAPGPDGLTVKDLKGIDIDIITIIFNIFLFLKKVPTYLMESRTTLIPKKEGASRPEDYRPITVSSVLLRTYHKVLAARMMRYIKLDERQKAFRKVDGCGENILLLDLALRHHRRNFKHIYVAKDVAKAFDSVAHDAIIAVLAAEGIPEEALEYIHFLYKKSYTKLAYNCKSSQNIHPTCGVKQGDPMSPIIFNCVINQLIRIIPGEIGVQVPGGPFLNILAFADDIVLLSSTAKGLQMIINICTEYLSSCGLRINTNKSNTIAIKNVPHENRSVVDSRASFQCLGMPLRALRSTEEWRYLGIQFSPSGRARINIKDRLKEQLEKLSKAPLKPQQRMFALRTNLIPSMYHLLMLGETRISVLKMYDKLIRNYVRKWLDLPHDTTIAYVHAPIKEGGLGVPSLRWNTYTMRLSRLQHLTRNTENSEYLQNEIKLTLQKLEERKTTYRNIKEVNKRWSEMLHRKVDGMALKPSNCIDKQHLWVGEGSRLLTGKDYINFIKLRINALPVRTRTARGRTKESTCRAGCRSVETLNHVLQHCHRTHDSRVKRHDAIASYIVRNLKNLEYQTLEEPHLVQGHELRKPDIVALKNEEAIVIDAQVVSEQTRLDMAHANKISYYKPLEKVIQDKYSVNTVKFSSITLNWRGVWSPESCNDLLQKGIVKQKELKIISTRVLLGGYSAFKTFNKRTTIKRTGVG

SEQ ID NO: 16233 - protein, 1189 aa, Tachina fera
MNINEQASNERRYGQERRGTRWPGQPVEEPRLTDNGTATSASTMSSSTTIADGSMRRMKWTIEMNECIMRNYYRITHNEQQMMSYRSKLHEVFTREYPNMAVTIQRVADQRSAIVRNNYIRIPRLQQIKAEVDRELNGHVDLAVEGLETNTLQTSNLSSTNQENAQQIEPEEHIVNNNTTAGAHLDPLEVELHENIRINFMRAVTEFSGTNPRDRDPIPKQKQMHMLFKVVNIMNTHILPGYLAENINNLHDLHYFIYTAAVAVVRTINGDTQVTTPRVLNRNIEPPWKQRLNKQILQLRSELGRLTQYINGNRSRKIVNYYKKLQIKYRIHSRNDPQNMEAEHYRDTLRQKLAAKCNKLRRYLISEKRRTANKIFQVNEKHFYRQLREGQTTSPIHPPSMDNIEQFWKTIWCDKKEHNKEATWISSEVTRMRNTTPMEDPIISTEDIRAVTKKLHSWKATGPDHVHNYWLKKFTSTHRYIAKLFTEILNDIAPIPEFMTEGRTFLLPKDKGNTTDPSNYRPITCLCTVYKLLTACIAQKIYTHLENNRILSIEQKGCIKKSQGCKEQLIIDSIIMEEAYQKKRNIFTAYIDYKKAFDSVPHTWLIEILRIYKVSGKIIRLVSSLMQSWRVNLYMNQGNDMVTSNQIPIKCGILQGDSLSPLWFCMAVNPLSTILNETKYGFLIKGEDTQHKISHLLYMDDIKLYGSRETHIKYLLNLTEQFTRDIKMTFGLDKCRRLSVVNGNILNEGFELNEGLIESMSERDSYKYLGLAQGRKIHHKNVINKVSQAYKQRVRDILKSCLSGRNMTKAINAYAIPVLSFTFGVIKWSTTELEAINRESRKLFTKFRIHHPRSAIERVYLPRNMAGRGILDITQLCQNQVKNLKQYFLQQDSELHKAINSADDNYTPLQLQRPESNTERISRISQLKQLWKDKAIHGRYPNMLDQPHIDMRASNMWLMRGNIFAETEGFMVAIQDQVISTKNYLKYVVKNGLQDDSCRRCRQKAETIQHITGACPSLAGIEYLQRHNMVARIVHQAIGIRTKLLENEMPYYRYIPEVILENERHKIYWDRTVFTDRTVPFNRPDIIHVDKDSRKASIIDIGIPNDHNILDYYMEKKRKYTQLAEEMKHLWHIDEVKIIPIIVSTTGIIPKSLERNLVTLGIKHKMVTIQKAVILATTTIVRTLMGTSI

SEQ ID NO: 16234 - protein, 1069 aa, Mimas tiliae
MQLTLNNTITNTQQNMQTNNLSNSITEESGEHIQNTNTQNQPNMIQNESKDEDEEYNKLNERFLEILKKYEGIDPAIRPPIPKLQKINKNTFKLIHKINLIIEYTLTQSKHTEPTLEYIIDVIYAAASTITDTTNNSSMTRSVNQNNTVTKKNTKAPWERRLEKQIVMLRKEVGQLTQYILGNLSTKKQQKLNPDGKNLDIITDNLDKKKQLLQAKAKRLQRYKISNQRKIDNKRFNNNEKVFYRSLNNEEKNVAEPPKMEELADFWSGVWSKPADYNHDAEWINDETNRVSEVVPMAEIDITLTDLQEAIKKTHNWKSPGPDKIHNFWLKHLTSTHVHVANIFNRLIQKPNITPETFTHGITYLKPKDKDTTNPAKYRPITCLPTTYKILTSIISDKIYKHIQDNGIMAEEQKGCYKGGRGCKEQLIIDSEIHTQCKRKHRNLHFAYIDYQKAFDSVPHSWLLHILKLYKIDDKIISFLEYIITKWSTTLNIRTKTQNLKSPTIPISRGIFQGDSLSPLWFCLALNPLSFHLNDSKYGYKIDKVNKITHLLYMDDIKIFAASRKELNHLLKITEKFSTDISMTFGIDKCKLNCIKKGKHEPQQPYNLGSQTDSIQSLEYKETYKYLGFHQSHELDHTKIKGVLKAKYKSRVTSILKTQLSARNTVKAINTYAIPVLTYSFGIIKWSDTELDALNTLTRTTLNKYKSHHIHAAVERITLKRQDGGRGIVDIKNLHYRQTYNLRNYFLHRSNNSAIHNSICNLATSATPLNLNDPDFHPETKITKDETKKDRWHTKTLHGKYPNQLKQSHIDQEASNMWLMKGNIFTETEGFMVAIQDRVIKTKNYEKYIIKNPQITSDSCRLCNKQQETIDHITGGCPLLATKQYTDRHNNVAKQIHALLAKKYNLIENIEPYYKYKPKNVLENQIAKLYWDREIITDRTTNNNRPDITLIKKDDKTTYLIDISVPNTDNLRQKHIDKIQKYLPLAEEIQQMWHQNCIRIIPVIISSVGVVPKSLHNSLVELGLHKYSYIAMQKSIILDTCAIVRRFLNNTMSFSQPQTQTQTTDGNNN

SEQ ID NO: 16235 - protein, 1264 aa, Deilephila porcellus
MESSRKDISIMSLPGGDRQGTSGAGAGRGSMRTASGRLLLRRAETDKNVTAEPDSDNRLTDTMPSTSSSNPARSVLQDMMPATTQAGRGRQRMKWTNEVNTELLRCYYHVTNLETNTTGYRQLLHQRFIQSYPELSTLTEQRLADQIRVIHRNNRISLAERENIKKEVQETLSSNDRSFISDLGLVITIDDNTERTQIHNTQIQDTINISVINTQTNNATECIVEDHSETMLDKLNDTQNEQNIIQSQSDSENNEYNKLMNKFHEMLICYEGIELVDRPPIPKLQKINRKTYSTIQKINLIVEKTLDSRNDTITLEQIIDIIYSAAITITNTINTDPMCQGNHKSNNTRKKHQKAPWERRLENQILILRKEISQLTQYILGNLSVKKQNKLNPDGKSSDRMKEELDKKKQLLQAKAKRLKRYKKSNQRKIDNRKFNNNEKLFYRTLNNEEIDVVEPPKMEDLVNFWSNIWSNPVDHKPDAEWIDEECRRVEEVVPMTEIEISIEDLKEAINKTLNWKTPGPDRIHNFWLKKLTSTHKHLTDIFNKILKEPNIVPKTFAHGITYLKPKDNDTTNPAKYRPITCLPTTYKLLTSIISNKVYNHILESGIMAEEQKGCYKGGRGCKEQLVIDSEIHTQCRRKHRNLHYAYIDYQKAFDSVPHSWLLHILKIYKIDNKTISFLNHIMQNWSTTLNINTKNNSLRSHKIAITRGIFQGDSLSPLWFCLALNPLSHRLNSSQYGYKIDNSNKISHLLYMDDIKLFAGTRLELDNLLKITELFSNDIKMAFGINKCKLNSIKKGKYHKQEPYNLELQPDTINCLESNESYKYLGFHQTHEIDHTKIKATLKNKYKSRLTAILKTHLSARNKIKAVNTYAIPVLTYSFGIIKWSDTDLDTLNTLTRTTFNKHNSHHLHAAVERFTLKRQKGGRGIVDIKNLHFRQINNLRTYFLNRSNNSAIHKAVCGLTTSASPLYLNNPDFNPESKIDKDESKLDRWSAKSLHGKYPNQVKQNHVDPEASNMWLTKGNIFAETEGFMIAIQDRIIKTRNYEKYIIKNPQVISDSCRLCNRQPETIEHITAGCPLLATKQYTDRHNNVAKQIHALLAKKYDLINNIEPYYKYKPKSVLENHQAKLYWDREIITDRTTNNNRPDITLIKKDDKTTYLIDISVPNTENLRQKHIDKIQKYLPLAEEIQQMWHQNQVRIIPIIISSIGVVPKSLHNSLSELGLHKFSYISLQKSIILDTCAIVRRFLNNTMSFTQQQGQVQSNT

SEQ ID NO: 16236 - protein, 802 aa, Hyles vespertilio
MEELEKFWANIWSNPVDHKPDANWIEEECKRVENIEPMTEIEITIEDLKEALNKAQNWKTAGPDRIQNFWLKKLTSTHKHLIDIFNKCISEPNTLPETFAHGITYLKPKDKDTTNPAKYRPITCLSTTYKILTSIISNKIYNHIKDSGVMAEEQKGCYKGGRGCKEQLIIDSQIHTQSRRKHRNLHYAYIDYQKAYDSVPHSWLLHILQIYKIDNRITSFLKHIIKNWYTTLNINTKTDRLKSQKIPITRGIFQGDSLSPLWFCLALNPLSHYLNTSQYGYKIDSSNKITHLLYMDDIKLFAATRQELNHLLKITETFSADIKMTFGLDKCKINSIKKGKHHTEEPYNLNYQHDVIHSLDSNEPYKYLGFHQTHELDHSKIKVNLKNKYKSRITAILKTHLSARNKIKAVNTYAVPVLTYSFGIIKWSDTDLDALNTLTRTTFNKFNSHHIHAAVERFNLKRQDGGRGIVDIKNLHYRQVKNLRSYFLNRSRDSPIHESICKIPISIAPLYLNDPDFTPETKIVKDETKIDSWNSKSLHGKYPNHLKQSHVDAEASNMWLKKGNIFAETEGFMVAIQDRIIKTKNYEKFIIKNPQVTIDSCRLCNRLPETIDHITGGCALLATKQYTDRHNNVAKQIHALLAKKYNLIENLDPYYKYKPKNVLENHQVKLYWDREVITDRTTNNNRPDIILLTKDDKTTYLIDISVPNTDNLRQKHIEKIRKYLPLAEEIQQMWHQNRVRIIPIIISSIGVVPKSLHNSLAELGIHKFSYIPLQKSIILDTCAIVRRFLNNTMSFSQPQSQT

SEQ ID NO: 16237 - protein, 805 aa, Laothoe populi
MEELVEFWSNIWSKPADYNHDAVWIGEENNRVKEVVPMGEIDITLADVQEAIKKAHNWKSPGPDKIHNFWLKHLTSTHIYITNIFNKLIQQPNITPEMFTQGITYLKPKDSDTTNPAKYRPITCLPTTYKILTSIISNKIYKHIKENKVMAEEQKGCYKGGKGCKEQLIIDSEIHTQCKRKHRHLHFAYIDYQKAFDSVPHTWLLHILKLYKIDNKIVSFLEHIIKHWSTTLNIRTKTNNLKSSTIAISRGIFQGDSLSPLWFCLALNPLSFMLNNSKYGYKIDKDNKITHLLYMDDIKLFATTRKELNHLLKITELFTTDISMTFGIDKCKINCIKKGKHETQQPYILDRQPDSFQSLEYRETYKYLGFHQTHELDHTKIKQDLKSKYKSRITSILKTQLSARNIVKAINTYAIPVLTYSFGIIKWSDTELDTLNTLTRTTLNRHNSHHIHAAVERFSLKRQDGGRGIVDIKNLHYRQTHNLRDYFLRRSNNSSIHKSISNLVTSATPLNLNNLDFHPETKIVKDETKKHRWHTKTLHGKYPNQLKQSHIDQEASNMWLMKGNIFKETEGFMVAIQDRVIKTKNYEKYIIKNPQITSDSCRLCNRQQETIDHITGGCALLATKQYTDRHNNVAKQIHALLAKKYNLIENIEPYYQYKPKNVLENQIAKLYWDREIITDRTTNNNRPDITLIKKDDKTTYLIDISVPNTENLRQKHVDKIQKYLPLAEEIQQMWHQNRIRIIPIIISSIGVVPKSLHNSLSELGLHKHSYIPLQKSIILDTCAIVRRFLNNTMSFSQPQPQNTND

SEQ ID NO: 16238 - protein, 1264 aa, Deilephila porcellus
MESSRKDISIMSLPGGDRQGTSGAGAGRGSMRTASGRLLLRRAETDKNVTAEPDSDNRLTDTMPSTSSSNPARSVLQDMMPATTQAGRGRQRMKWTNEVNTELLRCYYHVTNLETNTTGYRQLLHQRFIQSYPELSTLTEQRLADQIRVIHRNNRISLAERENIKKEVQETLSSNDRSFISDLGLVITIDDNTERTQIHNTQIQDTINISVINTQTNNATECIVEDHSETMLDKLNDTQNEQNIIQSQSDSENNEYNKLMNKFHEMLICYEGIELVDRPPIPKLQKINRKTYSTIQKINLIVEKTLDSRNDTITLEQIIDIIYSAAITITNTINTDPMCQGNHKSNNTRKKHQKAPWERRLENQILILRKEISQLTQYILGNLSVKKQNKLNPDGKSSDRMKEELDKKKQLLQAKAKRLKRYKKSNQRKIDNRKFNNNEKLFYRTLNNEEIDVVEPPKMEDLVNFWSNIWSNPVDHKPDAEWIDEECRRVEEVVPMTEIEISIEDLKEAINKTLNWKTPGPDRIHNFWLKKLTSTHKHLTDIFNKILKEPNIVPKTFAHGITYLKPKDNDTTNPAKYRPITCLPTTYKLLTSIISNKVYNHILESGIMAEEQKGCYKGGRGCKEQLVIDSEIHTQCRRKHRNLHYAYIDYQKAFDSVPHSWLLHILKIYKIDNKTISFLNHIMQNWSTTLNINTKNNSLRSHKIAITRGIFQGDSLSPLWFCLALNPLSHRLNSSQYGYKIDNSNKISHLLYMDDIKLFAGTRLELDNLLKITELFSNDIKMAFGINKCKLNSIKKGKYHKQEPYNLELQPDTINCLESNESYKYLGFHQTHEIDHTKIKATLKNKYKSRLIAILKTHLSARNKIKAVNTYAIPVLTYSFGIIKWSDTDLDTLNTLTRTTFNKHNSHHLHAAVERFTLKRQKGGRGIVDIKNLHFRQINNLRTYFLNRSNNSAIHKAVCGLTTSASPLYLNNPDFNPESKIDKDESKLDRWSAKSLHGKYPNQVNQNHVDPEASNMWLTKGNIFAETEGFMIAIQDRIIKTRNYEKYIIKNPQVISDSCRLCNRQPETIEHITAGCPLLATKQYTDRHNNVAKQIHALLAKKYDLINNIEPYYKYKPKSVLENHQAKLYWDREIITDRTTNNNRPDITLIKKDDKTTYLIDISVPNTENLRQKHIDKIQKYLPLAEEIQQMWHQNQVRIIPIIISSIGVVPKSLHNSLSELGLHKFSYISLQKSIILDTCAIVRRFLNNTMSFTQQQGQVQSNT

SEQ ID NO: 16239 - protein, 1032 aa, Deilephila porcellus
MLDKLNDTQNEQNIIQSDSENNDYNKLMNKFHEMLICYEGIELVDRPPIPKLQKIYRKTYSTIQKINLIVEKTLDSRNDTITLEQIIDIIYSAAITITNTINTDPMCQGNHKSNNTRKKHQKAPWERRLENQILILRKEISQLTQYILGNLSVKKQNKLNPDGKSSDRMKEELDKKKQLLQAKAKRLKRYKKSNQRKIDNRKFNNNEKLFYRTLNNEEIDVVEPPKMEDLVNFWSNIWSNPVDHKPDAEWIDEECRRVEEVVPMTEIEISIEDLKEAINKTLNWKTPGPDRIHNFWLKKLTSTHKHLTDIFNKILKEPNIVPKTFAHGITYLKPKDNDTTNPAKYRPITCLPTTYKILTSIISNKVYNHILESGIMAEEQKGCYKGGRGCKEQLVIDSEIHTQCRRKHRNLHYAYIDYQKAFDSVPHSWLLHILKIYKIDNKTISFLNHIMQNWSTTLNINTKNNSLRSHKIAITRGIFQGDSLSPLWFCLALNPLSHRLNSSQYGYKIDNSNKISHLLYMDDIKLFAGTRLELDNLLKITELFSNDIKMAFGINKCKLNSIKKGKYHKQEPYNLELQPDTISCLESNESYKYLGFHQTHEIDHTKIKATLKNKYKSRIIAILKTHLSARNKIKAVNTYAIPVLTYSFGIIKWSDTDLDTLNTLTRTTFNKHNSHHLHAAVERFTLKRQKGGRGIVDIKNLHFRQINNLRTYFLNRSNNSAIHKAVCGLTTSASPLYLNNPDFNPESKIDKDESKLDRWSAKSLHGKYPNQVKQNHVDPEASNMWLTKGNIFAETEGFMIAIQDRIIKTRNYEKYIIKNPQVISDSCRLCNRQPETIEHITAGCPLLATKQYTDRHNNVAKQILALLAKKYDLINNIEPYYKYKPKSVLENHQAKLYWDREIITDRTTNNNRPDITLIKKDDKTTYLIDISVPNTENLRQKHIDKIQKYLPLAEEIQQMWHQNQVRIIPIIISSIGVVPKSLHNSLSELSLHKFSYISLQKSIILDTCAIVRRFLNNTMSFTQQQGQVQSNT

SEQ ID NO: 16240 - protein, 1275 aa, Hyles vespertilio
MERRNKDNRIMSLPGGDRQGTSGAGAGRGSMRTASGRLLHRRAEADKNVTAEFESDNEDRLTDAITINPTSNPTRSVLQDMMPATTLAGRGRQRMKWTDEVNNSLLRCYYQVTNLETNTTGYRPQLRQRFIEIYPELSSLSEQRLADQIRVIHKNNRIKVGDRENIKKEVEQLLSRVNTSRYTTQGLSTDIVEHNLENNRILHPQVLEIEQNTINTQIQTQPSRVIESTVEELSEIVPNTLHDIQNDINTTQNCSECVDEEYNKLSNQFHEILIKYEGINPADRPPIPKLKKINKATYNAINKLNAIIEEMISDNKRTVPTLEHLLDIIYSAATTISNNINNKPDNNKNKRTVSNDQNKNNNIRKNNHKAPWERRLENQILLLRKEVSQLTQYILGNLSVRKQKKLNPDGKNSDLITEELDKKKQLLQAKAKRLNRYKKSNQRKIDNKKFNNSEKLFYRSLNNEEIEIAEPLNMEELEKFWANIWSNPVDHKPDANWIEEECKRVENIEPMTEIEITIEDLKEALNKAQNWKTAGPDRIQNFWLKKLTSTHKHLIDIFNKCISEPNTLPETFAHGITYLKPKDKDTTNPAKYRPITCLSTTYKILTSIISNKIYNHIKDSGVMAEEQKGCYKGGRGCKEQLIIDSQIHTQSRRKHRNLHYAYIDYQKAYDSVPHSWLLHILQIYKIDNRITSFLKHIIKNWYTTLNINTKTDRLKSQKIPITRGIFQGDSLSPLWFCLALNPLSHYLNTSQYGYKIDSSNKITHLLYMDDIKLFAATRQELNHLLKITETFSADIKMTFGLDKCKINSIKKGKHHTEEPYNLNYQHDVIHSLDSNEPYKYLGFHQTHELDHSKIKVNLKNKYKSRITAILKTHLSARNKIKAVNTYAVPVLTYSFGIIKWSDTDLDALNTLTRTTFNKFNSHHIHAAVERFNLKRQDGGRGIVDIKNLHYRQVKNLRSYFLNRSRDSPIHESICKIPISIAPLYLNDPDFTPETKIVKDETKIDSWNSKSLHGKYPNHLKQSHVDAEASNMWLKKGNIFAETEGFMVAIQDRIIKTKNYEKFIIKNPQVTIDSCRLCNRLPETIDHITGGCALLATKQYTDRHNNVAKQIHALLAKKYNLIENLDPYYKYKPKNVLENHQVKLYWDREVITDRTTNNNRPDIILLTKDDKTTYLIDISVPNTDNLRQKHIEKIQKYLPLAEEIQQMWHQNRVRIIPIIISSIGVVPKSLHNSLAELGIHKFSYIPLQKSIILDTCAIVRRFLNNTMSFSQPQSQT

SEQ ID NO: 16241 - protein, 1279 aa, Mimas tiliae
MERSIENYRIMSLPGGDRQGTSGAGAGRGSMRAASGRLLHRRATADKNVTAGSDNNNRLTDISTTNTAETTPTGSVLQEIMPATTLAGRSRQRMKWTDEINAQLLRCYYYVTDLESNTTGYRQQLHQRFLQIYPELNSITEQRLADQIRVIHKNNRISLANREKIKSEIEQELNKERTNTIHRTLSHTSYMTTESHLTPDQFTSLNTEVQMQLTLNNTITNTQQNMQTNNLSNSITEESGEHIQNTNTQNQPNMIQNESKDEDEEYNKLNERFLEILKKYEGIDPAIRPPIPKLQKINKNTFRLIHKINLIIEYTFTQSKHTEPTLEYIIDVIYAAASTITDTTNNSSMTRSVNQNNTVTKKNTKAPWERRLEKQILMLRKEVGQLTQYILGNLSTKKQQKLNPDGKNLDIITDNLDKKKQLLQAKAKRLQRYKISNQRKIDNKRFNNNEKVFYRSLNNEEKNVAEPLKMEELADFWSGVWSKPADYNHDAEWINDETNRVSEVVPMAEIDITLTDLQEAIKKTHNWKSPGPDKIHNFWLKHLTSTHVHVANIFNRLIQKPNITPETFTHGITYLKPKDKDTTNPAKYRPITCLPTTYKILTSIISDKIYKHIQDNGIMAEEQKGCYKGGRGCKEQLIIDSEIHTQCKRKHRNLHFAYIDYQKAFDSVPHSWLLHILKMYKIDDKIISFLEYIITKWSTTLNIRTKTQNLKSPTIPISRGIFQGDSLSPLWFCLALNPLSFHLNDSKYGYKIDKVNKITHLLYMDDIKIFAASRKELNHLLKITEKFSTDISMTFGIDKCKLNCIKKGKHEPQQPYNLGSQTDSIQSLEYKETYKYLGFHQSHELDHTKIKGDLKAKYKSRVTSILKTQLSARNTMKAINTYAIPVLTYSFGIIKWSDTELDALNTLTRTTLNKYKSHHIHAAVERITLKRQDGGRGIVDIKNLHYRQIYNLRNYFLHRSNNSAIHNSICNLSTSATPLNLNDPDFHPETKITKDETKKDRWHTKTLHGKYPNQLKQSHIDQEASNMWLMKGNIFTETEGFMVAIQDRVIKTKNYEKYIIKNPQIASDSCRLCNKQQETIDHITGGCPLLATKQYTDRHNNVAKQIHALLAKKYNLIENIEPYYKYKPKNVLENQIAKLYWDREIITDRTTNNNRPDITLIKKDDKTTYLIDISVPNTDNLRQKHIDKIQKYLPLAEEIQQMWHQNCIRIIPVIISSVGVVPKSLHNSLVELGLHKYSYIAMQKSIILDTCAIVRRFLNNTMSFSQPQTQTQTTDGNNN

SEQ ID NO: 16242 - protein, 1279 aa, Mimas tiliae
MERSIENYRIMSLPGGDRQGTFGAGAGRGSMRAASGRLLHRRATADKNVTAGSDNNNRLTDISTTNTAETNPTGSVLQEIMPATTLAGRSRQRMKWTDEINAQLLRCYYYVTDLESNTTGYRQQLHQRFLQIYPELNSITEQRLADQIRVIHKNNRISLVNREKIKSEIEQELNKERTNTIHRTLSHTSNITTESHLTPDQFTSLNTEVQMQLTLNNTITNTQQNMQTNNLSNSITEESGEHIQNTNTQNQPNMIQIESKDEDEEYNKLNERFLEILKKYEGIDPAIRPPIPKLQKINKNTFKLIHKINLIIEYTLTQSKHTEPTLEYIIDVIYAAASTITDTTNNSSMTRSVNQNNTVTKKNTKAPWERRLEKQILMLRKEVGQLTQYILGNLSTKKQQKLNPDGKNLDIITDNLDKKKQLLQAKAKRLQRYKISNQRKIDNKRFNNNEKVFYRSLNNEEKNVAEPPKMEELADFWSGVWSKPADYNHDAEWINDETNRVSEVVPMAEIDITLTDLQEAIKKTHNWKSPGPDKIHNFWLKHLTSTHVHVANIFNRLIQKPNITPETFTHGITYLKPKDKDTTNPAKYRPITCLPTTYKILTSIISDKIYKHIQDNGIMAEEQKGCYKGGRGCKEQLIIDSEIHTQCKRKHRNLHFAYIDYQKAFDSVPHSWLLHILKLYKIDDKIISFLEYIITKWSTTLNIRTKTQNLKSPTIPISRGIFQGDSLSPLWFCLALNPLSFHLNDSKYGYKIDKVNKITHLLYMDDIKIFAASRKELNHLLKITEKFSTDISMTFGIDKCKLNCIKKGKHEPQQPYNLGSQTDSIQSLEYKETYKYLGFHQSHELDHTKIKGDLKAKYKSRVTSILKTQLSARNTVKAINTYAIPVLTYSFGIIRWSDTELDALNTLTRTTLNKYKSHHIHAAVERITLKRQDGGRGIVDIKNLHYRQTYNLRNYFLHRSNNSAIHNSICNLATSATPLNLNDPDFHPETKITKDETKKDRWHTKTLHGKYPNQLKQSHIDQEASNMWLMKGNIFTETEGFMVAIQDRVIKTKNYEKYIIKNPQIASDSCRLCNKQQETIDHITGGCPLLATKQYTDRHNNVAKQIHALLAKKYNLIENIEPYYKYKPKNVLENQIAKLYWDRGIITDRTTNNNRPDITLIKKDDKTTYLIDISVPNTDNLRQKHIDKIQKYLPLAEEIQQMWHQNCIRIIPVIISSVGVVPKSLHNSLVELGLHKYSYIAMQKSIILDTCAIVRRFLNNTMSFSQPQTQTQITDGNNN

SEQ ID NO: 16243 - protein, 1267 aa, Laothoe populi
MEHFNEDYRIMSLPGGDRQGTSGAGAGRDSMRAASGRLLSRRATAENNATAESVTHDQSITMSTTTNPAGSVLQDMMPATTLAGRSRQRMKWTDEINAQLLRCYYYVTDLETNTTGYRPQLHRRFLHIYPELNSLTEQRLADQIRVIHKNNRISPANRQKIKTEIEQTLNNERNAIHNTLSDKTINTTENSNISSTTMSQNTEIEIQSTLDSTITNTQQNSHIHNALSSITEESAEYTPNTNTQNHPNIEKNKDEEEEYNKLNEVFLEKLNEYEGIDPALRPSIPKLQKINKTTYKVIHMVNVIIENKLKQIKETDSTLQYIIDIIYTAAFTITHTINKHPITVSANENNRTKKNNQKPPWERRLEKKILVLRKEVSQLTQYILGNLSSKKQHKLNPNDKDIDSIREDLDKKKQLLQAKAKRLKRYKKSNQRKIDNKKFTNNERLFYRALNNEENYSAEPPKMEELVEFWSNIWSKPADYNHDAVWIGEENNRVKEVVPMGEIDITLADVQEAIKKAHNWKSPGPDKIHNFWLKHLTSTHIYITNIFNILIQQPNITPEMFTQGITYLKPKDSDTTNPAKYRPITCLPTTYKILTSIISNKIYKHIKENKVMAEEQKGCYKGGKGCKEQLIIDSEIHTQCKRKHRNLHFAYIDYQKAFDSVPHTWLLHILKLYKIDNKIVSFLEHIIKHWSTTLNIRTKTNNLKSSTIAISRGIFQGDSLSPLWFCLALNPLSFMLNNSKYGYKIDKDNKITHLLYMDDIKLFATTRKELNHLLKITELFTTDISMTFGIDKCKINCIKKGKHETQQPYILDRQPDSFQSLEYRETYKYLGFHQTHELDHTKIKQDLKSKYKSRITSILKTQLSARNIVKAINTYAIPVLTYSFGIIKWSDTELDTLNTLTRTTLNRHNSHHIHAAVERFSLKRQDGGRGIVDIKNLHYRQTHNLRDYFLRRSNNSSIHKSISNLVTSATPLNLNNLDFHPETKIVKDETKKHRWHTKTLHGKYPNQLKQSHIDQEASNMWLMKGNIFKETEGFMVAIQDRVIKTKNYEKYIIKNPQITSDSCRLCNRQQETIDHITGGCALLATKQYTDRHNNVAKQIHALLAKKYNLIENIEPYYQYKPKNVLENQIAKLYWDREIITDRTTNNNRPDITLIKKDDKTTYLIDISVPNTENLRQKHVDNIQKYLPLAEEIQQMWHQNRIRIIPIIISSIGVVPKSLHNSLSELGLHKHSYIPLQKSIILDTCAIVRRFLNNTMSFSQPQPQNTND

SEQ ID NO: 16244 - protein, 1279 aa, Mimas tiliae
MERSIENYRIMSLPGGDRQGTFGAGAGRGSMRAASGRLLHRRATADKNVTAGSDNNNRLTDISTTNTAETNPTGSVLQEIMPATTLAGRSRQRMKWTDEINAQLLRCYYYVTDLESNTTGYRQQLHQRFLQIYPELNSITEQRLADQIRVIHKNNRISLVNREKIKSEIEQELNKERTNTIHRTLSHTSNITTESHLTPDQFTSLNTEVQMQLTLNNTITNTQQNMQTNNLSNSITEESGEHIQNTNTQNQPNMIQIESKDEDEEYNKLNERFLEILKKYEGIDPAIRPPIPKLQKINKNTFKLIHKINLIIEYTLTQSKHTEPTLEYIIDVIYAAASTITDTTNNSSMTRSVNQNNTVTKKNTKAPWERRLEKQILMLRKEVGQLTQYILGNLSTKKQQKLNPDGKNLDIITDNLDKKKQLLQAKAKRLQRYKISNQRKIDNKRFNNNEKVFYRSLNNEEKNVAEPPKMEELADFWSGVWSKPADYNHDAEWINDETNRVSEVVPMAEIDITLTDLQEAIKKTHNWKSPGPDKIHNFWLKHLTSTHVHVANIFNRLIQKPNITPETFTHGITYLKPKDKDTTNPAKYRPITCLPTTYKILTSIISDKIYKHIQDNGIMAEEQKGCYKGGRGCKEQLIIDSEIHTQCKRKHRNLHFAYIDYQKAFDSVPHSWLLHILKLYKIDDKIISFLEYIITKGSTTLNIRTKTQNLKSPTIPISRGIFQGDSLSPLWFCLALNPLSFHLNDSKYGYKIDKVNKITHLLYMDDIKIFAASRKELNHLLKITEKFSTDISMTFGIDKCKLNCIKKGKHEPQQPYNLGSQTDSIQSLEYKETYKYLGFHQSHELDHTKIKGDLKAKYKSRVTSILKTQLSARNTVKAINTYAIPVLTYSFGIIRWSDTELDALNTLTRTTLNKYKSHHIHAAVERITLKRQDGGRGIVDIKNLHYRQTYNLRNYFLHRSNNSAIHNSICNLATSATPLNLNDPDFHPETKITKDETKKDRWHTKTLHGKYPNQLKQSHIDQEASNMWLMKGNIFTETEGFMVAIQDRVIKTKNYEKYIIKNPQIASDSCRLCNKQQETIDHITGGCPLLATKQYTDRHNNVAKQIHALLAKKYNLIENIEPYYKYKPKNVLENQIAKLYWDRGIITDRTTNNNRPDITLIKKDDKTTYLIDISVPNTDNLRQKHIDKIQKYLPLAEEIQQMWHQNCIRIIPVIISSVGVVPKSLHNSLVELGLHKYSYIAMQKSIILDTCAIVRRFLNNTMSFSQPQTQTQITDGNNN

SEQ ID NO: 16245 - protein, 930 aa, Plutella xylostella
MSQAASQPSSTASQDLVQCPECPSGSRRYRGQRGLNIHKARAHKTSGAAPQVAGNTPAPAVPGGAGDGQQTPAAELWREISNYKQSRPTVKRIPRGARTTVNNKNDLSSWKNLLTFSYRTLHVARGKDNAGGSLTQKIKKNCSHPDENQETRKILLNNHKTNNITQKVASKLNDGDIKGAACLLFSSDAVAPDTPETLSALESKHPPPAATLTLPGAPDPSARTPEATQEEVQAAIASFRNGSAGGIDGLTPQHLKDLICGATGVAGRTLLDAVTRLANLMLSGKVCDNIVDLLYGANLCALLKKDGGIRPIAVGNTLRRMVSKICCKHILNHLSSKFQPTQLGFGTKGGCEAAVHAARSFLQHGGGEVLLKVDVANAFNSVDRGALLTEIKDHIPDIFHYMWQCYSKPTKLIYKNNLLQSAVGCQQGDPLGPAIFSLAIHPHISSLASKFNVWYLDDGTLGGEANTVLSDLQNIINKFDSIGLKLNFSKCELFVSERIPPGEKEQIIKKFNSLAPNIKLINKSSLRLLGAPVLDDSLESFTTEKITKFQESSKKLKELSPHMAYCIIKYCLFVPKFNYVLRCTTLWKHKILLNTLDDLVRKTLVEILNCPLNDKSWMQATLPIRFGGTGIRSVSAVALPAFLSSAHSTSDLYGKIIYPSLGDVEVTCLAEAKNAWLDVTGRSQSLPIVPGSQRLWDEPLCTQVQKNLIDSAQNPAERARLMAAAEPESGYWLHALPSTILGTHLDRSTFSLAISLRLGAKINEPHRCRCGGGVDELGHHGLACQRSAGRLSRHAALNDVIRRALASAGVPAVLEPTGVARDDGKRPDGMTLIPWKNGRPMVWDATCVDTLAQSHLPATATKAGAAAATAEAAKRRKYAALGQGYMFVPFGVETLGPWGPDAKRIYKQIATRLIDVKCRRFRREMKVSSS

SEQ ID NO: 16246 - protein, 960 aa, Ypsolopha scabrella
MSQTAGPSSRSQSAASQDFVLCPDCPQSSRVYRGQRGLNIHKSKCHKNVSVDDLSTSRSTDNPFWLEISKYKSSLPTVKRIPRGARNTVATSLSSCIRKVLDNNDKASWEDLLTFSYRTLHVPKGRDNGSSLTQEIKKNCKQPVNLKEAEDLTRKLNNTHNIGKRVETKINDGDIRGAAQILFSSDAVAPDTSETLSSLESKHPLPATSSHLPDAPDPSERTPEATPEEVQAAIASFRNGSAGGLDGLTPQHFKDLIYGVPGETGRALLEDVTRLVNLMLAGKVCDDVTDILYGANLCALKKKDGGIRPIAVGNTIRRVVSKICCRHIQPDLVNKFQPVQLGFGTKGGCEAAVHAARTFLEHGGGEVLLKVDVQNAFNSIDRGALLTQVRENIPAVFHYLWQCYSSPSKLVYKNHLLQSAVGCQQGDPLGPAIFSLAIQPQITCLKSKFNVWYLDDGTLGGEADSVLTDLKKLIQNFHSIGLNLNFSKCELFLSNSLSPHVKNDIITKFNTLAPNIKIINEESLRLLGAPVLDDSLPCFISEQISKFQESSSLLKMISPHIAYCIIKFCLFTPKFTYVLRCSTLWKHSPLLVYIDEIIRTTLVEILNCPLNDRSWTQASLPIRFGGLGIRRVSNVALPAFLSSAYSTMDLFGRIINPSLGDVEVACLAEARSAWTDTAGPCTNLPMTLSSQRSWDEPLCIQVQKNLLDTSLNPADRARLLASSEPESGYWLNALPSANIGTVLDKTTFTLATCLRLGARTNEPHRCRCGKAVDQLGHHGLSCQYSAGRLPRHAALNDVIRRALASASVPAILEPNGVIREDGKRPDGMTIIPWKHGRSLVWDATCVDTMAASHLQATSVRAGVTAASAEGSKRRKYAALGEGYMFVPFGVETLGPWGPEARQLFKEISSRLIDASGNQRAGAYFGQRISLAIQRGNATSLLGTFPTTVAIWPAYFIYSIK

SEQ ID NO: 16247 - protein, 959 aa, Ypsolopha scabrella
MSQTAGPSSRSQSAASQDFVLCPDCPQSSRVYRGQRGLNIHKSKCHKNVSVDDLSTSRSTDNPFWLEISKYKSSLPTVKRIPRGARNTVATSLSSCIRKVLDNNDKASWEDLLTFSYRTLHVPKGRDNGSSLTQEIKKNCKQPVNLKEAEDLTRKLNNTHNIGKRVETKINDGDIRGAAQILFSSDSVAPDTSETLSSLESKHPLPATSSHLPDAPDPSERTPEATPEEVQAAIASFRNGSAGGLDGLTPQHFKDLIYGAPGETGRALLEDVTRLVNLMLAGKVCDDVTDILYGANLCALKKKDGGIRPIAVGNTIRRVVSKICCRHIQPDLVNKFQPVQLGFGTKGGCEAAVHAARTFLEHGGGEVLLKVDVQNAFNSIDRGALLTQVRENIPAVFHYLWQCYSSPSKLVYKNHLLQSAVGCQQGDPLGPAIFSLAIHPQITCLKSKFNVWYLDDGTLGGEADSVLTDLKKLIQNFHSIGLNLNFSKCELFLNNSLSPHVKNNIITKFNTLAPNIKIINEESLRLLGAPVLDDSLPCFISEQISKFQESSSLLKMISPHIAYCIIKFCLFTPKFTYVLRCSTLWKHSPLLVCIDEIIRTTLVEILNCPLNDRSWTQASLPIRFGGLGIRRVSNVALPAFLSSAYSTMDLFGRIINPSLGDVEVACLAEARSAWTDTAGPCTNLPMTLSSQRSWDEPLCIQVQKNLLDTSLNPADRARLLASSEPESGYWLNALPSANIGTLLDKTTFTLATCLRLGARTNEPHRCRCGKAVDQLGHHGLSCQHSAGRLPRHAALNDVIRRALASASVPAILEPNGVIREDGKRPDGMTIIPWKHGRSLVWDATCVDTMAASHLQATSVRAGAAAASAEGSKRRKYAALGEGYMFVPFGVETLGPWGPEARQLFKEISSRLIDASGNQRAGTYFGQRISLAIQRGNATSLLGTLPNDGSDLASIFYLLH

SEQ ID NO: 16248 - protein, 959 aa, Ypsolopha scabrella
MSQTAGPSSRSQSAASQDFVLCPDCPQSSRVYRGQRGLNIHKSKCHKNVSVDDLSTSRSTDNPFWLEISKYKSSLPTVKRIPRGARNTVATSLSSCIRKVLDNNDKSSWEDLLTFSYRTLHVPKGRDNGSSLTQEIKKNCKQPVNLKEAEDLTRKLNNTHNIGKRVETKINDGDIRGAAQILFSSDAVAPDTSETLSSLESKHPLPATSSHLPDAPDPSERTPEATPEEVQAAIASFRNGSAGGLDGLTPQHFKDLIYGVPGETGRALLEDVTRLVNLMLAGKVCDDVTDILYGANLCALKKKDGGIRPIAVGNTIRRVVSKICCRHIQPDLVNKFQPVQLGFGTKGGCEAAVHAARTFLEHGGGEVLLKVDVQNAFNSIDRGALLTQVRENIPAVFHYLWQCYSSPSKLVYKNHLLQSAVGCQQGDPLGPAIFSLAIQPQITCLKSKFNVWYLDDGTLGGEADSVLTDLKKLIQNFHSIGLNLNFSKCELFLSNSLSPHVKNDIITKFNTLAPNIKIINEESLRLLGAPVLDDSLPCFISEQISKFQESSSLLKMISPHIAYCIIKFCLFTPKFTYVLRCSTLWKHSPLLVYIDEIIRTTLVEILNCPLNDRSWTQASLPIRFGGLGIRRVSNVALPAFLSSAYSTMDLFGRIINPSLGDVEVACLAEARSAWTDTAGPCTNLPMTLSSQRSWDEPLCIQVQKNLLDTSLNPADRARLLASSEPESGYWLNALPSANIGTLLDKTTFTLATCLRLGARTNEPHRCRCGKAVDQLGHHGLSCQYSAGRLPRHAALNDVIRRALASASVPAILEPNGVIREDGKRPDGMTIIPWKHGRSLVWDATCVDTMAASHLQATSVRAGAAAASAEGSKRRKYAALGEGYMFVPFGVETLGPWGPEARQLFKEISSRLIDASGNQRAGAYFGQRISLAIQRGNATSLLGTLPNDGSDLASIFYLFQ

SEQ ID NO: 16249 - protein, 959 aa, Ypsolopha scabrella
MSQTAGPSSRSQSAASQDFVLCPDCPQLSRVYRGQRGLNIHKSKCHKNVSVDDLSTSRSTDNPFWLEISKYKSSLPTVKRIPRGARNTVATSLSSCIRKVLDNNDKASWEDLLTFSYRTLHVPKGRDNGSSLTQEIKKNCKQPVNLKEAEDLTRKLNNTHNIGKRVETKINDGDIRGAAQILFSSDAVAPDTSETLSSLESKHPLPATSSHLPDAPDPSERTPEATPEEVQAAIASFRNGSAGGLDGLTPQHFKDLIYGVPGETGRALLEDVTRLVNLMLAGKVCDDVTDILYGANLCALKKKDGGIRPIAVGNTIRRVVSKICCRHIQPDLVNKFQPVQLGFGTKGGCEAAVHAARTFLEHGGGEVLLKVDVQNAFNSIDRGALLTQVRENIPAVFHYLWQCYSSPSKLVYKNHLLQSAVGCQQGDPLRPAIFSLAIQPQITCLKSKFNVWYLDDGTLGGEADSVLTDLKKLIQNFHSIGLNLNFSKCELFLSNSLSPHVKNDIITKFNTLAPNIKIINEESLRLLGAPVLDDSLPCFISEQISKFQESSSLLKMISPHIAYCIIKFCLFTPKFTYVLRCSTLWKHSPLLVYIDEIIRITLVEILNCPLNDRSWSQASLPIRFGGLGIRRVSNVALPAFLSSAYSTMDLFGRIINPSLGDVEVACLAEARSAWTDTAGPCTNLPMTLSSQRSWDEPLCIQVQKNLLDTSLNPADRARLLASSEPESGYWLNALPSANIGTVLDNTTFTLATCLRLGARTNEPHRCRCGKAVDQLGHHGLSCQYSAGRLPRHAALNDVIRRALASASVPAILEPNGVIREDGKRPDGMTIIPWKHGRSLVWDATCVDTMAASHLQATSVRAGAAAASAEGSKRRKYAALGEGYMFVPFGVETLGPWGPEARQLFKEISSRLIDASGNQRAGAYFGQRISLAIQRGNATSLLSTLPNDGSDLASIFYLFH

SEQ ID NO: 16250 - protein, 959 aa, Ypsolopha scabrella
MSQTAGPSSRSQSAASQDFVLCPDCPQSSRVYRGQRGLNIHKSKCHKNVSVDDLSTSRSTDNPFWLEISKYKSSLPTVKRIPRGARNTVATSLSSCIRKVLDNNDKASWEDLLTFSYRTLHVPKGRDNGSSLTQEIKKNCKQPVNLKEAEDLTRKLNNTHNIGKRVETKINDGDIRGAAQILFSSDAVAPDTSETLSSLESKHPLPATSSHLPDAPDPSERTPEATPEEVQAAIASFRNGSAGGLDGLTPQHFKDLIYGVPGETGRALLEDVTRLVNLMLAGKVCDDVTDILYGANLCALKKKDGGIRPIAVGNTIRRVVSKICCRHIQPDLVNKFQPVQLGFGTKGGCEAAVHAARTFLEHGGGEVLLKVDVQNAFNSIDRGALLTQVRENIPAVFHYLWQCYSSPSKLVYKNHLLQSAVGCQQGDPLGPAIFSLAIQPQITCLKSKFNVWYLDDGTLGGEADSVLTDLKKLIQNFHSIGLNLNFSKCELFLSNSLSPHVKNDIITKFNTLAPNIKIINEESLRLLGAPVLDDSLPCFISEQISKFQESSSLLKMISPHIAYCIIKFCLFTPKFTYVLRCSTLWKHSPLLVYIDEIIRTTLVEILNCPLNDRSWTQASLPIRFGGLGIRRVSNVALPAFLSSAYSTMDLFGRIINPSLGDVEVACLAEARSAWTDTAGPCTNLPMTLSSQRSWDEPLCIQVQKNLLDTSLNPADRARLLASSEPESGYWLNALPSANIGTVLDKTTFTLATCLRLGARTNEPHRCRCGKAVDQLGHHGLSCQYSAGRLPRHAALNDVIRRALASASVPAILEPNGVIREDGKRPDGMTIIPWKHGRSLVWDATCVDTMAASHLQATSVRAGAAAASAEGSKRRKYAALGEGYMFVPFGVETLGPWGPEARQLFKEISSRLIDASGNQRAGAYFGQRISLAIQRGNATSLLGTLPNDGSDLASIFYLFH

SEQ ID NO: 16251 - protein, 959 aa, Ypsolopha scabrella
MSQTAGPSSRSQSAASQDFVLCPDCPQSSRVYRGQRGLNIHKSKCHKNVSVDDLSTSRSTDNPFWLEISKYKSSLPTVKRIPRGARNTVATSLSSCIRKVLDNNDKASWEDLLTFSYRTLHVPKGRDNGSSLTQEIKKNCKQPVNLKEAEDLTRKLNNTHNIGKRVETKINDGDIRGAAQILFSSDAVAPDTSETLSSLESKHPLPATSSHLPDAPDPSERTPEATPEEVQAAIASFRNGSAGGLDGLTPQHFKDLIYGAPGETGRALLEDVTRLVNLMLAGKVCDDVTDILYGANLCALKKKDGGIRPIAVGNTIRRVVSKICCRHIQPDLVNKFQPVQLGFGTKGGCEAAVHAARTFLEHGGGEVLLKVDVQNAFNSIDRGALLTQVRENIPAVFHYLWQCYNSPSKLVYKNHLLQSAVGCQQGDPLGPAIFSLAIHPQITCLKSKFNVWYLDDGTLGGEADSVLTDLKKLIQNFHSIGLNLNFSKCELFLNNSLSPHVKNNIITKFNTLAPNIKIINEESLRLLGAPVLDDSLPCFISEQISKFQESSSLLKMISPHIAYCIIKFCLFTPKFTYVLRCSTLWKHSPLLVCIDEIIRTTLVEILNCPLNDRSWTQASLPIRFGGLGIRRVSNVALPAFLSSAYSTMDLFGRIINPSLGDVEVACLAEARSAWTDTAGPCTNLPMTLSSQRSWDEPLCIQVQKNLLDTSLNPADRARLLASSEPESGYWLNALPSANIGTLLDKTTFTLATCLRLGARTNEPHHCRCGKAVDQLGHHGLSCQHSAGRLPRHAALNDVIRRALASASVPAILEPNGVIREDGKRPDGMTIIPWKHGRSLVWDATCVDTMAASHLQATSVRAGAAAASAEGSKRRKYAALGEGYMFVPFGVETLGPWGPEARQLFKEISSRLIDASGNQRAGTYFGQRISLAIQRGNATSLLGTLPNDGSDLASIFYLLH

SEQ ID NO: 16252 - protein, 962 aa, Ypsolopha scabrella
MSQTGGPSSSSQTSATASPDRVLCPDCPVPRCFKGQRGLKIHFGKSHKNIETSSKNSVSSASTSSPSPFWSEISIYKNSIPTVKRIPRGARHSVASSLSSCIRKVIENNDRNSWELFLTFSYRTLHVQRGRDKGGSLTQKIKDNCKNPIDLSQNNLSDKRNQAYNICKKIESKVNDGDIKGAAQLLFSDDAVAPDTPETLASLQSKHPPPAATTQLPDAPDANARTPEATAEEVQVAISSFRNGSAGGLDGLTPQHYKDLICGTTGEAGRTLLEQVTHLVNLMLSGKVSEDIIDILYGASLCALKKKDGGIRPIAVGNTIRRVVSKICCRHILPNLSNKFEPIQLGFGTKGGCEAAMHAARTFLTHGGGEMLLKVDVRNAFNSVDRGALLSQIKENIPTIYNYLWQCYSHPSKLIYKNHLIHSSVGCQQGDPLGPAIFSLAIHPHIADLNSKFNVWYLDDGTLGGDASSVLLDLENIINKFKTIGLELNFSKCELYLSGILPPQEHNNVLAKFNDLAPNIKIIDNDSLRLLGAPVLDDSISGFIEEQISKFEESSRRLKQINPHMAYFIIRYCLFVPKFTYVLRCTTIWKHQNLLTLLDDVIQSTLTEILNCSFEERNWTQATLPIRCGGLGIRKISSVALPAFLSSAYSTIDLFNRIINPSLGGVEVACLTEARDVWCTIAGPDESVPINLASQKLWDGPLCSQVQTNLLETSINPAERARLLATSEPESGYWLNALPSANIGTLLERTTFSLAVGLRIGAKINEPHRCRCGHSVDQLGHHGLSCQYCAGRLPRHAALNDVIRRALASASVPAILEPKGIARDDGRRPDGMTLIPWKNGRSLIWDATCVDTLAQSHVQVTATKAGAAAEKAEGVKRRMYGALGEGFIFVPFAVETLGPWGQEARQLYKEISSRLVDASGDRRAGSYFAQKISLAIQRGNAASLLGTLPNDGSDLASIFHLL

SEQ ID NO: 16253 - protein, 959 aa, Ypsolopha scabrella
MSQTAGPSSRSQSAASQDFVLCPDCPQSSRVYRGQRGLNIHKSKCHKNVSVDDLSTSRSTDNPFWLEISKYKSSLPTVKRIPRGARNTVATSLSSCIRKVLDNNDKASWEDLLTFSYRTLHVPKGRDNGSSLTQEIKKNCKQPVNLKEAENLTRKLNNTHNIGKRVETKINDGDIRGAAQILFSSDAVAPDTSETLSSLESKHPLPATSSHLPDAPDPSERTPEATPEEVQAAIASFRNGSAGGLDGLTPQHFKDLIYGAPGETGRALLENVTRLVNLMLAGKVCDDVTDILYGANLCALKKKDGGIRPIAVGNTIRRVVSKICCRHIQPDLVNKFQPVQLGFGTKGGCEAAVHAARTFLEHGGGEVLLKVDVQNAFNSIDRGALLTQVRENIPAVFHYLWQCYSSPSKLVYKNHLLQSAVGCQQVDPLGPAIFSLAIHPQITCLKSKFNVWYLDDGTLGGEADSVLTDLKKLIQNFHSIGLNLNFSKCELFLNNSLSPHVKNDIITKFNTLAPNIKIINEESLRLLGAPVLDYSLPCFISEQISKFQESSSLLKMISPHIAYCIIKFCLFTPKFTYVLRCSTLWKHSPLLVYIDEIIRTTLVEILNCPLNDRSWTQASLPIRFGGLRIRRVSNVALPAFLSSAYSTMDLFGRIINPSLGDVEVACLAEARSAWTDTAGPCTSLPMTLSSQRSWDEPLCIQVQKNLLDTSLNPADRARLLASSEPESGYWLNALPSANIGTLLDKTTFTLATCLRLGARTNEPHRCRCGKAVDQLGHHGLSCQHSAGRLPRLAALNDVIRRALASASVPAILEPNSVIREDGKRPDGMNIIPWKHGRSLVWDATCVDTMAASHLQATSVRAGAAAASAEGSKRRKYAALGEGYMFLPFSVETLGPWGPEARQLFKEISSRLIDASGNQRAGTYFGQRISLAIQRGNATSPLGTLPNDGSDLASIFYLFH

SEQ ID NO: 16254 - protein, 962 aa, Ypsolopha scabrella
MSQTGGPSSSSQTSATASPDRVLCPDCPVPRCFKGQRGLKIHFGKSHKNIETSSKNSVSSASTSSPSPFWSEISIYKNSIPTVKRIPRGARHSVASSLSSCIRKVIENNDRNSWELFLTFSYRTLHVQRGRDKGGSLTQKIKDNCKNPIDLSQNNLSDKRNQAYNICKKIESKVNDGDIKGAAQLLFSDDAVAPDTPETLASLQSKHPPPAATTQLPDAPDANARTPEATAEEVQVAISSFRNGSAGGLDGLTPQHYKDLICGTTGEAGRTLLEQVTHLVNLMLSGKVSEDIIDILYGASLCALKKKDGGIRPIAVGNTIRRVVSKICCRHILPDLSNKFEPIQLGFGTKGGCEAAMHAARTFLTHGGGEVLLKVDVRNAFNSVDRGALLSQIKENIPTIYNYLWQCYSHPSKLIYKNHLIHSSVGCQQGDPLGPAIFSLAIHPHIADLNSKFNVWYLDDGTLGGDASSVLLDLENIINKFKTIGLELNFSKCELYLSGILPPQEHNNVLAKFNDLAPNIKIIDNDSLRLLGAPVLDDSISGFIEEQISKFEESSRRLKQINPHMAYFIIRYCLFVPKFTYVLRCTTIWKHQNLLTLLDDVIQSTLTEILNCSFEERNWTQATLPIRCGGLGIRKISSVALPAFLSSAYSTIDLFNRIINPSLGGVEVACLTEARDVWCTIAGPDESVPINLASQKLWDGPLCSQVQTNLLETSINPAERARLLATSEPESGYWLNALPSANIGTLLERTTFSLAVGLRIGAKINEPHRCRCGHSVDQLGHHGLSCQYSAGRLPRHAALNDVIRRALASASVPAILEPKGIARDDGRRPDGMTLIPWKNGRSLIWDATCVDTLAQSHVQVTATKAGAAAEKAEGVKRRMYGALGEGFIFVPFAVETLGPWGQEARQLYKEISSRLVDASGDRRAGSYFAQKISLAIQRGNAASLLGTLPNDGSDLASIFYLL

SEQ ID NO: 16255 - protein, 962 aa, Ypsolopha scabrella
MSQTGGPSSSSQTSATASPDRVLCPDCPVPRRFKGQRGLKIHFGKSHKNIETSSKNSVSSASTSSPSPFWSEISIYKDSIPTVKRIPRGARHSVASSLSSCIRKVIENNDRNSWELFLTFSYRTLHVQRGRDKGGSLTQKIKDNCKNPIDLSQNNLSDKRNQAYNICKKIESKVNDGDIKGAAQLLFSDDAVAPDTPETLASLQSKHPPPAVTTQLPDAPDANARTPEATAEEVQVAISSFRNGSAGGLDGLTPQHYKDLICGTTGEAGRTLLEQVTHLVNLMLSGKVTEDIIDILYGASLCALKKKDGGIRPIAVGNTIRRVVSKICCRHILPDLSNKFEPIQLGFGTKGGCEAAMHAARTFLTHGGGEVLLKVDVRNAFNSVDRGALLSQIKENIPTIYNYLWQCYSHPSKLIYKNHLIHSSVGCQQGDPLGPAIFSLAIHPHIADLNSKFNVWYLDDGTLGGDASSVLLDLENIINKFKTIGLELNFSKCELYLSGILPPQEHNNVLAKFNDLAPNIKIIDNDSLRLLGAPVLDDSISGFIEEQISKFEESSRRLIQINPHMAYFIIRYCLFVPKFTYVLRCTTIWKHQNLLTLLDDVIQSTLTEILNCSFEERNWTQATLPIRCGGLGIRKISSVALPAFLSSAYSTIDLFNRIINPSLGGVEVACLTEARDVWCTIAGPDESVPINLASQKLWDGPLCSQVQTNLLETSINPAERARLLATSEPESGYWLNALPSANIGTLLERTTFSLAVGLRIGAKINEPHRCRCGHSVDQLGHHGLSCQYSAGRLPRHAALNDVIRRALASASVPAILEPKGIARDDGRRPDGMTLIPWKNGRSLIWDATCVDTLAQSHVQVTATKAGAAAEKAEGVKRRMYGALGEGFIFVPFAVETLGPWGQEARQLYKEISSRLVDASGDRRAGSYFAQKISLAIQRGNAASLLGTLPNDGSDLASIFYLL

SEQ ID NO: 16256 - protein, 952 aa, Ypsolopha scabrella
MSQTAGPSSRSQSAASQDFMLCPDCPQSSRVYRGQRGLNIHKSKCHKNVSVDDLSTSRSTDNPFWLEISKYKSSLPTVKRIPRGARNTVATSLSSCIRKVLDNNDKASWEDLLTFSYRTLHVPKGRDNGSSLTQEIKKNCKQPVNLKEAEDLTRKLNNTHNIGKRVETKINDGDIRGAAQILFSSDAVAPDTSETLSSLESKHPLPATSSHLPDAPDPSERTPEATPEEVQAAIASFRNGSAGGLDGLTPQHFKDLIYGAPGETGRALLEDVTRLVNLMLAGKVCDDVTDILYGANLCALKKKRVGNTIRRVVSKICCRYIQPDLVNKFQPVQLGFGTKGGCEAAVHAAWTFLEHGGGEVLLKVDVQNAFNSIDRGALLTQVRENIPAVFHYLWQCYSSPSKLVYKNHLLQSAVGCQQGDPLRPAIFSLAIHPQITCLKSKFNVWYLDDGTLGGEADSVLTDLKKLIQNFHSIGLNLNFSKCELFLNNSLSPHVKNDIITKFNTLAPNIKIINEESLRLLDAPVLDDSLPCFISEQISKFQESSSLLKMISPHIAYCIIKFCLFTPKFTYVLRCSTLWKHSPLLVYIDEIIRTTLVEILNCPLNDRSWTQASLPIRFGGLGIRRVSNVALPAFLSSAYSTMDLFGRIINPSLGDVEVACLAEARSAWTDTAGPCTNLPMTLSSQRSWDEPLCIQVQKNLLDTSLNPADRARLLASSEPESGYWLNALPSANIGTLLDKTTFTLATCLRLGARTNEPHRCRCGKAVDQLGHHGLSCQHSAGRLPRHAALNDVIRRALASASVPAILEPNGVIREDGKRPDGMTIIPWKHGRSLVWDATCVDTMAASHLQATSVRAGAAAASAEGSKRRKYAALGEGYMFVPFGVETLGPWGPEARQPFKEISSRLIDASGNQRAGTYFGQRISLAIQRGNATSLLGTLPNDGSDLASIFYLFH

SEQ ID NO: 16257 - protein, 959 aa, Ypsolopha scabrella
MSQTAGPSSRSQSAASQDFVLCPDCPQSSRVYRGQRGLNIHKSKCHKNVSVDDLSTSRSTDNPFWLEISKYKSSLPTVKRIPRGARNTVATSLSSCIRKVLDNNDKSSWEDLLTFSYRTLHVPKGRDNGSSLTQEIKKNCKQPVNLKEAEDLTRKLNNTHNIGKRVETKINDGDIRGAAQILFSSDAVAPDTSETLSSLESKHPLPATSSHLPDAPDPSERTPEATPEEVQAAIASFRNGSAGGLDGLTPQHFKDLIYGVPGETGRALLEDVTRLVNLMLAGKVCDDITDILYGANLCALKKKDGGIRPIAVGNTIRRVVSKICCRHIQPDLVNKFQPVQLGFGTKGGCEAAVHAARTFLEHGGGEVLLKVDVQNAFNSIDRGALLTQVRENIPAVFHYLWQCYSSPSKLVYKNHLLQSAVGCRQGDPLGPAIFSLAIQPQITCLKSKFNVWYLDDGTLGGEADSVLTDLKKLIQNFHSIGLNLNFPKCELFLSNSLSPHVKNDIITKFNTLAPNIKIINEESLRLLGAPVLDDSLPCFISEQISKFQESSSLLKMISPHIAYCIIKFCLFTPKFTYVLRCSTLWKHSPLLVYIDEIIRTTLVEILNCPLNDRSWTQASLPIRFGGLGIRRVSNVALPAFLSSAYSTMDLFGRIINPSLGDVEVACLAEARSAWTDTAGPCTNLPMTLSSQRSWDEPLCIQVQKNLLDTSLNPADRARLLASSEPESGYWLNALPSANIGTLLDKTTFTLATCLRLGARTNEPHRCRCGKAVDQLGHHGLSCQYSAGRLPRHAALNDVIRRALASASVPAILEPNGVIREDGKRPDGMTIIPWKHGRSLVWDATCVDTMAASHLQATSVRAGAAAASAEGSKRRKYAALGEGYMFVPFGVETLGPWGPEARQLFKEISSRLIDASGNQRAGAYFGQRISLAIQRGNATSLLGTLPNDGSDLASIFYLFH

SEQ ID NO: 16258 - protein, 933 aa, Ypsolopha scabrella
MSQTAGPSSRSQSAASQDFVLCPDCPQSSRVYRGQRGLNIHKSKCHKNVSVDDLSTSRSTDNPFWLEISKYKSSFPTVKRIPRGARNTVATSLSSCIRKVLDNNDKASWEDLLTFSYRTLHVPKGRDNGSSLTQEIKKNCKQPVNLKEAEDLTRKLNNTHNIGKRVETKINDGDIRGAAQILFSSDAVAPDTSETLSSLESKHPLPATSSHLPDAPDPSERTPEATPEEVQAAIASFRNGSAGGLDGLTPQHFKDLIYGAPGETGRALLEDVTRLVNLMLAGKVCDDVTDILYGANLCALKKKDGGIRPIAVGNTIRRVVSKICCRHIQPDLVNKFQPVQLGFGTKGGCEAAVHAARTFLEHGGGEVLLKVDVQNAFNSIDRGALLTQVRENIPAVFHYLWQCYSSPSKLVYKNHLLQSAVGCQQGDPLGPAIFSLAIHPQITCLKSKFNVWYLDDGTLGGEADSVLTDLKKLIQNFHSIGLNLNFSKCELFLNNSLSPHVKNDIITKFNTLAPNIKIINEESLRLLGAPVLDDSLPCFISEQISKFQESSSLLKMISPHIAYCIIKFCLFTPKFTYVLRCSTLWKHSPLLVYIDEIIRTTLVEILNCPLNDRSWTQASLPIRFGGLGIRRVSNVALPAFLSSAYSTMDLFGRIINPSLGDVEVACLAEARSAWTDTAGPCTNLPMTLSSQRSWDEPLCIQVQKNLLYTSLNPADRARLLASSEPESGYWLNALPSANIGTLLDKTTFTLATCLRLGARTNEPHRCRCGKAVDQLGHHGLSCQHSAGRLPRHAALNDVIRRALASASVPAILEPNGVIREDGKRPDGMTIIPWKHGRSLVWDATCVDTMAASHLQATSVRAGAAAASAEGSKRRKYAALGEGYMFVPFGVETLGPWGPEARQLFKEISSRLIDASGNQRAGTYFGQRISLAIQ

SEQ ID NO: 16259 - protein, 959 aa, Ypsolopha scabrella
MSQTAGPSSRSQSAASQDFVLCPDCPQSSRVYRGQRGLNMHKSKYHKNVSVDNLSTSRSTDNPFWLEISKYKSSLPTVKRIPRGARNTVATSLSSCIRKVLDNNDKASWEDLLTFSYRTLHVPKGRDNGSSLTQEIKKNCKQPVNLKEAVNLTRKLNNTHNIGKRVETKIDDGDIRGAAQILFSSDAVAPDTSEILSSLESKHPLPATSSHLPDAPDPSERTPEATPEEVQAAIASFRNGSAGGLDGLTPQHFKDLIYGVPGETGRALLEDVTRLVNLMLAGKVCDDVTDILYGANLCALKKKDGGIRPIAVGNTIRRVVSKICCRHIQPDLVNKFQPVQLGFGTKGGCEAAVHAARTFLEHGGGEVLLKVDVQNAFNSIDRGALLTQVRENIPAVFHYLWQCYSSPSKLVYKNHLLQSAVGCQQGDPLGPAIFSLAIQPQITCLKSKFNVWYLDDGTLGGEADSVLTDLKKLIQNFHSIGLNLNFSKCELFLSNSLSPHVKNDIITKFNTLAPNIKIINEESLRLRGAPVLDDSLPCFISEQISKFQESSSLLKMISPHIAYCIIKFCLFTPKFTYVLRCSTLWKHSPLLVYIDEIIRTTLVEILNCPLNDRSWTQASLPIRFGGLEIRRVSNVALPAFLSSAYSTMDLFGRIINPSLGDVEVACLAEARSAWTDTAGPCTNLPMTLSSQRSWDEPLCIQVQKNLLDTSLNPADRARLLASSEPESGYWLNALPSANIGTLLDKTTFTLATCLRLGARTNESHRCRCGKAVDQLGHHGLSCQYSAGRLPRHAALNDVIRRALASASVPAILEPNGVIREDGKRPDGMTIIPWKHGRSLVWDATCVDTMAASHLQATSVRAGAAAASAEGSKRRKYAALGEGYMFVPFGVETLGPWEPEARQLFKEISSRLIDASGNQRAGAYFGQRISLAIQRGNATSLLGTLPNDGSDLASIFYLFH

SEQ ID NO: 16260 - protein, 959 aa, Ypsolopha scabrella
MSQTAGPSSRSQSAASQDFVLCPDCPQSSRVYRGQRGLNIHKSKCHKNVSVDDLSTSRSTDNPFWLEISKYKSSLPTVKRIPRGARNTVATSLSSCIRKVLDNNDKASWEDLLTFSYRTLHVPKGRDNGSSLTQEIKKNCKQPVNLKEAEDLTRKLNNTHNIGKRVETKINDGDIRGAAQILFSSDAVAPDTSETLSSLESKHPLPATSSHLPDAPDPSERTPEATPEEVQAAIASFRNGSAGGLDGLTPQHFKDLIYGAPGETGRALLEDVTRLVNLMLAGKVCDDVTDILYGANLCALKKKDGGIRPIAVGNTIRRVVSKICCRHIQPDLVNKFQPVQLGFGTKGGCEAAVHAARTFLEHGGGEVLLKVDVQNAFNSIDRGALLTQVRENIPAVFHYLWQCYSSPSKLVYKNHLLQSAVGCQQGDPLGPAIFSLAIHPQITCLKSKFNVWYLDDGTLGGEADSVLTDLKKLIQNFHSIGLNLNFSKCELFLNNSLSPHVKNDIITKFNTLAPNIKIINEESLRLLGAPVLDDSLPCFISEQISKFQESSSLLKMISPHIAYCIIKFCLFTPKFTYVLRCSTLWKHSPLLVYIDEIIRTTLVEILNCPLNDRSWTQASLPIRFGGLGIRRVSNVALPAFLSSAYSTMDLFGRIINPSLGDVEVACLAEARSAWTDTAGPCTNLPMTLSSQRSWDEPLCIQVQKNLLDTSLNPADRARLLASSEPESGYWLNALPSANIGTLLDKTTFTLAICLRLGARTNEPHRCRCGKAVDQLGHHGLSCQHSAGRLPRHAALNDVIRRALASASVPAILEPNGVIREDGKRPDGMTIIPWKHGRSLVWDATCVDTMAASHLQATSVRAGAAAASAEGSKRRKYAALGEGYMFVPFGVETLGPWGPEARQLFKEISSRLIDASGNQRAGTYFGQRISLAIQRGNATSLLGTLPNDGSDLASIFYLFH

SEQ ID NO: 16261 - protein, 962 aa, Ypsolopha scabrella
MSQTGGPSSSSQTSATASPDRVLCPDCPVPRRFKGQRGLKIHFGKSHKNIETSSKNSVSSASTSSPSPFWSEISIYKNSIPTVKRIPRGARHSVASSLSSCIRKVIENNDRNSWELFLTFSYRTLHVQRGRDKGGSLTQKIKDNCKNPIDLSQNNLSDKRNQAYNICKKIESKVNDGDIKGAAQLLFSDDAVAPDTPETLASLQSKHLPPAATTQLPDAPDANARTPEATAEEVQVAIFSFRNGSAGGLDGLTPQHYKDLICGTTGEAGRTLLEQVTHLVNLMLSGKVSEDIIDILYGASLCALKKKDGGIRPIAVGNTIRRVVSKICCRHILPDLSNKFEPIQLGFGTKGGCEAAMHAARTFLTHGGGEVLLKVDVRNAFNSVDRGALLSQIKENIPTIYNYLWQCYSHPSKLIYKNHLIHSSVGCQQGDPLGPAIFSLAIHPHIADLNSKFNVWYLDDGTLGGDASSVLLDLENIINKFKTIGLELNFSKCELYLSEILLPQEHNNVLAKFNDLAPNIKIIDNDSLRLLGAPVLDDSISGFIEEQISKFEESSRRLKQINPHMAYFIIRYCLFVPKFTYVLRCTTIWKHQNLLTLLDDVIQSTLTEILNCSFEERNWTQATLPIRCGGLGIRKISSVALPAFLSSAYSTIDLFNRIINPSLGGVEVACLTEARDVWCTIAGPDESVPINLASQKLWDGPLCSQVQTNLLETSINPAERARLLATSEPESGYWLNALPSANIGTLLERTTFSLAVGLRIGAKINEPHRCRCGHSVDQLGHHGLSCQYSAGRLPRHAALNDVIRRALASASVPAILEPKGIARDDGRRLDGMTLIPWKNGRSLIWDATCVDTLAQSHVQVTATKAGAAAEKAEGVKRRMYGALGEGFIFVPFAVETLGPWGQEARQLYKEISSRLVDASGDRRAGSYFAQKISLAIQRGNAASLLGTLPNDGSDLASIFYLL

SEQ ID NO: 16262 - protein, 959 aa, Ypsolopha scabrella
MSQTAGPSSRSQSAASQDFVLCPDCPQSSRVYRGQRGLNIHKSKCHKNVSVDDLSTSRSTDNPSWLEISKYKSSLPTVKRIPRGARNTVATSLSSCIRKVLDNNDKSSWEDLLTFSYRTLHVPKGRDNGSSLTQEIKKNCKQPVNLKEAEDLTRKLNNTHNIGKRVETKINDGDIRGAAQILFSSDAVTPDTSETLSSLESKHPLPATSSHLPDAPDPSERTPEATPEEVQAAIASFRNGSAGGLDGLTPQHFKDLIYGVPGETGRALLEDVTRLVNLMLAGKVCDDVTDILYGANLCALKKKDGGIRPIAVGNTIRRVVSKICCRHIQPDLVNKFQPVQLGFGTKGGCEAAVHAARTFLEHGGGEVLLKVDVQNAFNSIDRGALLTQVRENIPAVFHYLWQCYSSPSKLVYKNHLLQSAVGCQQGDPLGPAIFSLAIQPQITCLKSKFNVWYLDDGTLGGEADSVLTDLKKLIQNFHSIGLNLNFSKCELFLSNSLSPHVKNDIITKFNTLAPNIKIINEESLRLLGAPVLDDSLPCFISEQISKFQESSSLLKMISPHIAYGIIKFCLFTPKFTYVLRCSTLWKHSPLLVYIDEIIRTTLVEILNCPLNDRSWTQASLPIRFGGLGIRRVSNVALPAFLSSAYSTMDLFGRIINPSLGDVEVACLAEARSAWTDTAGPCTNLPMTLSSQRSWDEPLCIQVQKNLLDTSLNPADRTRLLASSEPESGYWLNALPSANIGTLLDKTTFTLATCLRLGARTNEPHRCRCGKAVDQLGHHGLSCQYSAGHLPRHAALNDVIRRALASGSVPAILEPNGVIREDGKRPDGMTIIPWKHGRSLVWDATCVDTMAASHLQATSVRAGAAAASAEGSKRRKYAALGEGYMFVPFGVETLGPWGPEVRQLFKEISSRLIDASGNQRAGAYFGQRISLAIQRGNATSLLGTLPNDGSDLASIFYLFH

SEQ ID NO: 16263 - protein, 959 aa, Ypsolopha scabrella
MSQTAGPSSRSQSAASQDFVLCPDCPQSSRVYRGQRGLNIHKSKCHKNVSVDDLSTSRSTDNPFWLEISKYKSSLPTVKRIPRGARNTVATSLSSCIRKVLDNNDKASWEDLLTFSYRTLHVPKGRDNGSSLTQEIKKNCKQPVNLKEAEDLTRKLNNTHNIGKRVETKINDGDIRGAAQILFSSDAVAPDTSETLSSLESKHPLPATSSHLPDAPDPSERTPEATPEEVQAAIASFRNGSAGGLDGLTPQHFKDLIYGAPGETGRALLEDVTRLVNLMLAGKVCDDVTDILYGANLCALKKKDGGIRPIAVGNTIRRVVSKICCRHIQPDLVNKFQPVQLGFGTKGGCEAAVHAARTFLEHGGGEVLLKVDVQNAFNSIDRGALLTQVRENIPAVFHYLWQCYSSPSKLVYKNHLLQSAVGCQQGDPLGPAIFSLAIHPQITCLKSKFNVWYLDDGTLGGEADSVLTDLKKLIQNFHSIGLNLNFSKCELFLNNSLSPHVKNNIITKFNTLAPNIKIINEESLRLLGAPVLDDSLPCFISEQISKFQESSSLLKMISPHIAYCIIKFCLFTPKFTYVLRCSTLWKHSPLLVCIDEIIRTTLVEILNCPLNDRSWTQASLPIRFGGLGIRRVSNVALPAFLSSAYSTMDLFGRIINPSLGDVEVACLAEARSAWTDTAGPCTNLPMTLSSQRSWDEPLCIQVQKNLLDTSLNPADRARLLASSEPESGYWLNALPSANIGTLLDKTTFTLATCLRLGARTNEPHRCRCGKAVDQLGHHGLSCQHSAGRLPRHAALNDVIRRALASASVPAILEPNGVIREDGKRPDGMTIIPWKHGRSLVWDATCVDTMAASHLQATSVRAGAAAASAEGSKRRKYAALGEGYMFVPFGVETLGPWGPEARQLFKEISSRLIDASGNQRAGTYFGQRISLAIQRGNATSLLGTLPNDGSDLASIFYLLH

SEQ ID NO: 16264 - protein, 959 aa, Ypsolopha scabrella
MSQTAGPSSRSQSAASQDFVLCPDCPQSSRVYRGQRGLNIHKSKCHKNVSVDDLSTSRSTDNPFWLEISKYKSSLPTVKRIPRGARNTVATSLSSCIRKVLDNNDKSSWEDLLTFSYRTLHVPKGRDNGSSLTQEIKKNCKQPVNLKEAEDLTRKLNNTHNIGKRVETKINDGDIRGAAQILFSSDAVAPDTSETLSSLESKHPLPATSSHLPDAPDPSERTPEATPEEVQAAIASFRNGSAGGLDGLTPQHFKDLIYGVPGETGRALLEDVTRLVNLMLAGKVCDDVTDILYGANLCALKKKDGGIRPIAVGNTIRRVVSKICCRHIQPDLVNKFQPVQLGFGTKGGCEAAVHAARTFLEHGGGEVLLKVDVQNAFNSIDRGALLTQVRENIPAVFHYLWQCYSSPSKLVYKNHLLQSAVGCQQGDPLGPAIFSLAIQPQITCLKSKFNVWYLDDGTLGGEADSVLTDLKKLIQNFHSIGLNLNFSKCELFLSNSLSPHVKNDIITKFNTLAPNIKIINEESLRLLGAPVLDDSLPCFISEQISKFQESSSLLKMISPHIAYCIIKFCLFTPKFTYVLRCSTLWKHSPLLVYIDEIIRTTLVEILNCPLNDRSWTQASLPIRFGGLGIRRVSNVALPAFLSSAYSTMDLFGRIINPSLGDVEVACLAEARSAWTDTAGPCTNLPMTLSSQRSWDEPLCIQVQKNLLDTSFNPADRARLLASSEPESGYWLNALPSANIGTLLDKTTFTLATCLRLGARTNEPHRCRCGKAVDQLGHHGLSCQYSAGRLPRHAALNDVIRRALASASVPAILKPNGVIREDGKRPDGMTIIPWKHGRSLVWDATCVDTMAASHLQATSVRAGAAAASAEGSKRRKYAALGEGYMFVPFGVETLGPWGPEARQLFKEISSRLIDASGNQRAGAYFGQRISLAIQRGNATSLLGTLPNDGSDLASIFYLFH

SEQ ID NO: 16265 - protein, 959 aa, Ypsolopha scabrella
MSQTAGPSSRSQSAASQDFVLCPDCPQSSRVYRGQRGLNIHKSKCHKNVSVDDLSTSRSTDNPFWLEISKYKSSLPTVKRIPRGARNTVATSLSSCIRKVLDNNDKASWEDLLTFSYRTLHVPKGRDNGSSLTQEIKKNCEQPVNLKEAEDLTRKLNNTHNIGKRVETKINDGDIRGAAQILFSSDAVAPDTSETLSSLESKHPLPATSSHLPDAPDPSERTPEATPEEVQAAIASFRNGSAGGLDGLTPQHFKDLIYGVPGETGRALLEDVTRLVNLMLAGKVCDDVTDILYGANLCALKKKDGGIRPIAVGNTIRRVVSKICCRHIQPDLVNKFQPVQLGFGTKGGCEAAVHAARTFLEHGGGEVLLKVDVQNAFNSIDRGALLTQVRENIPAVFHYLWQCYSSPSKLVYKNHLLQSAVGCQQGDPLGPAIFSLAIQPQITCLKSKFNVWYLNDGTLGGEADSVLTDLKKLIQNFHSIGLNLNFSKCELFLSNSLSPHVKNDIITKFNTLAPNIKIINEESLRLLGAPVLDDSLPCFISEQISKFQESSSLLKMISPHIAYCIVKFCLFTPKFTYVLRCSTLWKHSPLLVYIDEIIRTTLVEILNCPLNDRSWTQASLPIRFGGLGIRRVSNVALPAFLSSAYSTMDLFGRIINPSLGDVEVACLAEARSAWTDTAGPCTNLPMTLSSQRSWDEPLCIQVQKNLLDTSLNPADRARLLASSEPESGYWLNALPSANIGTVLDKTTFTLATCLRLGARTNEPHRCRCGKAVDQLGHHGLSCQYSAGRLPRHAALNDVIRRALASASVPAILEPNGVIREDGKRPDGMTIIPWKHGRSLVWDATCVDTMAASHLQATSVRAGAAAASAEGSKRRKYAALGEGYMFVPFGVETLGPWGPEARQLFKEISSRLIDASGNQRAGAYFGQRISLAIQRGNATSLLGTLPNDGSDLASIFYLFH

SEQ ID NO: 16266 - protein, 962 aa, Ypsolopha scabrella
MSQTGGPSSSSQTSATASPDRVLCPDCPVPRRFKGQRGLKIHFGKSHKNIETSSKNSVSSASTSSPSPFWLEISIYKNSIPTVKRIPRGARHSVASSLSSCIRKVIENNDRNSWELFLTFSYRTLHVQRGRDKGGSLTQKIKDNCKNPIDLSQNNLSDKRNQAYNICKKIESKVNDGDIKGAAQLLFSDDAVAPDTPETLASLQSKHPPPAATTQLPDAPDANARTPEATAEEVQVAISSFRNGSAGGLDGLTPQHYKDLICGTTGEAGRTLLEQVTHLVNLMLSGKVSEDIIDILYGASLCALKKKDGGIRPIAVGNTIRRVVSKICCRHILPDLSNKFEPIQLGFGTKGGCEAAMHAARTFLTHGGGEVLLKVDVSNAFNSVDRGALLSQIKENIPTIYNYLWQCYSHPSKLIYKNHLIHSSVGCQQGDPLGPAIFSLAIHPHIADLNSKFNVWYLDDGTLGGDASSVLLDLENIINKFKTIGLELNFSKCELYLSGILPPQEHNNVLAKFNDLAPNIKIIDNDSLRLLGAPVLDDSISGFIEEQISKFEESSRRLKQINPHMAYFIIRYCLFVPKFTYVLRCTTIWKHQNLLTLLDDVIQSTLTEILNCSFEERNWTQATLPIRCGGLGIRKISSVALPAFLSSAYSTIDLFNRIINPSLGGVEVACLTEARDVWCTIAGPDESVPINLASQKLWDGPLCSQVQTNLLETSINPAERARLLATSEPESGYWLNALPSANIGTLLERTTFSLAVGLRIGAKINEPHRCRCGHSVDQLGHHGLSCQYSAGRLPRHAALNDVIRRALASASVPAILEPKGIARDDGRRPDGMTLIPWKNGRSLIWDATCVDTLAQSHVQVTATKAGAAAEKAEGVKRRMYGALGEGFIFMPFAVETLGPWGQEARQLYKEISSRLVDASGDRRAGSYFAQKISLAIQRGNAASLLGTLPNDGSDLASIFYLL

SEQ ID NO: 16267 - protein, 957 aa, Ypsolopha scabrella
MPQKCVCRRQSAASQDFVLCPDCPQSSRVYRGQRGLNIHKSKCHKNVSVDDLSTSRSTDNPFWLEISKYKSSLPTVKRIPRGARNTVATSLSSCIRKVLDNNDKSSWEDLLTFSYRTLHVPKGRDNGSSLTQEIKKNCKQPVNLKEAEDLTRKLNNTHNIGKRVETKINDGDIRGAAQILFSSDAVAPDTSETLSSLESKHPLPATSSHLPDAPDPSERTPEATPEEVQAAIASFRNGSAGGLDGLTPQHFKDLIYGVPGETGRALLEDVTRLVNLMLAGKVCDDVTDILYGANLCALKKKDGGIRPIAVGNTIRRVVSKICCRHIQPDLVNKFQPVQLGFGTKGGCEATVHAARTFLEHGGGEVLLKVDVQNAFNSIDRGALLTQVRENIPAVFHYLWQCYSSPSKLVYKNHLLQSAVGCQQGDPLGPAIFSLAIQPQITCLKSKFNVWYLDDGTLGGEADLVLTDLKKLIQNFHSIGLNLNFSKCELFLSNSLSPHVKNDIITKFNTLAPNIKIINEESLRLLGAPVLDDSLPCFISEQISKFQESSSLLKMISPHIAYCIIKFCLFTPKFTYVLRCSTLWKHSPLLVYIDEIIRTTLVEILNCPLNDRSWTQASLPIRFGGLGIRRVSNVALPAFLSSAYSTMDLFGRIINPSLGDVEVACLAEARSAWTDTAGPCTNLPMTLSSQRSWDEPLCIQVQKNLLDTSLNPADRARLLASSEPESGYWLNALPSANIGTLLDKTTFTLATCLRLGARTNEPHRCRCGKAVDQLGHHGLSCQYSAGRLPRHAALNDVIRRALASASVPAILEPNGVIREDGKRPDGMTIIPWKHGRSLVWDATCVDTMAASHLQATSVRAGAAAASAEGSKRRKYAALGEGYMFVPFGVETLGPWGPEARQLFKEISSRLIDASGNQRAGAYFGQRISLAIQRGNATSLLGTLPNDGSDLASIFYLFH

SEQ ID NO: 16268 - protein, 959 aa, Ypsolopha scabrella
MSQTAGPSSRSQSAASQDFVLCPDCPQSSRVYRGQRGLNIHKSKCHKNVSVDDLSTSRSTDNPFWLEISKYKSSLPTVKRIPRGARNTVATSLSSCIRKVLDNNDKSSWEDLLTFSYRTLHVPKGRDNGSSLTQEIKKNCKQPVNLKEAEDLTRKLNNTHNIGKRVETKINDGDIRGAAQILFSSDAVAPDTSETLSSLESKHPLPATSSHLPDAPDPSERTPEATPEEVQAAIASFRNGSAGGLDGLTPQHFKDLIYGVPGETGRALLEDVTRLVNLMLAGKVCDDVTDILYGANLCALKKKDGGIRPIAVGNTIRRVVSKICCRHIQPDLVNKFQPVQLGFGTKGGCEATVHAARTFLEHGGGEVLLKVDVQNAFNSIDRGALLTQVRENIPAVFHYLWQCYSSPSKLVYKNHLLQSAVGCQQGDPLGPAIFSLAIQPQITCLKSKFNVWYLDDGTLGGEADLVLTDLKKLIQNFHSIGLNLNFSKCELFLSNSLSPHVKNDIITKFNTLAPNIKIINEESLRLLGAPVLDDSLPCFISEQISKFQESSSLLKMISPHIAYCIIKFCLFTPKFTYVLRCSTLWKHSPLLVYIDEIIRTTLVEILNCPLNDRSWTQASLPIRFGGLGIRRVSNVALPAFLSSAYSTMDLFGRIINPSLGDVEVACLAEARSAWTDTAGPCTNLPMTLSSQRSWDEPLCIQVQKNLLDTSLNPADRARLLASSEPESGYWLNALPSANIGTLLDKTTFTLATCLRLGARTNEPHRCRCGKAVDQLGHHGLSCQYSAGRLPRHAALNDVIRRALASASVPAILEPNGVIREDGKRPDGMTIIPWKHGRSLVWDATCVDTMAASHLQATSVRAGAAAASAEGSKRRKYAALGEGYMFVPFGVETLGPWGPEARQLFKEISSRLIDASGNQRAGAYFGQRISLAIQRGNATSLLGTLPNDGSDLASIFYLFH

SEQ ID NO: 16269 - protein, 959 aa, Ypsolopha scabrella
MSQTAGPSSRSQSAASQDFVLCPDCPQSSRVYRGQRGLNIHKSKCHKNVSVDDLSTSRSTDNPFWLEISKYKSSLPTVKRIPRGARNTVATSLSSYIRKVLDNNDKASWEDLLTFSYRTLHVPKGRDNGSSLTQEIKKNCKQPVNLKEAEDLTRKLNNTHNIGKRVETKINDGDIRGAAQILFSSDAVAPDTSETLSSLESKHPLPATSSYLPDAPDPSERTPEATPEEVQAAIASFRNGSAGGLDGLTPQHFKDLIYGAPGETGRALLEDVTRLVNLMLAGKVCDDVTDILYGANLCALKKKDGGIRPIAVGNTIRRVVSKICCRYIQPDLVNKFQPVQLGFGTKGGCEAAVHAARTFLEHGGGEVLLKVDVQNAFNSIDRGALLTQVRENIPAVFHYLWQCYSSPSKLVYKNHLLQSAVGCQQGDPLGPAIFSLAIQPQITCLKSKFNVWYLDDGTLGGEADSVLTDLKKLIQNFHSIGLNLNFSKCELFLNNSLSPHVKNDIITKFNTLAPNIKIINEESLRLLGAPVLDDSLPCFISEQISKFQESSSLLKMISPHIAYCIIKFCLFTPKFTYVLRCSTLWKHSPLLVYIDEIIRTTLVEILNCPLNDRSWTQASLPIRFGGLGIRRVSNVALPAFLSSAYSTMDLFGRIINPSLGDVEVACLAEARSAWTDTAGPCTNLPMTLCSQRSWDEPLCIQVQKNLLDTSLNPADRARLLASSEPESGYWLNALPSANIGTLLDKTTFTLATCLRLGARTNEPHRCRCGKAVDQLGHHGLSCQHSAGRLPRHAALNDVIRRALASASVPAILEPNGVIREDGKRPDGMTIIPWKHGRSLVWDATCVDTMAASHLQATSVRAGAAAASAEGSKRRKYAALGEGYMFVPFGVETLGPWGPEARQLFKEISSRLIDASGNQRAGTYFGQRISLAIQRGNATSLLGTLPNDGSDLASIFYLFH

SEQ ID NO: 16270 - protein, 680 aa, Ypsolopha scabrella
MLSGKVSEDIIDILYGASLCALKKKDGGIRPIAVGNTIRRVVSKICCRHILPDLSNKFEPIQLGFGTKGGCEAAMHAARTFLTHGGGEVLLKVDVRNAFNSVDRGALLSQIKENIPTIYNYLWQCYSHPSKLIYKNHLIHSSVGCQQGDPLGPAIFSLAIHPHIADLNSKFNVWYLDDGTLGGDASSVLLDLENIINKFKTIGLELNFSKCELYLSGILPPQEHNNVLAKFNDLAPNIKIIDNDSLRLLGAPVLDDSISGFIEEQISKFEESSRRLKQINPHMAYFIIRYCLFVPKFTYVLRCTTIWKHQNLLTLLDDVIQSTLTEILNCSFEERNWTQATLPIRCGGLGIRKISSVALPAFLSSAYSTIDLFNRIINPSLGGVEVACLTEARDVWCTIAGPDESVPINLASQKLWDGPLCSQVQMNLLETSINPAERARLLATSEPESGYWLNALPSANIGTLLERTTFSLAVGLRIGAKINEPHRCRCGHSVDQLGHHGLSCQYSAGRLPRHAALNDVIRRALASASVPAILEPKGIARDDGRRPDGMTLIPWKNGRSLIWDATCVDTLAQSHVQVTATKAGAAAEKAEGVKRRMYGALGEGFIFVPFAVETLGPWGQEARQLYKEISSRLVDASGDRRAGSYFAQKISLAIQRGNAASLLGTLPNDGSDLASIFYLL

SEQ ID NO: 16271 - protein, 959 aa, Ypsolopha scabrella
MSQTAGPSSRSQSAASQDFVLCPDCPQSSRVYRGQRGLNIHKSKCHKNVSVDDLSTSRSTDNPFWLEISKYKSSLPTVKRIPRGARNTVATSLSSCIRKVLDNNDKSSWEDLLTFSYRTLHVPKGRDNGSSLTQEIKKNCKQPVNLKEAEDLTRKLNNTHNIGKRVETKINDGDIRGAAQILFSSDAVAPDTSETLSSLESKHPLPATSSHLPDAPDPSERTPEATPEEVQAAIASFRNGSAGGLDGLTPQHFKDLIYGVPGETGRALLEDVTRLVNLMLAGKVCDDVTDILYGANLCALKKKDGGIRPIAVGNTIRRVVSKICCRHIQPDLVNKFQPEQLGFGTKGGCEAAVHAARTFLEHGGGEVLLKVDVQNAFNSIDRGALLTQVRENIPAVFHYLWQCYSSPSKLVYKNHLLQSAVGCQQGDPLGPAIFSLAIQPQITCLKSKFNVWYLDDGTLGGEADSVLTDLKKLIQNFHSIGLNLNFSKCELFLSNSLSPHFKNDIITKFNTLAPNIKIINEESLRLLGAPVLDDSLPCFISEQISKFQESSSLLKMISPHIAYCIIKFCLFTPKFTYVLRCSTLWKHSPLLVYIDEIIRTTLVEILNCPLNDRSWTQASLPIRFGGLGIRRVSNVALPAFLSSAYSTMDLFGRIINPSLGDVEVTCLAEARSAWTDTAGPCTNLPMTLSSQRSWDEPLCIQVQKNLLDTSLNPADRARLLASSEPESGYWLNALPSANIGTLLDKTTFTLATCLRLGARTNEPHRCRCGKAVDQLGHHGLSCQYSAGRLPRHAALNDVIRRALASASVPAILEPNGVIREDGKRPDGMTIIPWKHGRSLVWDATCVDTMAASHLQATSVRAGAAAASAEGSKRRKYAALGEGYMFVPFGVETLGPWGPEARQLFKEISSRLIDASGNQRAGAYFGQRISLAIQRGNATSLLGTLPNDGSDLASIFYLFH

SEQ ID NO: 16272 - protein, 962 aa, Ypsolopha scabrella
MSQTGGPSSSSQTSATASPDRVLCPDCPVPRRFKGQRGLKIHFGKSHKNIETSSKNSVSSASTSSPSPFWSEISIYKNSIPTVKRIPRGARHSVASSLSSCIRKVIENNDRNSWELFLTFSYRTLHVQRGRDKGGSLTQKIKDNCKNPIDLSQNNLSDKRNQAYNICKKIESKVNDGDIKGAAQLLFSDDAVAPDTPETLASLQSKHPPPAATTQLPDAPDANARTPEATAEEVQVAISSFRNGSAGGLDGLTPQHYKDLICGTTGEAGRTLLEQVTHLVNLMLSGKVSEDIIDILYGASLCALKKKDGGIRPIAVGNTIRRVVSKICCRHILPDLSNKFEPIQLGFGTKGGCEAAMHAARTFLTHGGGELLLKVDVRNAFNSVDRGALLSQIKENIPTIYNYLWQCYSHPSKLIYKNHLIHSSVGCQQGDPLGPAIFSLAIHPHIADLNSKFNVWYLDDGTLGGDASSVLLDLENIINKFKTIGLELNFSKCELYLSGILPPQEHNNVLAKFNDLAPNIKIIDNDSLRLLGAPVLDDSISGFIEEQISKFEESSRRLKQINPHMAYFIIRYCLFVPKFTYVLRCTTIWKHQNLLTLLDDVIQSTLTEILNCSFEERNWTQATLPIRCGGLGIRKISSVALPAFLSSAYSTIDLFNRIINPSLGGVEVACLTEARDVWCTIAGPDESVPINLASQKLWDGPLCSRVQMNLLETSINPAERARLLATSEPESGYWLNALPSANIGTLLERTTFSLAVGLRIGAKKNEPHRCRCGHSVDQLGHHGLSCQYSAGRLPRHAALNDVIRRALASASVPAILEPKGIARDDGRRPDGMTLIPWKNGRSLIWDATCVDTLAQSHVQVTATKAGAAAEKAEGVKRRMYGALGEGFIFVPFAVETLGPWGQEARQLYKEISSRLVDASGDRRAGSYFAQKISLAIQRGNAASLLGTLPNDGSDLASIFYLL

SEQ ID NO: 16273 - protein, 959 aa, Ypsolopha scabrella
MSQTAGPSSRSQSAASQDFVLCPDCPQSSRVYRGQRGLNIHKSKCHKNVSVDDLITSRSTDNPFWLEISKYKSSLPMVKRIPRGARNTVATSLSSYIRKVLDNNDKASWEDLLTFSYRTLHVPKGRDNGSSLTQEIKKNCKQPVNLKEAEDLTRKLNNTHNIGKRVETKINDGDIRGAAQILFSSDAVAPDTSETLSSLESKHPLPATSSHLPDAPDPSERTPEATPEEVQAAIASFRNGSAGGLDGLTPQHFKDLIYGAPGETGRALLEDVTRLVNLMLAGKVCDDVTDILYGANLCALKKKDGGIRPIAVGNTIRRVVSKICCRHIQPDLVNKFQPVQLGFGTKGGCEAAVHAARTFLEHGGGEVLLKVDVQNAFNSIDRGALLTQVRENIPAVFHYLWQCYSSPSKLVYKNHLLQSAVGCQQGDPLGPAIFSLAIQPQITCLKSKFNVWYLDDGTLGGEADSVLTDLKKLIQNFHSIGLNLNFSKCELFLSNSLSPHVKNDIITKFNTLAPNIKIINEESLRLLGAPVLDDSLPCFISEQISKFQESSSLLKMISPHIAYCIIKFCLFTPKFTYVLRCSTLWKHSPLLVYIDEIIRTTLVEILNCPLNDRSWTQASLPIRFGGLGIRRVSNVALPAFLSSAYSTMDLFGRIINPSLGDVEVACLAEARSAWTDTAGPCTNLPMTLSSQRSWDEPLCIQVQKNLLDTSLNPADRARLLASSEPESGYWLNALPLANIGTLLDKTTFTLATCLRLGARTNEPHRCRCGKAVDQLGHHGLSCQYSAGRLPRHAALNDVIRRALASASVPAILEPNGVIREDGKRPDGMTIIPWKHGRSLVWDATCVDTMAASHLQATSVRAGAAAASAEGSKRRKYAALGEGYMFVPFGVETLGPWGPEARQLFKEISSRLIDASGNQRAGAYFGQRISLAIQRGNATSLLGTLPNDGSDLASIFYLFH

SEQ ID NO: 16274 - protein, 962 aa, Ypsolopha scabrella
MSQTGGPSSSSQTSATASPDRVLCPDCPVPRCFKGQRGLKIHFGKSHKNIETSSKNSVSSASTSSPSPFWSEISIYKNSIPTVKRIPRGARHSVASSLSSCIRKVIENNDRNSWELFLTFSYRTLHVQRGRDKGGSLTQKIKDNCKNPIDLSQNNLSDKRNQAYNICKKIESKVNDGDIKGAAQLLFSDDAVAPDTPETLASLQSKHPPPAATTQLPDAPDANARTPEATAEEVQVAISSFRNGSAGGLDGLTPQHYKDLICGTTGEAGRTLLEQVTHLVNLMLSGKVSEDIIDILYGASLCALKKKDGGIRPIAVGNTIRRVVSKICCRHILPDLSNKFEPIQLGFGTKGGCEAAMHAARTFLTHGGGEVLLKVDVRNAFNSVDRGALLSQIKENIPTIYNYLWQCYSHPSKLIYKNHLIHSSVGCQQGDPLGPAIFSLAIHPHIADLNSKFNVWYLDDGTLGGDASSVLLDLENIINKFKTIGLELNFSKCELYLSGILPPQEHNNVLAKFNDLAPNIKIIDNDSLRLLGAPVLDDSISGFIEEQISKFEESSRRLKQINPHMAYFIIRYCLFVPKFTYVLRCTTIWKHQNLLTLLDDVIQSTLTEILNCSFEERNWTQATLPIRCGGLGIRKISSVALPAFLSSAYSTIDLFNRIINPSLGGVEVACLTEARDVWCTIAGPDESVPINLASQKLWDGPLCSQVQTNLLETSINPAERARLLATSEPESGYWLNALPSANIGTLLERTTFSLAVGLRIGAKINEPHRCRCGHSVDQLGHHGLSCQYSAGRLPRHAALNDVIRRALASASVPAILEPKGIARDDGRRPDGMTLIPWKNGRSLIWDATCVDTLAQSHVQVTATKAGAAAEKAEGLKRRMYGALGEGFIFVPFAVETLGPWGQEAQQLYKEISSRLVDASGDRRAGSYFAQKISLAIQRGNAASLLGTLPNDGSDLASIFYLL

SEQ ID NO: 16275 - protein, 959 aa, Ypsolopha scabrella
MSQTAGPSSRSQSAASQDFVLCPDCPQSSRVYRGQRGLNIHKSKCHKNVSVDDLSTSRSTDNPFWLEISKYKSSLPTVKRIPRGARNTVATSLSSCIRKVLDNNDKSSWEDLLTFSYRTLHVLKGRDNGSSLTQEIKKNCKQPVNLKEAEDLTRKLNNTHNIGKRVETKINDGDIRGAAQILSSSDAVAPDTSETLSSLESKHPLPATSSHLPDAPDPSERTPEATPEEVQAAIASFRNGSAGGLDGLTPQHFKDLIYGVPGETGRALLEDVTRLVNLMLAGKVCDDVTDILYGANLCTLKKKDGGIRPIAIGNTIRRVVSKICCRHIQPDLVNKFQPVQLGFGTKGGCEAAVHAARTFLEHGGGEVLLKVDVQNAFNSIDRGALLTQVRENIPAVFHYLWQCYSSPSKLVYKNHLLQSAVGCQQGDPLGPAIFSLAIQPQITCLKSKFNVWYLDDGTLGGEADSVLTDLKKLIQNFHSIGLNLNFSKCELFLSNSLSPHVKNDIITKFNTLAPNIKIINEESLRLLGAPVLDDSLPCFISEQISKFQESSSLLKMISPHIAYCIIKFCLFTPKFTYVLRCSTLWKHSPLLVYIDEIIRTTLVEILNCPLNDRSWTQASLPIRFGGLGIRRVSNVALPAFLSSAYSTMDLFGRIINPSLGDVEVACLAEARSAWTDTAGPCTNLPMTLSSQRSWDEPLCIQVQKNLLDTSLNPADRARLLASSEPESGYWLNALPSANIGTLLDKTTFTLATCLRLGARTNEPHRCRCGKAVDQLGHHGLSCQYSAGRLPRHATLNDVIRRALASASVPAILEPNGVIREDGKRPDGMTIIPWKHGRSLVWDATCVDTMAASHLQATSVRAGAAAASAEGSKRRKYAALGEGYMFVPFGVETLGPWGPEARQLFKEISSRLIDASGNQRAGTYFGQRISLAIQRGNATSLLGTLPNDGSDLASIFYLFH

SEQ ID NO: 16276 - protein, 959 aa, Ypsolopha scabrella
MSQTAGPSSRSQSAASQDFVLCPDCPQSSRVYRGQRGLNIHKSKCHKNVSVDDLSTSRSTDNPFWLEISKYKSSLPTVKRIPRGARNTVATSLSSCIRKVLDNNDKASWEDLLTFSYRTLHVPKGRDNGSSLTQEIKKNCKQPVNLKEAEDLTRKLNNTHNIGKRVETKINDGDIRGAAQILFSSDAVAPDTSETLSSLESKHPLPATSSHLPDAPDPSERTPEATPEEVQAAIASFRNGSAGGLDGLTPQHFKDLIYGVPGETGRALLEDVTRLVNLMLAGKVCDDVTDILYGANLCALKKKDGGIRPIAVGNTIRRVVSKICCRHIQPDLVNKFQPVQLGFGTKGGCEAAVHAARTFLEHGGGEVLLKVDVQNAFNSIDRGALLTQVRENIPAVFHYLWQCYSSPSKLVYKNHLLQSAVGCQQGDPLGPAIFSLAIQSQITCLKSKFNVWYLDDGTLGGEADSVLTDLKKLIQNFHSIGLNLNFSKCELFLSNSLSPHVKNDIITKFNTLAPNIKIINEESLRLLGAPVLDDSLPCFISEQISKFQESSSLLKMISPHIAYCIIKFCLFTPKFTYVLRCSTLWKHSPLLVYIDEIIRTTLVEILNCPLNDRSWTQASLPIRFGGLGIRRVSNVALPAFLSSAYSTMDLFGRIINPSLGDVEVACLAEARSAWTDTAGPCTNLPMTLSSQRSWDEPLCIQVQKNLLDTSLNPADRARLLASSEPESGYWLNALPSANIGTVLDKTTFTLATCLRLGARTNEPHRCRCGKAVDQLGHHGLSCQYSAGRLLRHAALNDVIRRALASASVPAILEPNGVIREDGKRPDGMTIIPWKHGRSLVWDATCVDTMAASHLQATSVRAGAAAASAEGSKRRKYAALGEGYMFVPFGVETLGPWGPEARQLFKEISSRLIDASGNQRAGAYFGQRISLAIQRGNATSLLGTLPNDGSDLASIFYLFH

SEQ ID NO: 16277 - protein, 959 aa, Ypsolopha scabrella
MSQTGGPSSSSQTSATASPDRVLCPDCPVPRRFKGQRGLKIHFGKSHKNIETSSKNSVSSASTSSPSPFWSEISIYKNSIPTVKRIPRGARHSVASSLSSCIRKVIENNDRNSWELFLTFSYRTLHVQKGRDKGGSLTQKIKDNCKNPIDLSQNNLSDKRNQAYNICKKIESKVNDGDIKGAAQLLFSDDAVAPDTPETLASLQSKHPPPAATTQLPDAPDANARTPEATAEEVQVAISSFRNGSAGGLDGLTPQHYKDLICGTTGEAGRTLLEQVTHLVNLMLSGKVSEDIIDILYGASLCALKKKDGGIRPIAVGNTIRRVVSKICCRHILPDLSNKFEPIQLGFGTKGGCEAAMHAARTFLTHGGGEVLLKVDVRNAFNSVDRGALLSQIKENIPTIYNYLWQCYSHPSKLIYKNHLIHSSVGCQQGDPLGPAIFSLAIHPHIADLNSKFNVWYLDDGTLGGDASSVLLDLENIINKFKTIGLELNFSKCELYLSGILPPQEHNNVLAKFNDLAPNIKIIDNDSLRLLGAPVLDDSISGFIEEQISKFEESSRRLKQINPHMAYFIIRYCLFVPKFTYVLRCTTIWKHQNLLTLLDDVIQSTLTEILNCSFEERNWTQATLPIRCGGLGIRKISSVALPAFLSSAYSTIDLFNRIINPSLGGVEVACLTEARDVWCTIAGPDESVPINLASQKLWDGPLCSQVQMNLLETSINPAERARLLATSEPESGYWLNALPSANIGTLLERTTFSLAVGLRIGAKINEPHRCRCGHSVDQLGHHGLSCQYSAGRLPRHAALNDVIRRALASASVPAILEPKGIARDDGRRPDGMTLIPWKNGRSLIWDATCVDTLAQSHVQVTATKAGAAAEKAEGVKRRMYGALGEGFIFVPFAVETLGPWGQEARQLYKEISSRLVDASGDRRAGSYFAQKISLAIQRGNAASLLGTLPNDGSDLASIF

SEQ ID NO: 16278 - protein, 959 aa, Ypsolopha scabrella
MSQTAGPSSRSQSAASQDFVFCPDCPQSSRVYRGQRGLNIHKSKCHKNVSVDDLSTSRSTDNPLWLEISKYKSSFPTVKRIPRGARNTVATSLSSYIRKVLDNNDKASWEDLLTFSYRTLHVPKGRDNGSSLTQEIKKNCKQPLNLKEAEDLTRKLNNTHNIGKRVETKINDGDIRGAAQILFSSDAVAPNTSETLSSLESKHPLPATSSHLPDAPDPSERTPEATPEEVQAAIASFRNGSAGGLDGLTPQHFKDLIYGAPGETGRALLEDVTRLVNLMLAGKVCDDVTDILYGANLCALKKKDGGIRPIAVGNTIRRVVSKICCRHIQPDLVNKFQPVQLGFGTKGGCEAAVHAARTFLEHGGGEVLLKVDVQNAFNSIDRGALLTQVRENIPAVFHYLWQCYSSPSKLVYKNHLLQSAVGCQQGDPLGPAIFSLAIQPQITCLKSKFNVWYLDDGTLGGEADSVLTDLKKLIQNFHSIGLNLNFSKCELFLSNSLSPHVKNDIITKFNTLAPNIKIINEESLRLLGAPVLDDSLPCFISEQISKFQESSSLLKMISPHIAYCIIKFCLFTPKFTYVLRCSTLWKHSPLLVYVDEIIRTTLVEILNCPLNDRSWTQASLPIRFGGLGIRRVSNVALPAFLSSAYSTMDLFGRIINPSLGDVEVACLAEARSAWTDTAGPCTNLPMTLSSQRSWDEPLCIQVQKNLLDTSLNPADRARLLASSEPESGYWLNALPSANIGTLLDKTTFTLATCLRLGARTNEPHRCRCGKAVDQLGHHGLSCQHSAGRLPRHAALNDVIRRALASASVPAILEPNGVIREDGKRPDGMTIIPWKHGRSLVWDATCVDTMAASHLQATSVRAGAAAASAEGSKRRKYAALGEGYMFVPFGVETLGPWGPEARQLFKEISSRLIDASGNQRAGTYFGQRISLAIQRGNATSLLGTLPNDGSDLASIFYLFH

SEQ ID NO: 16279 - protein, 959 aa, Ypsolopha scabrella
MSQTAGPSSRSQSAASQDFVLCPDCPQSSRVYRGQRGLNIHKSKCHKNVSVDDLSTSRSTDNPFWLEISKYKSSLPTVKRIPRGARNTVATSLSSYIRKVLDNNDKASWEDLLTFSYRTLHVPKGRDNGSSLTQEIKKNCKQPVNLKEAEDLTRKLNNTHNIGKRVETKINDGDIRGVAQILFSSDAVAPDTSETLSSLESKHPLPATSSYLPDAPDPSERTPEATPEEEQAAIASFRNGSAGGLDGLTPQHFKDLIYGAPGETGRALLEDVTRLVNLMLAGKVCDDVTGILYGANLCALKKKDGGIRPIAVGNTIRRVVSKICCRHIQLDLVNKFQPVQLGFGTKGGCEAAVHAARTFLEHGGGEVLLKVDVQNAFNSIDRGALLTQVRENIPAVFHYLWQCYSSPSKLVYKNHLLQSAVGCQQGDPLGPAIFSLAIQPQITCLKSKFNVWYLDDGTLGGEADSVLTDLKKLIQNCHSIGLNLNFSKCKLFLNNSLSPHVKNDIITKFNTLAPNIKIINEESLRLLGAPVLDDSLPCFISEQIPKFQESSSLLKMISPHIAYCIIKFCLFTPKFTYVLRCSTLWKHSPLLVYIDEIIRTTLVEILNCPLNDRSWTQASLPIRFGGLGIRRVSNVALPAFLSSAYSTMDLFGRIINPSLGDVEVACLAEARSAWTDTAGPCTNLPMTLSSQRSWDEPLCIQVQKNLLDTSLNPADRARLLASSEPESGYWLNALPSANIGTLLDKTTFTLATCLRLGARTNEPHRCRCGKAVDQLGHHGLSCQHSAGRLPRHAALNDVIRRALASASVPAILEPNGVIREDGKRPDGMTIIPWKHGRSLVWDATCVDTMAASHLQATSVRAGAAAASAEGSKRRKYAALGEGYMFVPFGVETLGPWGPEARQLFKEISSRLIDASGNQRAGTYFGQRISLAIQRGNATSLLGTLPNDGSDLASIFYLFH

SEQ ID NO: 16280 - protein, 959 aa, Ypsolopha scabrella
MSQTAGPSSRSQSAASQDFVLCPDCPQSSRVYRGQRGLNIHKSKCHKNVSVDDLSTSRSTDNPFWLEICKYKSSLPTVKRIPRGARNTVATSLSSCIRKVLDNNDKASWEDLLTFSYRTLHVPKGRDNGSSLTQEIKKNCKQPVNLKEAEDLTRKLNNTHNIGKRVETKINDGDIRGAAQILFSSDAVAPDTSETLSSLESKHPLPATSSHLPDAPDPSERTPEATPEEVQAAIASFRNGSAGGLDGLTPQHFKDLIYGAPGETGRALLEDVTRLVNLMLAGKVCDDVTDILYGANLCALKKKDGGIRPIAVGNTIRRVVSKICCRHIQPDLVNKFQPVQLGFGTKGGCEAAVHAARTFLEHGGGEVLLKVDVQNAFNSIDRGALLTQVRENIPAVFHYLWQCYSSPSKLVYKNHLLQSAVGCQQGDPLGPAIFSLAIQPQITCLKSKFNVWYLDDGTLGGEADSVLTDLKKLIQNFHSIGLNLNFSKCELFLNNSLSPHVKNDIITKFNTLAPNIKIINEESLRLLGAPVLDDSLPCFISEQISKFQESSSLLKMISPHIAYCIIKFCLFTPKFTYVLRCSTLWKHSPLLVYIDEIIRTTLVEILNCPLNDRSWTQASLPIRFGGLGIRRVSNVALPAFLSSAYSTMDLFGRIINPSLGDVEVACLAEARSAWTDTAGPCTNLPMTLSSQRSWDEPLCIQVQKNLLDTSLNPADRARLLASSEPESGYWLNALPSANIGTLLDKTTFTLATCLRLGARTNEPHRCRCGKAVDQLGHHGLSCQHSAGRLPRHAALNDVIRRALASASVPAILEPNGVIREDGKRPDGMTIIPWKHGRSLVWDATCVDTMAASHLQATSVRAGAAAASAEGSKRRKYAALGEGYMFVPFGVETLGPWGPEARQLFKEISSRLIDASGNQRAGTYFGQRISLAIQRGNATSLLGTLPNDGSDLASIFYLFH

SEQ ID NO: 16281 - protein, 959 aa, Ypsolopha scabrella
MSQTAGPSSRSQSAASQDFVLCPDCPQSSRVYRGQRGLNIHKSKCHKNVSVDDLSTSRSTDNPFWLEISKYKSSLPTVKRIPRGARNTVATSLSSCIRKVLDNNDKASWEDLLTFSYRTLHVPKGRDNGSSLTQEIKKNCKQPVNLKEAEDLTRKLNNTHNIGKRVETKINDGDIRGAAQILFSSDAVAPDTSETLSSLESKHPLPATSSHLPDAPDPSERTPEATPEEVQAAIASFKNGSAGGLDGLTPQHFKDLIYGVPGETGRALLEDVTRLVNLMLAGKVCDDVTDILYGANLCALKKKDGGIRPIAVGNTIRRVVSKICCRHIQPDLVNKFQPVQLGFGTKGGCEAAVHAARTFLEHGGGEVLLKVDVQNAFNSIDRGALLTQVRENIPAVFHYLWQCYSSPSKLVYKNHLLQSAVGCQQGDPLGPAIFSLAIQPQITCLKSKFNVWYLDDGTLGGEADSVLTDLKKLIQNFHSIGLNLNFSKCELFLSNSLSPHVKNDIITKFNTLAPNIKIINEESLRLLGAPVLDDSLPCFISEQISKFQESSSLLKMISPHIAYCIIKFCLFTPKFTYVLRCSTLWKHSPLLVYIDEIIRTTLVEILNCPLNDRSWTQASLPIRFGGLGIRRVSNVALPAFLSSAYSTMDLFGRIINPSLGDVEVACLAEARSAWTDTAGPCTNLPMTLSSQRSWDEPLCIQFQKNLLDTSLNPADRARLLASSEPESGYWLNALPSANIGTVLDKTTFTLATCLRLGARTNEPHRCRCGKAVDQLGHHGLSCQYSAGRLPRHAALNDVIRRALASASVPAILEPNGVIREDGKRPDGMTIIPWKHGRSLVWDATCVDTMAASHLQATSVRAGAAAASAEGSKRRKYAALGEGYMFVPFGVKTLGPWGPEARQLFKEISSRLIDASGNQRAGAYFGQRISLAIQRGNATSLLGTLPNDGSDLASIFYLFH

SEQ ID NO: 16282 - protein, 874 aa, Ypsolopha scabrella
MSQTAGPSLRSQSAASQDFVLCPDCPQSSRVYRGQRGLNIHKSKCHKNVSCDNPFWLEISKYKSSLPTVKRIPRGARNTVATSLSSCIRKVLDNNDKASWEDLLTFSYRTLHVPKGRDNGSSLTQEIKKNCKQPVNLKEAEDLTRKLNNTHNIGKRVETKMNDGDIRGAAQILFSSDAVAPDTSETLSSLESKHPLPATSSHLPVTPDPSERIPEATPEEVQAAIASFRNGSAGGLDGLTPQHFNLIYGAPGETGRALLEDVTRLVNLMLAGKVCDDVTDILYGANLCALKKKDGGIRPIAVGNTIRRVVSKICCRHIQPDLVNKFQPVQLGFGTKGGCEAAVHAARTFLEHGGGEVLLKVDVQNAFNSIDRGALLTQVRENIPAVFHYLWQCYSSPSKLVYKNHLLQSAVGCQQGDPLGPAIFSLAIQPQITCLKSKFNVWYLDDGTLGGEADSVLTDLKKLIQNLNFSKCELFLNNSLSPHVKNDIITKFNTLAPNIKIINEESLRLLGAPVLDDSLPCFISEQISKFQESSSLLKMISPHIAYCMIKFCLFTPKFTYVLRCSTLWKHSPLLVYIDEIIRTTLVEILNCPLNDRSWTQASLPIRFGGLGIRRVSNVALPAFLSSAYSTMDLFGRIIQCLAEARSAWTDTAGPCTNLPMTLSSQRSWDEPLCIQVQKNLLDTSLNPADRARLLASSEPESGYWLNALPFANIGTLLDKTTFTLATCLRLGARTNEPHHCRCGKAVDQLGHHGLSCQHSAGRLPRHAALNDVIRRALASASVPAILEPNGVIREDGKRPDGMTIIPWKHGRSLVWDATCVDTMAASHLQATSVRAGAAAASAEGSKRRKYAALGEGYMFVPFGVETLGPWGPEA

SEQ ID NO: 16283 - protein, 974 aa, Sesamia nonagrioides
MASQSSTAPNDVTTVSDSSGLASLDLVQCSDCLKFFKKRGLRIHRSKCHRGLLVSNHTTVTDSNSLPNIQSTNANTSSPLWQILNKLKKSLPILKRVPRGARRYVASSLSSIIKEVVDKNDSSGWERLLTFTYKPLNVSQASQAPRSSLTQKVKNNCSPNFRLALDNIKDIGFKPHKISKKIESKFDEGDIRGAANLLFSSDVVAPCTPGTYAALLSKHPLPAATSRLPDGPDPSEPTPVATSEDVRAAIMSFRRGSAGGLDGLTPQHLKDLISGVTGDVGTALLEDLTRLVNLMISGKVCEHIVDVLYGANLCALTKKDGGIRPIAVGNTIRRVVSKICCRHYLPLLEQEFQPRQLGFGTKGGCEAAVHAVRTFLEHSKGEVLLKVDVKNAFNSIDRGALLTQVKKIIPGAFPYLWQCYNKPTCLVYNGQLINSAVGCQQGDPLGPAIFSLAIHPLIKDLASKFNVWYLDDGTLGGDAESVLSDLEKIIHYFDDIGLELNFAKCELYFCQNVSQQLRDKINSKFKFLAPNIKIIDGQSLRLLGAPVLEEAFTKFVKDQILLFNESSSRLGDINPHMAYSIIKFCLFVPKTTYALRCTPLWTNNQLLSLLDDNIRETITKIFNCFLSDRSWDQATLPIRHGGLGIRKISSIALPAFLSSANGTSNLVGKILSPSLCDVEVTGLTEASDAWCDAAGPNSHPPLNLASQRQWDEPLCMLVRSYLLESADNNAERSRLLASCEPESGYWLNAIPCPNVGTLLERTTFSLAVSLRIGARTNEPHRCRCGGNVDPLGHHGLACRRSAGRFSRHAALNDVIRRALASAGVPAVLEPAGIIRDDGKRPDGMTLIPWKNGRSVVWDATCVDTVAQSHLPATARRAGAAAAAAEVIKRRKYAALSEPYIFVPFAVETLGPWGAEARQFFKEISARLIDVSGDRRAGAHFGQRLSLAIQRGNAASLLGTLPGDRSDLGSIFYIL

SEQ ID NO: 16284 - protein, 974 aa, Sesamia nonagrioides
MASQSSTAPNDVTTVSDSSGLASLDLVQCSDCLKFFKKRGLRIHQSKCHRGLLVSNHTTVTDSNSLPNIQSTNANTSSPLWQILNKFKKSLPILKRVPRGARRYVASSLSSIIKEVVDKNDSSGWERLLTFTYKTLNVSQASQAPRSSLTQKVKNNCSPNFILALDNIKDIGFKPHKISKKIESKFDEGDIRGAANLLFSSDVVAPCTPGTYAALLSKHPLPAATSRLPDGPDPSEPTPVATSEDVRAAIMSFRRGSAGGLDGLTPQHLKDLISGVTGDVGTALLEDLTRLVNLMISGKVCEHIVDVLYGANLCALTKKDGGIRPIAVGNTIRRVASKICCRHYLPLLEQEFQPRQLGFGTRGGCEAAVHAARTFLEHSKGEVLLKVDVQNAFNSIDRGALLTQVKKFIPGAFPYLWQCYNKPTCLVYNGQLINSAVGCQQGDPLGPAIFSLAIHPLIKDLASKFNVWYLDDGTLGGDAESVLSDLEKIIQYFDDIGLELNFAKCELYFCQNVSLQLRDEINSKFKFLAPNIKIIDGQSLRLLGAPVLEEAFTKFVEDQILLFNGSSSRLGDINPHMAYSIIKFCLFVPKTTYALRCTPLWTNNQLLSLLDDNIRDTITKIFNCFLSDRSWDQATLPIRHGGLGIRKISSIALPAFLSSANGTSNLVGKILSPSLCDVEVTGLTEASDAWCDAAGPNSHPPLNLASQRQWDEPLCMLVRNYLLESADNNAERSRLLASCEPESGYWLNAIPCPNVGTLLERTTFSLAVSLRIGARTNEPHRCRCGGDVDHLGHHGLACRRSAGRFSRHAALNDVIRRALASAGVPAVLEPAGIIRDDGKRPDGMTLIPWKNGRSVVWDATCVDTVAQSHLPATARRAGAAAAAAEVIKRRKYAALSEPYIFVPFAVETLGPWGAEARQFFKEISARLIDVSGDRRAGAHFGQRLSLAIQRGNAASLLGTLPGDRSDLGSIFYIL

SEQ ID NO: 16285 - protein, 974 aa, Sesamia nonagrioides
MASQSSTAPNDVTTVSDSSGLASLDLVQCSDCLKFFKKRGLRIHRSKCHRGLLVSNYTTVTDSNSLPNIQSTNANTSSPLWQILNKLKKSLPILKRVPRGARRYVASSLSSIIKEVVDKNDSSGWERLLTFTYKTLNVSQASQAPRSSLTQKVKNNCSPNFRLALDNIKDIGFKPHKISKKIESKFDEGDIRGAANLLFSSDVVAPCTPGTYAALLSKHPLPAATSRLPDGPDPSEPTPVATSEDVRAAIMSFRRGSAGGLDGLTPQHLKDLISGVTGDVGTALLEDLTRLVNLMISGKVCEHIVDVLYGANLCALTKKDGGIRPIAVGNTIRRVVSKICCRHYLPLLEQEFQPRQLGFGTNGGCEAAVHAVRTFLEHSKGEVLLKVDVKNAFNSIDRGALLTQVKKIIPGAFPYLWQCYNKPTCLVYNGQLINSAVGCQQGDPLGPAIFSLAIHPLIKDLASKFNVWYLDDGTLGGDAESVLSDLEKIIQYFDDIGLELNFAKCELYFCQNVSQQLRDKINSKFKFLAPNIKIIDGQSLRLLGAPVLEEAFTKFVEDQILLFNESSSRLGDINPHMAYSIIKFCLFVPKTTYALRCTPLWTNNQLLSLLDDNIRETITKIFNCFLSDRSWDQATLPIRHGGLGIRKISSIALPAFLSSANGTSNLVGKILSPSLCDVEVTGLTEASDAWCDAAGPNSHPPLNLASQRQWDEPLCMLVRNYLLESADNNAERSRLLASCEPESGYWLNAIPCPNVGTLLERTTFSLAVSLRIGARTNEPHRCRCGGDVDPLGHHGLACRRSAGRFSRHAALNDVIRRALASAGVPAVLEPAGIIRDDGKRPDGMTLIPWKNGRSVVWDATCVDTVAQSHLPATARRAGAAAAAAEVIKRRKYAALSEPYIFVPFAVETLGPWGAEARQFFKEISARLIDVSGDRRAGAHFGQRLSLAIQRGNAASLLGTLPGDRSDLGSIFYIL

SEQ ID NO: 16286 - protein, 974 aa, Sesamia nonagrioides
MASQSSTAPNDVTTVSDSSGLASMDLVQCSDCLKFFKKRGLRIHQSKCHRRLLVSNHTTVTDSNSLPNIQSTNVNTSSPLWQILNKLKKSLPILKRVPRGARRYVASSLSSIIKEVVDKNDSSGWERLLTFTYKTLNVSQASQAPRSSLTQKVKNNCSPNFRLALDNIKDIGFKPHKISKKIESKFDEGDIRGASNLLFSSDVVAPCTPGTYAALLSKHPLSAATSRLPDGPDPSEPTPVATSEDIRAAIMSFRRGSAGGLDGLTPQHLKDLISGVTGDVGRALLEDLTRLVNLMISGKVCEHIVDVLYGANLCALTKKDGGIRPIAVGNTIRRVASKICCRHYLPLLEQEFQPRQLGFGTRGGCEAAVHAARTFLEHSKGEVLLKVDVKNAFNSIDRGALLTQVKKFIPGAFPYLWQCYNKPTCLVYNGQLINSAVGCQQGDPLGPAIFSLAIHPLIKDLASKFNVWYLDDGTLGGDAESVLSDLENIIQYFDDIGLELNFAKCELYFCQNVSQQLRDKINSKFKFLAPNIKIIDGQSLRLLGAPVLEEAFTKFVEDQILLFNESSSRLGDINPHMAYSIINFCLFVPKTTYALRCTPLWTNNQLLSLLDDNIRDTITKIFNCFLSDRSWDQATLPIRHGGLGIRKISSIALPAFLSSANGTSNLVGKILSPSLCDVEVTGLSEASDAWCEAAGPNSHPPLNLASQRQWDEPLCMLVRNYLLESADNNAERSRLLASCEPESGYWLNAIPCPNVGTLLERTTFSLAVSLRIGARTNEPHRCRCGGDVDHLGHHGLACRRSAGRFSRHAALNDVIRRALASAGVPAVLEPAGIIRDDGKRPDGMTLIPWKNGRSVVWDATCVDTVAQSHLPATARRAGAAAAAAEVIKRRKYAALSEPYIFVPFAVETLGPWGAEARQFFKEISARLIDVSGDRRAGAHFGQRLSLAIQRGNAASLLGTLPGDRSDLGSIFYIL

SEQ ID NO: 16287 - protein, 974 aa, Sesamia nonagrioides
MASQSSTAPNDVTTVSDSSGLASLDLVQCSDCLKFFKKRGLRIHRSKCHRGLLVSNHTTVTDSNSLPNIQSTNANTSSPLCQILNKLKKSLPILKRVPRGARRYVASSLSSIIKEVVDKNDSSGWERLLTFTYKTLNVSQASQAPRSSLTQKVKNNCSPNFRLALDNIKDIGFKPHKISKKIESKFDEGDIRGAANLLFSSDVVAPCTPGTYAALLSKHPLPAATSRLPDGPDPSEPTPVATSEDVRAAIMSFRRGSAGGLDGLTPQHLKDLISGVTGDVGTALLEDLTRLVNLMISGKVCEHIVDVLYGANLCALTKKDGGIRPIAVGNTIRRVVSKICCRHYLPLLEQEFQPRQLGFGTKGGCEAAVHAVRTFLEHSKGEVLLKVDVKNAFNSIDRGALLTQVKKIIPGAFPYLWQCYNKPTCLVYNGQLINSAVGCQQGDPLGPAIFSLAIHPLIKDLASKFNVWYLDDGTLGGDAESVLSDLEKIIQYFDDIGLELNFAKCELYFCQNVSQQLRDKINSKFKFLAPNIKIIDGQSLRLLGAPVLEEAFTKFVEDQILLFNESSSRLGDINPHMAYSIIKFCLFVPKTTYALRCTPLWTNNQLLSLLDDNIRETITKIFNCFLSDRSWDQATLPIRHGGLGIRKISSIALPAFLSSANGTSNLVGKILSPSLCDVEVTGLTEASDAWCDAAGPNSHPPLNLASQRQWDEPLCMLVRNYLLESADNNAGRSRLLASCEPESGYWLNAIPCPNVGTLLERTTFSLAVSLRIGARTNEPHRCRCGGDVDPLGHHGLACRRSAGRFSRHAALNDVIRRALASAGVPAVLEPAGIIRDDGKRPDGMTLIPWKNGRSVVWDATCVDTVAQSHLPATARRAGAAAAAAEVIKRRKYAALSEPYIFVPFAVETLGPWGAEARQFFKEISARLIDVSGDRRAGAHFGQRLSLAIQRGNAASLLGTLPGDRSDLGSIFYIL

SEQ ID NO: 16288 - protein, 974 aa, Sesamia nonagrioides
MASQSSTAPNDVTTVSDSSGLASLDLVQCSDCLKFFKKRGLRIHRSKCHRGLLVSNHTTVTDSNSLPNIQSTNANTSSPLWQILNKLKKSLPILKRVPRGARRYVASSLSSIIKEVVDKNDSSGWERLLTFTYKTLNVSQASQAPRSSLTQKVKNNCSPNFRLALDNIKDIGFKPHKISKKIESKFDEGDIRGAANLLFSSDVVAPCTPGTYAALLSKHPLPAATSRLPDGPDPSEPTPVATSEDVRAAIMSFRRGSAGGLDGLTPQHLKDLISGVTGDVGTALLEDLTRLVNLMISGKVCEHIVDVLYGANLCALTKKDGGIRPIAVGNTIRRVVSKICCRHYLPILEQEFQPRQLGFGTKGGCEAAVHAVRTFLEHSKGEVLLKVDVKNAFNSIDRGALLTQVKKIIPGAFPYLWQCYNKPTCLVYNGQLINSAVGCQQGDPLGPAIFSLAIHPLIKDLASKFNVWYLDDGTLGGDAESVLSDLEKIIQSFDDIGLELNFAKCELYFCQNVSQQLRDKINSKFKFLAPNIKIIDGQSLRLLGAPVLEEAFTKFVEDQILLFNESSSRLGDINPHMAYSIIKFCLFVPKTTYALRCTPLWTNNQLLSLLDDNIRETITKIFNCFLSDRSWDQATLPIRHGGLGIRKISSIALPAFLSSANGTSNLVGKILSPSLCDVEVTGLTEASDAWCDAAGPNSHPPLNLASQRQWDEPLCMLVRNYLLESADNNAGRSRLLASCEPESGYWLNAIPCPNVGTLLERTTFSLAVSLRIGARTNEPHRCRCGGDVDPLGHHGLACRRSAGRFSRHAALNDVIRRALASAGVPAVLEPAGIIRDDGKRPDGMTLIPWKNGRSVVWDATCVDTVAQSHLPATARRAGAAAAAAEVIKRRKYAALSEPYIFVPFAVETLGPWGAEARQFFKEISARLVDVSGDLRAGAHFGQRLSLAIQRGNAASLLGTLPGDRSDLGSIFYIL

SEQ ID NO: 16289 - protein, 974 aa, Sesamia nonagrioides
MASQSSTAPNDVTTVSDSSGLASLDLVQCSDCLKFFKKRGLRIQRSKCHRGLLVSNHTTVTDSNSLPNIQSTNANTSSSLWQILNKFKKSLPILKRVPRGARRYVASSLSSIIKEVVDKNDSSGWERLLTFTYKTLNVSQASQAPRSSLTQKVKNNCSPNFRLALDNIKDVGFKPHKISKKIESKFDEGDIRGAANLLFSSDVVAPCTPGTYAALLSKHPLPAATSRLPDGPDPSEPTPVATSEDVRAAIMSFRRGSAGGLDGLTPQHLKDLISGVTGDVGTALLKDLTRLVNLMISGKVCEHIVDVLYGANLCALTKKDGGIRPIAVGNTIRRVVSKICCRHYLPLLEQEFQPRQLGFGTKGGCEAAVHAVRTFLEHSKGEVLLKVDVKNAFNSIERGALLTQVKKIIPGAFPYLWQCYNKPTCLVYNGQLINSAVGCQQGDPLGPAIFSLAIHPLIKDLASKFNVWYLDDGTLGGDAESVLSDLEKIIQYFDDIGLELNFAKCELYFCQNVSQQLRDKINSKFKFLAPNIKIIDGQSLRLLGAPVLEEAFTKFLEDQILLFNESSSRLGDINPHMAYSIIKFCLFVPKTTYALRCTPLWTNNQLLSLLDDNIRETITKIFNCFLSDRSWDQATLPIRHGGLGIRKISSIALPAFLSSANGTSNLVGKILSPSLCDVEVTGLTEASDAWCDAAGPNSHPPLNLASQRQWDEPLCMLVRNYLLESADNNAERSRLLASCEPESGYWLNAIPCPNVATLLERTTFSLAVSLRIGARTNEPHRCRCGGDVDPLGHHGLACRRSAGRFSRHAALNDVIRRALASAGVPAVLEPAGIIRDDGKRPDGMTLIPWKNGRSVVWDATCVDTVAQSHLPATARRAGAAAAAAEVIKRRKYAALSEPYIFVPFAVETLGLWGAEARQFFKEISARLIDVSGDRRAGAHFGQRLSLAIQRGNAASLLGTLPGDRSDLGSIFYIL

SEQ ID NO: 16290 - protein, 974 aa, Sesamia nonagrioides
MASQSSTAPNDVTTVSDSSGLASLDLVQCSDCLKFFKMRGLRIHQSKCHRGLLVSNHTTVTDSNSLPNIQSTNANTSSPLWQILNKLKKSLPLLKRVPRGARRYVASSLSSIIKEVVDKNDSSGWERLLTFTYKTLNVSQASQAPRSSLTQKVKNNCSPNFRLALDNIKDIGFKPHKISKKIESKFDEGDIRGAANLLFSSDVVAPCTPGTYAALLSKHPLPAATSRLPDGPDPSEPTPVATSEDVRAAIMSFRRGSAGGLDGLTPQHLKDLISGVTGDVGTALLEDLTRLVNLMISGKVCEHIVDVLYGANLCALTKKDGGIRPIAVGNTIRRVASKICCRDYLPLLEQEFQPRQLGFGTRGGCEAAVHAARTFLEHSKGEVLLKVDVKNAFNSIDRGALLTQVKKFIPGAFPYLWQCYNKPTCLVYNGQLINSAVGCQQGDPLGPAIFSLAIHPLIKDLASKFNVWYLDDGTLGGDAESVLSDLEKIIQYFDDIGLELNFAKCELYFCQNVSQQLRDKINSKFKFLAPNIKIIDGQSLRLLGAPVLEEAFTKFVEDQILLFNESSSRLGDINPHMAYSIIKFCLFVPKTTYALRCTPLWTNNQLLSLLDDNIKDTITKIFNCFLSDRSWDQATLPIRHGGLGIRKISSIALPAFLSSANGTSNLVGKILSPSLCDVEVTGLTEASDAWCDAAGPNSHPPLNLASQRQWDEPLCMLVRNYLLESADNNAERSRLLASCEPESGYWLNAIPCPNVGTLLERTTFSLAVSLRIGARTNEPHRCRCGGDVDHLGHHGLACRRSAGRFSRHAALNDVIRRALASAGVPGVLEPAGIIRDDGKRPDGMTLIPWKNGRSVVWDATCVDTVAQSHLPATARRAGAAAAAAEVIKRRKYAALSEPYIFVPFAVETLGPWGAEARQFFKEISARLIDVSGDRRAGAHFGQRLSLAIQHGNAASLLGTLPGDRSDLGSIFYIL

SEQ ID NO: 16291 - protein, 969 aa, Ypsolopha scabrella
MTTPQRQSVAVPSTSAVQHSQATSAGDLVQCPQCPQPTLLKGQRGLKIHTGKVHKQNKNQQQIECPDVSTTDILNTTPFWQEISHFKNNLPLVKRIPRGARNTVAASLSSCIKNAVDKNDYDSWRHLLTFPFRSLHVPKSNNDGSLTQKIKKNCLSALNPNTDSTKKKHHTYNLSRIIENKFGVGDIRGAAQLLFSSDAVAPDTPETLLALKLKHPPPAATLRLPDPPHFSDPTPQATAEDVQAAIMSFKSGSAGGLDGLTPQHLKDLICNATGDTGRALLEDLTGLINLMLSGKVCCQITDILYGANLCALIKKDGGVRPIAVGNTIRRVASKICCHYLLPQLSSKFQPVQLGFGSKGGCEAAVHAARTYLKRGGGEVLLKVDLKNAFNSVDRSTLLSQIKENTPQIYNYMHQCYGSPSKLIYKNHLIESAVGCQQGDPLGPAIFSLAIHPIITSLNSKFNVWYLDDGTIGGDATTVLEDLKKMIEEFELTGLTLNSSKCELYISDSIDENLKNDIISKFNNVAPDIKVLTKASLRLLGAPILDDAIPDYVRDQISKFRESSSRLTEISPHMALFIIRYCMFVPKFTYALRCTPLWQHDSLLNTLDDIVKNTMTNIINCPLDERSWTQDTLPVRMGGLGIRKISSVALPAFLSTAYSSRDLFEKLINSSLGDVEVTGLTEARNAWSHACPNQNSPFALHSQKLWDEPLCRQVQEHLLNTATNAADRARLLATSEPESGYWLNALPSPNIGTLLDRTTFSLAIGLRLGVNLNEPHRCRCGERVHRLGHHGLSCQRSAGRLPRHASINDIIRRALASVNVPAILEPNGLSRDDGKRPDGMSLIPWKNGRSLVWDATCVDTVAPSHLQVTSSQAGMAAASAEEAKRRKYVSLGVGYIFVPFGIETLGPWGPGAWQLYKELSSRLGDVSGDPRAGAYLGQRIGLAIQRGNAASILGTLPRDDSDFGSIFYLL

SEQ ID NO: 16292 - protein, 969 aa, Ypsolopha scabrella
MTTPQRQSVAVPSTSAVQHSQAASAGDLVQCPQCPQPTLLKGQRGLKIHTGKVHKQNKNQQQIECPDVSTTDILNTTPFWQEISHFKNNLPLVKRIPRGARNTVAASLSSCIKNAVDKNDYDSWRHLLTFPFRSLHVPKSNNDGSLTQKIKKNCLSALNPNTDSTKKKHHTYNLSRIIDNKFGVGDIRGAAQLLFSSDAVAPDTPETLLALKLKHPPPAATLRLPDPPHFSDPTPQATAEDVQAAIMSFKSGSAGGLDGLTPQHLKDLICNATGDTGRALLEDLTGLINLMLSGKVCCQITDILYGANLCALIKKDGGVRPIAVGNTIRRVASKICCHYLLPQLSSKFQPVQLGFGSKGGCEAAVHAARTYLKRGGGEVLLKVDLKNAFNSVDRSTLLSQIKENTPQIYNYMHQCYGSPSKLIYKNHLIESAVGCQQGDPLGPAIFSLAIHPIITSLNSKFNVWYLDDGTIGGDATTVLEDLKKMIEEFELIGLTLNSSKCELYISDSIDENLKNDIISKFNNVAPDIKVLTKASLRLLGAPILDDAIPDYVRDQISKFRESSSRLTEISPHMALFIIRYCMFVPKFTYALRCTPLWQHDSLLNTLDDIVKNTMTNIINCPLDERSWTQATLPVRMGGLGIRKISSVALPAFLSSAYSSRDLFEKLINSSLGDVEVTGLTEARNAWSHACPNQNSPFTLHSQKLWDEPLCRQVQEHLLNTATNAADRARLLATSEPESGYWLNALPSPNIGTLLDRTTFSLAIGLRLGVNLNEPHRCRCGERVDRLGHHGLSCQRSAGRLPRHASINDIIRRALASVNVPAILEPNGLSRDDGKRPDGMSLIPWKNGRSLVWDATCVDTVAPSHLQVTSSQAGTAAASAEEAKRRKYVSLGVGYIFVPFGVETLGPWGPGARQLYKELSSRLVNVSGDPRAGAYLGQRIGLAIQRGNAASILGTLPRDDSDFGSIFYLL

SEQ ID NO: 16293 - protein, 969 aa, Ypsolopha scabrella
MTTPQRQSVAVPSTSAVQHSQAASAGDLVQSPQCPQPTLLKGQRGLKIHTGKVHKQNKNQQQIECPDVSTTDILNTTPFWQEISHFKNNLPLVKRIPRGARNTVAAFLSSCIKNAVDKNDYDSWRHLLTFPFRSLHVPKSNNDGSLTQKIKKNCLSALNPNTDSTKKKHHTYNLSRIIENKFGVGDIRGAAQLLFSSDAVAPDTPETLLALKLKHPPPAATLRLPDPPHFSDPTPQATAEDVQAAIMSFKSGSAGGLDGLTPQHLKDLICNATGDTGRALLEDLTGLINLMLSGKVCCQITDILYGANLCALIKKDKGVRPIAVGNTIRRVASKICCHYLLPQLSSKFQPVQLGFGSKGGCEAAVHAARTYLKRGGGEVLLKVDLKNAFNSVDRSTLLSKIKENTPQIYNYMHQCYGSPSKLIYKNHLIESAVGCQQGDPLSPAIFSLAIHPIITSLNSKFNVWYLDDGTIGGDATTVLEDLKKMIEEFELIGLTLNSSKCELYISDSIDENLKNDIISKFNNVAPDIKVLTKASLRLLGAPILDDAIPDYVRDQISKFRESPSRLTEISPHMALFIIRYCMFVPKFTYALRCTPLWQHDSLLNTLDDIVKNTMTNIINCPLDECSWTQATLPVRMGGLGIRKISSVALPAFLSSAYSSRDLFEKLINSSLGDVKVTGLTEARNAWSHACPNQNSPFTLHSQKLWDEPLCRQVQEHLLNTATNAADRARLLATSEPESGYWLNALPSPNIGTLLDRTTFSLAIGLRLGVNLNEPNRCRCGERVDRLGHHGLSCQRSAGRLPRHASINDIIRRALASVNVPAILEPNGLSRDDGKRPDGMSLIPWKNGRSLVWDATCVDTVAPSHLQVTSSQAGTAAASAEEAKRRKYVSLGVGYIFVPFGVETLGPWGPGARQLYKELSSRLVDVSGDPRAGAYLGQRIGLAIQRGNAASILGTLPRDDSDFGSIFYLL

SEQ ID NO: 16294 - protein, 723 aa, Ypsolopha scabrella
MSFKSGSAGGLDGLTPQHLKDLICNATGDTGRALLEDLTGLINLMLSGKVCCQITDILYGANLCALIKKDGGVRPIAVGNTIRRVASKICCHYLLPQLSSKFQPVQLGFGSKGGCEAAVHAARTYLKRGGGEVLLKVDLKNAFNSVDRSTLLSQIKENTPQIYNYMHQCYGSPSKLIYKNHLIESAVGCQQGDPLGPAIFSLAIHPIITSLNSKFNVWYLDDGTIGGDATTVLEDLKKMIEEFELIGLTLNSSKCELYISDSIDENLKNDIISKFNNVAPDIKVLTKASLRLLGAPILDDAIPDYVRDQISKFRESSSRLTEISPHMALFIIRYCMFVPKFTYALRCTPLWQHDSLLNTLDDIVKNTMTNIINCPLDERSWTQATLPVRMGGLGIRKISSVALPAFLSSACSSRDLFEKLINSSLGDVEVTGLTEARNAWSHACPNQNSPFTLHSQKLWDEPLCRQVQEHLLNTETNAADRARLLATSEPESGYWLNALPSPNIGTLLDRTTFSLAIGLRLGVNLNEPHRCRCGERVDRLGHHGLSCQRSAGRLPRHASINDIIRRALASVNVPAILEPNGLSRDDGKRPDGMSLIPWKNGRSLVWDATCVDTVAPSQLQVTSSQAGTAAASAEEAKRRKYVSLGVGYIFVPFGVETLGPWGPGARQLYKELSSRLVDVSGDPRAGAYLGQRIGLAIQRGNAASILGTLPRDDSDFGSIFYLL

SEQ ID NO: 16295 - protein, 966 aa, Ypsolopha scabrella
MTTPQRQSVAVPSTSAVQHSQAASAGDLVQCPQCPQPTLLKGQKGLKIHTGKVHKQNKNQQQIECPDVSTTDILNTTPFWQEISHFKNNLPLVKRIPRGARNTVAASLSSCIKNAVDKNDWRHLLTFPFRSLHVPKSNNDGSLTQKIKKNCLSALNPNTDSTKKKHHTYNLSRIIENKFGVGDIRGAAQLLFSSKAVAPDTPETLLALKLKHPPPAATLRLPDPPHFSDPTPQATAEDVQAAIMSFKSGSAGGLDGLTPQHLKDLICNATGDTGRALLEDLTGLINLMLSGKVCCQITDILYGANLCALIKKDGGVRPIAVGNTIRRVASKICCHYLLPQQSSKFQPVQLGFGSKGGCEAAVHAARTYLKRAGGEVLLKVDLKNAFNSVDRSTLLSQIKENTPQIYNYMHQCYGSPSKLIYKNHLIESAVGCQQGDPLGPAIFSLAIHPIITRLNSKFNVWYLDDGTIGGDATTVLEDLTKMVEEFELIGLTLNSSKCELYISDSIDENLKNDIISKFNNVAPDIKVLTKASLRLLGAPILDDAIPDYVRDQISKFRESSSRLTEISPHMALFIIRYCMFVPEFTYALRCTPLWQHDSLLNTLDDIVKNTMTNIINCPLDERSWTQATLPVRMGGLGIRKISSVALPAFLSSAYSSRDLFEKLINSSLGDVEVTGLTEARNAWSHACPNQNSPFALHSQKLWDEPLCRQVQEHLLNTVTNAADRARLLATSEPESGYWLNALPSPNIGTLLDRTTFSLAIGLRLGVNLNEPHRCRCGEGVDRLGHHGLSCQRSAGRLPRHASINDIIRRALASVNVPAILEPNGLSRDDGKRPDGMSLIPWKNGRSLVWDATCVDTVAPSHLQVTSSQAGTAAASAEEAKRRKYVSLGVGYIFVPFGVETLGPWGPGARQLYKELSSRLVDVSGDPRAGAYLGQRIGLAIQRGNAASILGTLPRDDSDFGSIFYLL

SEQ ID NO: 16296 - protein, 969 aa, Ypsolopha scabrella
MTTPQRQSVAVPSTSAVQHSQAASAGDLVQCPQCPQPTLLKGQRGLKIHTGKVHKQNKNQQQIECPDVSTTDILNTTPFWQEISHFKNNLPLVKRIPRGARNTVAASLSSCIKNALDKNDYDSWRHLLTFPFRSLHVPKSNNDGSLTQKIKKNCLSALNPNTDSTKKKHHTYNLSRIIENKFGVGDIRGAAQLLFSSDAVAPDTPETLLALKLKHPPPAATLRLPDPPHFSDPTPQATAEDVQAAIMSFKSGSAGGLDGLTPQHLKDLICNATGDTGRALLEDLTGFINLMLSGKVCCQITDILYGANLCALIKKDGGVRPIAVGNTIRRVASKICCHYLLPQLSSKFQPVQLGFGSKGGCEAAVHAARTYLKRGGGEVLLKVDLKNAFNSVDRSTLLSQIKENTPQIYNYMHQCYGSPSKLIYKNHLIESAVGCQQGDPLGPAIFSLAIHPIITSLNSKFNVWYLDDGTIGGDATTVLEDLKKMIEEFELIGLTLNSSKCELYISDSIDENLKNDIISKFNNVAPDIKVLTKASLRLLGTPILDDAIPDYVRDQISKFKESSSRLTEISPHMALFIIRYCMFVPKFTYALRCTPLWQHDSLLNTLDDIVKNTMTNIINCPLDERSWTQATLPVRMGGLGIRKISSVALPAFLSSAYSSRDLFEKLINSSLGDVEVTGLTEARNAWSHACPNQNSPFTLHSQKLWDEPLCRQVQEHLLNTATNAADRARLLATSEPESGYWLNALPSPNIGTLLDRTTFSLAIGLRLGVNLNEPHRCRCGERVDRLGHHGLSCQRSAGRLPRHASINDIIRRALASVNVPAILAPNGLSRDDGKRPDGMSLIPWKNGRSLVWDATCVDTVAPSHLQVTSSQAGTVAASAEEAKRCKYVSLGVGYIFVPFGVETLGPWEPGARQLYKELSSRLVDVSGDPRAGAYLGQRIGLAIQRGNAASILGTLPRDDSDFGSIFYLL

SEQ ID NO: 16297 - protein, 970 aa, Ypsolopha scabrella
MTTPQRQSVAVPSTSAVQHSQAASAGDLVQCPQCPQPTLLKGQRGLKIHTGKVHKQKNKNQQQIECPDVSTTDILNTTPFWQEISHFKNNLPLVKRIPRGARNTVAASLSSCIKNAVDKNDYDSWRHLLTFPFRSLHVPKSNNDGSLTQKIKKNCLSALNPNTDSTKKKHHTYNLSRIIENKFGVGDIRGAAQLLFSSDAVAPDTPETLLALKLKHPPPAATLRLPDPPHFSDPTPQATAEDVQAAIMSFKSGSAGGLDGLTPQHLKDLICNATGDTGRALLEDLTGLINLMLSGKVCCQITDILYGANLCALIKKDGGVRPIAVGNTIRRVASKICCHYLLPQLSSKFQPVQLGFGSKGGCEAAVHAARTYLKRGGGEVLLEVDLKNAFNSVDRSTLLSQIKENTPQIYNYMHQCYGSPSKLIYKNHLIESAVGCQQGDPLGPAIFSLAIHPIITSLNSKFNVWYLDDGTIGGDATTVLEDLKKMIEEFELIGLTLNSSKCELYISDSIDENLKNDIISKFNNVAPDIKVLTKASLRLLGAPILDDAIPDYVRDQISKFRESSSRLTEISPHMALFIIRYCMFVPKFTYALRCTPLWQHDSLLNTLDDIVKNTMTNIINCPLDERSWTQATLPVRMGGLGIRKISSVALPAFLSSAYSSRDLFEKLINSSLGDVEVTGLTEARNAWSHACPNQNSPFALHSQKLWDEPLCRQVQEHLLNTATNAADRARLLATSEPESGYWLNALPSPNIGTLLDRTTFSLAIGLRLGVNLNEPHRCLCGERVDRLGHHGLSCQRSAGRLPRHASINDIIRRALASVNVPAILEPNGLSRDDGKRPDGMSLIPWKNGRSLVWDATCVDTVAPSHLQVTSSQAGTAAASAEEAKRRKYVSLGVGYIFVPFGVETLGPWGPGARQLYKELSSRLVDVSGDPRAGAYLGQRIGLAIQRGNAASILGTLPRDDSDFGSIFYLL

SEQ ID NO: 16298 - protein, 966 aa, Luehdorfia chinensis
MSQAARPSYGIGSAAASSQELMQCPECSQPRFFKGQRGLKIHKARSHKPLEVPGNLPRYSSPSHDNLYSKLSFLKCEFSIVKRIPRGARNIVASSLSSCVKNVVNRNDIESWENFLTFSFRILHVAKGREGGGISLTQAIKNNCTDIEKPIDFSNSNFNSVRLTKQNSYNIVKKTESKLNDGDLRGAARLLFSNDTVAPDTPETLFSLRNKHPLPAANSCLPNAPDAFEHAPEATPKEVQTAITSFKNGSAGGLDGLSPQHFKDLLLGATGDTGRALLLDLTRLVNLMLSGKVCKDITNVLYGANLCALKKKDGGIRPIAIGNTIRRIASKVCCKHIQSDLAAMFQPVQLGFGTRGGCEAAVHAARTFLKQSGCEVLLKVDVTNAFNTVDRGALLTQVKEHIPAAYHYLWQCYSSPTKLMYKQHEILSAVGCQQGDPLGPAIFSLAIHPHVKNLHSKFNVWYLDDGTLGGEATTVLNDLDSLISRFESIGLKLNFPKCELFMKDNIPLLEKNQLISKFNALAPNLKIVNSESLRLLGAPVLEDSFQSFVNDQILKFEESSRHLKEINPHMAYALLKFCLFVPNFTYVLRCSTFWMHVPLLNRLDDLIRKTISEILNCSLNDNSWIQATLPIRLGGLGIRKVSSVALPAFLASAHNTLHLVGNIISPSLGEEVSYLAEAKDAWRVKVALDQDFPINPASQRHWDEPLCVQVQKKLFENCGSLTERSRLLASMEKESGYWLNALPSVHIGTMLDKTSFSFAVSLRLGVKINEPHRCRCGKEVDHMGHHGLACQRSAGRIPRHVAINDVIRRALISASVPSVLEPNGIFRDDGKRPDGMTLIPWKNGRTLVWDATCVDTLAPSHVSGTARKAGYAAATAECMKRRKYIALREGYIFMPFGVETLGPWGPDAKLLYKDICSRLVTISGDPRAGSYFGQRISLAIQRGNSASLLGTLPTDGSDLASIFYLV

SEQ ID NO: 16299 - protein, 940 aa, Luehdorfia chinensis
MFATAVFKGQRGLKIHKARSHKPLEVPGNLPRYSSPSHDNLYSKLSFLKCEFSIVKRIPRGARNIVASSLSSCVKNVVNRNDIESWENFLTFSFRILHVAKGREGGGISLTQAIKNNCTDIEKPIDFSNSNFNSVRLTKQNSYNIVKKTESKLNDGDLRGAARLLFSNDTVAPDTPETLFSLRNKHPLPAANSCLPNAPDAFEHAPEATPKEVQTAITSFKNGSAGGLDGLSPQHFKDLLLGATGDTGRALLLDLTRLVNLMLSGKVCKDITNVLYGANLCALTKKDGGIRPIAIGNTIRRIASKVCCKHIQSDLAAMFQPVQLGFGTRGGCEAAVHAARTFLKQSGCEVLLKVDVTNAFNTVDRGALLTQVKEHIPAANHYLWQCYSSPTKLMYKQHEILSAVGCQQGDPLGPAIFSLAIHPHVKNLHSKFNVWYLDDGTLGGEATTVLNDLDSLISRFESIGLKLNFQKCELFMKDNIPLLEKNQLISKFNALAPNLKIVNSESLRLLGAPVLEDSFQSFVNDQILKFEESSRRLKEINPHMAYALLKFCLFVPNFTYVLRCSTFWMHVPLLNRLDDLIRKTISEILNCSLNDNSWIQATLPIRLGGLGIRKVSSVALPAFLASAHNTLHLVGNIISPSLGEEVSYLAEAKDAWRVKVALDQDFPINPASQRHWDEPLCVQVQKKLFENCGSLTERSRLLASVEKESGYWLNALPSVHIGTMLDKTSFSFAVSLRLGVKINEPHRCRCGKEVDHMGHHGLACQRSAGRIPRHAAINDVIRRALISASVPSVLEPNGIFRDDGKRPDGMTLIPWKNGRTLVWDATCVDTLAPSHVSGTARKAGYAAATAECMKRRKYIALREGYIFMPFGVETLGPWGPDAKLLYKDICSRLVTISGDPRAGSYFGQRISLAIQRGNSASLLGTLPTDGGDLASIFYLV

SEQ ID NO: 16300 - protein, 966 aa, Luehdorfia chinensis
MSQAARPSYGIGSAAASSQELMQCPECSQPRFFKGQRGLKIHKARSHKPLEVPGNLPRYSSPSHDNLYSKLSFLKCEFSIVKRIPRGARNIVASSLSSCVKNVVNRNDIESWENFLTFSFRILHVAKGREGGGISLTQAIKNNCTDIEKPIDFSNSNFNSVRLTKQNSYNIVKKTESKLNDGDLRGAARLLFSNDTVAPDTPETLFSLRNKHPLPAANSCLPNAPDAFEHAPEATPKEVQTAITSFKNGSAGGLDGLSPQHFKDLLLGATGDTGRALLLDLTRLVNLMLSGKVCKDITNVLYGANLCALKKKDGGIRPIAIGNTIRRIASKVCCKHIQSDLAAMFQPVQLGFGTRGGCEAAVHAARTFLKQSGCEVLLKVDVTNAFNTVDRGALLTQVKEHIPAAYHYLWQCYSSPTKLMYKQHEILSAVGCQQGDPLGPAIFSLAIHPHVKNLHSKFNVWYLDDGTLGGEATTVLNDLDSLISRFESIGLKLNFPKCELFMKDNIPLLEKNQLISKFNALAPNLKIVNSESLRLLGAPVLEDSFQSFVNDQILKFEESSRHLKEINPHMAYALLKFCLFVPNFTYVLRCSTFWMHVPLLNRLDDLIRKTISEILNCSLNDNSWIQATLPIRLGGLGIRKVSSVALPAFLASAHNTLHLVGNIISPSLGEEVSYLAEAKDAWRVKVALDQDFPINPASQRHWDEPLCVQVQKKLFENCGSLTERSRLLASMEKESGYWLNALPSVHIGTMLDKTSFSFAVSLRLGVKINEPHRCRCGKEVDHMGHHGLACQRSAGRIPRHAAINDVIRRALISASVPSVLEPNGIFRDDGKRPDGMTLIPWKNGRTLVWDATCVDTLAPSHVSGTARKAGYAAATAECMKRRKYIALREGYIFMPFGVETLGPWGPDAKLLYKDICSRLVTISGDPRAGSYFGQRISLAIQRGNSASLLGTLPTDGSDLASIFYLV

SEQ ID NO: 16301 - protein, 1222 aa, Pygocentrus nattereri
MASPRGGDDPRDTSSTLRHGLHELCSVVLHDILNCPCSICTSRPHFLTPEETRREPARGLNPNAAGVRGGTPQSLSDIRRAPSDAQGPVRAPTPQRKGTTTPDPTARDDSVGELDHGVIISLPTDTVFCVLCSQYVGTVLRADNHFKSTHGGVEVRYECGVCRKSSRNHHSISCHVPKCRGLDTPSSGGTTPAVQCEACGRSFKSVTAVSTHERHVHPDVRNRKRIQLARMRKGTTRWTEQEVALLNRLVAEFAGDPDATFLVAERFPGRGYEAVRSKIRRLCIQAQAPGHEVAADPDPTTRLLSPRQSRAVRTGLRERLIHLAESYVDIPGDAHCHVIREWLRGADQIPTLVETAAQSLLADLGPGKARRRPVHRTVGRRTSSRPSRHTSRRLRLAFRQHQLLYAKDRPALAGWILDGRTAARCLIPLEDIERAFRDKWEQREPYRGLGQFLVSDSRGDECFSRRITSRDILDTLSATRNNTALGPDRIGKRALLNWDPQGLKLERILNTWWFTGVIPQCLKHCRTVLLPKSKDETLLADVHNWRPITIGSSLLKLYSRILAERLAEACPLHERQRGFIRAPGCAENVELLRCIMRRSRADRKEVAVVFVDFAKAFDSVSHEHILDVLPQRQVDDHVIGVIRDMYTNVISRVEDGRGGATPEIPIRVGVKQGDPMSPLLFNLALDPLIRTLNELGKGYHLSGRMLVTLAFADDLALVSDTWNGMKVNLQILDAFCELTGLRVQPSKCYGFLRKPIAGDSFTLNDCQAWTVGGSPLNMIGPDESERYLGIRVNPMKGVTTPELQKQYEDWVRRIGRAPLRAYQKLDILRGYTIPRLIYQADHGELGVLALRALDGTTRKAVKKWLHLPLCTTDGLLFAGLKDGGLGLQKLERMVPSIQVRRLHQLAGSTDELVSALICEDPYIVIKFRKLWKRAGGSEDSLPPLGTVRAELNTAGQESPPPMTQRGRINPCNWRNEELQRWAEQPTQGVGVAGFKGMRVSNGWLGNPIGFNQRQYIAALQLRANVYPTLEFKSRGRDGSVAACRRCSAALESSQHILCLCPSVQKSRIDRHNRVCSTLANAAGAAGWTVHRERSFRLPHGRSIRPDLVLTQGQVVLVADVAVCYERTSDTLAEACSRKKDHYKKYGQVIKATMSAGVVKFFGFPVGARGLWHPGNYELLSEMGLSSRSASRLAARLCRTALVGSTRVLRDFYRVPGWLAGRR

SEQ ID NO: 16302 - protein, 971 aa, Neodiprion pinetum
MKEAELMLGNVRFMNLALMPHFPERTQESIKGQRRGQEYKGLVQKYHIELLAAQQQRRSSASSSSLGPDNILGSPSSTPPALVEAEVLSPGSATAEVANRIATDVLASPPRPATDKIMDFLKSLQPCPFSDFEADKLQEIIHSATALGKRSTSRRLELYLREAFPVLPRLVKKHHRNDAQPVSRRRGRRQEYAKVQKFYHKNQRRCLQGILDGVDDFRLPPKEVLEPYWRTIFSSESNVEPPKFIQETTIDDLWNPITYEEIRNSKPPLNTASGPDGLTAKKYRLVPPGILIRVFNLLMWCEDLPSHLCMSLTTMIPKKDGAADPEDFRPISVTSVFTRGFHKILASRLDSRVKLHPSQRAFQAGIDGCRDNVFLMDCIIRDSYMHNNTRYLASIDLTKAFPSVTHQTIFKALRAAGAPPQMVSYVSRFYGKMQTAILGDGWMSDRIRILRGVMQGDPMSPILFNIVMNGLLKQLPSEVSTSFMGTKFNSAAFADDIVFVAETPVGLQHLLDYSDDYLGKCGQSTNIGKSHTLSIVADKKLKKTVVDGNRRFTIRGRHIKPLNRTSEWKYLGIQFTGEGRKKVVLNSLLLPLLERLSKAPLKPQQRLHALKVYLLPRFYHMMALGKVNISELKKSDTVVRRNVRRWLNLPHDVPVGYFHASINEGGLGIPSLRWMAPLHRLNRLNSLLPPEGAFTEPYLIQEINTCKRRLNDHGTYILSNELIKTRWAQQLHASVDGSSLKASAQVQGQHSWIRKTTSFFSGKDYVNFHRIRIGALPTRSRTSRGRYRDRQCRGGCLAPETLNHVLQHCHRTFDARNKRHDAVVAYIGRNLQKQGYDVDYAPEYQTPLGARKPDIVATHGNLGLVIDAQVTSEQRNLAQAYEQKVVKYHTPAIHNAIRDSTGATNVLHIPAILTWRGLWYKDSAEGLCNVGTLNKWDLSVISTRVLLGGINAFNIFNRTTMVRPFVPIDPG

SEQ ID NO: 16303 - protein, 998 aa, Sinella curviseta
MEDEEDSPCPSCQPLTSVQQRTESDWIYCDTCDKCFHGVCEDLTNEKITELGNSEEKWFCSRCRKISETQDTGSICKICHKKFKSKIGVNIHMKRKHPEEHSPQNSDINSNFSSLLMNLKRNTRILRRIPKGARPAAALRLSKTIDEVVNKNSTSAWESLLLFAFTCLQIPTRDPKKSLTSAVKENISSQVTPNMVIGTKKKKSSNNLEEKVKAKVADYDIRGALRLLSSTDTLAPNNESTFQNLLKKHPSPSRDLIFPDDPDPTSAFETNEKDVLAAIKSFPNGSAAGIDGLSPQHLKDLTSRSAGDHGVSLLRQVTKLINLMLTGTVNPAITEFLFGANLCALEKKDGGIRPIAVGSTFRRLASKICCEHVKIEASTYFQPNQYGFATKQGAESIIHATRTFIKTNQYTNFVLVKIDFTNAFNSVERDSFLQEVKTHTPALLPFLWQSYRTPSVLFFGDKTLKSEVGTQQGDPAAPLGFSLAIHPIVKLLSSRLNLWYLDDGVLAGDPDTVLNDLKILISESSKIGLQINPSKCEIYFLNGGSSPSLQTKFEDVLPGLLTVKEGELTLLGSPLLNDGFKHNVEKRFEKLETMLNRVTSLNAHVAYFLIKNCLGVPKLTYTLRTVPLWHMSSLVEDLDTRIKTSVETVLNTRFDEKQWSQASLPISSGGIGIRKISDINLPAFLSSTHGVLSQVSSILQTTVDTCDIAHVTEALELWNEKYDGIIPPIANIQKNWDNVVIKSIMDTKMTFENSRDVARYKALLNKEAGAWLQAVPSKNVGTFLEDGAFRYCIALRLGAKLCKSFTCICGEKVDEYGIHPLSCPRSTGRIPRHACINDIIKRSLNSSGYPAVLEPAGLSRSDGKRPDGATLIPWSKGQCMIWDVTCVDTLAPSHLPATCANPGAAAELACKNKNNKYNLLKDTHIFFAFAVESMGIWSGEAKVLAKSIGKFLISKTGDPRSSHYLTQRISIAIQRGNAASFFGAFSDTKDFEEAFYLS

SEQ ID NO: 16304 - protein, 948 aa, Tuta absoluta
MDSSSQPTNSIANTVCPHCPSSNRLYKGVRGLNLHIRSKHKYIHNTDPEKSSPAIAPEADQSTVPLDFEGLTNLKNNIPVLKRIPKGARSLAAGKLEDLLRECLKSNTKEAWFSLMSFAFTGLRVPEKNINTSLTAKVKRNLDSSCPQPVDHSGARTFNLYRKVEAKVHEGDLGGAARLLVSDCKIAPANEDTLDALRGKHPTPTRPLSFDSPDVSLTPLTVTADDVVRALNTFHTSSASGPDGLRPQHLKECISHSAGNNGTRLLETLTDLCNFLLSGFLNSEVCPFLYGASLCALTKKDGGIRPIAVGSTLRRLVAKLGCRAVRDEMATHLQPHQVGFGTRLGCEAAIHATRTFAMDPDNADCVIVKVDLQNAFNSVERDTMLAEVKEFIPSLYPFLHQCYAIRSNLSFNKSQIPSQVGAQQGDPLGPLIFSLAIHKVVTSLKSKLNVWYLDDGTIGGTCESLTEDVKTLVAGLTKMGLQVNSSKCEFFSCSEEANNRIASFNSLLPGMKELNENTFSLLGAPIFSSAIPSALEDKNRMIAQVREHLGHLSAHVALILFRTCFSLPKLTYVIRTTPTWLFPEEVSLVDCAIRDTLESVINVTLDDNQWRQAALPIRYGGLGIRSIRAVGLPAFIASSNGVADLVANILKLQGKRLSIPFQCNAVEAWRATCPGVDPPLKLESQRAWDDLSCKFSLSELSESLTGPDVARIKAATCPESGAWLQALPSPHLGTHLDDDSLRVAVALRLGCSVCEAHICPCGAPVDSTGHHGLSCVKCAGRFPRHHALNEIIRRALVSANVPCVLEPPGLCRTDGKRPDGLTLIPWNKGRSLLWDATCVSTFAASHLPKTLREAGSAAEFAARQKRIKYAELEQNYLFIPFAVETGGPWGKEAKKFIREIGRRLRDRGCDPRTGAYLVQHISLAIQRGNAAGVMGTFEPGTLRGGLFV

SEQ ID NO: 16305 - protein, 947 aa, Glaucopsyche alexis
MDTSSINSGVACPHCPGSTRRFIGTHGLNIHVSRKHKNLLDRGSSLPVGSNQPSQVIRESLNLDLNTLPDLKRNIRVLKHVPKGARSLAAGKLADLIDDCVTTNTTISWFKLLSFSFTVLRVPENSGASSLTSKVKRNIDSPCPEPTERSYRRPLDLIKRVESKAHEGDLAGAARLLVSDCKIAPTNESTLASLIEKHPAPSRPTGIAPLSAEDSEFSLELSSEDIASAIQSFRSSSASGPDGLRPLHLKELTSLSAGSNGPRLLKSLTRLCNFLLKGSLNSEVIPLLYGATLCALVKKDGGIRPIAIGSTFRRLVAKCACRAVREQMAQHLLPTQLGFGTTLGCEASIHATRTFASNPKNADCVIVKVDLKNAFNAVERDTILTEVKEYIPSLYPFLYQCYATPSHLTYDHHKIPSQVGAQQGDPLGPLIFSLAIHKSIASIKSPLNVWYLDDGTIGGSPETVAEDIQTLCKNLSSIGLQLNPHKCEIFPCGVSAIQKIRMFDTLLPGMKTVNESTFSLLGAPIFPSAVPASLEAKGRMLTQARELLGQLSSHVALTLFRSCFSLPKLTYLIRTAPTWLFPNEVSDLDTTIRSTLEDILNVTLHDHQWQQAVLPVRHGGLGIRSIHSVGLPAFLASSNGVADLVSNILKIQGARCSVPFQHDAESAWCAMFPGTNPPENVDSQRAWDDLSSRCALLKLTASLSGTSLARIKASSCLESGAWLQALPSPQLGTLLDNDTLRVAAALRLGCKVCEPHRCPCGAETDPYGYHGLSCIKAAGRFARHHALNDILRRALVSANVPCALEPPGLSRTDGKRPDGLTLVPWRKGRCLLWDATCVSTFAASHTPSTIRTAGSAAESAARHKRSKYAELERQYLFVPFAVETGGPWCDEAKGLIRELGRRLRDCGNDPRSGAYLVQHVSLAIQRGNAASVMGTFEPGMLRGGLFS

SEQ ID NO: 16306 - protein, 947 aa, Glaucopsyche alexis
MDTSSINSGVACPHCPGSTRRFIGTHGLNIHVSRKHKDLLDRDSSLPVGSNQPSQVIRESLNLDFNTIPDLKRNIRVLKHVPKGARSLAAGKLADLIDDCVTTNTTISWFKLLTFSFTVLRVPENSGASSLTSKVKRNIDSPCPEPTERSYRRPLDLIRRVESKVHEGDLAGAARLLVSDCKIAPTNESTLASLIEKHPAPSRPTGIAPLSAEDSEFSLVLSSEDIASAIQSFRSSSASGPDGLRPLHLKELTSLSAGSNGPRLLKSLTRLCNFLLKGSLNSEVIPLLYGATLCALVKKDGGIRPIAIGSTFRRLVAKCACRAVREHMAAHLLPTQLGFGTTLGCEASIHATRTFASNPKNADCVIVKVDLKNAFNAVERDTILTEVKEYIPSLYPFLYQCYATPSHLTYDHHKIPSQVGAQQGDPLGPLIFSLAIHKSIASIKSPLNVWYLDDGTIGGCPETVAEDIQTLCRNLSSIGLQLNPHKCEIFPCGVSAIQEIRMFDTLLPGMKTVNESTFSLLGAPIFPSAVPASLEAKGRMLTQARELLGQLSSHVALTLFRSCFSLPKLTYLIRTAPTWLFPNEVSDLDTTIRSTLEDILNVTLHDQQWQQAVLPVRHGGLGIRSIHSVGLPAFLASSNGVADLVSNILKIQGARCSVPFQHDAETAWCAMFPGTNPPENVNSQRAWDDLSSRCALLKLTASLSGTSLARIKASSCSESGAWLQALPSPQLGTLLDNDTLRVAAALRLGCKVCEPHRCPCGAETDPYGYHGLSCIKAAGRFARHHALNDILRRALVSANVPCALEPPGLSRTDGKRPDGLTLVPWRKGRCLLWDATCVSTFAASHTPSTIRTAGSAAESAARHKRSKYAELERQYLFVPFAVETGGPWCDEAKGLIRELGRRLRDCGNDPRSGAYLVQHISLAIQRGNAASVMRTFEPGMLRGGLFS

SEQ ID NO: 16307 - protein, 941 aa, Glaucopsyche alexis
MDTSSINSGVACPHCPGSTRRFIGTHGLNIHVSRKHKDLLDRDSSHPVGSNQPSQVIRESLNLDLNTLPDLKRNIRVLKHVPKGARSLAAGKLADLIDDCVTTNTTISWFKLLTFSFTVLRVPENSGASSLTSKVKRNIDSPCPEPTERSYRRPLDLIKRVESKVHEGDLAGAARLLVSDCKIAPTNESTLASLIEKHPAPSRPTGIAPLSAEDSEFSLVSSSEDIASAIQSFRSSSASGPDGLRPLHLKELMSLSAGSNGPRLLKSLTRLCNFLLKGSLNSEVIPLLYGATLCALVKKDGGIRPIAIGSTFRRHVAKCACRAVREHMAAHLLPTQLGFGTTLGCEALIHATRTFASNPKNADCVIVKVDLKNAFNAVERDTILTEVKEYIPSLYPFLYQCYATPSHLTYDHHKIPSQVGAQQGDPLGPLIFSLAIHKSPLNVWYLDDGTIGGCPETVAEDIQTLCRNLSSIGLQLNPHKCEIFPCGVSAIQKIRMFDTLLPGMKTVNESTFSLLGAPIFPSAVPASLEPKGRILTQARELLGQLSSHVALTLFRSCFSLPKLTYLIRTAPTWLFPNEVSDLDTTIRSTLEDILNVTLHDHQWQQAVLPVRHGGLGIRSIHSVGLPAFLASLNGVADLVSNILKIQGARCSVPFQHDAETAWCAMFPSTNPPENVNSQRAWDNLSSRCALLKLTASLSGTSLARIKASSCSESGAWLQALPSPQLGTLLDNDTLRVAAALRLGCKVCEPHRCPCGAETDPYGYHGLSCIKAAGRFARHHALNDILRRALVSANVPCALEPPGLSRTDGKRPDGLTLVPWRKGRCLLWDATCVSTFAASHTPSTIRTAGSAAESAARHKRSKYAELERQYLFVPFAVETGGPWCDEAKGLIRELGRRLRDCGNDPRSGAYLVQHVSLAIQRGNAASVMGTFEPGMLRGALFS

SEQ ID NO: 16308 - protein, 947 aa, Glaucopsyche alexis
MDTSSINSGVACPHCPGSTRRFIGTHGLNIHVSRKHKDLLDRDSSLPVGSNQPSQVIRESLNLDFNTIPDLKRNIRVLKHVPKGARSLAAGKLADLIDDCVTTNTTISWFKLLTFSFTVLRVPENSGASSLTSKVKRNIDSPCPEPTERSYRRPLELIRRVESKVHEGDLAGAARLLVSDCKIAPTNESTLASLIEKHPSPSRPTGIAPLSAEDSEFSLVLSSEDIASAIQSFRSSSASGPDGLRPLHLKELTSLSAGSNGPRLLKSLTRLCNFLLKGSLNSEVIPLLYGATLCALVKKDGGIRPIAIGSTFRRLVAKCTCRAVREHMAAHLLPTQLGFGTTLGCEASIHATRTFASNPKNADCVIVKVDLKNAFNAVERDTILTEVKEYIPSLYPFLYQCYATPSHLTYDHHKIPSQVGAQQGDPLGPLIFSLAIHKSIASIKSPLNVWYLDDGTIGGCPETVAEDIQTLCRNLSSIGLQLNPHKCEIFPCGVSAIQEIRMFDTLLPGMKTVNESTFSLLGAPIFPSAVPASLEAKGRMLTQARELLGQLSSHVALTLFRSCFSLPKLTYLIRTAPTWLFPNEVSDLDTTIRSTLEDILNVTLHDHQWQQAVLPVRHSGLGIRSIHSVGLPAFLASSNGVADLVSNILKIQGARCSVPFQHDAETAWCAMFPGTNSPENVNSQRAWDDLSSRCALLKLTASLSGTSLARIKASSCSESGAWLQALPSPQLGTLLDNDTLRVAAALRLGCKVCEPHRCPCGAETDPYGYHGLSCIKAAGRFARHHALNDILRRALVSANVPCALEPPGLSRTDGKRPDGLTLVPWRKGRCLLWDATCVSTFAASHTPSTIRTAGSAAESAARHKRSKYAELERQYLFVPFAVETGGPWCDEAKGLIRELGRRLRDCGNDPRSGAYLVQHISLAIQRGNAASVMGTFEPGMLRGGLFS

SEQ ID NO: 16309 - protein, 947 aa, Glaucopsyche alexis
MDTSSINSGVACPHCPGSTRRFIGTHGLNIHVSRKHKDLLDRDSSLPVGSNQPSQVIRESLNLDFNTIPDLKRNIRVLKHVPKGARSLAAGKLADLIDDCVTTNTTISWFKLLTFSFTVLRVPENSGASSLTSKVKRNIDSPCPEPTERSYRRPLELIRRVESKVHEGDLAGAARLLVSDCKIAPTNESTLASLIEKHPSPSRPTGIAPLSAEDSEFSLVLSSEDIASAIQSFRSSSASGPDGLRPLHLKELTSLSAGSNGPRLLKSLTRLCNFLLKGSLNSEVIPLLYGATLCALVKKDGGIRPIAIGSTFRRLVAKCACRAVREHMAAHLLPTQLGFGTTLGCEASIHATRTFASNPKNADCVIVKVDLKNTFNAVERDTILTEVKEYIPSLYPFLYQCYATPSHLTYDHHKIPSQVGAQQGDPLGPLIFSLAIHKSIASIKSPLNVWYLDDGTIGGCPETVAEDIQTLCRNLSSIGLQLNPHKCEIFPCGVSAIQEIRMFDTLLPGMKTVNESTFSLLGAPIFPSAVPASLEAKGRMLTQARELLGQLSSHVALTLFRSCFSLPKLTYLIRTAPTWLFPNEVSDLDTTIRSTLEDILNVTLHDHQWQQAMLPVRHGGLGIRSIHSVGLPAFLASSNGVADLVSNILKIQGARCSVPFQHDAETAWCAMFPGTNPPENVNSQRAWDDLSSRCALLKLTASLSGTSLARIKASSCSESGAWLQALPSPQLGTLLDNDTLRVAAALRLGCKVCEPHRCPCGAETDPYGYHGLSCIKAAGRFARHHALNDILRRALVSANVPCALEPPGLSRTDGKRPDGLTLVPWRKGRCLLWDATCVSTFAASHTPSTIRTAGSAAESAARHKRSKYAELERQYLFVSFAVETGGPWCDEAKGLIRELGRRLRDCGNDPRSGAYLVQHISLAIQRGNAASVMGTFEPGMLRGGLFS

SEQ ID NO: 16310 - protein, 947 aa, Glaucopsyche alexis
MDTSSINSGVACPHCSGSTRRFIGTHGLNIHVSRKHKDLLDRDSSLPVGSNQPSQVIRESLNLDFNTIPDLKRNIRVLKHVPKGARSLAAGKLADLIDDCVTTNTTISWFKLLTFSFTVLRVPENSGASSLTSKVKRNIDSPCPEPTERSYRRPLDLIRRVESKVHEGDLAGAARLLVSDCKIAPTNESTLASLIEKHPAPSRPTGIAPLSAEDSEFSLVLSSEDIASAIQSFRSSSASGPDGLRPLHLKELTSLSAGSNGPRLLKSLTRLCNFLLKGSLNSEVIPLLYGATLCALVKKDGGIRPIAIGSTFRRLVAKCACRAVREHMAAHLLPTQLGFGTTLGCEASIHATRTFASNPKNADCVIVKVDLKNAFNAVERDTILTEVKEYIPSLYPFLYQCYATPSHLTYDHHKIPSQVGAQQGDPLGPLIFSLAIHKSIASIKSPLNVWYLDDGTIGGCPETVAEDLQTLCRNLSSIGLQLNPHKCEIFPCGVSAIQEIRMFDTLLPGMKTVNESTFSLLGAPIFPSAVPASLEAKGRMLTQARELLGQLSSHVALTLFRSCFSLPKLTYLIRTAPTWLFPNEVSDLDTTIRSTLEDIINVTLHDHQWQQAVLPVRHGGLGIRSIHSVGLPAFLASSNGVADLVSNILKIQGARCSVPFQHDAETAWCAMFPGTNPPENVNSQRAWDDLSSRCALLKLTASLSGTSLARIKAYSCSESGAWLQALPSPQLGTLLDNDTLRVAAALRLGCKVCEPHRCPCGAETDPYGYHGLSCIKAAGRFARHHALNDILRRALVSANVPCALEPPGLSRTDGKRPDGLTLVPWRKGRCLLWDATCVSTFAASHTPSTIRTAGSAAESAARHKRSKYAELERQYLFVPFAVETAGPWCDEAKSLIRELGRRLRDCGNDPRSGAYLVQHISLAIQRGNAASVMGTFEPGMLRGGLFS

SEQ ID NO: 16311 - protein, 952 aa, Plebejus argus
MDTHNCNQGIPCPHCPCSSRRFNGVHGLNIHISRKHKNLLPQPSSDLSSISTSLGGTTQPNQVSNDPFDFDSLSKFKRSVRVLKHVPKGARSLAAGKLADLMDACVDKNTKAAWYEFLTFAFSALRVPDQSSKLSLTTKVKHNIYSSCPLPCEIPTRQPFNVCKRVEMKVHEGDLAGAARLLVSDCKIAPADTSTLESLIHKHPTPSRSLSIPPLSSVGPIVPLVLSPSDVVSAIQSFNNSSASGPDGIRPQHLKELLSPSAGNNSSRLLKSLVNLCNFLLQGELNPDVAPHLYGATLCALLKKDGGIRPIAVGSTLRRLVAKCACRAVREPMASHLQPTQIGFGTALGCEAAIHATRAFALSPANSDCVIVKVDLKNAFNSVERDSILNEVKELIPSLYPFLHQCYASPSHLTYDSHKISSQVGAQQGDPLGPLIFSLAIHKKISSIKSPLNVWYLDDGTIAGSPEVVAEDIRTLTSSLQELGLEINTKKCEIFACKDTAEHKITTFDSLLPGIKTLNKSTFSLLGAPIFPDAIPSTLESKGKILTQVRELLTNVSPHIALILYRSCFSLPKLTYVIRTAPTWRFPKDVCQLDNIIRATLEEILNISLDDLQWQQAALPVKHGGLGIRSIGSVGLPAFLASSNGVAELVTNILKNQGTRCSIPFLTDAETAWQELYPGINPPEDVTFQRAWDDLSSRYSLTHMLNSRSESALARIKAAGCAESGAWLHALPSPHLGTLLDDNTLRVAVALRLGCEVCEPHRCPCGTEADVYGHHGLSCVKAAGRFSRHHVLNDIIRRALVSADVPCVLEPPGLSRSDGKRPDGLTLIPWEKGRCLLWDATCVSTYAASHISGTSRIAGSAAEYAARQKHNKYADLEQKYLFVPFAVETGGTWCNEAKAFVRQLGRRLRESGNDPRSGAYLAQHVSLAIQRGNAASVMGTFEHGTLRGGLFD

SEQ ID NO: 16312 - protein, 947 aa, Glaucopsyche alexis
MDTSSINSGVACPHCPGSTRRFIGTHGLNIHVSRKHKDLLDRDSSLPVGSNQPSQVIRESLNLDFNTIPDLKRNIRVLKHVPKGARSLAAGKLADLIDDCVTTNTTISWFKLLTFSFTVLRVPENSGASSLTSKVKRNIDSPCPEPTERSYRRPLDLIRRVESKVHEGDLAGAARLLVSDCKIAPTNESTLASLIEKHPAPSRPTGIAPLSAEDSEFSLVLSSEDIASAIQSFRSSSASGPDGLRPLHLKELTSLSAGSNGPRLLKSLTRLCNFLLKGSLNSEVIPLLYGATLCALVKKDGGIRPIAIGSTFRRLVAKCACRAVREHMADHLLPTQLGFGTTLGCEASIHATRTFASNPKNADCVIVKVDLKNAFNAVERDTILTEVKEYIPSLYPFLYQCYATPSHLTYDHHKIPSQVGAQQGDPLGPLIFSLAIHKSIASIKSPLNVWYLDDGTIGGCPETVAEDIQTLCRNLSSIGLQLNPHKCEVFPCGVSAIQEIRMFDTLLPGMKAVNESTFSLLGAPIFPSAVPASLEGKGRMLTQARELLGQLSSHVALTLFRSCFSLPKLTYLIRTAPTWLFPNEVSDLDTTIRSTLEDILNVTLHDHQWQQAVLPVRHGGLGIRSIHSVGLPAFLASSNGVADLVSNILKIQGARCSVPFQHDAETAWCAMFPGTNPPENVDSQRAWDDLSSRCALLKLTASLSGTSLARIKASSCSESGAWLQALPSPQLGTLLDNDTLRVAAALRLGCKVCEPHRCPCGAETDPYGYHGLSCIKAAGRFARHHALNDILRRALVSANVPCALEPPGLSRTDGKRPDGLTLVPWRKGRCLLWDATCVSTFAASHTPSTIRTAGSAAESAARHKRCKYAELERQYLFVPFAVETGGPWCDEAKGLIRELGRRLRDCGNDPRSGAYLVQHVSLAIQRGNAASVMGTFEPGMLRGGLFS

SEQ ID NO: 16313 - protein, 952 aa, Aricia agestis
MSMDVNNSSQGIECPHCPCSSRRFNGVHGLNIHISRKHKNLLPQPSSDLSCISPSPGSSAQPNHTDPYDFDSLSKFKRSVRVLKHVPKGARSLAAGKLADLIDACVDKNTKAAWYDFLTFAFSALRVPDQTSKLSLTTKVKHNIYSSCPLPCEIPTRQPFNLCKRVEMKVHEGDLAGAARLLVSDCKIAPADTSTVESLIQKHPTPSRSLSIPPLSSVELLSPLVLSPSDVVSAIQSFSNSSASGPDGIRPQHLKELLSPSAGDNASRLLKSLANLCNFLLQGELNPDVAPYLYGATLCALLKKDGGIRPIAVGSTFRRLVAKCACRAVREPMASHLQPIQIGFGTALGCEAAIHATRAFALNSANSDCVIVKVDIKNAFNSVERDSILNEVKDLIPSLYPFLHQCYASPSHLTYDSHKILSQVGAQQGDPLGPLIFSLAIHKKISSIKSPLNVWYLDDGTIGGSPAVVAEDIRTLTSSLKELGLEINTNKCELFACGEIDLPIITTFDSLLPGIKTLNKSTFSLLGAPIFTNGIPLALENKSKTLTQVRELLGNLSSHVALILYRCCFSLPKLTYIIRTAPTWQFHMEVSKIDAIIRSTLEDILNISLNDLQWQQAALPVKYGGLGIRTMGSVGLPAFLASSNGVANLVTSILKVQGARCSIPFMNDAENAWHESYPGINPPVDVTSQRAWDELCSRSTLVQISNSFSETALARIKAASCPESGAWLQALPSPHLGTLLDDNTLRVAVALRLGCEVCEPHRCPCGSEADAYGHHGLSCFKAAGRFARHHALNDILRRALVSADVPCVLEPPGLSRSDGKRPDGLTLIPWEKGRCLLWDATCVSTYAASHISGTARTAGSAAEYAARQKHTKYADLGQKYLFVPFAVETGGTWCNEAKAFVRQLGRRLRESGKDPRSGAYLAQHVSLAIQRGNAASVMGTFEHGTLRGGLFD

SEQ ID NO: 16314 - protein, 952 aa, Plebejus argus
MDTHNCNQGIPCPHCPCSSRRFNGVHGLNIHISRKHKNLLPQPSSDLSSISTSLGGTTQPNQVSNDPFDFDSLSKFKRSVRVLKHVPKGARSLAAGKLADLMDACVDKNTKAAWYEFLTFAFSALRVPDQSSKLSLTTKVKHNIYSSCPLPCEIPTRQPFNVCKRVEMKVHEGDLAGAARLLVSDCKIAPADTSTLESLIHKHPTPSRSLSIPPLSSVGPIVPLVLSPSDVVSAIQSFNNSSASGPDGIRPQHLKELLSPSAGNNGSRLLKSLVNLCNFLLQGELNPDVAPHLYGATLCALLKKDGGIRPIAVGSTLRRLVAKCACRAVREPMASHLQPTQIGFGTALGCEAAIHATRAFALSPANSDCVIVKVDLKNAFNSVERDSILNEVKELIPSLYPFLHQCYASPSHLTYDSHKISSQVGAQQGDPLGPLIFSLAIHKKISSIKSPLNVWYLDDGTIAGSPEVVAEDIRTLTSSLQELGLEINTKKCEIFACKDTAEHKITTFDSLLPGIKTLNKSTFSLLGAPIFPDAIPSTLESKGKILTQVRELLTNVSPHIALILYRSCFSLPKLTYVIRTAPTWRFPKEVCQLDNIIRATLEEILNISLDDLQWQQAALPVKHGGLGIRSIGSVGLPAFLASSNGVAELVTNILKNQGTRCSIPFLTDAETAWQELYPGINPPEDVTFQRAWDDLSSRYSLTHMLNSRSESALARIKAAGCAESGAWLHALPSPHLGTLLDDNTLRVAVALRLGCEVCEPHRCPCGTEADVYGHHGLSCVKAAGRFSRHHVLNDIIRRALVSADVPCVLEPPGLSRSDGKRPDGLTLIPWEKGRCLLWDATCVSTYAASHISGTSRIAGSAAEYAARQKHNKYADLEQKYLFVPFAVETGGTWCNEAKAFVRQLGRRLRESGNDPRSGAYLAQHVSLAIQRGNAASVMGTFEHGTLRGGLFD

SEQ ID NO: 16315 - protein, 947 aa, Glaucopsyche alexis
MDTSSINSGVACPHCPGSTRRFIGTHGLNIHVSRKHKDLLDRDSSLPVGSNQPSQVIRDSLNLDFNTIPDLKRNIRILKHVPKGARSLAAGKLADLIDDCVTTNTTTSWFKLLTFSFTVLRVPENSGASSLTSKVKRNIDSPYPEPTERSYRRPLDLIRRVESKVHEGDLAGAARLLVSDCKIAPTNESTLASLIEKHPAPSRPTGIAPLSAEDSEFSLVLSSEDIASAIQSFRNSSASGPDGLRPLHLKELTSLSAGSNGPRLLKSLTRLCNFLLKGSLNTEVIPLLYGATLCALVKKDGGIRPIAIGSTFRRLVAKCACRAVREHMAAHLLPTQLGFGTTLGCEASIHATRTFASNPKNADCVIVKVDLKNAFNAVERDTILTEVKEYIPSLYPFLYQCYATPSHLTYDHHKIPSQVGAQQGDPLGPLIFSLAIHKSIASIKSPLNVWYLDDGTIGGCLETVAEDIQTLCRNLSSIGLQLNPHKCEIFPCGVSAIQEIRMFDTLLPGMKTVNESTFSLLGAPIFPSAVPASLEAKGRMLTQARELLGQLSSHVALTLFRSCFSLPKLTYLIRTAPTWLFPNEVSDLDTTIRSTLEDILNVTLHDHQWQQAVLPVRHGGLGIRSIHSVGLPAFLASSNGVADLVSNILKIQGARCSVPFQHDAETAWCAMFPGTNPPENVDSQRAWDDLSSRCALLKLTASLSGTSLARIKASSCSESGAWLQALPSPQLGTLLDNDTLRVAAALRLGCKVCEPHRCPCGAETDPYGYHGLSCIKAAGRFARHHALNDILRRALVSANVPCALEPPGLSRTDGKRPDGLTLVPWRKGRCLLWDATCVSTFAASHTPSTIRTGGSAAESAARHKRSKYAELERQYLFVPFAVETGGPWCDEAKGLIRELGRRLRDCGNDPRSEAYLVQHVSLAIQRGNAASVMGTFEPGMLRGGLFS

SEQ ID NO: 16316 - protein, 928 aa, Glaucopsyche alexis
MDTSSINSGVACPHCPGSTRRFIGTHGLNIHVSRKHKDLLDRDSSLPVGSNQPSQVIRESLNLDLNTLPDLKRNIRVLKHVPKGARSISAGKLSDLIDDCVTTNSTISWFKLLTFSFTVLRVPENSGASSLTSKVKRNIDSTCPEPTERSYRRPLDLIKRVESKAHEGDLAGAARLLVSDCKIAPTNESTLASLIEKHPAPSRPTGIAPLSAEDSEFSLVLSSEDIASAIQSFRSSSASGPDGLRPLHLKELTSLSAGSNGPRLLKSLTRLCNFLLKGSLNSEVIPLLYGATLCALVKKDGGIRPIAIGSTFRRLVAKCACRAVREHMAAHLLPTQLGFGTTLGCEASIHATRTFASNPKNADCVIVKVDLKNAFNAVERDTILTEVKECIPSLYPFLYQCYATPSHLTYDHHKIPSQVGAQQGDPLGPLIFSLAIHKSIASIKSPLNVWYLDDGTIGGCPETVAEDIQTLCRNLSSIGLQLNPHKCEIFPCGVSAIQKIRMFGTLLPGIKTVNESTFSLLGAPIFPSAVPASLEAKGRMLTQARELLGQLSSHVALTLFRSCFSLPKLTYLIRTAPTWLFPNEVSDLDTTIRSTLEDTLNVTLHDHQWQQAVLPVRHGGLGIRSIHSVGLPAFLASSNGVADLVSNILKIQGARCSVPFQHDAETAWCAMFPGTNPPENIDSQRAWDDLSSRCALFKLTASLSGTSLARIKASCCSESGAWLQALPSPQLGTLLDNDTLRIAAALRLGCKVCEPHRCPCGAETDPFGYHGLSCIKAAGRFARHHALNYILRRALVSANVPCALEPPGLSRTDGKRPDGLTLVPWRKGRCLLWDATCVSTFAASHTPSTIRTAGSAAESAARHKRSKYAELERQYLFVPFAVETGGPWCDEAKGLIRELGRRLRDCGPPLRGVPGSACFPGHSARQCG

SEQ ID NO: 16317 - protein, 947 aa, Glaucopsyche alexis
MDTSSINSGVACPHCPGSTRSFIGTHGLNIHVSRKHKDLLDRDSSLPVGSNQPSQVIRDSLNLDFNTIPDLKRNIRVLKHVPKGARSLAAGKLADLIDDCVTTNTTISWFKLLTFSFTVLRVPENSGASSLTSKVKRNIDSPCPEPTERSYRRPLDLIRRVESKVHEGDLAGAARLLVSDCKIAPTNESTLASLIEKHPAPSRPTGIAPLSAEDSEFSLVLSSEEIASAIQSFRSSSASGPDGLRPLHLKELTSLSAGSNGPRLLESLTRLCNFLLKGSLNSEVIPLLYGATLCALVKKDGGIRPIAIGSTFRRLVAKCACRAVREHMAAHLLPTQLGFGTTLGCEASIHATRTFASNPKNADCVIVKLDLKNAFNAVERDTILTEVKEYIPSLYPFLYQCYATPSHLTYDHHKIPSQVGAQQGDPLGPLIFSLAIHKSIASIKSPLNVWYLDDGTIGGCPETVAEDIQTLCRNLSSIGLQLNPHKCEIFPCGVSVIQEIRMFDTLLPGMKTVNESTFSLLGAPIFPSAVPASLEAKGRMLTQARELLGQLSSHVALTLFRSCFSLPKLTYLIRTAPTWLFPNEVSDLDTTIRSTLEDILNVTLHDHQWQQAVLPVRHGGLGIRSIHSVGLPAFLASSNGVADLVSNILKIQGARCSVPFQHDAETAWCAMFPGTNPPENVDSQRAWDDLSSRCALLKLTASLSGTSLARIKASSCSESGAWLQALPSPQLGTLLDNDTLRVAAALRLGCKVCEPHRCPCGAETDPYGYHGLSCIKAAGRFARHHALNDILRRALVSANVPCALEPPGLSRTDGKRPDGLTLVPWRKGRCLLWDATCVSTFAASHTPSTIRTAGSAAESAARHKRSKYAELERQYLFVPFAVETGGPWCDEAKGLIRELGRRLRDCGNDPRSGAYLVQHVSLAIQRGNAASVMGTFEPGMLRGGLFS

SEQ ID NO: 16318 - protein, 952 aa, Aricia agestis
MSMDVNNSSQGIECPHCPCSSRRFNGVHGLNIHISRKHKNLLPQPSSDLSCISPSPGSSAQPNHTDPYDFDSLSKFKRSVRVLKHVPKGARSLAAGKLADLIDACVDKNTKAAWYDFLTFAFSALRVPDQTSKLSLTTKVKHNIYSSCPLPCEIPTRQPFNLCKRVEMKVHEGDLAGAARLLVSDCKIAPADTSTVESLIQKHPTPSRSLSIPPLSSVELLSPLVLSPSDVVSAIQSFSNSSASGPDGIRPQHLKELLSPSAGDNASRLLKSLANLCNFLLQGELNSDVAPYLYGATLCALLKKDGGIRPIAVGSTFRRLVAKCACRAVREPMASHLQPIQIGFGTALGCEAAIHATRAFALNSANSDCVIVKVDIKNAFNSVERDSILNEVKDLIPSLYPFLHQCYASPSHLTYDSHKILSQVGAQQGDPLGPLIFSLAIHKKISSIKSPLNVWYLDDGTIGGSPAVVAEDIRTLTSSLKELGLEINTNKCELFACGEIDLPIITTFDSLLPGIKTLNKSTFSLLGAPIFTNGIPLALENKSKTLTQVRELLGNLSSHVALILYRCCFSLPKLTYIIRTAPTWQFHMEVSKIDAIIRSTLEDILNISLNDLQWQQAALPVKYGGLGIRTMGSVGLPAFLASSNGVANLVTSILKVQGARCSIPFMNDAENAWHESYPGINPPVDVTSQRAWDELCSRSTLVQISNSFSETALARIKAASCPESGAWLQALPSPHLGTLLDDNTLRVAVALRLGCEVCEPHRCPCGSEADAYGHHGLSCFKAAGRFARHHALNDILRRALVSADVPCVLEPPGLSRSDGKRPDGLTLIPWEKGRCLLWDATCVSTYAASHISGTARTAGSAAEYAARQKHTKYADLGQKYLFVPFAVETGGTWCNEAKAFVRQLGRRLRESGKDPRSGAYLAQHVSLAIQRGNAASVMGTFEHGTLRGGLFD

SEQ ID NO: 16319 - protein, 947 aa, Glaucopsyche alexis
MDTSSINSGVACPHCPGSTRRFIGTHGLNIHVSRKHKDLLDRDSSLPVGSNQPSQVIRDSLNLDFNTIPDLKRNIRVLKHVPKGARSLAAGKLADLIDDCVTTNTTISWFKLLTFSFTVLRVPENSGASSLTSKVKRNIDSPCPEPTERSYRRPLDLIRRVESKVHEGDLAGAARLLVSDCKIAPTNESTLASLIEKHPAPSRPTGIAPLSAEDSEFSLVLSSEDIASAIQSFRSSSASGPDGLRPLHLKELTSLSAGSHGPRLLKSLTRLCNFLLKGSLNSEVIPLLYGATLCALVKKDGGIRPIAIGSTFRRLVAKCACRAVREHMAAHLLPTQLGFGTTLGCEASIHATRTFASNPKNADCVIVKVDLKNAFNAVERDTILTEVKEYIPSLYPFLYQCYATPSHLTYDHHKIPSQVGAQQGDPLGPLIFSLAIHKSIASIKSPLNVWYLDDGTIGGCPETVAEDIQTLCRNLSSIGLQLNPHKCEIFPCGVSAIQEIRMFDTLLPRMKTVNESTFSLLGAPIFPSAVPASLEAKGRMLTQARELLGQLSSHVALTLFRSCFSLPKLTYLIRTAPTWLFPNEVSDLNTTIRSTLEDILNVTLHDHQWQQAVLPVRHGGLGIRSIHSVGLPAFLASSNGVADLVSNTLKIQGARCSVPFQHDAETAWCAMFPGTNPPENVDSQRAWDDLSSRCALLKLTASLSGTSLARIKASSCSESGAWLQALPSPQLGTLLYNDTLRVAVALRLGCKVCEPHRCPCGAETDPYGYHGLSCIKAAGRFARHHALNDILRRALVSANVPCALEPPGLSRTDGKRPDGLTLVPWRKGRCLLWDATCVSTFAASHTPSTIRTAGSAAESAARHKRSKYAELERQYLFVPFAVETGGPWCDEAKGLIRELGRRLRDCGNDPRSGAYLVQHVSLAIQRGNAASVMGTFDPGMLRGGLFS

SEQ ID NO: 16320 - protein, 942 aa, Glaucopsyche alexis
MDTSSINSGVACPHCPGSTRRFIGTHGLNIHVSRKHKDLLDRDSSLPVGSNQPSQVIRESLNLDFNTIPDLKRNIRVLKHVPKGARSLAAGKLADLIDDCVTTNTTISWFKLLTFSFTVLRVPENSGASSLTSKVKRNIDSPCPEPTERSYRRPLNLIRRVESKVHEGDLAGAARLLVSDCKIAPTNESTLASLIEKHPAPSRPTGIAPLSAEDSEFSLVLSSEDIASAIQSFRSSSASGPDGLRPLHLKRTDVSFCWQQRSASLKIRNFLLKGFLNSEVIPLLYGATSCALVKKDGGIRPIAIGSTFRRLVAKCACRAVREHMVVHLLPTQLGFGTTLGCEALIHATRTFASNPKNADCVIVKVDLKNAFNAVDRDTILTEVKEYIPSLYPFLYQCYATPSHLTYDHHKIPSQVGAQQGDPLGPLIFSLLHKSIASIKSPLNVWYLDDGTIGGCPETVAEDIQTLCRNLSSIGLQLNPHKCEIFPCGVSAIQEIRMFDTLLPGMKTVNESTFSLLGAPIFPSAVPASLEAKGRMLTQARELLGQLSSHVALTLFRSCFSLPKLTYLIRTAPTWLFPNEVSDLDTTIRSTLEDILNVTLHDHQWQQAVLPVRHGGLGIRSIHSVGLPAFLASSNGVADLVSNILKIQGARCSVPFQHDAETAWCAMFPGTNPPENVDSQRAWDDLSSRCALLKLTASLSGTSLARIKASSCSESGAWLQALPSPQLGTLLDNDTLRVAAALRLGCKVCEPHRCPCGAETDPYGYHGLSCIKAAGRFARHHALNDILRRALVSANVPCALEPPGLSRTDGKRPDGLTLVPWRKGRCLLWDATCVSTFAASHTPSTIRTAGSAAESAARHKRSKYAELERQYLFVPFAVETGGPWCDEAKGLIRELGRRLRDCGNDPRSGAYLVQHVSLAIQRGNAASVMGTFESGMLRGGLFS

SEQ ID NO: 16321 - protein, 960 aa, Plebejus argus
MLHFSTTSMDTHNCNQGIPCPHCPCSSRRFNGVHGLNIHISRKHKNLLPQPSSDLSSISTSLGGTTQPNQVSNDPFDFDSLSKFKRSVRVLKHVPKGARSLAAGKLADLMDACVDKNTKAAWYEFLTFAFSALRVPDQSSKLSLTTKVKHNIYSSCPLPCEIPTRQPFNVCKRVEMKVHEGDLAGAARLLVSDCKIAPADTSTLESLIHKHPTPSRSLSIPPLSSVGPIVPLVLSPSDVVSAIQSFNNSSASGPDGIRPQHLKELLSPSAGNNGSRLLKSLVNLCNFLLQGELNPDVAPHLYGATLCALLKKDGGIRPIAVGSTLRRLVAKCACRAVREPMASHLQPTQIGFGTALGCEAAIHATRAFALSPANSDCVIVKVDLKNAFNSVERDSILNEVKELIPSLYPFLHQCYASPSHLTYDSHKISSQVGAQQGYPLGPLIFSLAIHKKISSIKSPLNVWYLDDGTIAGSPEVVAEDIRTLTSSLQELRLEINTKKCEIFACKDTAEHKITTFDSLLPGIKTLNKSTFSLLGAPIFPDAIPSTLESKGKILTQVRELLTNVSPHIALILYRSCFSLPKLTYVIRTAPTWRFPKEVCQLDNIIRATLEEILNISLDDLQWQQAALPVKHGGLGIRSIGSVGLPAFLASSNGVAELVTNILKNQGTRCSIPFLTDAETAWQELYPGINPPEDVTFQRAWDDLSSRYSLTHMLNSRSESALARIKAAGCAESGAWLHALPSPHLGTLLDDNTLRVAVALRLGCEVCEPHRCPCGTEADVYGHHGLSCVKAAGRFSRHHVLNDIIRRALVSADVPCVLEPPGLSRSDGKRPDGLTLIPWEKGRCLLWDATCVSTYAASHISGTSRIAGSAAEYAARQKHNKYADLEQKYLFVPFAVETGGTWCNEAKAFVRQLGRRLRESGNDPRSGAYLAQHVSLAIQRGNAASVMGTFEHGTLRGGLFD

SEQ ID NO: 16322 - protein, 947 aa, Glaucopsyche alexis
MDTSSINSGVACPHCPGSTRRFIGTHGLNIHVSRKHKDLLDRDSSLPVGSNQPSQVIRESLNLDFNTIPDLKRNIRVLKHVPKGARSLAAGKLADLIDDCVTTNTTISWFKLLTFSFTVLRVPENSGASSLTSKVKRNIDSPCPEPTERSYRRPLDLIRRVESKVHEGDLAGAARLLVSDCKIAPTNESTLASLIEKHPALSRPTGIAPLSAEDSEFSLVLSSEDIASAIQSFRSSSASGPDGLRPLHLKELTSLSAGSNGPRLLKSLTRLCNFLLKGSLNSEVMPLLYGATLCALVKKDGGIRPIAIGSTFRRLVAKCACRAVREHMAAHLLPTQLGFGTTLGCEASIHATRTFASNPKNADCVIVKVDLKNPFNAVERDTILTEVKEYIPSLYPFLYQCYATPSHLTYDHHKIPSQVGAQQGDPLGPLIFSLAIHKSIASIKSPLNVWYLDDGTIGGCPETVAEDIQTLCRNLSSIGLQLNPHKCEIFPCGVSAIQEIRMFDTLLPGMKTVNESTFSLLGAPIFPSAVPASLEAKGRMLTQARELLGQLSSHVALTLFRSCFSLPKLTYLIRTASTWLFPNEVSDLDTTIRSTLEDILNVTLHDHQWQQAVLPVRHGGLGIRSIHSVGLPAFLASSNGVADLVSNILKIQGARCSVPFQHDAETAWCAMFPGTNPPENVNSQRAWDDLSSRCALLKLTASLSGTSLARIKASSCSESGAWLQALPSPQLGTLLDNDTLRVAAALRLGCKVCEPHRCPCGAETDPYGYHGLSCIKAAGRFARHHALNDILRRALVSANVPCALEPPGLSRTDGKRPDGLTLVPWRKGRCLLWDITCVSTFAASHTPSTIRTAGSAAESAARHKRSKYAELERQYLFVPFAVETGGPWCDEAKGLIRELGRRLRDCGNDPRSGAYLVQHISLAIQRGNAASVMGTFEPGMLRGGLFS

SEQ ID NO: 16323 - protein, 1132 aa, Alatina alata
MSVMNFSLTENNDVNGTGTLCEGATFGRCPLVQQQGPGRHPTTARTKWTREMNKLVMKCYFRSTAPHLPKRNYRKRMLEEWKQIGLFELSEQKLAGQARAIKVNNWLSDLELEHIRLEVMNELEGGQEENAVNIEVENEVEEIAVTLTDSTTTFFQEDNSVLNEEITEVNVNLNEEEMQLLTMLKEELNKSPIEEPMNLRFMDRKKLASLTTKVNNIIRYLQGNTIFECNNIIKAAANLVARLAGLKRRKRKKVVEPCWKRRIVSKIDELRRDLSRLEKLKSDKLNRKHIRDHLVEKYKVNRKGLNLVIEELKQRIVAKSEKIKRYQNRCDQYQQNRLFQNNQKKLFEKLEGVERSDSEPPELEAATEFWKGIWEKDVRHNEKAEWISEIKAEIDTISNKQNDVTITVGLLKKQTKKLSNWKSPGPDGVQGYWIKNFSSLHGKLAAFFNDCVNTGKVPEWLTKGKTVLIMKDKAKGNDVTNYRPITCLSLLWKLLTGILSEEIYSHLDSNNLLPEEQKGCRKRSRGTKDQLLIDKAIIRNCKRRKTGLAMGWIDYKKAFDMIPHSWIIECLEIFKVADNIKSFLKQSMVSWETQLTSEGKVLGSVKIKRGIFQGDSLSPLLFVISLIPLSFILRKVKAGYQFSKTSPLINHLLYMDDLKMFGKSEIQLETLLNTVHIFSQDIRMEFGISKCGVLLMKRGKLVSMEGITVPSGEQIQEIDKEKGYKYLGILEADGVKSNEIKTSIRKEYLKRLKLILKSSLNSRNTITAINSRAISIIRYSAGIVDWRVNDVKELDRKTRKMMTMHCMFHKRGDVDRLYISRKNGGRGLISVEDCVNMEKFNLQKYLSESSEPFLKDVTDEKILSEGTSKQEVKRKRTEGLMAKSMHSVFFDKTEWRDPRSWNWLRNGDLKKASEGTIMAAQEQALRTRAIRNRIDKENISPLCRMCGNFDETIAHVVSECKMLAQKQYKEWRHDAICRVIHWQLCVDLGLNHSEKWYEHRPEVSTENEQSKLLWDMSIQTDKEIKHNKPDIVLLNKVTRKVKIIDVACPFDTRIEQKEQEKLTTYHDLKVELKRIWNCREVVIIPIIVGALGTVSKNLFGWLEGISSNIRFSQVQKAGLLGTARILRYTLDI

SEQ ID NO: 16324 - protein, 1148 aa, Alatina alata
MNVMSNQNIENNGVNGTGTQSEGPTPGRCFLAQQREPGRHSATARMKWSKEVNKVVMECFFRSKPFDAEGKPIRGYRQRMFKEWKERGLFDSTEQRICDQARAIRKNGWMSELEMEAIERMVKKDESGNDMNNEEMERNQDGMNENQDVMDEECDIRDTMTVEEETNDSNSEELVGVYECDDEIRCIVDRLKEIKKEGKRCDGVMFKRVDKKVLKFHMDKANKAVTYIKCRNITETNAIISAVSVWVAEKMGLKRTGNRKVNEPRWKRRIEGDIKNLRHDVNLLERGLKGQLGEKKIRKVKRLHEKYRVDRKGLRTVVEELKQRLVAKSAKIKRYTERIEQFRQNRMFGLEQKKFYEELNGERSSANDIPNADECTQFWGEIWSVEKEHNKNASWLKDLKIEMNNVDKKNQEMLKINKEKVYKQCKKMPNWKAPGPDGVQGYWIKNLTNLHERISSQLSSIVDGDEIPQWMTLGRTVLCQKDHEKGNAADNYRPITCLPLMWKLLTGIVAEDMYQYLDQAKLLPEEQKGCSRGSRGTKDHLLIDRTVLKDCKRRMTNLSMAWIDYRKAYDLVPHSWIKECLEMFGIAENVRDLLDRSMEKWKLGLVVNDKKLGKVCVRRGIFQGDSLSPLLFVLCMVPLTMILKKVNASYEWGKKEFAVNHLLFMDDLKLYAKNEQQMNMLVQTVHVFSSDIGMQFGMKKCGVLVLRRGKIVKKDGIELLDGQVMKMVGEEGYKYLGIVELDKIKETEMKENICKEYKRRLRLVLQSKLNGRNKVSAVNTWAVSIFRYGAGVIRWRDNELKDLDRKTRKTMTMCGAFHPKSDVDRLYLKRKEGGRGLISVESCVKEEENSLAVHVAKSKERLLRGVAVFENIKQNTLIGNKEFKEKKRQELKDKWTEKQLHGQFIRQLPEAVDKEKTWQWLTRCDLKIGTEALICAAQEQSIRTNYVKYHIDKTAENPLCRLCGKKGETVQHIVSGCEKLAQKEYKRRHDTVAKKVHWDISRKFQLPHCEKWYEHSPESVVENEDVKVLWDFNVQCDNVIEARRPDLIVVFKKENKATVIDIAIPADINVEEKEKNKVEKYQDLKREIKRLWKLKNVAVVPVVIGALGSITKEFEKWFEKIEIPCHVGVMQKTALLGTARILRKVLEM

SEQ ID NO: 16325 - protein, 1143 aa, Morbakka virulenta
MNEMSNQSIENNGVNGTGTQGEGPTPGRCFSAQQREPGRHPSTARKKWSKEINKVIMECFYRSNPFDENGKPIRGYRQRMFREWRERGMFETTEQRICDQARTIRKNGLLSELELEEIERRVNVEVFGNKGEIQVKEEETNSELDDPIGEARDGVEPRQDVVENDFDTEERLTQASDETKGIVERLKAILVEGKKSDGIMFKKLDRKALKIQVEKVNEAMKYTKCRNITETNNLIIAGSVWVAEKFGLKTGVRQKRNEPRWKRRIKGDIRKLRQDVNLLERDQKGQLGVKKTKKIKQLNEKYRVNRKGIKTVIEEIKQRMVAKSGKLKRYEDRIEQFRQNRIFGLDQKKFYYELNKCSNFSKAVPNAEECTKFWGDIWSVEKEHNRTAIWLKELKKEIDRDMKHTQDTVKINAEKVKKQSRKLPNWKAPGPDGVQGYWLKHFAALHERIASQLDGMLREEEVFQWTTHGRTVLCQKDPQKGTAIDNYRPITCLPLMWKLLTGIVADEMYQYLEESNILPDEQKGCRRRSRGTKDHLLIDRTVLRDCKKRRTNLSMSWIDYRKAYDLVPHSWISECLTMFGIAENVRNFLGRSMKQWKVSLTSNGEDLGQVFVKRGIFQEDGLSPLLFVLSMIPLSLILRKVNAAYEWGKTEYKVNHLLFMDDLKLYAKTEDQMSMLVRTVHMFSNDIGMEFGMKKCGILTLKRGMIIRSEGIKLADGQTMKEVGEEGYAYLGIVELDKIKEAEMKDAIRKEYKRRVRLVLRSKLNGKNKVSAINTWAVAIFRYVAGIIQWREKELKDLDRQTRKTMTMHGAFHPKSDTDRLYVKRKDGGRGLISIERCVKEEESSLKVYVAKSKEKLLKGVAEFEKLNATELEEARDIKARNENKAKDTWNEKRMHGQFVRDLTDDVDKVKTWEWLSKCDLKVGTEALICAAQEQSIRTNYVKYHIDRTAGSPLCRLCGQTGESIQHIVSACQKLAQKEYKRRHDNVARKIHWDICKKRGLECSKKWYEHTPEGVLESDDVKLLWDVNIQCDNVIEARRPDLVLVEKKEHTAIIIDITVPADANVAEKEKKKVEKYQDLKREIKRLWKLKKVEVVPIAIGALGSVTKGFEKWVEKLGIHCYLGVLQKTTLFGTARILRKVLEF

SEQ ID NO: 16326 - protein, 1052 aa, Morbakka virulenta
MNEMSNQSIENNGVNGTGTQGEGPTPGRCFSAQQREPGRHPSTARKKWSKEINKVIMECFYRSNPFDENGKPIRGYRQRMFREWRERGMFETTEQRICDQARTIRKNGLLSELELEEIERRVNVEVFGNKGEIQVKEEETNSELDDPIGEARDGVEPRQDVVENDFDTEERLTQASDETKGIVERLKAILVEGKKSDGIMFKKLDRKALKIQVEKVNEAMKYTKCRNITETNNLIIAGSVWVAEKFGLKTGVRQKRNEPRWKRRIKGDIRKLRQDVNLLERDQKGQLGVKKTKKIKQLNEKYRVNRKGIKTVIEEIKQRMVAKSGKLKRYEDRIEQFRQNRIFGLDQKKFYYELNKCSNFSKAVPNAEECTKFWGDIWSVEKEHNRTAIWLKELKKEIDRDMKHTQDTVKINAEKVKKQSRKLPNWKAPGPDGVQGYWLKHFAALHERIASQLDGMLREEEVFQWTTHGRTVLCQKDPQKGTAIDNYRPITCLPLMWKLLTGIVADEMYQYLEESNILPDEQKGCRRRSRGTKDHLLIDRTVLRDCKKRRTNLSMSWIDYRKAYDLVPHSWISECLTMFGIAENVRNFLGRSMKQWKVSLTSNGEDLGQVFVKRGIFQGDSLSPLLFVLSMIPLSLILRKVNAAYEWGKTEYKVNHLLFMDDLKLYAKTEDQMSMLVRTVHMFSNDIGMEFGMKKCGILTLKRGMIIRSEGIKLADGQTMKEVGEEGYAYLGIVELDKIKEAEMKDAIRKEYKRRVRLVLRSKLNGKNKVSAINTWAVAIFRYVAGIIQWREKELKDLDRQTRKTMTMHGAFHPKSDTDRLYVKRKDGGRGLISIERCVKEEESSLKVYVAKSKEKLLKGVAEFEKLNATELEEARDIKARNENKAKDTWNEKRMHGQFVRDLTDDVDKVKTWEWLSKCDLKVGTEALICAAQEQSIRTNYVKYHIDRTAGSPLCRLCGQTGESIQHIVSACQKLAQKEYKRRHDNVARKIHWDICKKRGLECSKKWYEHTPEGVLESDDVKLLWDVNIQCDNVIEARRPDLVLVERGNIRQ

SEQ ID NO: 16327 - protein, 974 aa, Morbakka virulenta
MECFYRSNPFDENGKPIRGYRQRMFREWRERGMFETTEQRICDQARTIRKNGLLSELELEEIERRVNVEVFGNEGEIQVKEEETNSEVDDPIGEARDGVEPRQDVVENDFDTEERLTQASDETKGIVERLKAILVEGKKSDGIMFKKLDRKALKIQVEKVNEAMKYTKCRNITETNNLIIAGSVWVAEKFGLKTGVRQKRNEPRWKRRIKGDIRKLRQDVNLLERDQKGQLGVKKTKKIKQLNEKYRVNRKGIKTVIEEIKQRMVAKSGKLKRYEDRIEQFRQNRIFGLDQKKFYYELNKCSNFSKAVPNAEECTKFWGDIWSVEKEHNRTAIWLKELKKEIDRDMKHTQDTVKINAEKVKKQSRKLPNWKAPGPDGVQGYWLKHFAALHERIASQLDGMLREEEVFQWTTHGRTVLCQKDPQKGTAIDNYRPITCLPLMWKLLTGIVADEMYQYLEESNILPDEQKGCRRRSRGTKDHLLIDRTVLRDCKKRRTNLSMSWIDYRKAYDLVPHSWISECLTMFGIAENVRNFLGRSMKQWKVSLTSNGEDLGQVFVKRGIFQGDSLSPLLFVLSMIPLSLILRKVNAAYEWGKTEYKVNHLLFMDDLKLYAKTEDQMSMLVRTVHMFSNDIGMEFGMKKCGILTLKRGMIIRSEGIKLADGQTMKEVGEEGYAYLGIVELDKIKEAEMKDAIRKEYKRRVRLVLRSKLNGKNKVSAINTWAVAIFRYVAGIIQWREKELKDLDRQTRKTMTMHGAFHPKSDTDRLYVKRKDGGRGLISIERCVKEEESSLKVYVAKSKEKLLKGVAEFEKLNATELEEARDIKARNENKAKDTWNEKRMHGQFVRDLTDDVDKVKTWEWLSKCDLKVGTEALICAAQEQSIRTNYVKYHIDRTAGSPLCRLCGQTGESIQHIVSACQKLAQKEYKRRHDNVARKIHWDICKKRGLECSKKLYEHTPEGVLESDDVKVLWDVNIQ

SEQ ID NO: 16328 - protein, 1069 aa, Morbakka virulenta
MYNQSIENNGVNGTGTQREGPTPGRCFSAQQREPGRRPSTARKKWSKEINKVIMECFYRSNPFDENGKPIRGYRQRMFREWRERGMFETTEQRICDQARTIRKNGLLSELELEEIERRVNVEVFGNEGEIQVKEEETNSEVDDPIGEVRDGVEPRQDVVENDFDTEERLTQASDETKGIVERLKAILVEGKKSDGIMFKKLDRKALKIQVEKVNEAMKYTKCRNITETNNLIIAGSVWVAEKFGLKTGVRQKRNEPRWKRRIKGDIRKLRQDVNLLERDQKGQLGVKKTKKIKQLNEKYRVNRKGIKTVIEEIKQRMVAKSGKLKRYEDRIEQFRQNRIFGLDQKKFYYELNKCSNFSKAVPNAEECTKFWGDIWSVEKEHNRTAIWLKELKKEIDRDMKHTQDTVKINAEKVKKQSRKLPNWKAPGPDGVQGYWLKHFAALHERIASQLDGMLREEEVFQWTTHGRTVLCQKDPQKGTAIDNYRPITCLPLMWKLLTGIVADEMYQYLEESNILPDEQKGCRRRSRGTKDHLLIDRTVLRDCKKRRTNLSMSWIDYRKAYDLVPHSWISECLTMFGIAENVRNFLGRSMKQWKVSLTSNGEDLGQVFVKRGIFQGDSLSPLLFVLSMIPLSLILRKVNAAYEWGKTEYKVNHLLFMDDLKLYAKTEDQMSMLVRTVHMFSNDIGMEFGMKKCGILTLKRGMIIRSEGIKLADGQTMKEVGEEGYAYLGIVELDKIKEAEMKDAIRKEYKRRVRLVLRSRLNGKNKVSAINTWAVAIFRYVAGIIQWREKELKDLDRQTRKTMTMHGAFHPKSDTDRLYVKRKDGGRGLISIERCVKEEESSLKVYVAKSKEKLLKGVAEFEKLNATELEEARDIKARNENKAKDTWNEKRMHGQFVRDLTDDVDKVKTWEWLSKCDLKVGTEALICAAQEQSIRTNYVKYHIDRTAGSPLCRLCGQTGESIQHIVSACQKLAQKEYKRRHDNVARKIHWDICKKRGLECSKKWYEHTPEGVLESDDVKLLWDVNIQCDNVIEARRPDLVLVEKKEHTAIIIDITVPADANVAEKKKNK

SEQ ID NO: 16329 - protein, 1143 aa, Morbakka virulenta
MNEMSNQSIENNGVNGTGTQGEGPTPGRCFSAQQREPGRHPSTARKKWSKEINKVIMECFYRSNPFDENGKPIRGYRQRMFREWRERGMFETTEQRICDQARTIRKNGLLSELELEEIERRVNVEVFGNKGEIQVKEEETNSELDDPIGEARDGVEPRQDVVENDFDTEERLTQASDETKGIVERLKAILVEGKKSDGIMFKKLDRKALKIQVEKVNEAMKYTKCRNITETNNLIIAGSVWVAEKFGLKTGVRQKRNEPRWKRRIKGDIRKLRQDVNLLERDQKGQLGVKKTKKIKQLNEKYRVNRKGIKTVIEEIKQRMVAKSGKLKRYEDRIEQFRQNRIFGLDQKKFYYELNKCSNFSKAVPNAEECTKFWGDIWSVEKEHNRTAIWLKELKKEIDRDMKHTQDTVKINAEKVKKQSRKLPNWKAPGPDGVQGYWLKHFAALHERIASQLDGMLREEEVFQWTTHGRTVLCQKDPQKGTAIDNYRPITCLPLMWKLLTGIVADEMYQYLEESNILPDEQKGCRRRSRGTKDHLLIDRTVLRDCKKRRTNLSMSWIDYRKAYDLVPHSWISECLTMFGIAENVRNFLGRSMKQWKVSLTSNGEDLGQVFVKRGIFQGDSLSPLLFVLSMIPLSLILRKVNAAYEWGKTEYKVNHLLFMDDLKLYAKTEDQMSMLVRTVHMFSNDIGMEFGMKKCGILTLKRGMIIRSEGIKLADGQTMKEVGEEGYAYLGIVELDKIKEAEMKDAIRKEYKRRVRLVLRSKLNGKNKVSAINTWAVAIFRYVAGIIQWREKELKDLDRQTRKTMTMHGAFHPKSDTDRLYVKRKDGGRGLISIERCVKEEESSLKVYVAKSKEKLLKGVAEFEKLNATELEEARDIKARNENKAKDTWNEKRMHGQFVRDLTDDVDKVKTWEWLSKCDLKVGTEALICAAQEQSIRTNYVKYHIDRTAGSPLCRLCGQTGESIQHIVSACQKLAQKEYKRRHDNVARKIHWDICKKRGLECSKKWYEHTPEGVLESDDVKLLWDVNIQCDNVIEARRPDLVLVEKKEHTAIIIDITVPADANVAEKEKKKVEKYQDLKREIKRLWKLKKVEVVPIAIGALGSVTKGFKKWVEKLGIHCNLGVLQKTTLLGTARILRKVLEF

SEQ ID NO: 16330 - protein, 1092 aa, Alatina alata
MNEMSNQSIENNGVNGTGTQSEGPTPGRCFLAQQQEPGRHSATARKKWSKEINIVIMECFYRSNPFDENGKPIRGYRQCLFREWRERGIFESTEQRICDQARAIRKNGWLSELELEEIKRKVEVELLAHEGELQAEQEETNNSADDVNVEARSWEEVRHDVVENVSDTEGRLIDASDETKCIVERLKVILVEGKKSDGIMFKKLDRKALKIQVDKVNEAMKYMKCKNITETNNLIIAGSVWIAEKFGLKKSARQKRNEPRWKRRIEGDIRKLRQDVNLLERELKGQLGAKKTTKIKQLNEKYRVNRKGVKTVIEELKQRMMAKSGKLKRYEDRIEQFRQNRMFGLDQKKFYDELNKRSKFSMEAPNADQCTKFWSDIWSVEKEHNRTAIWLKELKKEIECNVKHRQDTVKINAEKVRSQSSKLPNWKAPGPDGVQGYWLKNFSALHERIASQLDGMLTEQKVLQWTTHGRTVLCQKDPHRGTVVDNYRPITCLPLMWKLLTAIVADEMYKYLERSNILPDEQKGCRRRSRGTKDQLLIDRTILRDCKKRLTNLSMSWIDYRKAYDLVPHSWLNECLEMFGIAENVRNFLRRSMKEWKVTLTSNGEDLGEVFVKRGIFQGDSLSPLLFVLSMIPLSLILRKVNANYEWGKKEYKVNHLLFMDDLKLYAKTEDQMSMLVRTVHMFSKDIGMEFGMKKCGMLTLKRGKIVRSEGIELVDGHTMKEVQEEGYTYLGIVELDKIKEAEMKDAIGKEYKRRLRLVLRSKLNGRNKISAINTWAVAIFRYGAGIIQWRENELKNLDRQTRKTMTMYGAFHPKSDVDRLYVKRKDGGRGLVSIERCVKEEESSLKMYVAKSNEKLLKGVAKFEKLNANEMEDVRDIKARNANKAKDTWNGKRLHGQFIRDLTDDIDKEKTWEWLSKCDLKVGTEALICAAQEQSIRTNYVKHHIDKTVESPLCRLCGQAGESIQHIVSACGKLAQKEYKRRHDNVARRIHWDIGKRRGLECSEKWYEHAPEGVVENDDVKLLWDVNIQCDNVIEARRPDLILVEKKEHTAAIIDVTVPADANVAEKEKNKVEKYQDLKREKKRLWRLKKV

SEQ ID NO: 16331 - protein, 1129 aa, Morbakka virulenta
MGLELKVKDPRPAGVSRHSGENPVVILLLLERNGVKKSTKSLWSASIEVIHLMRTVSKLEGTDNACLENGGERGMFETKEQRICDQARTIRKNGLLSELELEEIERRVNVEVFGNEGEIQVKEEETNSEVDDPIGEARDGVEPRQDVVENDFDTEERLTQASDETKGIVERLKAILVEGKKSDGIMFKKLDRKALKIQVEKVNEAMKYTKCRNITETNNLIIAGSVWVAEKFGLKTGVRQKRNEPRWKRRIKGDIRKLRQDVNLLERDQKGQLGVKKTKKIKQLNEKYRVNRKGIKTVIEEIKQRMVAKSGKLKRYEDRIEQFRQNRIFGLDQKKFYYELNKCSNFSKAVPNAEECTKFWGDIWSVEKEHNRTAIWLKELKKEIDRDMKHTQDTVKINAEKVKKQSRKLPNWKAPGPDGVQGYWLKHFAALHERIASQLDGMLREEEVFQWTTHGRTVLCQKDPQKGTAIDNYRPITCLPLMWKLLTGIVADEMYQYLEESNILPDEQKGCRRRSRGTKDHLLIDRTVLRDCKKRRTNLSMSWIDYRKAYDLVPHSWISECLTMFGIAENVRNFLGRSMKQWKVSLTSNGEDLGQVFVKRGIFQGDSLSPLLFVLSMIPLSLILRKVNAAYEWGKTEYKVNHLLFMDDLKLYAKTEDQMSMLVRTVHMFSNDIGMEFGMKKCGILTLKRGMIIRSEGIKLADGQTMKEVGEEGYAYLGIVELDKIKEAEMKDAIRKEYKRRVRLVLRSKLNGKNKVSAINTWAVAIFRYVAGIIQWREKELKDLDRQTRKTMTMHGAFHPKSDTDRLYVKRKDGGRGLISIERCVKEEESSLKVYVAKSKEKLLKGVAEFEKLNATELEEARDIKARNENKAKDTWNEKRMHGQFVRDLTDDVDKVKTWEWLSKCDLKVGTEALICAAQEQSIRTNYVKYHIDRTAGSPLCRLCGQTGESIQHIVSACQKLAQKEYKRRHDNVARKIHWDICKKRGLECSKKWYEHTPEGVLESDDVKLLWDVNIQCDNVIEARRPDLVLVEKKEHTAIIIDITVPADANVAEKEKKKVEKYQDLKREIKRLWKLKKVEVVPIAIGALGSVTKGFEKWVEKLGIHWNLGVVQKTTLLGTARILRKVLEF

SEQ ID NO: 16332 - protein, 1143 aa, Morbakka virulenta
MNEMSNQSIENNGVNGTGTQGEGPTPGRCFSAQQREPGRHPSTARKKWSKEINKVIMECFYRSNPFDENGKPIRGYRQRMFREWRERGMFETTEQRICDQARTIRKNGLLSELELEEIERRVNVEVFGNKGEIQVKEEETNSELDDPIGEARDGVEPRQDVVENDFDTEERLTQASDETKGIVERLKAILVEGKKSDGIMFKKLDRKALKIQVEKVNEAMKYTKCRNITETNNLIIAGSVWVAEKFGLKTGVRQKRNEPRWKRRIKGDIRKLRQDVNLLERDQKGQLGVKKTKKIKQLNEKYRVNRKGIKTVIEEIKQRMVAKSGKLKRYEDRIEQFRQNRIFGLDQKKFYYELNKCSNFSKAVPNAEECTKFWGDIWSVEKEHNRTAIWLKELKKEIDRDMKHTQDTVKINAEKVKKQSRKLPNWKAPGPDGVQGYWLKHFAALHERIASQLDGMLREEEVFQWTTHGRTVLCQKDPQKGTAIDNYRPITCLPLMWKLLTGIVADEMYQYLEESNILPDEQKGCRRRSRGTKDHLLIDRTVLRDCKKRRTNLSMSWIDYRKAYDLVPHSWISECLTMFGIAENVRNFLGRSMKQWKVSLTSNGEDLGQVFVKRGIFQEDGLSPLLFVLSMIPLSLILRKVNAAYEWGKTEYKVNHLLFMDDLKLYAKTEDQMSMLVRTVHMFSNDIGMEFGMKKCGILTLKRGMIIRSEGIKLADGQTMKEVGEEGYAYLGIVELDKIKEAEMKDAIRKEYKRRVRLVLRSKLNGKNKVSAINTWAVAIFRYVAGIIQWREKELKDLDRQTRKTMTMHGAFHPKSDTDRLYVKRKDGGRGLISIERCVKEEESSLKVYVAKSKEKLLKGVAEFEKLNATELEEARDIKARNENKAKDTWNEKRMHGQFVRDLTDDVDKVKTWEWLSKCDLKVGTEALICAAQEQSIRTNYVKYHIDRTAGSPLCRLCGQTGESIQHIVSACQKLAQKEYKRRHDNVARKIHWDICKKRGLECSKKWYEHTPEGVLESDDVKLLWDVNIQCDNVIEARRPDLVLVEKKEHTAIIIDITVPADANVAEKEKKKVEKYQDLKREIKRLWKLKKVEVVPIAIGALGSVTKGFKKWVEKLGIHCNLGVLQKTTLLGTARILRKLLEF

SEQ ID NO: 16333 - protein, 1143 aa, Morbakka virulenta
MNEMSNQSIENNGVNGTGTQGEGPTPGRCFSAQQREPGRHPFTARKKWSKEINKVIMECFYRSNPFDENGKPIRGYRQRMFREWRERGMFETTEQRICDQARTIRKNGLLSELELEEIERRVNVEVFGNKGEIQVKEEETNSELDDPIGEARDGVEPRQDVVENDFDTEERLTQASDETKGIVERLKAILVEGKKSDGIMFKKLDRKALKIQVEKVNEAMKYTKCRNITETNNLIIAGSVWVAEKFGLKTGVRQKRNEPRWKRRIKGDIRKLRQDVNLLERDQKGQLGVKKTKKIKQLNEKYRVNRKGIKTVIEEIKQRMVAKSGKLKRYEDRIEQFRQNRIFGLDQKKFYYELNKCSNFSKAVPNAEECTKFWGDIWSVEKEHNRTAIWLKELKKEIDRDMKHTQDTVKINAEKVKKQSRKLPNWKAPGPDGVQGYWLKHFAALHERIASQLDGMLREEEVFQWTTHGRTVLCQKDPQKGTAIDNYRPITCLPLMWKLLTGIVADEMYQYLDESNILPDEQKGCRRRSRGTKDHLLIDRTVLRDCKKRRTNLSMSWIDYRKAYDLVPHSWISECLTMFGIAENVRNFLGRSMKQWKVSLTSNGEDLGQVFVKRGIFQGDSLSPLLFVLSMIPLSLILRKVNAAYEWGKTEYKVNHLLFMDDLKLYAKTEDQMSMLVRTVHMFSNDIGMEFGMKKCGILTLKRGMIIRSEGIKLADGQTMKEVGEEGYAYLGIVELDKIKEAEMKDAIRKEYKRRVRLVLRSKLNGKNKVSGINTWAVAIFRYVAGIIQWREKELKDLDRQTRKTMTMHGAFHPKSDTDRLYVKRKDGGRGLISIERCVKEEESSLKVYVAKSKEKLLKGVAEFEKLNATELEEARDIKARNENKAKDTWNEKRMHGQFVRDLTDDVDKVKTWEWLSKCDLKVGTEALICAAQEQSIRTNYVKYHIDRTAGSPLCRLCGQTGESIQHIVSACQKLAQKEYKRRHDNVARKIHWDICKKRGLECSKKWYEHTPEGVLESDDVKLLWDVNIQCDNVIEARRPDLVLVEKKEHTAIIIDITVPADANVAEKEKKKVEKYQDLKREIKRLWKLKKVEVVPIAIGALGSVTKGFKKWVEKLGIHCNLGVLQKTTLLGTARILRKVLEF

SEQ ID NO: 16334 - protein, 944 aa, Morbakka virulenta
MFKKLDRKALKIQVEKVNEAMKYTKCRNITETNNLIIAGSVWVAEKFGLKTGVRQKRNEPRWKRRIKGDIRKLRQDVNLLERDQKGQLGVKKTKKIKQLNEKYRVNRKGIKTVIEEIKQRMVAKSGKLKRYEDRIEQFRQNRIFGLDQKKFYYELNKCSNFSKAVPNAEECTKFWGDIWSVEKEHNRTAIWLKELKKEIDRDMKHTQDTVKINAEKVKKQSRKLPNWKAPGPDGVQGYWLKHFAALHERIASQLDGMLREEEVFQWTTHGRTVLCQKDPQKGTAIDNYRPITCLPLMWKLLTGIVADEMYQYLEESNILPDEQKGCRRRSRGTKDHLLIDRTVLRDCKKRRTNLSMSWIDYRKAYDLVPHSWISECLTMFGIAENVRNFLGRSMKQWKVSLTSNGEDLGQVFVKRGIFQGDSLSPLLFVLSMIPLSLILRKVNAAYEWGKTEYKVNHLLFMDDLKLYAKTEDQMSMLVRTVHMFSNDIGMEFGMKKCGILTLKRGMIIRSEGIKLADGQTMKEVGEEGYAYLGIVELDKIKEAEMKDAIRKEYKRRVRLVLRSKLNGKNKVSAINTWAVAIFRYVAGIIQWREKELKDLDRQTRKTMTMHGAFHPKSDTDRLYVKRKDGGRGLISIERCVKEEESSLKVYVAKSKEKLLKGVAEFEKLNATELEEARDIKARNENKAKDTWNEKRMHGQFVRDLTDDVDKVKTWEWLSKCDLKVGTEALICAAQEQSIRTNYVKYHIDRTAGSPLCRLCGQTGESIQHIVSACQKLAQKEYKRRHDNVARKIHWDICKKRGLECSKKWYEHTPEGVLESDDVKLLWDVNIQCDNVIEARRPDLVLVEKKEHTAIIIDITVPADANVAEKEKKKVEKYQDLKREIKRLWKLKKVEVVPIAIGALGSVTKGFKKWVEKLGIHCNLGVLQKTTLLGTARILRKVLEF

SEQ ID NO: 16335 - protein, 1143 aa, Morbakka virulenta
MNEMSNQSIENNGVNGTGTKGEGPTPGRCFSAQQREPGRHPFTARKKWSKEINKVIMECFYRSNPFDENGKPIRGYRQRMFREWRERGMFETTEQRICDQARTIRKNGLLSELELEEIERRVNVEVFGNEGEIQVKEEETNSEVDDPIGEARDGVEPRQDVVENDFDTEERLTQASDETKGIVERLKAILVEGKKSDGIMFKKLDRKALKIQVEKVNDAMKYTKCRNITETNNLIIAGSVWVAEKFGLKTGVRQKRNEPRWKRRIKGDIRKLRQDVNLLERDQKGQLGVKKTKKIKQLNEKYRVNRKGIKTVIEEIKQRMVAKSGKLKRYEDRIEQFRQNRIFGLDQKKFYYELNKCSNFSKAVPNAEECTKFWGDIWSVEKEHNRTAIWLKELKKEIDRDMKHTQDTVKINAEKVKKQSRKLPNWKAPGPDGVQGYWLKHFAALHERIASQLDGMLREEEVFQWTTHGRTVLCQKDPQKGTAIDNYRPITCLPLMWKLLTGIVADEMYQYLEESNILPDEQKGCRRRSRGTKDHLLIDRTVLRDCKKRRTNLSMSWIDYRKAYDLVPHSWISECLTMFGIAENVRNFLGRSMKQWKVSLTSNGEDLGQVFVKRGIFQGDSLSPLLFVLSMIPLSLILRKVNAAYEWGKTEYKVNHLLFMDDLKLYAKTEDQMSMLVRTVHMFSNDIGMEFGMKKCGILTLKRGMIIRSEGIKLADGQTMKEVGEEGYAYLGIVELDKIKEAEMKDAIRKEYKRRVRLVLRSKLNGKNKVSAINTWAVAIFRYVAGIIQWREKELKDLDRQTRKTMTMHGAFHPKSDTDRLYVKRKDGGRGLISIERCVKEEESSLKVYVAKSKEKLLKGVAEFEKLNATELEEARDIKARNENKAKDTWNEKRMHGQFVRDLTDDVDKVKTWEWLSKCDLKVGTEALICAAQEQSIRTNYVKYHIDRTAGSPLCRLCGQTGESIQHIVSACQKLAQKEYKRRHDNVARKIHWDICKKRGLECSKKWYEHTPEGVLESDDVKLLWDVNIQCDNVIEARRPDLVLVEKKEHTAIIIDITVPADANVAEKEKKKVEKYQDLKREIKRLWKLKKVEVVPIAIGALGSVTKGFKKWVEKLGIHCNLGVLQKTTLLGTARILRKVLEF

SEQ ID NO: 16336 - protein, 1143 aa, Morbakka virulenta
MNEMSNQSIENNGVNGTGTQGEGPTPGRCFSAQQREPGRHPSTARKKWSKEINKVIMECFYRSNPFDENGKPIRGYRQRMFREWRERGMFETTEQRICDQARTIRKNGLLSELELEEIERRVNVEVFGNKGEIQVKEEETNSELDDPIGEARDGVEPRQDVVENDFDTEERLTQASDETKGIVERLKAILVEGKKSDGIMFKKLDRKALKIQVEKVNEAMKYTKCRNITETNNLIIAGSVWVAEKFGLKTGVRQKRNEPRWKRRIKGDIRKLRQDVNLLERDQKGQLGVKKTKKIKQLNEKYRVNRKGIKTVIEEIKQRMVAKSGKLKRYEDRIEQFRQNRIFGLDQKKFYYELNKCSNFSKAVPNAEECTKFWGDIWSVEKEHNRTAIWLKELKKEIDRDMKHTQDTVKINAEKVKKQSRKLPNWKAPGPDGVQGYWLKHFAALHERIASQLDGMLREEEVFQWTTHGRTVLCQKDPQKGTAIDNYRPITCLPLMWKLLTGIVADEMYQYLEESNILPDEQKGCRRRSRGTKDHLLIDRTVLRDCKKRRTNLSMSWIDYRKAYDLVPHSWISECLTMFGIAENVRNFLGRSMKQWKVSLTSNGEDLGQVFVKRGIFQEDGLSPLLFVLSMIPLSLILRKVNAAYEWGKTEYKVNHLLFMDDLKLYAKTEDQMSMLVRTVHMFSNDIGMEFGMKKCGILTLKRGMIIRSEGIKLADGQTMKEVGEEGYAYLGIVELDKIKEAEMKDAIRKEYKRRVRLVLRSKLNGKNKVSAINTWAVAIFRYVAGIIQWREKELKDLDRQTRKTMTMHGAFHPKSDTDRLYVKRKDGGRGLISIERCVKEEESSLKVYVAKSKEKLLKGVAEFEKLNATELEEARDIKARNENKAKDTWNEKRMHGQFVRDLTDDVDKVKTWEWLSKCDLKVGTEALICAAQEQSIRTNYVKYHIDRTAGSPLCRLCGQTGESIQHIVSACQKLAQKEYKRRHDNVARKIHWDICKKRGLECSKKWYEHTPEGVLESDDVKLLWDVNIQCDNVIEARRPDLVLVEKKEHTAIIIDITVPADANVAEKEKKKVEKYQDLKREIKRLWKLKKVEVVPIAIGALGSVTKGFKKWVEKLGIHCNLGVLQKTTLLGTARILRKVLEF

SEQ ID NO: 16337 - protein, 1143 aa, Morbakka virulenta
MNEMSNQSIENNGVNGTGTQGEGPTPGRCFSAQQREPGRHPSTARKKWSKEINKVIMECFYRSNPFDENGKPIRGYRQRMFREWRERGMFETTEQRICDQARTIRKNGLLSELELEEIERRVNVEVFGNKGEIQVKEEETNSELDDPIGEARDGVEPRQDVVENDFDTEERLTQASDETKGIVERLKAILVEGKKSDGIMFKKLDRKALKIQVEKVNEAMKYTKCRNITETNNLIIAGSVWVAEKFGLKTGVRQKRNEPRWKRRIKGDIRKLRQDVNLLERDQKGQLGVKKTKKIKQLNEKYRVNRKGIKTVIEEIKQRMVAKSGKLKRYEDRIEQFRQNRIFGLDQKKFYYELNKCSNFSKAVPNAEECTKFWGDIWSVEKEHNRTAIWLKELKKEIDRDMKHTQDTVKINAEKVKKQSRKLPNWKAPGPDGVQGYWLKHFAALHERIASQLDGMLREEEVFQWTTHGRTVLCQKDPQKGTAIDNYRPITCLPLMWKLLTGIVADEMYQYLEESNILPDEQKGCRRRSRGTKDHLLIDRTVLRDCKKRRTNLSMSWIDYRKAYDLVPHSWISECLTMFGIAENVRNFLGRSMKQWKVSLTSNGEDLGQVFVKRGIFQEDGLSPLLFVLSMIPLSLILRKVNAAYEWGKTEYKVNHLLFMDDLKLYAKTEDQMSMLVRTVHMFSNDIGMEFGMKKCGILTLKRGMIIRSEGIKLADGQTMKEVGEEGYAYLGIVELDKIKEAEMKDAIRKEYKRRVRLVLRSKLNGKNKVSAINTWAVAIFRYVAGIIQWREKELKDLDRQTRKTMTMHGAFHPKSDTDRLYVKRKDGGRGLISIERCVKEEESSLKVYVAKSKEKLLKGVAEFEKLNATELEEARDIKARNENKAKDTWNEKRMHGQFVRDLTDDVDKVKTWEWLSKCDLKVGTEALICAAQEQSIRTNYVKYHIDRTAGSPLCRLCGQTGESIQHIVSACQKLAQKEYKRRHDNVARKIHWDICKKRGLECSKKWYEHTPEGVLESDDVKLLWDVNIQCDNVIEARRPDLVLVEKKEHTAIIIDITVPADANVAEKEKKKVEKYQDLKREIKRLWKLKKVEVVPIAIGALGSVTKGYKKWVEKLGIHCNLGVLQKTTLLGTARILRKVLEF

SEQ ID NO: 16338 - protein, 1143 aa, Morbakka virulenta
MNEMSNQNIENTGVNGTRTQSKGPTPGRCFSAQQREPGRHPATARKKWSKEINKVIMECFYRSNPFDENGKPIRGYRQRMFREWRERGMFETTEQRICDQARTIRKNGLLSELELEEIERRVNVEVFGNEGEIQVKEEETNSELDDPIGEARDGVEPRQDVVENDFDTEERLTQASDETKGIVERLKAILVEGKKSDGIMFKKLDRKALKIQVEKVNEAMKYTKCRNITETNNLIIAGSVWVAEKFGLKTGVRQKRNEPRWKRRIKGDIRKLRQDVNLLERDQKGQLGVKKTKKIKQLNEKYRVNRKGIKTVIEEIKQRMVAKSGKLKRYEDRIEQFRQNRIFGLDQKKFYYELNKCSNFSKAVPNAEECTKFWGDIWSVEKEHNRTAIWLKELKKEIDRDMKHTQDTVKINAEKVKKQSRKLPNWKAPGPDGVQGYWLKHFAALHERIASQLDGMLREEEVFQWTTHGRTVLCQKDPQKGTAIDNYRPITCLPLMWKLLTGIVADEMYQYLEESNILPDEQKGCRRRSRGTKDHLLIDRTVLRDCKKRRTNLSMSWIDYRKAYDLVPHSWISECLTMFGIAENVRNFLGRSMKQWKVSLTSNGEDLGQVFVKRGIFQGDSLSPLLFVLSMIPLSLILRKVNAAYEWGKTEYKVNHLLFMDDLKLYAKTEDQMSMLVRTVHMFSNDIGMEFGMKKCGILTLKRGMIIRSEGIKLADGQTMKEVGEEGYAYLGIVELDKIKEAEMKDAIRKEYKRRVRLVLRSKLNGKNKVSAINTWAVAIFRYVAGIIQWREKELKDLDRQTRKTMTMHGAFHPKSDTDRLYVKRKDGGRGLISIERCVKEEESSLKVYVAKSKEKLLKGVAEFEKLNATELEEARDIKARNENKAKDTWNEKRMHGQFVRDLTDDVDKVKTWEWLSKCDLKVGTEALICAAQEQSIRTNYVKYHIDRTAGSPLCRLCGQTGESIQHIVSACQKLAQKEYKRRHDNVARKIHWDICKKRGLECSKKWYEHTPEGVLESDDVKLLWDVNIQCDNVIEARRPDLVLVEKKEHTAIIIDITVPADANVAEKEKKKVEKYQDLKREIKRLWKLKKVEVVPIAIGALGSVTKGFKKWVEKLGIHCNVGVLQKTTLLGTARILRKVLEF

SEQ ID NO: 16339 - protein, 1162 aa, Morbakka virulenta
MWSRYKYRWLRNLKITKLLLNEMSNQSIENNGVNGTGTQGEGPTPGRCFSAQQREPGRHPSTARKKWSKEINKVIMECFYRSNPFDENGKPIRGYRQRMFREWRERGMFETTEQRICDQARTIRKNGLLSELELEEIERRVNVEVFGNEGEIQVKEEETNSELDDPIGEARDGVEPRQDVVENDFDTEERLTQASDETKGIVERLKAILVEGKKSDGIMFKKLDRKALKIQVEKVNEAMKYTKCRNITETNNLIIAGSVWVAEKFGLKTGVRQKRNEPRWKRRIKGDIRKLRQDVNLLERDQKGQLGVKKTKKIKQLNEKYRVNRKGIKTVIEEIKQRMVAKSGKLKRYEDRIEQFRQNRIFGLDQKKFYYELNKCSNFSKAVPNAEECTKFWGDIWSVEKEHNRTAIWLKELKKEIDRDMKHTQDTVKINAEKVKKQSRKLPNWKAPGPDGVQGYWLKHFAALHERIASQLDGMLREEEVFQWTTHGRTVLCQKDPQKGTAIDNYRPITCLPLMWKLLTGIVADEMYQYLEESNILPDEQKGCRRRSRGTKDHLLIDRTVLRDCKKRRTNLSMSWIDYRKAYDLVPHSWISECLTMFGIAENVRNFLGRSMKQWKVSLTSNGEDLGQVFVKRGIFQGDSLSPLLFVLSMIPLSLILRKVNAAYEWGKTEYKVNHLLFMDDLKLYAKTEDQMSMLVRTVHMFSNDIGMEFGMKKCGILTLKRGMIIRSEGIKLADGQTMKEVGEEGYAYLGIVELDKIKEAEMKDAIRKEYKRRVRLVLRSKLNGKNKVSAINTWAVAIFRYVAGIIQWREKELKDLDRQTRKTMTMHGAFHPKSDTDRLYVKRKDGGRGLISIERCVKEEESSLKVYVAKSKEKLLKGVAEFEKLNATELEEARDIKARNENKAKDTWNEKRMHGQFVRDLTDDVDKVKTWEWLSKCDLKVGTEALICAAQEQSIRTNYVKYHIDRTAGSPLCRLCGQTGESIQHIVSACQKLAQKEYKRRHDNVARKIHWDICKKRGLECSKKWYEHTPEGVLESDDVKLLWDVNIQCDNVIEARRPDLVLVEKKEHTAIIIDITVPADANVAEKEKKKVEKYQDLKREIKRLWKLKKVEVVPIAIGALGSVTKGFKKWVEKLGIHCNLGVLQKTTLLGTARILRKVLEF

SEQ ID NO: 16340 - protein, 1143 aa, Morbakka virulenta
MNEMSNKSIENNGVNGTGTQGEGPTPGRCFSAQQREPGRHPSTARKKWSKEINKVIMECFYRSNPFDENGKPIRGYRQRMFREWRERGMFETTEQRICDQARTIRKNGLLSELELEEIERRVNVEVFGNKGEIQVKEEETNSELDDPIGEARDGVEPRQDVVENDFDTEERLTQASDETKGIVERLKAILVEGKKSDGIMFKKLDRKALKIQVEKVNDAMKYTKCRNITETNNLIIAGSVWVAEKFGLKTGVRQKRNEPRWKRRIKGDIRKLRQDVNLLERDQKGQLGVKKTKKIKQLNEKYRVNRKGIKTVIEEIKQRMVAKSGKLKRYEDRIEQFRQNRIFGLDQKKFYYELNKCSNFSKAVPNAEECTKFWGDIWSVEKEHNRTAIWLKELKKEIDRDMKHTQDTVKINAEKVKKQSRKLPNWKAPGPDGVQGYWLKHFAALHERIASQLDGMLREEEVFQWTTHGRTVLCQKDPQKGTAIDNYRPITCLPLMWKLLTGIVADEMYQYLEESNILPDEQKGCRRRSRGTKDHLLIDRTVLRDCKKRRTNLSMSWIDYRKAYDLVPHSWISECLTMFGIAENVRNFLGRSMKQWKVSLTSNGEDLGQVFVKRGIFQEDGLSPLLFVLSMIPLSLILRKVNAAYEWGKTEYKVNHLLFMDDLKLYAKTEDQMSMLVRTVHMFSNDIGMEFGMKKCGILTLKRGMIIRSEGIKLADGQTMKEVGEEGYAYLGIVELDKIKEAEMKDAIRKEYKRRVRLVLRSKLNGKNKVSAINTWAVAIFRYVAGIIQWREKELKDLDRQTRKTMTMHGAFHPKSDTDRLYVKRKDGGRGLISIERCVKEEESSLKVYVAKSKEKLLKGVAEFEKLNATELEEARDIKARNENKAKDTWNEKRMHGQFVRDLTDDVDKVKTWEWLSKCDLKVGTEALICAAQEQSIRTNYVKYHIDRTAGSPLCRLCGQTGESIQHIVSACQKLAQKEYKRRHDNVARKIHWDICKKRGLECSKKWYEHTPEGVLESDDVKLLWDVNIQCDNVIEARRPDLVLVEKKEHTAIIIDITVPADANVAEKEKKKVEKYQDLKREIKRLWKLKKVEVVPIAIGALGSVTKGFKKWVEKLGIHCNLGVLQKKTLLGTARILRKVLEF

SEQ ID NO: 16341 - protein, 1143 aa, Morbakka virulenta
MNEMSNQSIENNGVNGTGTQGEGPTPGRCFSAQQREPGRHPSTARKKWSKEINKVIMECFYRSNPFDENGKPIRGYRQRMFREWRERGMFETTEQRICDQARTIRKNGLLSELELEEIERRVNVEVFGNKGEIQVKEEETNSELDDPIGEARDGVEARQDVVENDFDTEERLTQASDETKGIVERLKAILVEGKKSDGIMFKKLDRKALKIQVEKVNEAMKYTKCRNITETNNLIIAGSVWVAEKFGLKTGVRQKRNEPRWKRRIKGDIRKLRQDVNLLERDQKGQLGVKKTKKIKQLNEKYRVNRKGIKTVIEEIKQRMVAKSGKLKRYEDRIEQFRQNRIFGLDQKKFYYELNKCSNFSKAVPNAEECTKFWGDIWSVEKEHNRTAIWLKELKKEIDRDMKHTQDTVKINAEKVKKQSRKLPNWKAPGPDGVQGYWLKHFAALHERIASQLDGMLREEEVFQWTTHGRTVLCQKDPQKGTAIDNYRPITCLPLMWKLLTGIVADEMYQYLEESNILPDEQKGCRRRSRGTKDHLLIDRTVLRDCKKRRTNLSMSWIDYRKAYDLVPHSWISECLTMFGIAENVRNFLGRSMKQWKVSLTSNGEDLGQVFVKRGIFQGDSLSPLLFVLSMIPLSLILRKVNAAYEWGKTEYKVNHLLFMDDLKLYAKTEDQMSMLVRTVHMFSNDIGMEFGMKKCGILTLKRGMIIRSEGIKLADGQTMKEVGEEGYAYLGIVELDKIKEAEMKDAIRKEYKRRVRLVLRSKLNGKNKVSAINTWAVAIFRYVAGIIQWREKELKDLDRQTRKTMTMHGAFHPKSDTDRLYVKRKDGGRGLISIERCVKEEESSLKVYVAKSKEKLLKGVAEFEKLNATELEEARDIKARNENKAKDTWNEKRMHGQFVRDLTDDVDKVKTWEWLSKCDLKVGTEALICAAQEQSIRTNYVKYHIDRTAGSPLCRLCGQTGESIQHIVSACQKLAQKEYKRRHDNVARKIHWDICKKRGLECSKKWYEHTPEGVLESDDVKLLWDVNIQCDNVIEARRPDLVLVEKKEHTAIIIDITVPADANVAEKEKKKVEKYQDLKREIKRLWKLKKVDGVPIAIGALGSVTKGFKKWVEKLGIHCNLGVLQKTTLLGTARILRKVLEF

SEQ ID NO: 16342 - protein, 1143 aa, Morbakka virulenta
MNEMSNQSIENNGVNGTGTQGEGPTPGRCFSAQQREPGRHPSTARKKWSKEINKVIMECFYRSNPFDENGKPIRGYRQRMFREWRERGMFETTEQRICDQARTIRKNGLLSELELEEIERRVNVEVFGNEGEIQVKEEETNSELDDPIGEARDGVEPRQDVVENDFDTEERLTQASDETKGIVERLKAILVEGKKSDGIMFKKLDRKALKIQVEKVNEAMKYTKCRNITETNNLIIAGSVWVAEKFGLKTGVRQKRNEPRWKRRIKGDIRKLRQDVNLLERDQKGQLGVKKTKKIKQLNEKYRVNRKGIKTVIEEIKQRMVAKSGKLKRYEDRIEQFRQNRIFGLDQKKFYYELNKCSNFSKAVPNAEECTKFWGDIWSVEKEHNRTAIWLKELKKEIDRDMKHTQDTVKINAEKVKKQSRKLPNWKAPGPDGVQGYWLKHFAALHERIASQLDGMLREEEVFQWTTHGRTVLCQKDPQKGTAIDNYRPITCLPLMWKLLTGIVADEMYQYLEESNILPDEQKGCRRRSRGTKDHLLIDRTVLRDCKKRRTNLSMSWIDYRKAYDLVPHSWISECLTMFGIAENVRNFLGRSMKQWKVSLTSNGEDLGQVFVKRGIFQGDSLSPLLFVLSMIPLSLILRKVNAAYEWGKTEYKVNHLLFMDDLKLYAKTEDQMSMLVRTVHMFSNDIGMEFGMKKCGILTLKRGMIIRSEGIKLADGQTMKEVGEEGYAYLGIVELDKIKEAEMKDAIRKEYKRRVRLVLRSKLNGKNKVSAINTWAVAIFRYVAGIIQWREKELKDLDRQTRKTMTMHGAFHPKSDTDRLYVKRKDGGRGLISIERCVKEEESSLKVYVAKSKEKLLKGVAEFEKLNATELEEARDIKARNENKAKDTWNEKRMHGQFVRDLTDDVDKVKTWEWLSKCDLKVGTEALICAAQEQSIRTNYVKYHIDRTAGSPLCRLCGQTGESIQHIVSACQKLAQKEYKRRHDNVARKIHWDICKKRGLECSKKWYEHTPEGVLESDDVKLLWDVNIQCDNVIEARRPDLVLVEKKEHTAIIIDITVPADANVAEKEKKKVEKYQDLKREIERLWKLKKVEVVPIAIGALGSVTKGFKKWVEKLGIHCNLGVLQKTTLLGTARILRKVLEF

SEQ ID NO: 16343 - protein, 1143 aa, Morbakka virulenta
MNEMSNQSIENNGVNGTGTQGEGPTPGRCFSAQQREPGRHPSTARKKWSKEINKVIMECFYRSNPFDENGKPIRGYRQRMFREWRERGMFETTEQRICDQARTIRKNGLLSELELEEIERRVNVEVFGNKGEIQVKEEETNSELDDPIGEARDGVEPRQDVVENDFDTEERLTQASDETKGIVERLKAILVEGKKSDGIMFKKLDRKALKIQVEKVNEAMKYTKCRNITETNNLIIAGSVWVAEKFGLKTGVRQKRNEPRWKRRIKGDIRKLRQDVNLLERDQKGQLGVKKTKKIKQLNEKYRVNRKGIKTVIEEIKQRMVAKSGKLKRYEDRIEQFRQNRIFGLDQKKFYYELNKCSNFSKAVPNAEECTKFWGDIWSVEKEHNRTAIWLKELKKEIDRDMKHTQDTVKINAEKVKKQSRKLPNWKAPGPDGVQGYWLKHFAALHERIASQLDGMLREEEVFQWTTHGRTVLCQKDPQKGTAIDNYRPITCLPLMWKLLTGIVADEMYQYLEESNILPDEQKGCRRRSRGTKDHLLIDRTVLRDCKKRRTNLSMSWIDYRKAYDLVPHSWISECLTMFGIAENVRNFLGRSMKQWKVSLTSNGEDLGQVFVKRGIFQGDSLSPLLFVLSMIPLSLILRKVNAAYEWGKTEYKVNHLLFMDDLKLYAKTEDQMSMLVRTVHMFSNDIGMEFGMKKCGILTLKRGMIIRSEGIKLADGQTMKEVGEEGYAYLGIVELDKIKEAEMKDAIRKEYKRRVRLVLRSRLNGKNKVSAINTWAVAIFRYVAGIIQWREKELKDLDRQTRKTMTMHGAFHPKSDTDRLYVKRKDGGRGLISIERCVKEEESSLKVYVAKSKEKLLKGVAEFEKLNATELEEARDIKARNENKAKDTWNEKRMHGQFVRDLTDDVDKVKTWEWLSKCDLKVGTEALICAAQEQSIRTNYVKYHIDRTAGSPLCRLCGQTGESIQHIVSACQKLAQKEYKRRHDNVARKIHWDICKKRGLECSKKWYEHTPEGVLESDDVKLLWDVNIQCDNVIEARRPDLVLVEKKEHTAIIIDITVPADANVAEKEKKKVEKYQDLKREIKRLWKLKKVEVVPIAIGALGSVTKGFKKWVEKLGLHCNLGVLQKTTLLGTARILRKVLEF

SEQ ID NO: 16344 - protein, 1143 aa, Morbakka virulenta
MNEMSNQSIENNGVNGTGTQGEGPTPGRCFSAQQREPGRHPSTARKKWSKEINKVIMECFYRSNPFDENGKPIRGYRQRMFREWRERGMFETTEQRICDQARTIRKNGLLSELELEEIERRVNVEVFGNKGEIQVKEEETNSELDDPIGEARDGVEARQDVVENDFDTEERLTQASDETKGIVERLKAILVEGKKSDGIMFKKLDRKALKIQVEKVNEAMKYTKCRNITETNNLIIAGSVWVAEKFGLKTGVRQKRNEPRWKRRIKGDIRKLRQDVNLLERDQKGQLGVKKTKKIKQLNEKYRVNRKGIKTVIEEIKQRMVAKSGKLKRYEDRIEQFRQNRIFGLDQKKFYYELNKCSNFSKAVPNAEECTKFWGDIWSVEKEHNRTAIWLKELKKEIDRDMKHTQDTVKINAEKVKKQSRKLPNWKAPGPDGVQGYWLKHFAALHERIASQLDGMLREEEVFQWTTHGRTVLCQKDPQKGTAIDNYRPITCLPLMWKLLTGIVADEMYQYLEESNILPDEQKGCRRRSRGTKDHLLIDRTVLRDCKKRRTNLSMSWIDYRKAYDLVPHSWISECLTMFGIAENVRNFLGRSMKQWKVSLTSNGEDLGQVFVKRGIFQGDSLSPLLFVLSMIPLSLILRKVNAAYEWGKTEYKVNHLLFMDDLKLYAKTEDQMSMLVRTVHMFSNDIGMEFGMKKCGILTLKRGMIIRSEGIKLADGQTMKEVGEEGYAYLGIVELDKIKEAEMKDAIRKEYKRRVRLVLRSKLNGKNKVSAINTWAVAIFRYVAGIIQWREKELKDLDRQTRKTMTMHGAFHPKSDTDRLYVKRKDGGRGLISIERCVKEEESSLKVYVAKSKEKLLKGVAEFEKLNATELEEARDIKARNENKAKDTWNEKRMHGQFVRDLTDDVDKVKTWEWLSKCDLKVGTEALICAAQEQSIRTNYVKYHIDRTAGSPLCRLCGQTGESIQHIVSACQKLAQKEYKRRHDNVARKIHWDICKKRGLECSKKWYEHTPEGVLESDDVKLLWDVNIQCDNVIEARRPDLVLVEKKEHTAIIIDITVLADANVAEKEKKKVEKYQDLKREIKRLWKLKKVEVVPIAIGALGSVTKGFKKWVEKLGIHCNLGVLQKTTLLGTARILRKVLEF

SEQ ID NO: 16345 - protein, 1143 aa, Morbakka virulenta
MNEMSNQSIENNGVNGTGTQGEGPTPGRCFSAQQREPGRHPSTARKKWSKEINKVIMECFYRSNPFDENGKPIRGYRQRMFREWRERGMFETTEQRICDQARTIRKNGLLSELELEEIERRVNVEVFGNKGEIQVKEEETNSELDDPIGEARDGVEPRQDVVENDFDTEERLTQASDETKGIVERLKAILVEGKKSDGIMFKKLDRKALKIQVEKVNEAMKYTKCRNITETNNLIIAGSVWVAEKFGLKTGVRQKRNEPRWKRRIKGDIRKLRQDVNLLERDQKGQLGVKKTKKIKQLNEKYRVNRKGIKTVIEEIKQRMVAKSGKLKRYEDRIEQFRQNRIFGLDQKKFYYELNKCSNFSKAVPNAEECTKFWGDIWSVEKEHNRTAIWLKELKKEIDRDMKHTQDTVKINAEKVKKQSRKLPNWKAPGPDGVQGYWLKHFAALHERIASQLDGMLREEEVFQWTTHGRTVLCQKDPQKGTAIDNYRPITCLPLMWKLLTGIVADEMYQYLEESNILPDEQKGCRRRSRGTKDHLLIDRTVLRDCKKRRTNLSMSWIDYRKAYDLVPHSWISECLTMFGIAENVRNFLGRSMKQWKVSLTSNGEDLGQVFVKRGIFQEDGLSPLLFVLSMIPLSLILRKVNAAYEWGKTEYKVNHLLFMDDLKLYAKTEDQMSMLVRTVHMFSNDIGMEFGMKKCGILTLKRGMIIRSEGIKLADGQTMKEVGEEGYAYLGIVELDKIKEAEMKDAIRKEYKRRVRLVLRSKLNGKNKVSAINTWAVAIFRYVAGIIQWREKELKDLDRQTRKTMTMHGAFHPKSDTDRLYVKRKDGGRGLISIERCVKEEESSLKVYVAKSKEKLLKGVAEFEKLNATELEEARDIKARNENKAKDTWNEKRMHGQFVRDLTDDVDKVKTWEWLSKCDLKVGTEALICAAQEQSIRTNYVKYHIDRTAGSPLCRLCGQTGESIQHIVSACQKLAQKEYKRRHDNVARKIHWDICKKRGLECSKKWYEHTPEGVLESDDVKLLWDVNIQCDNVIEARRPDLVLVEKKEHTAIIIDITVPADANVAEKEKKKVEKYQDLKREIKRLWKLKKVEVVPIAIEALGSVTKGFEKWVEKLGIHFNLGVLQKTTLLGTARILRKVLEF

SEQ ID NO: 16346 - protein, 1052 aa, Morbakka virulenta
MTINCTQLAPTQVLTTGLLSELELEEIERRVNVEVFGNKGEIQVKEEETNSELDDPIGEARDGVEPRQDVVENDFDTEERLTQASDETKGIVERLKAILVEGKKSDEIMFKKLDRKALKIQVEKVNEAMKYTKCRNITETNNLIIAGSVWVAEKFGLKTGVRQKRNEPRWKRRIKGDIRKLRQDVNLLERDQKGQLGVKKTKKIKQLNEKYRVNRKGIKTVIEEIKQRMVAKSGKLKRYEDRIEQFRQNRIFGLDQKKFYYELNKCSNFSKAVPNAEECTKFWGDIWSVEKEHNRTAIWLKELKKEIDRDMKHTQDTVKINAEKVKKQSRKLPNWKAPGPDGVQGYWLKHFAALHERIASQLDGMLREEEVFQWTTHGRTVLCQKDPQKGTAIDNYRPITCLPLMWKLLTGIVADEMYQYLEESNILPDEQKGCRRRSRGTKDHLLIDRTVLRDCKKRRTNLSMSWIDYRKAYDLVPHSWISECLTMFGIAENVRNFLGRSMKQWKVSLTSNGEDLGQVFVKRGIFQGDSLSPLLFVLSMIPLSLILRKVNAAYEWGKTEYKVNHLLFMDDLKLYAKTEDQMSMLVRTVHMFSNDIGMEFGMKKCGILTLKRGMIIRSEGIKLADGQTMKEVGEEGYAYLGIVELDKIKEAEMKDAIRKEYKRRVRLVLRSKLNGKNKVSAINTWAVAIFRYVAGIIQWREKELKDLDRQTRKTMTMHGAFHPKSDTDRLYVKRKDGGRGLISIERCVKEEESSLKVYVAKSKEKLLKGVAEFEKLNATELEEARDIKARNENKAKDTWNEKRMHGQFVRDLTDDVDKVKTWEWLSKCDLKVGTEALICAAQEQSIRTNYVKYHIDRTAGSPLCRLCGQTGESIQHIVSACQKLAQKEYKRRHDNVARKIHWDICKKRGLECSKKWYEHTPEGVLESDDVKLLWDVNIQCDNVIEARRPDLVLVEKKEHTAIIIDITVPADANVAEKEKKKVEKYQDLKREIKRLWKLKKVEVVPIAIGALGSVTKGFKKWVEKLGIHCNLGVLQKTTLLGTARILRKVLEF

SEQ ID NO: 16347 - protein, 924 aa, Pardosa pseudoannulata
MDGLTNPDSPSPSEEFITKFRNISNTDGPIDLNVFQNTLAEFIAFATEFVKLPVTQSAGTFARPDPNNPRYIQRLYRRNRRRAVRLITGESEVKCTVEKDSILSHFCPQRPPAPSPDLFAHPTPATETMDTHQFTPEEVLRKLKGCENSAPGPDRITYNHWKSIDPDGRALTIIFNIILKTGKIPDTWRESRTILLPKSDSPTIAADWRPITLGNTIAKLFAGCLAKRLTAWIECNGVLCPAQKGFLPHDGAFENNFVLESLFQGARAGRKDLCIASLDISNAFGSIPHEAIFAALEGCGAGNEFCTIIRDLYTNCSTSFLLEGGPTELAPVNCGVRQGCPLSGLLFNVAFDPVLRDVNAMTDDINVLAFADDVLLIASNPNDLQTYINRVVNSAALLGLHFNASKCATLHLTRNPVRCAQTSFLVDGAAARVCGDGDEFRFLGKPIGFSIVSNPERVDDLITPGAKIMKSFLAPWQRIDAMKSFYYPSLHYAQRTSQLNKTDWQVLDDTLRPEFKKTLYLPSNATNAYIYGNPRKGLFGVPLAAEDSDIAAVDGAFKLLTSRDERIADMAWSELGSLVEHRTGNAPTPETIASYLNGEELPRSNPISSVWTRARSASRRLEVTWIIHDDKSISLTVDENVINNRRKVFSGLRLAFRNRRAAAMSTKPHQGKTFHAFSQSSSSTHFHRTGEFTRFADWRFIHRAKLGLVPLNAYGSAASSPEQRQCRRCSRDLETLPHVVNHCRRYLPLITKRHNAVVDRIKKDAAGRWNIFRENQPLGSGNLRPDLVLTKGDEVLLIDVTVPFENGPDAFTAAREQKQVKYAPLVSELKSRYKRVSFEAVVIGALGSWDRGNDRCISRICSKKYAALMRKLIVSDVIRATRNIYIEHITGFRQETTQMQQISGAIADARANMETNQGNSSSNE

SEQ ID NO: 16348 - protein, 1609 aa, Pardosa pseudoannulata
MADFPLRPALSLPSLAQGAPLLERGTFSRVFLPQNVATTNASVPLSMPIFCEDVVFRVPNIPAPRPVSAESNEMTETTDTPTCENTKNQDTSSPAKSFAQVTASPPTKHIPLSPVDEIRLRNRGVVKAKSNKLTKLTKHTTGTIAKDDQRPGPSGIRNIPTTKSSIYGKFGKSSSQICKANVNKQVAPPPSKGGPPSGEVRKKYPTSPPDSDDEWITPYPMKPKIVNASKLVATKNVNNKSSPPNCVKTPYRSNGSPRGSRQEANPSPPRIANPPLGNCGEKWANTPKLSTRDAPRLGTSSSNVNRSSPNGSPSQNCGSGSPRGFGNEGTSTFPRNVNPQVELNGNSVDGNVQHTSRDASKENLCVKENYTCSPGSAEHSDRPSNNELDPSFMVDSNSGSHVEADGTDSDSIPTGIQLEINLPGSPVLGSRLNGRDFDNGDSPASTASSSSSADFVSPNGRYLRTNSETAQNITTTTNNSNANPNPNLTRRRTYNVIPDQAFPGSTKRIGDILHFVFPIYGAMRCTEAGCQRTFVGQNWGSEKHSLRRHLEQIHNLPRVTDVRWCGFCQCQIGTRVSLHECLADATFFNPTRETFALECRHCLHSFDNVQALRNHARRHRRERLREARDRETTTSTHSVPPQPNPPSVQVEETPTLTQASTDNNSDDEVEPLSQHIAGDDFVEADTDGLTNPDSPSPSEEFITKFRNICNNDGPIDLNVFQNTLAEFIAFATEFVKLPVTQNVGTFARPDPNNPRYIQRLYRRNRRRAVRLITGESEVKCTVEKDSILSHFCPQRPPAPSPDLFAHPTPATETMDTHQFTPEEVLRKLKGCENSAPGPDRITYNHWKSIDPDGRALTIIFNIILKTGKIPDTWRESRTILLPKSDSPTNAADWRPITLGNTIAKLFAGCLAKCLTAWIESNGVLCPAQKGFLPHDGAFENNFVLESLFQGARAGRKDLCIASLDISNAFGSIPHEAIFAALEGCGAGNEFCTIIRDLYANCFTSFLLEGGPTELAPVNCGVRQGCPLSGLLFNVAFAPVLRDVNAMTDDINVLAFADDVLLIASNPNDLQTYINRVVNSAALLGLRFNASKCATLHLTRNPVRCAQTSFLVDGAAARVCGDGDEFRFLGKPIGFSIVSNPERVDDLIAPGAKIMKSFLAPWQRIDAMKSFYYPSLHYAQRTSQLNKTDWQVLDDTLRPEFKKTLYLPSNATNAYIYGNPRKGLFGVPLAAEDSDIAAVDGAFKLLTSRDERIADMAWSELGSLVEHRTGNAPTPETIASYLNGEELPRSNPISSIWTRARSASRRLEVTWIIHDDKSISITADENVINNRRKVFSGLRLAFRNRRAAAMSTKPHQGKTFHASSQSSSSTHFHRSGEFTRFADWRFIHRAKLGLVPLNAYGSAASSPEQRQCRRCSRELETLPHVVNHCRRYLPLITKRHNAVVNRIKKAAAGRWNIFRENQPLGSGNLRPDLVLTKGDEVLLIDVTVPFENGPDAFNAARVQKQVKYAPLVSELKSRYKRVSFEAVVIGALGSWDRDNDKCISRLCSKKYAALMRKLIVSDVIRATRNIYIEHITGFRQETTQMQQISGAIADARANMETNQGNSNSNE

SEQ ID NO: 16349 - protein, 931 aa, Muscidifurax raptorellus
MQDLRAVPEAVNPPLQEDEETISDASDSTSASSYTSATEEIPPRRHPSNPRGARWSDMYSSISEAVGRLIPIVEEMVGWEAPLLVKAGRSFRARGDPSGDICAWFFKVFPPPEPRRHPRRPPRDRSPIPPPKKVRRRREYARVQTLIKKNMSRAAKEVLDGANESRSPGLNEMRAYWEPVLTQESVPYPPQGQQHPDPALAYVWHPITCEDTITTNVESSFAPGVDGVTPVQWRSVPASAKALLFNIVLEMGSFPPQMLIGRTVFLPKKASSETPADFRPISIASVTVRHLHKILAERIREANLVGVRQRCLDDGCAENITVLAALLDDARSNLRELHVSSLDYAKAFDSVRHDAISAIMGKVGLPEGFVRYITRTYASSCTVLEVEGRRSDSIAVKRGVRQGDPLSSLIFCLVVNGVLQSLPQDVGYELGEHRLNALAYADDIFIVSETRLGMQRLLQVAEGKADEVGLSLNAMKCSSLSIVPAGKAKKYKVLTTPQFHLSDGSPIRQLTPTEEWRYLGVDFRPIGPKRAGGTLERELDRITRAPLKPQQRLKILRCFLLPRIYHRFVLSGTTLGKLRALDRQTRGAIRKWLRLPHDVPIAYFHTDTKDGGLGIPSLATTVPGLIHKRLRSLAHSTLPAAKAAAQTLWVLRSLEWAERALTQEGQVLNTVEKRSRWWRHRLYTSVDGSELRECGNTAISSWWVDGGSYGIPGCDYVQYHHVRINCLPTRIRTSRGIRRATAEIGCRAGCRVTETAAHVIQACHRTHGGRIKRHNALCKVLAAGLRDKGWVVQEEPRFRTGVGLRKPDLVARRDDRLCVVDAQVVSGATSLDAAHERKCEYYAGNLDIASALRTQHRFLGPIAYSSCTLSWRGVWSSKSVDFLLGMGLSRRLLAGITTRVLQGSHTNWTRWNKMTGITVPEAGGPPRTGIG

SEQ ID NO: 16350 - protein, 1160 aa, Strongyloides papillosus
MTTKWTNDDIERLVYRVNELGSKKETWEILTKEFPGRTALALKSKYGKERNFVKEVKLTPTTSISNSKENGKENDDNGKTIMQTRTDVTQYNDGNAANDEQNCLDETMKMLNIKFNKLFDSVCKNKGPKKLVKFRVNMNHPKIKLIDQILMNWIERYKDFNTAKSRKTIKKLILTAGLVLRSENTGSCTPKKRISKSELNLKKKIKKLRIKIEAINEEKERRKCKANGSAPPKPKHNPKLLYKEMNKKKVKLDHLHCQTEEMIKHLENEYEQKRIGNEKLNVRRNFELNPSIKVLKTEGESYDGKEEELLMEDAIQFYHELYSEGQPPSKTPILDEYEQHVKKNYRNIPEMLSKDRIREIVALKVKYSANFKAAGVDLIPTFCYKYFKSALNYLQDWVYGILNKEIRIMKSDCIGRTILLFKSGCRKQPQNYRPITMMPTDYKILTGTIAEILSEQIGPDFISREQLAIRRNVNGTLEGLVIDKCIIASTTFRASERKTGTQLCTSWIDFSKAFDSIYRSSLHRIVDMLPINSYIKDLLKEITKKWQSQLVLNNRNSGNEVNGNMFQIRRGILQGDSLSPILFVLVLNAASFKLNQQNKIKLRQKLKKNLEMNHQSFMDDIKLYSDDVSTMNKLKQILHSYGHEVGLQMNQKKCSDLVIDAKNPKAETEIESQLPFPVNKDGYKYLGLTQTTFDLNKICMASLQEKILPNVSKIFSSKLSVRQMKNLFNSTIVPASNYIATNIQSKQKINGLLNDLEKLDTKIRSIMEKNNVKFYSTSTARLYIDESDGGYGMKSLRSEAAISYINKSLYIVFNERLEPLLELYQMMTSKGNQNPLNNASKLAEIFKFKLNFSKPNEVTINGIQINSLKEARTKVKEIIRKHENDKWLQDWGKSMKYAKTFIELKDRIELPYMKTNVSAMTFRNTYGAAEEQLFTNTHVQADRKYEGKCRKCKVAQETCYHILSCCDAWVGTLYVERHNRIARLIYEELCRKYKLKVPKVNEKIPLLLENDEVCLRWNYTIPASTSIYHRKPDLYLHLKKEGKIFLIEVSVNALKNILRQRKLKLARYSVNGEKLLKFEEVDTVKAGNNIKKDLESRMKCSVEIIPIIVGNLGEWLMEFDVYLEKLKLDVRMKQRMSAISIHTANRIIKRHLCVAPEKLI

SEQ ID NO: 16351 - protein, 1160 aa, Strongyloides papillosus
MTTKWTNDDIERLVYRVNELGSKKETWETLTKEFPGRTALALKSKYGKERNFVKEVKLTPTTSISNSKENGKENDDNGKTIMQTRTDVTQYNDGNAANDEQNCLDETMKMLNIKFNKLFDSVCKNKGPKKLVKFRVNMNHPKIKLIDQILMNWIERYKDFNTAKSRKTIKKLILTAGLVLRSEITGSCTPKKRISKSELNLKKKIKKLRIKIEAINEEKERRKCKANGSAPPKPKHNPKLLYREMNKKKVKLDHLHCQTEEMIKHLENEYEQKRIGNEKLNVRRNFELNPSIKVLKTEGESYDGKEEELLMEDAIQFYHELYSEGQPPSKTPILDEYEQHVKKNYRNIPEMLSKDRIREIVALKVKYSANFKAAGVDLIPTFCYKYFKSALNYLQDWVYGILNKEIRIMKSDCIGRTILLFKSGCRKQPQNYRPITMMPTDYKILTGTIAEILSEQIGPDFISREQLAIRRKVNGTLEGLAIDKFIIASTTFRASERKTGTQLCTSWIDFSKAFDSIYRSSLHRIVDMLPISSYIKDLLKEITKKWQSQLVLNNRNSGNEVNENMFQIRRGILQGDSLSPILFVLVLNAASFKLNQQNKIKLRQKLKKNLEMNRQSFMDDIKLYSDDVSTMDKLKQILHSYGHEVGLQMNQKKCSDLVIDAKNPKAETEIESQLPFPVNKDGYKYLGLTQTTFDLNKICMASLQEKILPNVSKIFSSKLSVRQMKNLFNSTIVPASNYIATNIQSKQKINGLLNDLEKLDTKIRSIMEKNNVKFYSTSTARLYIDESDGGYGMKSLRSEAAISYINKSLYIVFNERLEPLLELYQIMTSKGNQNPLNNASKLAEIFKFKLNFSKPNEVTINGIQINSLKEARTKVKEIIRKHENDKWLQDWGKSMKYAKTFIELKDRIELPYMKTNVSAMTFRNTYGEAEEQLFTNTHVQADRKYVGKCRKCKVAQETCYHILSCCDAWVGTLYVERHNRIARLIYEELCRKYKLKVPKVNEKIPLLLENDEVCLRWNYTIPASTSIYHRKPDLYLHLKKEGKIFLIEVSVNALKNILRQRKLKLARYSVNGEKLLKFEEVDTVKAGNNIKKDLESRMKCSVEIIPIIVGNLGEWLMEFDVYLEKLKLDVRMKQRMSAISIHTANRIIKRHLCVAPEKLI

SEQ ID NO: 16352 - protein, 1160 aa, Strongyloides papillosus
MTTKWTNDDIERLVYRVNELGSKKETWEILTKEFPGRTALALKSKYGKERNFVKEVKLTPTTSISNSKENGKENDDNGKTIMQTRTDVTQYNDGNAANDEQNCLDETMKMLNIKFNKLFDSVCKNKGPKKLVKFRVNMNHPKIKLIDQILMNWIERYKDFNTAKSRKTIKKLILTAGLVLRSEITGSCTPKKRISKSELNLKKKIKKLRIKIEAINEEKERRKCKANGSAPPKPKHNPKLLYKEMNKKKVKLDHLHCQTEEMIKHLENEYEQKRIGNEKLNVRRNFELNPSIKVLKTEGESYDGKEGELLMEDAIQFYHELYSEGQPPSKTPILDEYEQHVKKNYRNIPEMLSKDRIREIVALKVKYSANFKAAGVDLIPTFCYKYFKSALNYLQDWVYGILNKEIRIMKSDCIGRTILLFKSGCRKQPQNYRPITMMPTDYKILTGTIAEILSEQIGPDFISREQLAIRRNVNGTLEGLAIDKCIIASTTFRASERKTGTQLCTSWIDFSKAFDSIYRSSLHRIVDMLPINSYIKDLLKEITKKWQSQLVLNNRNSGNEVNGNMFQIRRGILQGDSLSPILFVLVLNAASFKLNQQNKIKLRQKLKKNLEMNHQSFMDDIKLYSDDVSTMNKLKQILHSYGHEVGLQMNQKKCSDLVIDAKNPKAETEIESQLPFPVNKDGYKYLGLTQTTFDLNKICMASLQEKILPNVSKIFSSKLSVRQMKNLFNSTIVPASNYIATNIQSKQKINGLLNDLEKLDTKIRSIMEKNNVKFYSTSTARLYIDESDGGYGMKSLRSEAAISYINKSLYIVFNERLEPLLELYQIMTSKGNQNPLNNASKLAEIFKFKLNFSKPNEVTINGIQINSLKEARTKVKEIIRKHENDKWLQDWGKSMKYAKTFIELKDRIELPYMKTNVSAMTFRNTYGAAEEQLFTNTHVQADRKYEGKCRKCKVAQETCYHILSCCDAWVGTLYVERHNRIARLIYEELCRKYKLKVPKVNEKIPLLLENDEVCLRWNYTIPASTSIYHRKPDLYLHLKKEGKIFLIEVSVNALKNILRQRKLKLARYSVNGEKLLKFEEVDTVKAGNNIKKDLESRMKCSVEIIPIIVGNLGEWLMEFDVYLEKLKLDVRMKQRMSAISIHTANRIIKRHLCVAPEKLI

SEQ ID NO: 16353 - protein, 1190 aa, Hycleus phaleratus
MEEFKCHCFKQFPTSAALKQHKRYYCKGAPTEDGYKCSECERDFSSFIGLRQHLKKAHPQIYNDEMEGADIRSNRPWSELESEFMATKEIQYGGQHINKYLLTQIEDRSLDSIKGHRRTTQYQDLLKRLKGTPEFRSLSLMVSSGLQPAALRGEAATCSAAVSTRRRRGSSRSSSASAPSPTLPAGHSASSVSSPARGVVSGVDPPQSSAQSSSPSSLPPSGSIAAVSSAAAVGPLPPPLLLSSSSSSGCADSGVPELSRGLLLAPAMVCTAVSSPLPSASSSSSLLSPRPVGSRLLSSPPVLSPALPSETPSVLVSSDAVVDAGDPVLGYLCEMSRGDAVDPSMSETIQNIARGPDRAARYIDKLLEKVYSLCVRRRSIEDRDLRRPSANAQQNNQNRRAYGGASERASMYKRAQQMFYRNRSALASHVLANTLGQSVSNNVDIREIEETYKSLFNSASIKDQEPITDFKDHHIEIYKPITIDDVKSALSQRSSNTPGPDDVTFTALRRVSPVLLSILYNSMLLTAYIPRKLKICRTVMIPKSGVDLRNVDGWRPITISSTIIRVLHKILATRFRNLPFHHSQRGFLSVDGTLANTVTLQWAIKELRKKLTPHSITTIDLKKAFDSVSHSSLERAMLRFRIPEKIIKFIMNGYQDTFTTITCSQKSTNSIFFTRGVKQGDPLSPYLFNLVIDELLVHLENVGSGIDIDGTRLSSLAYADDLILFANTSMDSQRIIRLCERFFEKRQMSINSDKCTNLTTKLLPHRKKLYVSSHSKIYANGGLIPSIGVLDLFKYLGFKFSYLGVDRPDGATLSIELDRVMTAPLKPYQKLNIITYYVIPRYMYVLQNPSVTNKTVKNYDKLIRLCVKKILHIPKQASNAALYASLRAGGLGIISYQTKIPRIMLDRLNNLQNFSGPTMNALVNSDFFKKLQERLTSMVRYTGLDKKSEMAYWKDKLATSCLGDGISDVQHCHESSKWVYDAPRYWSGRDYIGAIQLRLNILPTYGGLHNPSGQRGCRAGCPRNESVCHVLQRCPVTHYRRIQRHDNVVKLVSKLAVKRGWSVEIEPRFRNRDGVLRKPDLLMVKNQVSILCDVGIHWEGGNSLMEACQQKINHYNDPNIIETIAAKHNNNDLHILPLIIGARGGWCPMNKSVVDALQLTSGELTAIISTVLRGGCQIHRAFDSLVWEQL

SEQ ID NO: 16354 - protein, 1314 aa, Hycleus phaleratus
MESFKCECLKEFTSNRTLKQHKRYYCRGAPTEDGHVCSECNREFASYIGLRQHLKKAHPLKYNEEMEGADVRANKPWTELESKFMALKEINYTGQHVNKYLLTHVTDRSLDSIKGHRRTNQYLDLIKELRASPSMEASLRAALPSSICAGGPSASRSSIVSSPSSPLPSGGELLSSPRSQNLSSHSSAAPLPLVPPVSSSGPTLPVPQAPVLCSVPPASSGSLSTLSALSSLSASSSSAALSSLASPSASSSSSASSSLLASSLLSSSSSLASSALSSSSLSASSASSSSLSSSASSASASSSSSALSSSSASSSSSASSSSSASSSSSASSSSSASSSSSALSLPLASSSSASSSSSASSSSAASSSSSASSSSSASSSFSSLLSSSSSSSSSSSSSSSLPSLSLASSSSSSLVSSLSAAALPSVLASSSASGSSSSSAPRASLASSSAALPCDDPIMSYLLDLSRSNLVDQALAETIKNIIEGRRSVHFIDMLLHQIYSLCVRRTSGPDGASMGTMSRGRTERHHYGGAAERAASYKRAQKMYKDNRSALASHIFSNTLGQAATNRINIEELEQTYKNLFNSPSTEDQETIYDFKEHTIPIYTPITIEDIKTALSRKSSDTPGPDRVTLSAVRKVSPVLLSVLYNSMLLTTYIPKELKACRTVMIPKNGANLDCVDGWRPITVSSTLIRVLHKILATRLGKLPYHHSQRGFLSIDGTLANTLILQWAIKDLRRRTVPHSVVTLDLRKAFDSVSHSSLRRAMQRFRIPSKIIDFVMNGYTDSSTIITCNKKSTNPIFFTRGVKQGDPLSPYLFNLVMDELLVQIDAMGAGVGVDDIRLSTLAYADDLILLSSTPFDAQRLIRVCEKFFSKRQMGINSDKCTSLTTKLLPHRKKLYVSTYSKVYANGGLIPTIGVLDQFKYLGFKFSFMGVENPNGASLESELRHVMSAPLKPFQKLNIITTYLIPRYMYVLQNPSITSKTIKSYDKLIRLSIKKILHVPKQATNAFLYASLQAGGLGIISYETKIPRILRDRMLNLQQFSDPVIESLIKSSFYTNLLERLSLMLRHIGLDKKSEAAFWSGRLESSCLSDGISDVRHCRESSRWIYEPPAYWSGCDYIGAIHLRMNILPTCGGLHNPSGHRGCRAGCLRNESVCHILQRCPVTHFRRIQRHDYVVRLLARFAVKRGWSVEVEPRFRNRDGILRKPDLVIVKNEVAVLCDVGIHWEGGNSLVEACKQKFDYYNDQTIISTITSKHGGCDVFIFPLIVGARGGWSPTNRSIVEALRLSPGERLAIISAVLRGGCQIHRAFSTMVWD

SEQ ID NO: 16355 - protein, 856 aa, Hycleus cichorii
MSRGDAVDPSMSETIQNITQDPERAAQYIDALLEKVYSLCARRRNIEDRHLRRPSANAQQNNQNRRFYGGASERASMYKRAQQMFYQNRSALASHVLANTLGQSVSNSVDIREIERTYKNLFNSTSIKDQEPITDFKDHHIEIYKPITVDDIKSALSQKSSNTPGPDDVTFTAFRRVSPVLLSILYNSMLLTAYIPRRLKICRTVMIPKNGADLRNVDGWRPITISSTIIRVLHKILATRFRNLPFHHSQRGFLSVDGTLANTVTLQWAIKELRKKLTPHSITTIDLKKAFDSVSHSSLERAMLRFRIPEKIIKFIMNGYQDTFTTITCGKKSTNSIFFTRGVKQGDPLSPYLFNLVIDELLGRLENVGSGIDIGGTRLASLAYADDLILFANTSMDSQRMIRLCEKFFEKRQMSINSNKCTNLTTKLLPHRKKLYVSSHSKIYANGGLIPSIGVLDLFKYLGFKFSYLGVDRPDGSTLSVELNRVMTAPLKPYQKLNIISYYVIPRYMYVLQNPSVTNKTIKNYDKLIRLCVKKILHIPKQASNAALYASLRAGGLGIISYQTKIPRIMLDRLNNLQNFAGPTMNALVNSDFFKNLQERLTSMVRYTGLDKKSEMSYWNDKLATSCLGDGISDVQHCHESSKWVYDAPRYWSTRDYIGAIQLRLNILPTYGGLHNPSGQRGCRAGCLRNESVCHVLQRCPVTHYRRIQRHDNVVKLVSKLAVKRGWNVEIEPRFRNSDGVLRKPDLLMVKNQVSILCDVGIHWEGGNSLMEACQQKINHYNDPNIIETIAAKHNNNDLHILPLIIGARGGWCPMNKSVVDALQLSSGELTAIISAVLRGGCQIHRSFDSLVWEQL

SEQ ID NO: 16356 - protein, 1181 aa, Hycleus phaleratus
MDQHTCICLKQFSSPRALKQHQKYYCRGTSTEDDGKCPECDRTFASFIGMRQHLKKAHPQEYNDEMEAADVRLNRPWSELESKTMALKELQYNGQSVNKYLITQMVDRSLYSIKGHRRTNQYQDLLKSLKSSSCGLLPSPIVIAESLRPSTNPSSSLAVHSVVSVAGPSSSSSVASGAADVGASAASLISPSASSPIAISRSAVLPPAPALSVPAVIASSSAAPSLLSSPPPHAPSLEVASLGQPQSLMSPSSLVSSDVSSLQLPSVDFSSLPSVASSASPPPLPAPLLISPMRPPNILITTDAPASSLTTPMDAAMGETGDPILNYLLRLSQDSTLDLPTREITRKIIEDRHHCNQHIDTLLQRVYSLCVRRTAVNRGGGVDSAADARRGARTYGGSAGRAALYKRAQQMYRNNRSALASHVLAGTLGQSSAGGADVGDIERTYRSLFSSPSVDDDEPIYDYKTHDIDVYSPIAVEDIKKTLTQKSSDTAGPDRITLSSLRKVPAVILSVLYNSMLLATYVPHELKVCRTVMIPKNGADLSGVDGWRPITVSSVIIRVLHKIIAARFKNLPFHHSQRGFLSVDGTLANTLTLQWAIKELRKNSTPHSITTLDLKKAFDSVSHKSLHRAMIRFKIPQKIVDFIMHGYQETSTIITCNKKSTGVIEITRGVKQGDPLSPYLFNLVIDELLCQLENVGSGIDVCGTRLSSLAYADDLILFSNTSMDAQRIIRMCERFFEKRQMTINSKKCSNLTTKLVPHRKKLYVSSHTKIYANGGLIPTIGVLDQFKYLGYRYSYVGVDKPDGATLKVELDRVIAAPLKPFQKLSIIAYYVIPRYMYVLQNPSITVKTIKNYDKLLRLYIKKILHLPKQASNAALYASIRAGGLGIISYETKIPRIMFDRIDNLQYFHGPTMHALVNSEFLKNFIERLRSMIRYTGFDKKSELMYWNDKLMASCLSDGISDVQHCRESSRWIYDPPNYWSGRDYIGAIQLRLNILPTYGGLHNPSGHRGCRAGCMRNESVCHVLQRCPVTHYRRIQRHDCVVKLLSRFATKRGWSVEVEPRFRNSDGILRKPDLLMVKERVAVLSDVGIHWEGGDSLVEACQQKINHYNDCKIIESIKNKHNGCDVYILPLIVGARGGWSPTNRSVLEALRLSSGEITAIISAVLRGGCQIHRAFSSLVWE

SEQ ID NO: 16357 - protein, 1185 aa, Hycleus cichorii
MEEFRCDCFKQFPTSAALKQHKRYYCRGAPSEDDIKCSECGRDFSGFMALRQHLRRAHPQIYNDEMEGADVRANRPWSELESTSMATKEAQYKGQHINKYLLTQIEDRSLDSIKGHRRTTQYQELLKKLKGAPELQLPSSIVSSGSQSAPSPRGAVASSATVSTRRPRKSSRSSSASVSSPTLPKSVAAQSASSTGGVLSSEMPPPLSPVLLPSSPSSALAASVSVGSSASIVVASPPTSLSPSPLSSGSGVPGLSLDPPSPPLRVSAAASSSLPSAAPSSSPSSPVGSFSSSSSPVLVPPPDRDSSSGAMPSCVVRDSGDPILAYLLELSRGDAIDPSTAEIIQNITQDLGQADHSIDALLEKIYSLCVRRRNTDNRNVRRGPAITQHNIQNHRTYGGASERAAMYKRAQQMYRENRSALASHILANTLGQSATRCVDIQKIEETYKNLFNSTSIEDQEPITDFKEHRIEIYSPITVNDVKSALSQRSSETPGPDQVKFSPVKKISPILLSILYNSMLLTAHVPRKLKICRTVMIPKNGADLSNVDGWRPITISSIIIRILHKILASRFRNLPFHHSQRGFLSVDGTLANTVTLQWAVKELRKKLTPHSITTIDLKKAFDSVSHCSLRRAMLRFRIPEKIIQFIMNGYQDTFTTITCSKKSTNSIFFTRGVKQGDPLSPYLFNLVIDELLVHLENVGSGIDIDGTRLSSLAYADDLILFSNTSMDSQRMVRLCERFFEKRQMNINSDKCTNLTTKLLPHRKKLYVSSHSKIYANGGLIPSIGVLDIFKYLGYKFTYLGVDKPDGAALKTELDRVMTAPLKPHQKLSIISYYVIPRYMYVLQSPSVTNKIIKNYDKLIRLNIKKILHIPKQSSNAALYASLRAGGLGIISYETKIPRIMLDRLNNLQYFTGPTMGALVNSDFFKKLQERLASMVRYAGFDKGSEMAYWNDKLATSCLGDGISDVQHCHESSKWIYDPPGYWSGRDYIGAIQLRLNILPTYGGLHNPSGQRGCRAGCLRNESVCHVLQRCPVTHFRRIQRHDNVVKLVSKLAVKKGWNVEIEPRFRNSSGVLRKPDLLMVKDQMSILCDVGIHWEGGDSLMEACQQKINHYSDPNIVESIAAKYNTNELHILPLIIGARGGWCPTNKNLVDILQLSSGELTSIISVVLRGGCQIHRSFDSLVWEQP

SEQ ID NO: 16358 - protein, 1115 aa, Araneus ventricosus
MVVDPSGRIIPQTDDSLRSEVSDSNSLPIDSHDTNDPLPISGVCPNDNCRKDTDLHIRFPINEKLVCTEEGCSTPFKTNDWHSTKNSLARHLRTKHRVIIKRSIYWCFICQTRIFRHPAEHACLQGCIVATDQSSNMFRCGVCSFDCPIQLGLNNHQKMHRRKDAEETMPKRSIPRPKKRRRKNKRQRQQSPGVNPSGDEGAIDDPTISLAAPVIPNTLPPTPPADRKDRSLLAHILIELNSLSVDDPSEDNFRSFCILVEQAVQEAQQHLFERDDEARPANPRDRANRPEPDPKDPAFIQRLYTRNPKRAVRMITGSDGARCNIETETLFDFFSGAWGPASSDPAFFQETRAGVLDREFSIAEMSKKLRNAENSAAGPDRLTYHHWRTVDPSGKTLVKIFNLCLFFRRIPPSWKETKTILIPKKNVDLAIPANWRPIALSNTIYKLFTKCITGRLTSWCERYHAISPNQKGFMPHDGVLEHNFTLQERFNDARDNKSDFCAAWLDVSNAFGSLPHCAIQNSLQAARVGDTLCSLVADMYSGCTTRILSNDSCTNPIPILSGVKQGCPLSGILFNLAIDPALRRLQANSAQLTVLAFADDLALLANSPQELQANLDGIHNDLARISLRLNPSKSVALHIGGSVPVGARETSFSIGGTPLTVLTEFDRHRFLGKPVGFSVLPDYASLETMVLKGNKLIESALAPWQTMEALKKFYFASLQFAMRTAQFRKSDWNEVDRQIRPGIKNTLSLPENAANEFIYGSRSLGCWGMSIAAEAYDLNIIDTAFKLLTSHWSHARAASRRMDVSWSFDDGIPRLHYQDITLRPAHRRKVLFSIRDRLRTDRTATLILTKKHQGKVMDCVSLDPASSHFYTSGAFTRFCDFRFSQKCRLGVGLDLNGYKTWKPPQEQLCRFGHKERETLPHVLNHCFGSKTRGYQLRHNCLVDRIKKAAERDFTIVYENQRIPGTDLGPDLVIENATKIFVIDVTVAFQHHREAFDRARQRKHETYNCLIEIMKKPGKTEEIVPFVMGSCGTWDPQNDSFMRNLCSRSYLKLFQKLCVSDTLRWSRDLYIEHVTGVRQYDPAAFPTTNFKYRPEESEEADALAPQRPTENQQVSE

SEQ ID NO: 16359 - protein, 1612 aa, Ephydatia muelleri
MASPLPTQAETWERLFPLPSALKCPRCSTCMWNETSYARHVRQHYPTPPVVKWVCDVCRAPFDTKQAVAQHYRSHSSEDPGSPGHTSQSSPTDPTSRLTPTNNYSCEYCENSFPTRIGLRNHERARHQALVSASLSRAVSALTDTRRPSTQWSDEEVAKFLAAVNKYGLKHTSLIAQFIGTRTATQVTYFKAAYKKRHPIWAMRHLLPVKVKTTNQGTQSSPSTSPSSSPSMSSSSRSPTLPTQRSHLSTPSPQLPTLEEATPTTSPECLPTIQPTISLQSRASLQLADQALRLLKAPPTTSPPRTQEPSSTPPSTHPEVPSSAVRLLPTRSPTPTHSPLPRHGPDPTERDYSNGSPLAYITPRATTQSTAPPTSLALHDLVASIRKEVELGCKSNPRRRRDQGHLSSPSTTGEISPPPPPQPRTPSLPCDSPTTTPHHPKASSRSMSHSSPSTAEQPSPPPSSQWAPPPPPHLPYGPPAVITQPSLGGLHITTTHVPRIAPTPSTNNMREGRSVGPYNWYGPSWLTKHPPLIDQNRSMGPCPPLGNWVGWGEGPRGKGKETPSRPPITTSARPVLRGNRIRGPTGPFTGNNNRGGLVPTTGQPSRGFNQPYTSNGPHRHRVIQPGSGESLTQPNPSVNHLGIDGGVQPGDGGGPEDALFPRGPLSMNPNDNTAPVKLFSKLLPYTERLLSDTEWSQWCSLLDCWTQGFSKWFSDRSKPPTPTPQAAWARRQQDRRPNERRPNTQQDRSQTRNRAITRMVAVQKAYRQNPKRCMAMLRKSPPPVRCNIPIATVETYFLAKQNVADPSVPMEPPPFQLWQDTTPTDLLEVPITSQEVLTTLRRTNLNSAPGPDRLPYAAWKRLEPIPNIVTSILNTCRINAKIPPSWKGSNTILIHKGDSVNHLDNWRPIALQNTLYKVYASIIARRLSTWAISNNIVSPSQKGFLPVEGCLEHGFVLKSVLQDSRRNKREACIAWLDLKDAFGSVPHPVLLETLRLAGLQGSTLDVIKDIYTNSTTSVKTSSATSTPIICRRGVKQGCPLSPILFDLIIEVIIRAMDRVPKAGYRIAHSTVRSLTYADDLCAFASSPAIMQQMLTGAQNAATWAGLTFNPRKCAILSIVRGSGKRQRVDRPQPSISGEPVPTLPWDGQYKYLGCTRGADPNSDLTQAANDYLSDCKVILESELTDWQKIDAIKRFARPRMTYLLQNMEPTISWARSIDQELKSLAKMCFKLPNRATTSYFYAQTKAGGLALPRIEDEIHLFRISTAYKVLFAQGDAQLRDISTSALGKTAEIRTRNQKSAQTFLNDPADPGEGRRGDIKSLWSEVRSSLQHCRAKFNLQDQSITCDGITLGWSKRRNITGLLRNAIQSRYVEDWKRCPDQGRAVICTSAHPASNHWVTTGRYTSFGEYRFAIKARLNLLTTRTSRFRAGDRVPDRSCRRCNTEQETLAHVLNHCPTHVGLLRKRHNNILARLSNAIPVWRGKQFKEQGVPGDNLGLKPDLVILDDTKKEAFVIDVTMPFEGNGSFAEARQAKERKYGHLKALLNAKGYNRVEVDAFIVGPLGSWDPANDPVLHKLCISRRYAILFRKLCCTEALKGSFGIWKAFTEGHPPNS

SEQ ID NO: 16360 - protein, 1298 aa, Emmelina monodactyla
MSVDVVPEADADNPEYTTGKNNVRKKWSNDMNEYILRTYLQLTKMESDTKSYLITLHTKFCEKFPFMEVTRQRIGDQRRAIIRKKLLPQHRIDQIYQDVQTELSLSQSQVTPDTDTTAPHRYAQSSSRMRWCNDHNETIMKSYYKITHLETNKTAYRKFLHQEFIAKYPHLSNITEQRVADQRRLIILNKYIDDTRLQTIRDEVARELDLTTIQNTNNNVTPVLPTPSLETNEMKSDNFLQNIDPEILTNNLIPTENHLDPQNIEGDELFKKVYQFYKKTDPTSRNYIPKQKPSKKLAFICQYINKSILPKYINKETRFNELQLIIYCAAWTAVKLNGAKISMSPMITRVHKNKNKKPKWQIRLELKVTDLRAKIARLTQFINGNTNRNLVRHVNNIIKQYKIHSTHERINTELNHFLDTLKQKLSVFSSRLRRYKDCTQRKSQNQQFKLNESSFYRNLNNTSPCTPSNITPQTPSSESLRSFWADIWENPVTYNTEAEWILDEKVRVADVPSMQFEFVPVEVFEGVVSKLHNWKSPGSDCIHNYWYKKFTYIHPFIHTFINNFIINPQQMPEYLLEGVTYMIPKDPADLYNPAKYRPITCLQTFYKILTSCLSQVIYAHLNNNNILTEEQKGCRKHSQGCKEQLTIDAVVMKQVQRKKKDLFSTYIDYRKAYDTVPHSWLLHILDIYKINDKISSFLRHIIPKWKTQLKMSTKITSVTTEPIKIQRGIFQGDALSPLLFCLALNPLSNQLNSLNLGYQFNLQAENSNFLQTSEYKLNHLLYMDDIKLFASTQKDLETLIKKTDQFSNDINMEFGIDNSRINSVKSGATYQHFHQLQNGQTIEPLNVNETYKYLGYNQSKLIHVKETKTELIKQFKHRLNTILKTHLNSINVTKAINSYAIPILTYSFGIINWSKTDLKKLQRTINTTLTKHRKHHPRSCVQRVTLPRKEGGRGMIDITNLHNKQITKLRSYFHKISLTSVMHKTIVQNDLKLTPLNLNDHSTQNNEEQIDNKKKISEWTLKSLHGRHRRDLENPNVDKEASNEWLRRGELFPETEGFMLAIQDQIIETRNYQKYIIKIPNLPTDTCRRCHNASETIQHITGACKSIVENDYKHRHDQVANIIHQKLAFKYNLAPENQAIQPYYKYKPESVLENSTHKLYFDRAILTDRTVHYNRPDITLVDKINKTAQIIDIAIPNTHNLQDTIATKLSKYTELKDEIIKMWRLQNATIVPVVLSTTGVIPKQLLKSLKTLDLHEHTYIQLQKASILNTCRIVRKFLQLGSDTPTISLDPTVRHSLG

SEQ ID NO: 16361 - protein, 1381 aa, Vanessa cardui
MKRNLNQPNERYNLRSRQQPIATSSKSKPNALGSYIPKKLGTDSLTSSPPSSISSTFSLFPSPNSSPKSYERSNSRVSTISPVSVNVIPVATADDPESMTGSKRARKRWSNEMNEYILRTYLELTNLGTDTKTYLTPLHTRFSERFPTMHVTRQRIGDQRRAIINKKLLSEQVIETIYREVSIKLAGNSSQTVRDTLNTQIPNITQTSQRMRWSNEHNETIIKAYYKITHLETNKTVYRKYLHQEFIKKFPELSNITEQRVADQRRLIILNKYIDSNRLKNIKEEVKRELQTEKDNYQEALNQSSSGENAHTIHPTTSIGEVARNNIIDNINPERFSNTPPLNYENYDINYAKQIDETFVKALEFYKQTKPTDRNFIPKQKSSKKLSKLLHYINNSILPKYLNNETEYDQMQLIIYCAAWTVAKLNGSNITMSQTSEIRKRKEPNKPKWQVRLENKVKDLRAKIGRLTQYINGNRNRNLQRHINNITEQYKIHSTHDRSNTQLIHFLDTLKQKLNVTSSRLKRYKDCTDRKTQNRKFCTNERLFYRTLKNSTSNNISFNTTNQIMPTSENLQSYWANIWENPVTYNDEAEWIAKEKEKFSNVTTMPFEFITIDMFQTVLAKLHNWKAPGSDCIHNFWYKKFTQTHPYLHTHINKFILHPETIPSYLCEGVTYMILKDPTDPCNPAKYRPITCLQTFYKIITACLSQVIYDHINNNKILTEAQKGCRKLSQGCKEQLIIDAVVMKQVYKMKKDLYSMYIDYKKAFDSVPHDWLLQVLDIYKINPKIVNFMKNILPKWQTQLKLNTNSNTILTEVIKIQRGIFQGDAFSPLWFCLAINPLSNLLNSLNAGYKLNIARTDNDSNNQLHFKLNHLMYMDDIKLFASTQQDLESLAAYTEAFSWDIKMDFGIDKCKINSVQLGKIHQHCYQLQTGEEIESLELNETYKYLGYHQSKHIHFKETKSELIKQFKHRIRSILKTQLNAKNMTKAINSYAIPILTYSFGIINWTKTDLAKLQRIINTSLTKHRKHHPRSCVQRLTLPRQEGGRGLIDITNLHNRQITSLRSYFHNKTASTLHNAIVQNDTKLTPLNLQDRLRQNNETVIDNNKKIEEWTLKSLHGRHRHDINQPNVDKSASNEWLIRGELFPETEGFMIAIQDQIIETRNYQRYIIKVPNLPTDICRRCYIASETIQHITGACKSIAETDYKHRHDQIANIIHQKLALKFNLLPSGQPTQPYYKYNPETILENTTHKLYYDRAILTDKTTHYNRPDITLVDKINKTAQIIDIAIPNTHNIQDTIATKLSKYNELRDEIIRIWRLQNAVIVPIVLSTTGVIPKQLHQSLKTLDLPKNTFIQLQKATILNTCRIVRKFLSQNTPPIQSNTLL

SEQ ID NO: 16362 - protein, 1285 aa, Osmia lignaria
MATQKTPEERPVTRRSTRAKTLSPGSTLEKKMKGDGPATLPSPITGRTGRRNLLPAIAEASPAIPAAPVEGPKSGGGGGRRRQVGEEEEDWRDVTPRNRRRRAGRQQEEGALTTPSPKTPARQPRQDQQVQHEEDVVWGSRVVRTPTETEQRPRSKPLTVDRATSPIDFNNNISSQCSCDRPSLRITASSATNCPGSNRGSVFRSNEQNRRGRGGTINNTNNRSSRETITQRVPPRGRAPQSPATHRRGRMTPPTSPERRGSRRGRDPRRDTRLPDAVSHAGRLDEPTPDTDRPEGLRRSTRAAIGVERAGLTEEAETVTTLQALEDFAAKVAEFFVKHRAVDTERAANPATSGRGGRPRPAARREGESHRPRDSSTTTGTPADREEYVREATRIQRLFRANRKRAVREVLKGSSPHCEVSKDAVQRHFADMYALRDRAEPLPTIHYETAQGSDALVSTCTATEVSRRLDRMKKSSPGPDGVTYGDLRDVDPGATLLTALFNACLRMEHIPRVWKESNTVLIYKKGDRDDLSNWRPLAMGDTVPKLFAAVMADRLTHWAVQNRRLSRGQKGFLPYEGCLEHNFVLQECIADARRRKGELVVAWLDLSNAFGSIPHATILESLTNAGVPRAMTNIVASMYTDCATRVRTAEGYTDRIPIRSGVKQGCPLSPILFNLALEPVVRAAEDSTTGYNIAGERIVELAYADDIALLAESEEEMRVLLREIEKIAANLGLAFNAKKCATLHIRGRDDVLDTVYRIQEEPVPALEKGESYQHLGIPTGVQLDQTPYTTIRGVLEDLGALDSSLLAPWQRVEALATFIVPRLDFLLRGANMRRTILSELDKAIKRTVKLWLHLPQRASPEVVHIPPSLGGCGLPPIADLAEVTAVAHAFRMLNAKDPVVARIARSTLEAAASEKLRRAPTDRDLAQYLSGSLAGDWSRPTTGRSSFWSRVRSVALRSGARLGFRWEWCDDRAELAIVMESRNGRRVVVPPLAKAHVITRMRAAVTEHYVSSLLRKSDQGKVFQATTQHAVSNRFMRGGAFIRFADWRFIHRARLDVLPLNGARRWGSDDKRCRRCGYTLEGLPHVLCHCGPHSAARQRRHDNLVLRLSKAIRLPGEIRINRRVPGATGESSALRPDIVVTHEASKTIVLVDVAVPFENTMQAIVEARFEKINKYQQLADSLKGRGYKVYLDAFIVGALGAWDPGNEFLLELLRISPRYASLMRKLMVAETIAWSRDMYVEHVSGIRQYTVSSTENHNENHNNSNRVNVDELEGEARVPSSPPHV

SEQ ID NO: 16363 - protein, 1738 aa, Osmia lignaria
MTSPQPSCTARGNDVIITFPFPETFPCPFCNVGVPSNWIRSAVYQRHEDLGKHLRIHHPGASRKWVCGVCSFTDNSVYALKKVRKHHADSHKGSEEPRAAGARPSVSASSSNSSSNNNDGGSAPPAEGDSAEKRPQSDATPVEMTQRPSPSPMEAAGTTTGGGALTRAAKTTLTNSRTTVAAKTKTAPKKKPVITSSVTGRNLLTGWAIKTATATRKSGMPSSPADGRPPSTGSPAAPPTVDLTTPPAGTGTAKRTSGGPVSMRRPSGGVTSILTPPLKEKEKSPGTNRRSTRATTEPPRPGPSQRTAITATRKVTPAVTYAEVTRGTSTTTTMTTRRMTRATSLPPVSREVGAGGVSTAQAPPTRPVVATCTFATAGTLTLTTTSVYSKPVAVVTVATRRSGGGTSPRGLKKRLQEDTVLLESTPTTRARAARATTEPPRTPPRTRNDERRSPPTGSATVNDMANQKTPEERPVTRRSTRAKTMSPGETQEKRRGDGPVTLPSPTTGRTGRRNLLPAIAEASPAVPAAPVEEMKTGGGGRRRRGTRGNEDEEDWRDVTPRITRRRAGRQQEEGALTTPSPKTQARQPRQQQQQREEEMAREPPVVRSPTGAEQGSRSRPLTVDRATSPIDFNNNSSHCSCDRPRLSIIASSATNCPGSNRGSVFRSNGLSRGGRGGTINSINNRSTRETTARRVPPRGRAPQSPATHWRGRVTPPNSPERRGSRRGRDPRRDTRLPDAVSHAGRLDEPTLDTDRPEGLRRSTRAAIGVERAGLAEEAETVTTLQALEDFAAKVAEFFVKHRAVDTERAANPATSGRGGRPRPAARREGESHRPRDSSTMTGTPADREEYVREATRIQRLFRANRKRAVREVLKGSSPHCEVSKDVVQRHFADMYALRDRAGPLPTVHYETAQGSDALVSTCTATEVSRRLDRMKKSSPGPDGVTYGDLRDADPGATLLTALFNACLRMEHIPRVWKESNTVLIYKKGDRDDLSNWRPLAMGDTVPKLFAAVMADRLTHWAVQNRRLSRGQKGFLPYEGCLEHNFVLQECIADARRKKGELVVAWLDLSNAFGSIPHATILESLSNAGVPRAMTNIVASMYTDCATRVRTAEGYTDRIPIRSGVKQGCPLSPILFNLALEPVVRAAEDSTTGYNIAGERIVELAYADDIALLAENEEEMRALLREIEKIAANLGLAFNAKKCATLHIRGRDDVLDTVYRIQEEPVPALGKGESYQHLGIPTGVQLDQTPYTTIRGVLEDLGALDSSLLAPWQKVEALATFIVPRLDFLLRGANMRRTILSELDKAIKRTVKLWLHLPQRASPEVVHIPPSLGGCGLPPIADLAEVTAVAHAFRMLNAKDPVVARIARSTLEAAASEKLRRAPTDRDLAQYLSGSLAGDWSRPTTGRSSFWSRVRSVALRSGARLGFRWEWCDDRAELAIVMESRNGRRVVVPPLAKAHVITRMRAAVTEHYVSSLLRKPDQGKVFQATTQHAASNRFMRGGAFIRFADWRFIHRARLDVLPLNGARRWGSDDKRCRRCGYTLESLPHVLCHCGPHSAARQRRHDNLVLRLSKAIRLPGEIRINRRVPGATGESSALRPDIVVTHEASKTIVLVDVAVPFENTMQAIVEARFEKINKYQQLADSLKGRGYKVYLDAFIVGALGAWDPGNEFLLELLRISPRYASLMRKLMVAETIAWSRDMYVEHVSGIRQYTVSSTDNNIRDNADLEGEARETSSPRT

SEQ ID NO: 16364 - protein, 1748 aa, Osmia lignaria
MTSTTNPQPSCTARGNEVIITFPPPETFPCPFCNEGAPPSRMKVAVYQRHEDLGKHLRLHHHGASRRWVCGVCFFTDDSAYALKKVRKHHADSHANNAVPRAAGARTSAPAGRVSGGAPSVGGDSAEERPSIDVALPETTQRPSPSPLEAAAPTTRGGALARAKKTTTSTNSRTTVAAKPSNAPKRKPVITSTVTGRNLLTGWAIKKTAATSTTRKSGTPSSPADGRPPSTGSPATPPTVDLTTPPAGTGAAKRTSGGSVSMRRPSGGASTTLTPPIKEKEKSPGTKRRSTRATTEPPQPGPPQRTAARKVTPAVTYAEVTRGTSTVTTTMTTRRMARATSLPPVPRNDKDGGASTTQAPPTMPVTATCTFATAGTLTLTTTSVYSKPVAVVTVATRRSGGGISPRGLKKKIQEDTVLLESAPTTRARATRATTEPPRTPPRAKQTKKRRSPPADMSPATVSDTATPTTPEERPATRRSTRAKTLSPGSIQEKRRGDGTTTLPSPAGRPGRRRILPAIAEASPVVTAAPIKEKEKKKEKEQEDEEKGEWRDFTPRIRRRRVGRREEEGETTNPSPRTQARQPPRLHDEGAEEEVVRVPRVVEVSVASEQGPPSDKVTIDRGTSPVNFNINNTNNNNNNNSSHNCCECVCPRLSNVASSVTNCPGSNRGSVFSNNGQSRRGRGGTVNSTRAGTREARARGVPPRGRAPQTPATHRRERVTPPPSPERRGSRRGRDPHRDTRLPDAVPHAGRPGEPTRGADRPEVLRRSTRAAIGIERAGLVEEAETVATLQALEDFAAKVAEFFVKHRAVDTERAANSATSGRGGRPQAAARREGESRRPRDSSTTTGTPTNREEYVREATRIQRLFRANRKRAVREVLKGSSPHCEVSKDVVQRHFTEMYAPRDRAGPLPTIHYETAQECDALVLACTAAEVSRRLDRMKKSSPGPDGVTYGDLRDVDPGATLLTALFNACLKMEHIPRVWKESNTVLIHKKGDRDDLSNWRPLAMGDTLPKLFAAVMADRLTHWAVLNRRLSRGQKGFLPYEGCLEHNFVLQECIADARRKKGELVVAWLDLSNAFGSIPHATILESLSNAGAPRAITNIVASLYTDCATRVRTSEGYTEKIPIQSGVKQGCPLSPILFNLAIEPLLRVAEESTGGYEIAGETVDELAYADDLTLLATYEEEMRDMLQNVEVTANNLGLAFNAKKCATLHLRGRDDVLDTVYCIQEEPVPALGKGEPYQHLGVPTGVQLDQTPYTTIRGVLEDLGAVDQSLLAPWQKIETVATFIVPRLDFLLRGANMRRMALSELDKAIKRTVKLWLNLPQRASPEVVHIPPSLGGCGLPPIADLAEVTTVAHAFRMLNAGDTVVANIARYSLEAAASEKLCRAPTGRDLAQYLSGSLAGDWSRPTTGRSSFWSRVRSAALRSGARLGFRWEWCDDRAELAVVMESRNGRRVVVPPQAKAHVITRMRAAVTEHYLSSLLRKPDQGKAFQATTQHAASNRFMRGGAFIRFADWRFIHRARLDVLPLNGARRWGSDDKRCRRCGYTLESLPHVLCHCGPHSAARQRRHDNLVLRLSRAIRLPGEIRVNRRVPGASGVSSALRPDIVVTHEASKTIVLVDVAVPFENTMQAIVDARMEKINKYQDLADSLKGRGYKVYLDAFIVGALGAWDPGSEFLLELLRISPRYASLMRKLMIAETIAWSRDIYVEHVSGIRQYTVSSTENHNDNNRVNVDELEGGARVPSSPPQA

SEQ ID NO: 16365 - protein, 1737 aa, Osmia lignaria
MSNATSPQPSCTARGNDVIITFPFPETFPCPFCNVGVPSNWIRSAVYQRHEDLGKHLRIHHPGAKRKWVCGVCFFTDDSVYALKKVRKHHADSHKGSAEPRAAGARPSVSTSSSSRDGGSAPLAEGDSAEKRPQPDAAPAETTPRPSPSPLEAAGTTTRGGALTRAARTTLTNSRTTVAAKTRAAPKKMPVITSSVTGRNLLTSWAVKPTATRKSGTPSSPADGRPPSSGSPATPPTVDLTTPPAGTGAAKRTSGGPVSMRRPSGGVTSTLTLPLKEKEKSPGAKRRSTRATTEPPQPGPPRRTTTTTTTRKVSPAVTYAEVTRGTSTTTTTMTTRRMTRATSLPPVPKEGDRGASTAQAPPTRPVVATCTFATAGTLTLTTTSVYSKPVAVVTVATRRSGGGTSPRGFKKRIQEDTVLLESAPTTRARAARATTEPPRTPPRTRNTGKRSPPTGCATVSDMATQKTPEERPVTRRSTRAKTLSPGSTLEKKMKGDGPATLPSPITGRTGRRNLLPAIAEASPAIPAAPVEAPKSGGGGGRRRQVGEEEEDWRDVTPRNRRRRAGRQQEEGALTTPSPKTPARQPRQDQQVQHEEDVVWGSRVVRTPTETEQRPRSKPLTVDRATSPIDFNNNISSQCSCDRPSLRITASSATNCPGSNRGSVFRSNEQNRRGRGGTINNTNNRSSRETITQRVPPRGRAPQSPATHRRGRMTPPTSPERRGSRRGRDPRRDTRLPDAVSHAGRLDEPTPDTDRPEGLRRSTRAAIGVERAGLTEEAETVTTLQALEDFAAKVAEFFVKHRAVDTERAANLATSGRGGRPRPAARREGESHRPRDSSTTTGTPADREEYVREATRIQRLFRANRKRAVREVLKGSSPHCEVSKDAVQRHFADMYALRDRAEPLPTIHYETARGSDALVSTCTATEVSRRLDRMKKSSPGPDGVTYGDLRDVDPGATLLTALFNACLRMEHIPRVWKESNTVLIYKKGDRDDLSNWRPLAMGDTVPKLFAAVMADRLTHWAVQNRRLSRGQKGFLPYEGCLEHNFVLQECIADARRKKGELVVAWLDLSNAFGSIPHATILESLSNAGVPRAMTNIVASMYTDCATRVRTAEGYTDKIPIRSGVKQGCPLSPILFNLALEPVVRAAEDSTTGYNIAGERIVELAYADDIALLAESEEEMRVLLREIEKIAANLGLAFNAKKCATLHIRGRDDVLDTVYRIQEEPVPALEKGESYQHLGIPTGVQLDQTPYTTIRGVLEDLGALDRSLLAPWQKVEALATFIVPRLDFLLRGANMRRTILSELDRAIKRTVKLWLHLPQRASPEVVHIPPSLGGCGLPPIADLAEVTAVAHAFRMLNAKDPVVARIARSTLEAAASEKLRRAPTDRDLAQYLSGSLAGDWSRPTTGRSSFWSRVRSVALRSGARLGFRWEWCDDRAELAIVMESRNGRRVVVPPLAKAYVITRMRAAVTEHYVSSLLRKPDQGKVFQATTQHAASNRFMRGGAFIRFADWRFIHRARLDVLPLNGARRWGSDDKRCRRCGYTLESLPHVLCHCGPHSAARQRRHDNLVLRLSKAIRLPGEIRINRRVPGATGESSALRPDIVVTHEASKTIVLVDVAVPFENTMQAIVEARFEKINKYQQLADSLKGRGYKVYLDAFIVGALGAWDPGNEFLLELLRISPRYASLMRKLMVAETIAWSRDMYVEHVSGIRQYTVSSTDNNIRDNAVLEGEAREPSSPRN

SEQ ID NO: 16366 - protein, 1738 aa, Osmia lignaria
MSNATSPQPSCTARGNDVIITFPFPETFPCPFCNVGVPSNWIRSAVYQRHEDLGKHLRIHHPGAKRKWVCGVCFFTDDSVYALKKVRKHHADSHKGSAEPRAAGARPSVSTSSSNRDGGSAPLAEGDSAEKRPQPDAAPAETTPRPSPSPLEAAGTTTRGGALTRAAKTTSTNSRTTVAAKTRSAPKKMPVITSSVTGRNLLTSWAVKPTATRKSGTPSSPADGRPPSSGSPATPPTVDLTTPPAGTGAAKRTNGGPVSMRRPSGGVTSTLTLPLKEKEKSPGAKRRSTRATTEPPQPGPPRRTTTTTTTRKVSPAVTYAEVTRGTSTTTTTMTTRRMTRATSHPPVSKEGDGGASTAQAPPTRPVVATCTFATAGTLTLTTTSVYSKPVAVVTVATRRSGGGTSPRGFKKRIQEDTVLLESAPTTRARATRATTEPPRTPPRTRNTGKRSPPTGCATVSDMATQKTPEERPVTRRSTRAKTLSPGSTLEKKMKGDGPATLPSPITGRTGRRNLLPAIAEASPAIPAAPVEAPKSGGGGGRRRQVGEEEEDWRDVTPRNRRRRAGRQDGEGDLTTPSPKTPARQPRQQQQQQHEEEVVRGPRVVRTPTGAEQGSRSKPLTVDRATSPIDFNNNNSSLCNCDRPRLSAIASSATNCPGSNRGSVFSQNNGQNRRGRGGTINNTNNRSTRETTTRRVPPRGRAPQSPATHRRGRMTPPTSPERRGSRRGRDPRRDTRLPDAVSHAGRLDEPTPDTDRPEGLRRSTRAAIGVERAGLTEEAETVTTLQALEDFAAKVAEFFVKHRAVDTERAANPATSGRGGRPRPAARREGESHRPRDSSTTTGTPADREEYVREATRIQRLFRANRKRAVREVLKGSSPHCEVSKDAVQRHFADMYALRDRAEPLPTIHYETAQGSDALVSTCTATEVSRRLDRMKKSSPGPDGVTYGDLRDVDPGATLLTALFNACLRMVHIPRVWKESNTVLIYKKGDRDDLSNWRPLAMGDTVPKLFAAVMADRLTHWAVQNRRLSRGQKGFLPYEGCLEHNFVLQECIADARRRKGELVVAWLDLSNAFGSIPHATILESLSNAGVPRAMTNIVASMYTDCATRVRTAEGYTDRIPILSGVKQGCPLSPILFNLALEPVIRVAEDSTIGCKIAGERIVELAYADDIALLAESEEEMRRLLRDIEMIAASLGLAFNAKKCATLHIRGRDDVLDTVYRIQEEPVPALEKGESYQHLGIPTGVQLDQTPYTTIRGVLEDLGALDRSLLAPWQRVEALATFIVPRLDFLLRGANMRRTILSELDKAIKRTVKLWLHLPQRASPEVVHIPPSLGGCGLPPIADLAEVTAVAHAFRMLNAKDPVVARIARSTLEAAASEKLRRAPTDRDLAQYLSGSLAGDWSRPTTGRSSFWSKVRSVALRSGARLGFRWEWCDDRAELAIVMESRNGRRVVVPPLAKAHVITRMRAAVTEHYVSSLLRKPDQGKVFQATTQHAASNRFMRGGAFIRFADWRFIHRARLDVLPLNGARRWGSDDKRCRRCGYTLESLPHVLCHCGPHSAARQRRHDNLVLRLSKAIRLPGEIRINRRVPGATGESSALRPDIVVTHEASKTIVLVDVAVPFENTMQAIVEARFEKINKYQQLADSLKGRGYKVYLDAFIVGALGAWDPGNEFLLELLRISPRYASLMRKLMVAETIAWSRDMYVEHVSGIRQYTVSSTDNNIRDNAVLEGEAREPSSPRN

SEQ ID NO: 16367 - protein, 1749 aa, Osmia lignaria
MSNTTSPQPSCTARGNDVIITFPFPETFPCPFCNVGVPSTWIRSAVYQRHEDLGKHLRIHHPGAKRKWVCGVCFFTDDSVYALKKVRKHHADSHKGSAEPRAAGARPSVSTSSSSRDGGSAPPAEGDCAEKRPQPDAALAETTQRPSPSPLETAGTTTRGGALTRAAKSTPTNSRTTVAAKTRTAPKKKPVITSSVTGRNLLTSWAMKSTAIRKSGTPSSPADGRPPPTGSPATPPTVDLTSPTAGSGAAKRTSGGLAPMRRPSGGVTSTLTPPLKEKEKSPGLKRRSTRATTEPPQPGPPRRPVTATRKVTPAVTYAEITRGTSTTTTTMTTRRMTRATSLPPVSREGTGGATAAQAPPTRLVVATCTFATAGTLTLTTTSVYSKPVAVVTVATRRSGGGTSPRGIKKRMKEDTVLLESAPTTRARAARATTEPPRTPPRTRQHPKPRRSPPPSMGSATVNDVATSRTPEERPETRRSTRAKTLSPGSTQEKGRGDGPTTLPSPNTGRFGRRLILPAIAEASPAVTAAPEKEMEMEKEKEKERRIGEEEDVRDWRDVTPRNTRRRAGRQKEEGALTTPSPKTPARQPRQRQQQREEEVVREPRVVRTPTGAEQGPPSRPLTVDRATSPIDFNNNSSQCSCDCPTISNVASSVTNCPGSNRGSVFSHNGQSRRGRGGTFSNTNNIRDTREISARRVPPRGRAPQSPATHRRGSVASPPSPERRGSRRGRDPRRDTRLPDAVPHAGRSDEPTPDADRPEVLRRSTRAAIGIERAGLVEEAETVTTPQALEDFAAKVAEFFVKHRAVDTERAANSATSGRGGRPQAAARREGESRRPRDSSTTTGTPANREEYVREATRIQRLFRANRKRAVREVLKGSSPHCEVSKDIVQRHFTEMYAPRDRAGPLPTIHYETAQECDALVSACTAAEVSRRLDRMKKSSPGPDGVTYGDLRDVDPGATLLTALFNACLKMEHIPRVWKESNTVLIHKKGDRDDLSNWRPLAMGDTLPKLFAAVMADRLTHWAVLNRRLSRGQKGFLPYEGCLEHNFVLQECIADARRKKRELVVAWLDLSNAFGSIPHATILESLSNAGAPRAITNIVASLYTDCATRVRTSEGYTERIPIQSGVKQGCPLSPILFNLAIEPILRVAEESTGGYEIAGETVDELAYADDVTLLATSEEEMRITLLNVEKTANNLGLAFNAKKCATLHLRGRDDVLDTVYCIQEEPVPALGKGEPYQHLGVPTGVQLDQTPYTAIRGVLEDLSAVDQSLLAPWQKIETVATFIVPRLGFLLRGANMRRMALSELDKAIKRTVKLWLNLPQRASPEVVHIPPSLGGCGLPPIADLAEVTAVAHAFRMLNAGDTVVANIARYSLEAAASEKLCRAPTGRDLAQYLSGSLAGDWSRPTTGRSSFWSRVRSAALRSGARLGFRWEWCDDRAELAVVMESRNGRRVVVPPQAKAHVITRMRAAVTERYLSSLLRKPDQGKVFQATTQHAASNRFMRGGAFIRFADWRFIHRARLDVLPLNGARRWGSDDKRCRRCGYTLESLPHVLCHCGPHSAARQRRHDNLVLRLSKAIRLPGEIRVNRCVPGVTGESSTLRPDIVVTHEASKTIVIVDVAVPFENTMQGIVDARFEKIKKYEDLAAILRGRGYKVYLDAFIVGALGAWDPGNEFLLEVLRISPRYASLMRKLMIAETIGWSRDMYVEHVSGIRQYTVSEAQLNNNNGNNNATIEQGGGTLVSSSPPLRRAPM

SEQ ID NO: 16368 - protein, 1747 aa, Osmia lignaria
MSNTTSPQPGCTARGNDVIITFPFPETFPCPFCNVGVPSTWIRSAVYQRHEDLGKHLRIHHPGASRKWVCGVCSFTDNSVYALKKVRKHHADSHKGSAEPRAAGARPLVSASSSSSRNDNDGGSATPAEGDSAEKRPQSDATPVEMTQRPSPSPMEAAGTTTGGGALTRAAKTILTNSRTTVAAKTKTAPKKKPVITSSVTGRNLLTGWAIKKTATTTTRKSGTPSSPADGRPPSTGSPAAPPTVDLTTPPAGTGAAKRTSGGPVSMRRPSGGVTSTLTPPLKEKKKSPGANRRNTRATTEPPQPGPPQRTAIIVTRKVTPAVTYAEVTRGTSSTTTTMTTRRMTRATSLPPVSREDGSGGASTAQAPPTRPVVATCTFATAGTLTLTTTSVYSKPVAVITVATRRSGGGTSPRGLKKRIQEDTVLLESAPMTRARAARATTEPPRTPPRTRNGERRSPPMGSATVSDVATQKTPEERPVMRRSTRAKTMSPGVTREKVRGDGPTTLPSPNTGRIGRRNLLPAIAEASPAVPAAPVKETKTGGGGRIGTRVEEDEEDWRDVTPRITRRRAGRQQEEGALTTPSPKTQARQPRQQQVQQEEEMVREPPVVRTPTGAEQGSRSRPLTVDRATSPIDFNNNSSHCSCDCPRLSVIASSATNCPGSNRGSVFRSNELNRGGRGGTINNINNRSTRETTTRRVPPRGRAPQSPATHRRGRVTPPNSPERRGSRRGRDPRRDTRLPDAVSHAGRLDEPTPDTDRPEGLRRSTRAAIGVERAGLTEEAETVTTLQALEDFAAKVAEFFVKHRVVDTERAANPATSGRGGRPRPAARREGESHRPRDSSTTTGTPANREEYVREATRIQRLFRANRKRAVREVLKGSSPHCEVSKDVVQRHFADMYALRDRAGPLPTVHYETAQGSDALVSTCTATEVSRRLDRMKKSSPGPDGVTYGDLRDADPGATLLTALFNACLRMEHIPRVWKESNTVLIYKKGDRDDLSNWRPLAMGDTVPKLFAAVMADRLTHWAVQNRRLSRGQKGFLPYEGCLEHNFVLQECIADARRKKGELVVAWLDLSNAFGSIPHATILESLSNAGVPRAMTNIVASMYTDCATRVRTAEGYTDRIPIRSGVKQGCPLSPILFNLALEPVVRAAEDSTTGYNIAGERIVELAYADDIALLAENEEEMRALLREIEKIAANLGLAFNAKKCATLHIRGRDDVLDTVYRIQEEPVPALEKGESYQHLGIPTGVQLDQTPYTTIRGVLEDLGALDRSLLAPWQRVEALATFIVPRLDFLLRGANMRRTILSELDKAIKRTVKLWLHLPQRASPEVVHIPPSLGGCGLPPIADLAEVTAVAHAFRMLNAKDPVVARIARSTLEAAASEKLRRAPTDRDLAQYLSGSLAGDWSRPTTGRSSFWSRVRSVALRSGARLGFRWEWCDDRAELAIVMESRNGRRVVVPPLAKAHVITRMRAAVTEHYVSSLLRKPDQGKVFQATTQHAASNRFMRGGAFIRFADWRFIHRARLDVLPLNGARRWGSDDKRCRRCGYTLESLPHVLCHCSPHSAARQRRHDNLVLRLSKAIRLPGEIRINRRVPGATGESSALRPDIVVTREASKTIVLVDVAVPFENTMQAIVDARMGKINKYKDLADSLRGRGYKVYLDAFIVGALGAWDPGNEFLLELLRISPRYASLMRKLMVAETIAWSRDMYVEHVSGIRQYTVSSTENNRDIATEDLEGEAQEPSSPRLTGTPI

SEQ ID NO: 16369 - protein, 1744 aa, Osmia lignaria
MTSTTNPQPSCTARGNEVIITFPPPETFPCPFCNEGAPPSRMKVAVYQRHEDLGKHLRLHHHGASRRWVCGVCFFTDDSAYALKKVRKHHADSHANNAVPRAAGARTSAPAGRVSGGAPSGGGDSAEERPSIDVALPETTQRPSPSPLEAAAPTTRGGALARAKKTTTSTNSRTTVAAKPSNAPKRKPVITSTVTGRNLLTGWAIKKTAATSTTRKSGTPSSPADGRPPSTGSPATPPTVDLTTPPAGTGAAKRTSGGSVSMRRPSGGASTTLTPPIKEKEKSPGTKRRSTRATTEPPQPGPPQRTAARKVTPAVTYAEVTRGTSTVTTTMTTRRMARATSLPPVPRNDKDGGASTTQAPPTMPVTATCTFATAGTLTLTTTSVYSKPVAVVTVATRRSGGGISPRGLKKKIQEDTVLLESAPTTRARATRATTEPPRTPPRAKQTKKRRSPPADMSPATVSDTATPTTPEERPATRRSTRAKTLSPGSIQEKRRGDGTTTLPSPAGRPGRRRILPAIAEASPVVTAAPIKEKGKKKEKEQEDEEKGEWRDFTPRIRRRRVGRREEEGETTNPSPRTQARQPPRLHDEGAEEEVVRVPRVVEVSVAPEQGPPSDKVTIDRGTSPVNFNINNTNNNNNNNSSHNCCECVCPRLSNVASSVTNCPGSNRGSVFSNNGQSRRGRGGTVNSTRAGTREARARGVPPRGRAQQTPATHRRGRVTPPPSPERRGSRRGRDPHRDTRLPDAVPHAGRTDEPTRGADRPEVLRRSTRAAIGIERVSLVEEAETVTTLQALEDFAAKVAEFFVKHRAVDTERAANSATSGRGGRPQAAAGREGGSRRPRDSSTTTGTPTNREEYVREATRIQRLFRANRKRAVREVLKGSSPHCEVSKDVVQRHFTEMYAPRDRAGPLPTIHYETAQECDALVSACTAAEVSRRLDRMKKSSPGPDGVTYGDLRDVDPGATLLTALFNACLKMEHIPRVWKESNTVLIHKKGDRDDLSNWRPLAMGDTLPKLFAAVMADRLTHWAVLNRRLSRGQKGFLPYEGCLEHNFVLQECIADARRKKGELVVAWLDLSNAFGSIPHATILESLSNAGAPRAITNIVASLYTDCATRVRTSEGYTEKIPIQSGVKQGCPLSPILFNLAIEPLLRVAEESTGGYEIAGETVEELAYADDLTLLATYEEEMRDMLHNVEVTASNLGLAFNAKKCATLHLRGRDDVLDTVYCIQEEPVPALGKGEPYQHLGVPTGVQLDRTPYTTIRGVLEDLGAVDQSLLAPWQKIETVATFIVPRLDFLLRGANMRRMALSELDKAIKRTVKLWLNLPQRASPEVVHIPPSLGGCGLPPIADLAEVTAVAHAFRMLNAGDTVVANIARYSLEAAASEKLCRAPTGRDLAQYLSGSLAGDWSRPTTGRSSFWSRVRSAALRSGARLGFRWEWCDDRAELAVVMESRNGRRVVVPPQAKAHVITRMRAAVTEHYLSSLLRKPDQGKAFQATTQHAASNRFMRGGAFIRFADWRFIHRARLDVLPLNGARRWGSDDKRCRRCGYTLESLPHVLCHCGPHSAARQRRHDNLVSRLSRAIRLPGEIRVNRRIPGATGESTALRPDIVVTHEASRTIVLVDVTVPFENTMQAIADARTEKINKYKDLADSLKGRGYRVYLDAFIVGALGAWDPGNEFLLELLRISPRYASLMRKLMIAETIAWSRDMYVEHVSGIRQYTVSSTDNNRVNSDELEGEARDSASPPRS

SEQ ID NO: 16370 - protein, 1737 aa, Osmia lignaria
MSNTTSPQPNCTARGNDVVITFPFPETFPCPFCNVGVPSNWIRSAVYQRHEDLGKHLRIHHPGAKRKWVCGVCFFTDDSVYALKKVRKHHADSHKGSAEPRAAGARPSVSTSSSSRDGGSAPPAEGDCAEKRPQPDAALAETTQRPSPSPLETAGTTTRGGALTRAAKSTPTNSRTTVAAKTRTAPKKKPVITSSVTGRNLLTSWAVKTTATRKSGTPSSPADGRPPPTGSPATPPTVDLTTPPAGTGAAKRTSGGPASMRRPSGGVTPTLTPPLKEKEKSPGSKRRSTRATTEPPQPGPPRRTTTTTTTRKVSPAVTYAEVTRGTSTVTTTMTTRRMARATSLPPVPRQEEARGASTTLAPPTRPVTATCTFATAGTLTLTTTSVYSKPVAVVTVASRRSGGGTSPRGHKKRIQQDTVLLESAPTTRARAARATTEPPRTPPRTRNQGKRSPPTGCATVSDMATQKTPEERPVTRRSTRAKTLSPGSTLVKMMKGDGPSTLPSPITGRTGRRNLLPAIAEASPAIPAAPVEAPKSRGGGGRRREVDEEEEDWRDVTPRNMRRRAGRQQEEGALTTPSPKTPARQPRQQQQVQHEEEVVRGPRVVRTPPGAERGSRSRPLTVDRATSPIDLNNNSSRCNCDCPRLSDAASSATNCPGSNRGSVFRPSNGQNRSGRGGTNNNTSTRSREMIDRRVPPRGRAPQSPATHRRGRMTSPTSPERRGSRRGRDPRRDTRLPDAVSHAGRLDEPTPDTDRPEGLRRSTRAAIGVERAGLAEEAETVTTLQALEDFAAKVAEFFVKHRVVDTERAANPATSGRGGRPRPAARREGESHRPRDSSTTTGTPADREEYVREATRIQRLFRANRKRAVREVLKGSSPHCEVSKDVVQRHFADMYALRDRAGPLPTVHYETAQGSDALVSTCTATEVSRRLDRMKKSSPGPDGVTYGDLRDADPGATLLTALFNACLRMEHIPRVWKESNTVLIYKKGDRDDLSNWRPLAMGDTVPKLFAAVMADRLTHWAVQNRRLSRGQKGFLPYEGCLEHNFVLQECIADARRKKGELVVAWLDLSNAFGSIPHATILESLSNAGVPRAMTNIVASMYTDCATRVRTAEGYTDRVPIRSGVKQGCPLSPILFNLALEPVVRAAEDSTTGYNIAGERIVELAYADDIALLAENEEEMRALLREIEKIAANLGLAFNAKKCATLHIRGRDDVLDTVYRIQEEPVPALEKGESYQHLGIPTGVQLDQTPYTTIRGVLEDLGALDRSLLAPWQRVEALATFIVPRLDFLLRGANMRRTILSELDKAIKRTVKLWLHLPQRASPEVVHIPPSLGGCGLPPIADLAEVTAVAHAFRMLNAKDPVVARIARSTLEAAASEKLRRAPTDRDLAQYLSGSLAGDWSRPTTGRSSFWSRVRSVALRSGARLGFRWEWCDDRAELAIVMESRNGRRVVVPPLAKAHVITRMRAAVTEHYVSSLLRKPDQGKVFQATTQHAASNRFMRGGAFIRFADWRFIHRARLDVLPLNGARRWGSDDKRCRRCGYTLESLPHVLCHCGPHSAARQRRHDNLVLRLSKAIRLPGEIRINRRVPGATGESSALRPDIVVTHEASKTIVLVDVAVPFENTMQAIVEARFEKINKYQQLADSLKGRGYKVYLDAFIVGALGAWDPGNEFLLELLRISPRYASLMRKLMVAETIAWSRDMYVEHVSGIRQYTVSSTDNNIRDNADLEGEARETSSPRT

SEQ ID NO: 16371 - protein, 1519 aa, Osmia lignaria
MDDLRPRGVPPPPPTIDLTTPPAGTGAAKRTSGGPASMRRPSGGVTSTLTPPLKVKEKSPGTKRRSTRATTEPPQPGPPQRTITAARKVTPAVTYAEVTRGTSTVTTTMTTRRMARATSLPPVSKQEEAGGASTTQAPPTRPVTATCTFATAGTLTLTTTSVYSKPVAVVTVATRRSGGGASPRGIKKRIQEDTVLLESAPTTRARAARATTEPPRTPPRTRQATKMRKSPPTSMGSATVNDVATSRTPEERPVTRRSTRAKTLSPGSTQEKTTRGDGPTTLPSPTTGRPGRRLILPAIAEASPAVTAAPDKEKDKEKEKEKERRLGEEEDVGGWRDVVPWKTRRRAGRQEEEGVMTTPPPKTPTRQPRQHVQEEEVVREPLVVRTPTGAKQGPPSRPLTIDRATSPIDFNNNSSQCDCDRPRISNVASSVTNCPGSNRGSVFSTNGQSRRGRGGTSNTRTREQITGGVPPRGRAPRTPATHRRGTVTPPPSPERRGSRRGRDPHRDTRLPDAVPHAGRPDEPTRGADRPEVLRRSTRAAIGIERAGLVEEAETVATLQALEDFAAKVAEFFVKHRAVDTERAANSATSGRGGRPQAAARREGESRRPRDSSTTTGTPTNREEYVREATRIQRLFRANRKRAVREVLKGSSPHCEVSKDVVQRHFTEMYAPRDRAGPLPTIHYETAQECDALVSACTAAEVSRRLDRMKKSSPGPDGVTYGDLRDVDPGATLLTALFNACLKMEHIPRVWKESNTVLIHKKGDRDDLSNWRPLAMGDTLPKLFAAVMADRLTHWAVLNRRLSRGQKGFLPYEGCLEHNFVLQECIADARRKKGELVVAWLDLSNAFGSIPHATILESLSNAGAPRAITNIVASLYTDCATRVRTSEGYTERIPIQSGVKQGCPLSPILFNLAIEPIIRVAEDSTAGYVIAGEKIGELAYADDLTLLATKEEEMRSMLLVVEDTATNLGLAFNPKKCATLHLRGRNDVLDTVYNIQEEPVPALGKGEPYQHLGVPTGVQLDQTPYTTIRGVLEDLSAVDQSLLAPWQKIETVATFIVPRLDFLLRGANMRRMALSELDKAIKRTVKLWLNLPQRASPEVVHIPPSLGGCGLPPIADLAEVTAVAHAFRMLNAGDTVVANIARYSLEAAASEKLCRAPTGRDLAQYLSGSLAGDWSRPTTGRSSFWSRVRSAALRSGARLGFRWEWCDDRDELAVVMESRNGRRVVVPPQAKAHVITRMRAAVTERYLSSLLRKPDQGKVFQATTQHAASNRFMRGGAFIRFADWRFIHRARLDVLPLNGARRWGSDDKRCRRCGYTLESLPHVLCHCGPHSAARQRRHDNLVSRLSRAIRLPGEIRVNRRIPGATGESTALRPDIVVTHEASRTIVLVDVTVPFENTMQAIADARLEKINKYKDLADSLRGRGYKVYLDAFIVGALGAWDPGNEFLLELLRISPRYASLMRKLMVAETIAGSRDIYVEHVSGIRQYTVPSTENNNDIAAVDDLAGEAQESSSPRLAGSPT

SEQ ID NO: 16372 - protein, 967 aa, Osmia lignaria
MATLQALEDFAAKVAEFFVKHRAVDTERTANSATSGRGGRPQAAARREGGSRRPRDSSTTTGTPTNREEYVREATRIQRLFRANRKRAVREVLKGSSPHCEVSKDVVQRHFTEMYAPRDRAGPLPTIHYETAQECDALVSACTAAEVSRRLDRMKKSSPGPDGVTYGDLRDVDPGATLLTALFNACLKMEHIPRVWKESNTVLIHKKGDRDDLSNWRPLAMGDTLPKLFAAVMADRLTHWAVLNRRLSRGQKGFLPYEGCLEHNFVLQECIADARRKKGELVVAWLDLSNAFGSIPHATILESLSNAGAPRAITNIVASLYTDCATRVRTSEGYTEKIPIQSGVKQGCPLSPILFNLAIEPLLRVAEESTGGYEIAGETVEELAYADDLTLLATYEEEMRDMLHNVEVTASNLGLAFNAKKCATLHLRGRDDVLDTVYCIQEEPVPALGKGEPYQHLGVPTGVQLDQTPYTTIRGVLEDLGAVDQSLLAPWQKIETVATFIVPRLDFLLRGANMRRMALSELDKAIKRTVKLWLNLPQRASPEVVHIPPSLGGCGLPPIADLAEVTAVAHAFRMLNAGDTVVANIARYSLEAAASEKLCRAPTGRDLAQYLSGSLAGDWSRPTTGRSSFWSRVRSAALRSGARLGFRWEWCDDRAELAVVMESRNGRRVVVPPQAKAHVITRMRAAVTEHYLSSLLRKPDQGKAFQATTQHAASNRFMRGGAFIRFADWRFIHRARLDVLPLNGARRWGSDDKRCRRCGYTLESLPHVLCHCGPHSAARQRRHDNLVLRLSRAIRLPGEIRVNRRVPGASGVSSALRPDIVVTHEASKTIVLVDVAVPFENTMQAIVDARTEKINKYKNLADSLKGRGYKVYLDAFIVGALGAWDPGNEFLLELLRISPRYASLMRKLMIAETIAWSRDIYVEHVSGIRQYTVSSTENHNENHNNSNRVNVDELEGEARVPSSPPHV

SEQ ID NO: 16373 - protein, 1741 aa, Osmia lignaria
MTSTTNPQPSCTARGNEVIITFPPPETFPCPFCNEGAPPSRMRVAVYQRHEDLGKHLRLHHHGASRRWVCGVCFFTDDSAYALKKVRKHHADSHANSAVPRAAGTRSSAPAGRTSGGAFSTGGDSAEERPTDAAIAELTQRPSPPPMEAAGTATSGGALTRAAKATLTNSRTTVAAKTRTAPKKKPTITASVTGRNLLTGWAIKKTATATTTTIRKNGTPSSPADGRPPSTGSPATPPTIDLTTPPAGTGAAKRTSGGPASMRRPSGGVTSTLTPPLKVKEKSPGTKRRSTRATTEPPQPGPPQRTITAARKVTPAVTYAEVTRGTSTVTTTMTTRRMARATSLPPVSKQEEAGGASTTQAPPTRPVTATCTFATAGTLTLTTTSVYSKPVAVVTVATRRSGGGASPRGIKKRIQEDTVLLESAPTTRARAARATTEPPRTPPRTRQATKMRKSPPTSMGSATVNDVATSRTPEERPVTRRSTRAKTLSPGSTQEKTTRGDGPTTLPSPTTGRPGRRLILPAIAEASPAVTAAPDKEKDKEKEKEKERRLGEEEDVGGWRDVVPWKTRRRAGRQEEEGVMTTPPPKTPTRQPRQHVQEEEVVREPLVVRTPTGAKQGPPSRPLTIDRATSPIDFNNNSSQCDCDRPRISNVASSVTNCPGSNRGSVFSTNGQSRRGRGGTSNTRTREQITGGVPPRGRAPRTPATHRRGTVTPPPSPERRGSRRGRDPHRDTRLPDAVPHAGRPDEPTRGADRPEVLRRSTRAAIGIERAGLVEEAETVATLQALEDFAAKVAEFFVKHRAVDTERAANSATSGRGGRPQAAARREGESRRPRDSSTTTGTPTNREEYVREATRIQRLFRANRKRAVREVLKGSSPHCEVSKDVVQRHFTEMYAPRDRAGPLPTIHYETAQECDALVSACTAAEVSRRLDRMKKSSPGPDGVTYGDLRDVDPGATLLTALFNACLKMEHIPRVWKESNTVLIHKKGDRDDLSNWRPLAMGDTLPKLFAAVMADRLTHWAVLNRRLSRGQKGFLPYEGCLEHNFVLQECIADARRKKGELVVAWLDLSNAFGSIPHATILESLSNAGAPRAITNIVASLYTDCATRVRTSEGYTEKIPIQSGVKQGCPLSPILFNLAIEPLLRVAEESTGGYEIAGETVDELAYADDLTLLATYEEEMRDMLHNVEVTANNLGLAFNAKKCATLHLRGRDDVLDTVYCIQEEPVPALGKGEPYQHLGVPTGVQLDQTPYTTIRGVLEDLGAVDQSLLAPWQKIETVATFIVPRLDFLLRGANMRRMALSELDKAIKRTVKLWLNLPQRASPEVVHIPPSLGGCGLPPIADLAEVTAVAHAFRMLNAGDTVVANIARYSLEAAASEKLCRAPTGRDLAQYLSGSLAGDWSRPTTGRSSFWSRVRSAALRSGARLGFRWEWCDDRAELAVVMESRNGRRVVVPPQAKAHVITRMRAAVTEHYLSSLLRKPDQGKAFQATTQHAASNRFMRGGAFIRFADWRFIHRARLDVLPLNGARRWGSDDKRCRRCGYTLESLPHVLCHCGPHSAARQRRHDNLVLRLSRAIRLPGEIRVNRRVPGASGVSSALRPDIVVTHEASKTIVLVDVAVPFENTMQAIVDARMEKINKYQDLADSLKGRGYKVYLDAFIVGALGAWDPGNEFLLELLRISPRYASLMRKLMIAETIAWSRDIYVEHVSGIRQYTVSSTENHNDNNRVNVDELEGEARVPSSPPQA

SEQ ID NO: 16374 - protein, 1738 aa, Osmia lignaria
MTSPQPSCTARGNDVIITFPFPETFPCPFCNVGVPSNWIRSAVYQRHEDLGKHLRIHHPGASRKWVCGVCSFTDNSVYALKKVRKHHADSHKGSEEPRAAGARPSVSASSSNSSSNNNDGGSAPPAEGDSAEKRPQSDATPVEMTQRPSPSPMEAAGTTTGGGALTRAAKTTLTNSRTTVAAKTKTAPKKKPVITSSVTGRNLLTGWAIKTATATRKSGMPSSPADGRPPSTGSPAAPPTVDLTTPPAGTGAAKRTSGGPVSMRRPSGGVTSILTPPLKEKEKSPGTNRRSTRATTEPPRPGPSQRTAITATRKVTPAVTYAEVTRGTSTTTTMTTRRMTRATSLPPVSREVGAGGVSTAQAPPTRPVVATCTFATAGTLTLTTTSVYSKPVAVVTVATRRSGGGTSPRGLKKRLQEDTVLLESTPTTRARAARATTEPPRTPPRTRNDERRSPPTGSATVNDMANQKTPKERPVTRRSTRAKTMSPGETQEKRRGDGPVTLPSPTTGRTGRRNLLPAIAEASPAVPAAPVEEMKTGGGGRRRRGTRGNEDEEDWRDVTPRITRRRAGRQQEEGALTTPSPKTQARQPRQQQQQREEEMAREPPVVRSPTGAEQGSRSRPLTVDRATSPIDFNNNSSHCSCDRPRLSIIASSATNCPGSNRGSVFRSNGLSRGGRGGTINSINNRSTRETTARRVPPRGRAPQSPATHRRGRVTPPNSPERRGSRRGRDPRRDTRLPDAVSHAGRLDEPTLDTDRPEGLRRSTRAAIGVERAGLAEEAETVTALQALEDFAAKVAEFFVKHRAVDTERAANPATSGRGGRPRPAARREGESHRPRDSSTTTGTPADREEYVREATRIQRLFRANRKRAVREVLKGSSPHCEVSKDVVQRHFADMYALRDRAGPLPTVHYETAQGSDALVSTCTATEVSRRLDRMKKSSPGPDGVTYGDLRDVDPGATLLTALFNACLRMEHIPRVWKESNTVLIYKKGDRDDLSNWRPLAMGDTVPKLFAAVMADRLTHWAVQNRRLSRGQKGFLPYEGCLEHNFVLQECIADARRKKGELVVAWLDLSNAFGSIPHATILESLSNAGVPRAMTNIVASMYTDCATRVRTAEGYTDRIPILSGVKQGCPLSPILFNLALEPVIRVAEDSTIGCKIAGERIVELAYADDIALLAESEEEMRRLLRDIEMIAASLGLAFNAKKCATLHIRGRDDVLDTVYRIQEEPVPALEKGESYQHLGIPTGVQLDQTPYTTIRGVLEDLGALDSSLLAPWQKVEALATFIVPRLDFLLRGANMRRTILSELDKAIKRTVKLWLHLPQRASPEVVHIPPSLGGCGLPPIADLAEVTAVAHAFRMLNAKDPVVARIARSTLEAAASEKLRRAPADRDLAQYLSGSLAGDWSRPTTGRSSFWSRVRSVALRSGARLGFRWEWCDDRAELAIVMESRNGRRVVVPPLAKAHVITRMRAAVTEHYVSSLLRKPDQGKVFQATTQHAASNRFMRGGAFIRFADWRFIHRARLDVLPLNGARRWGSDDKRCRRCGYTLESLPHVLCHCGPHSAARQRRHDNLVLRLSKAIRLPGEIRINRRVPGATGESSALRPDIVVTHEASKTIVLVDVAVPFENTMQAIVEARFEKINKYQQLADSLKGRGYKVYLDAFIVGALGAWDPGNEFLLELLRISPRYASLMRKLMVAETIAWSRDMYVEHVSGIRQYTVSSTDNNIRDNADLEGEARETSSPRT

SEQ ID NO: 16375 - protein, 1745 aa, Osmia lignaria
MSNATSPQPSCTARGNDVVITFPFPETFPCPFCNVGVPSNWIRSAVYQRHEDLGKHLRIHHPSAKRKWVCGVCSFTDDSVYALKKVRKHHADSHKSSAEPRAAGARPPASTSSKSNSNDGGSAPPAEGDAAEKRPLTDAAPAKTTQRPSPSPLATAAPTTRGGALTRATKPNPTNSRTTAAAKPKDAPKRKPTITSTVTGRNLLTGWATIKTATTSTRKSGTPSSPADGRPPSTGSPATPPTVDLTTPPAGTGAAERTNDGPVSMRRPSGGVTFTLTPPLKVKEKEKSPGLKRRCTRATTEPPQPGPPQRTITTARKVTPAVTYAEVTRGTSSATTTMTTRRMARATSLPPVPKQEEAGGASTTQAPPTRTVAATCTFATAGTLTLTTTSVYSKPVAVVTVATRRSGGGTSPRGLMKRIQEDTVLLESAPTTRVRAARATTEPPRTPPRTRQQAKQRKSPPPPTGSATVNDAATPTTPELRPALRRSTRAKTLSPGSTQGTRRGDGPTTLPSPTTGRTGRRNLLPAIAEASPAVTAAREKMKRMEREMRTGVEEDARDWRDVTPRNRRRRAGRQDGEGDLTTPSPKTPARQPRQQQQQQHEEEVVRGPRVVRTPTGAEQGSRSKPLTVDRATSPIDFNNNNSSLCNCDRPRLSAIASSATNCPGSNRGSVFSQNNGQNRRGRGGTINNTNNRSTRETSTRRVPPRGRAPQSPAAHRRGRVTPPPSPGHRGSRRGRDPHRDTRLPDAVPHAGRSDEPTPDADRPEVLRRSTRAAIGIERAGLVEEAETVTTPQALEDFAAKVAEFFVKHRAVDTERAANSATSGRGGRPQAAARREGESRRPRDSSTTTGTPTNREEYVREATRIQRLFRANRKRAVREVLKGSSPHCEVSKDAVQRHFADMYALRDRAEPLPTIHYETAQGSDALVSTCTATEVSRRLDRMKKSSPGPDGVTYGDLRDVDPGATLLTALFNACLRMEHIPRVWKESNTVLIYKKGDRDDLSNWRPLAMGDTVPKLFAAVMADRLTHWAVQNRRLSRGQKGFLPYEGCLEHNFVLQECIADARRRKGELVVAWLDLSNAFGSIPHATILESLSNAGVPRAMTNIVASMYTDCATRVRTAEGYTDRIPILSGVKQGCPLSPILFNLALEPVIRVAEDSTIGCKIAGERIVELAYADDIALLAESEEEMRRLLRDIEMIAASLGLAFNAKKCATLHIRGRDDVLDTVYRIQEEPVPALEKGESYQHLGIPTGVQLDQTPYTTIRGVLEDLGALDRSLLAPWQKVEALATFIVPRLDFLLRGANMRRTILSELDKAIKRTVKLWLHLPQRASPEVVHIPPSLGGCGLPPIADLAEVTAVAHAFRMLNAKDPVVARIARSTLEAAASEKLRRAPTERDLAQYLSGSLAGDWSRPTTGRSSFWSKVRSVALRSGARLGFRWEWCDDRAELAIVMESRNGRRVVVPPLAKAHVITRMRAAVTEHYVSSLLRKPDQGKVFQATTQHAASNRFMRGGAFIRFADWRFIHRARLDVLPLNGARRWGSDDKRCRRCGYALESLPHVLCHCGPHSAARQRRHDNLVLRLSKAIRLPGEIRINRRVPGATGESSALRPDIVVTHEASKTIVLVDVAVPFENTMQAIVEARFEKISKYQQLADSLRGRGYKVYLDAFIVGALGAWDPGNEFLLELLRISPRYASLMRKLMVAETIAWSRDMYVEHVSGIRQYTVSSTDNNIRDNAVLEGEAREPSSPRN

SEQ ID NO: 16376 - protein, 968 aa, Astreopora myriophthalma
MVYVARREIAMQTASGSVNVKELAAQIPNRTYESIRGLRRKTEYRDLVTSLASTSIGTRDGAPSLPSEGTPMGPEAQSASSEEWTQDWAADLIKAVEDSKINLGELRLGDIVPGQPSDRVREAVDSNYEAWLPSRPRRSRGAREPPKVPEGPRAKRRAQYARVQHCYDRDRTRCARDVLSDSWLDPPASLPMSTQEPFWRDLFETPSTPDSRTFPPVGEVCWDMLRPITSEVVVGALKKMKDGAPGPDGRTLPDVKAIPAEELAGHFNLWLLAGYLPTQLRRGETVLLPKCPGAGDPSKYRPITMSDIVVRCFHRIIAQRMEALLPFNTRQKAFRAGDGVADSVWFIQAVIKHHQDSLRPLNVAFVDVKKAFDSVSHQSILVAAARLGVPPPFLGYIRELYSDAVTTLRIGTELSDPIRLGRGVRQGDPLSVHLFNAVIDMCLAGLDEGLGCEVGGMRVNQGAFADDIALIATTPLGLQTLASELESQLTLCGLSISSGPQGKSASMRLDIDGKAKKWVVNPLPYLRIAGETVPAVSVSQLYRYLGVDLSPQRTRANVERILREGLASSSSAPLKPQQRLYIATYHLLPKVQHQLTLTHSSAKYLKWLDRMVRSAVRSWLKLPADTPVPYFHAPVVEGGLGIPLLEHVVPLSRANRLSRLDESPDPVIAAMLKEASASAGLARMTCRTSLDGHEITSSRDLKATLAAMLHKSVDGRGLANASLVPECQRWVNAGRGSGNPNTAGAYIAAIKVRGNLIGTALRRSRGRPQASNRCDCCGRVESLGHILQVCPRTHASRVARHDKILDLVDRTLTQKGYTIAREPAIPTPAGIRRPDLVVARGSAVTVLDVTIVADNADLARVHDSKCVYYDTPSIREWVRDRYGTGEISVSSVALNWRGAMAIQSARTLRNMGVSGAFLGLLSYVTLERGSWIVSHFHRSTYSVRWRDGLTPHGAGGNLPIGSDTYGCG

SEQ ID NO: 16377 - protein, 877 aa, Bombyx mori
MDGCINNNGVADWVSLLSFSYTTLRIPDRGDPRSLTAKVKENANNNSPYFLEDFKHKPRSIVKRIEAKVHEGDLRGAVRLLVSEDSLAPFNNETLSALRDKHPTPFRPLSLPPAPDSSCPFLTVNSEDVADAISSFYSGSAPGLDGLRPNHLKELISPSAGENGVRLLHSITDLCNFILRGTVNVQVCPYLYGGSLCALTKKDGGVRPIAVGSVLRRLAAKLGCRSVRNEMASYLQPHQLGFGTALGCEAAIHATRAFAMSRESCNSAIVKLDIRNAFNSLERDIILNEIKERIPALYPFLYQCYSSSSKLFFMESSIDSEVGAQQGDPLGPLIFSLAIHIIIKTVKSPLNLWYLDDGTIGGPPDSVLDDIRLLFPKLRDVGLEVNTGKCEVYFSTEVSASVVNDFQELVPGIKVLNKSNFILLGTPIFQDGVPSSLEIKRQLLSSLRGNLLSLSSHVALLLLRCCFSMPRLTYLVRTCPTWLFTQDVAQLDALLRDTLEAILNVSLDDRQWCQAVLPIRHGGLGVRQMERTGLAAFLASCYGVVDFVAKLLGTNGDGSTIPFASEALAAWGLLCPNEALPVNRSSQRCWDDVLCKLTLSTLLGDAAGVELARLKAVSSPESGAWLQALPSPQLGTLLDNNSLRVATALRLGCSICEPHRCVCGSMVDAAGLHGLSCVRSAGRFPRHHALNDIIRRALVSANIPCVLEPPGLSRSDGKRPDGLTLIPWEKGRCLLWDATCSCTYAACHLSGTRQCAGFAAEASAKTKHAKYDALKSTYLFVPVAVETTGVWSSEAKKFIAAIGHRLRGQGHDPRSGSYLVQRLSIAIQRGNAASIPIEAPVTRGRAHRPLDRPAFVRPAFVSPAIVRAACVRGTSAD

SEQ ID NO: 16378 - protein, 946 aa, Bombyx mori
MNSPTRATCPHCPGSTRLFVVPRGLNVHISHMHKDSQIQPSILPRVPCAVTADAHSQTQSVIHTLDDLASYKNKIPVLKHIPKGARNLVAGKLRVIMDGCINNNGVADWVSLLSFSYTTLRIPDRGDPRSLTAKVKENANNNSPYFLEDFKHKPRSIVKRIEAKDHEGDLRGAVRLLVSEDSLAPFNDETLSALRDKHPTPFRPLSLPPAPDSSCPFLTVNSEDVADAISSFYSGSAPGLDGLRPNHLKELISPSAGENGVRLLHSITDLCNFILRGTVNVQVCPYLYGGSLCALTKKDGGVRPIAVGSVLRRLAAKLGCRSVRNEMASYLQPHQLGFGTALGCEAAIHATRAFAMSRESCNSAIVKLDIRNAFNSLETDIILNEIKEKIPALYPFLYQCYSSSSKLFFMESSIDSEVGAQQGDPLGPLIFSLAIHSIIKTVKSPLNLWYLDDGTIGGPPDSVLDDIRLLFPKLRDVGLEVNTGKCEVYFSTEVSASVVNDFQELVPGIKVLNKSNFILLGTPIFQDGVPSSLEIKRQLLSSLRGNLLSLSSHVALVLLRCCFSMPRLTYLVRTCPTWLFTQDVAQLDALLRDTLEAILNVSLDDRQWCQAVLPIRHGGLGVRQMERTGLAAFLASCYGVVDFVAKLLGTNGDGSTIPFASEALAAWGLLCPNEALPVNRSSQRCWDDVLCKLTLSTLLGDAAGVELARLKAVSSPESGAWLQALPSPQLGTLLDNNSLRVATALRLGCSICEPHRCVCGSMVDAAGLHGLSCVRSAGRFPRHHALNDIIRRALVSANIPCVLEPPGLSRSDGKRPDGLTLIPWEKGRCLLWDATCSCTYAACHLSGTRQCAGFAAEASAKTKHAKYDALKSTYLFVPVAVETTGVWSSEAKKFIAAIGHRLRGQGHDPRSGSYLVQRLSIAIQRGNAASVMGTFGPGAIQSGLFD

SEQ ID NO: 16379 - protein, 946 aa, Bombyx mori
MNSPTRATCPHCPGSTRLFVVPRGLNVHISHMHKDSQIQPSILPRVPCAVTADAHSQTQSVIHTLDDLASYKNKIPVLKHIPKGARNLVAGKLRVIMDGCINNNGVADWVSLLSFSYTTLRIPDRGDPRSLTAKVKENANNNSPYFLEDFKHKPRSIVKRIEAKVHEGDLRGAVRLLVSEDSLAPFNDETLSALRDKHPTPFRPLSLPPAPDSSCPFLTVNSEDVADAISSFYSGSAPGLDGLRPNHLKELISPSAGENGVRLLHSITDLCNFILRGTVNVQVCPYLYGGSLCALTKKDGGVRPIAVGSVLRRLAAKLGCRSVRNEMASYLQPHQLGFGTALGCEAAIHATRAFAMSRESCNSAIVKLDIRNAFNSLERDIILNEIKEKIPALYPFLYQCYSSSSKLFFMKSSIDSEVGAQQGDPLGPLIFSLAIHSIIKTVKSPLNLWYLDDGTIGGPPDSVLDDIRLLFPKLRDVGLEVNTGKCEVYFSTEVSASVVNDFQELVPGIKVLNKSNFILLGTPIFQDGVPSSLEIKRQLLSSLRGNLLSLSSHVALVLLRCCFSMPRLTYLVRTCPTWLFTQDVAQLDALLRDTLEAILNVSLDDRQWCQAVLPIRHGGLGVRQMERTGLAAFLASCYGVVDFVAKLLGTNGDGSAIPFASEALAAWGLLCPNEALPVNRSSQRCWDDVLCKLTLSTLLGDAAGVELARLKAVSSPESGAWLQALPSPQLGTLLDNNSLRVATALRLGCSICEPHRCVCGSMVDAAGLHGLSCVRSAGRFPRHHALNDIIRRALVSANIPCVLEPPGLSRSDGKRPDGLTLIPWERGRCLLWDATCSCTYAACHLSGTRQCAGFAAEASAKTKHAKYDDLKSTYLFVPVAVETTGVWSSEAKKFIAAIGHRLRGQGHDPRSGSYLVQRLSIAIQRGNAASVMGTFGPGAIQSGLFD

SEQ ID NO: 16380 - protein, 946 aa, Bombyx mandarina
MNSPTRATCPHCPGSTRLFVVPRGLNVHISHMHKDSQIQPSILPRVPCAVTADAHSQTQSVIHTLDDLASYKNKIPVLKHIPKGARNLVAGKLRVIMDGCINNNGVEDWVSLLSFSYTTLRIPDRGDPRSLTAKVKENANNNSPYFLEDFKHKPRSIVKRIEAKVHEGDLRGAVRLLVSEDSLAPFNDETLSALRDKHPTPFRPLSLPPAPDSSCPFLTVNSEDVADAISSFYSGSAPGLDGLRPNHLKELISPSAGENGVRLLHSITDLCNFILRGTVNVQVCPYLYGGSLCALTKKDGGVRPIAVGSVLRRLAAKLGCRSVRNEMASYLQPHQLGFGTALGCEAAIHATRAFAMSRESCNSAIVKLDIRNAFNSLERDIILNEIKEKIPALYPFLYQCYSSSSKLFFMESSIDSEVGAQQGDPLGPLIFSLAIHSIIKTVKSPLNLWYLDDGTIGGPPDSVLDDIRLLFPKLRDVGLEVNTGKCEVYFSTEVSASVVNDFQELVPGIKVLNKSNFILLGTPIFQDGVPSSLEIKRQLLSSLRGNLLSLSSHVALVLLRCCFSMPRLTYLVRTCPTWLFTQDVAQLDALLRDTLEAILNVSLDDRQWCQAVLPIRHGGLGVRQMERTGLAAFLASCYGVVDFVAKLLGTNGDGSTIPFASEALAAWGLLCPNEALPVNRSSQRCWDDVLCKLTLSTLLGDAAGVELARLKAVSSPESGAWLQALPSPQLGTLLDNNSLRVATALRLGCSICEPHRCVCGSMVDAAGLHGLSCVRSAGRFPRHHALNDIIRRALVSANIPCVLEPPGLSRSDGKRPDGLTLIPWEKGRCLLWDATCSCTYAACHLSGTRQCAGFAAEASAKTKHAKYDALKSTYLFVPVAVETTGVWSSEAKKFIAAIGHRLRGQGHDPRSGSYLVQRLSIAIQRGNAASVMGTFGPGAIQSGLFD

SEQ ID NO: 16381 - protein, 946 aa, Bombyx mori
MNSPTRATCPHCPGSTRLFVVPRGLNVHISHMHKDSQIQPSILPRVPCAVTADAHPQTQSVIHTLDDLASYKNKIPVLKHIPKGARNLVAGKLRVIMDGCINNNGLGDWVSLLSFSYTTLRIPDRGDPRSLTAKVKENANNNSPYFLEDFKHKPRSIVKRIEAKVHEGDLRGAVRLLVSEDSLAPFNDETLSALRDKHPTPFRPLSLPPAPDSSCPFLTVNSEDVADAISSFYSGSAPGLDGLRPNHLKELISPSAGENGVRLLHSITDLCNFILRGTVNVQVCPYLYGGSLCALTKKDGGVRPIAVGSVLRRLAAKLGCRSVRNEMASYLQPHQLGFGTALGCEAAIHATRAFAMSRESCNSAIVKLDIRNAFNSLERDIILNEIKEKIPALYPFLYQCYSSSSKLFFMESSIDSEVGAQQGDPLGPLIFSLAIHSIIKTVKSPLNLWYLDDGTIGGPPDSVLDDIRLLFPKLRDVGLEVNTGKCEVYFSTEVSASVVNDFQELVPGIKVLNKSNFILLGTPIFQDGVPSSLEIKRQLLSSLRGNLLSLSSHVALVLLRCCFSMPRLTYLVRTCPTWLFTQDVAQLDALLRDTLETILNVSLDDRQWCQAVLPIRHGGLGVRQMERTGLAAFLASCYGVVDFVAKLLGTNGDGSTIPFASEALAAWGLLCPNEALPVNRSSQRCWDDVLCKLTLSTLLGDAAGVELARLKAVSSPESGAWLQALPSPQLGTLLDNNSLRVATALRLGCSICEPHRCVCGSMVDAAGLHGLSCVRSAGRFPRHHALNDIIRRALVSANIPCVLEPPGLSRSDGKRPDGLTLIPWEKGRCLLWDATCSCTYAACHLSGTRQCAGFAAEASAKTKHAKYDALKSTYLFVPVAVETTGVWSSEAKKFIAAIGHRLRGQGHDPRSGSYLVQRLSIAIQRGNAASVMGTFGTGAIQSGLFD

SEQ ID NO: 16382 - protein, 946 aa, Bombyx mori
MNSPTRATCPHCPGSTRLFVVPRGLNVHISHMHKDSQIQPSILPRVPCAVTADAHSQTQSVIHTLDDLASYKNKIPVLKHIPKGARNLVAGKLRVIMDGCINNNGVADWVSLLSFSYTTLRIPDRGDPRSLTAKVKENANNNSPYFLEDFKHKPRSIVKRIEAKVHEGDLRGAVRLLVSEDSLAPFNDETLSALRDKHPTPFRPLSLPPAPDSSCPFLTVNSEDVADAISSFYSGSAPGLDGLRPNHLKELISPSAGENGVRLLHSITDLCNFILRGTVNVQVCPYLYGGSLCALTKKDGGVRPIAVGSVLRRLAAKLGCRSVRNEMASYLQPHQLGFGTALGCEAAIHATRAFAMSRESCNSAIVKLDIRNAFNSLERDIILNEIKEKIPALYPFLYQCYSSSSKLFFMESSIDSEVGAQQGDPLGPLIFSLAIHSIIKTVKSPLNLWYLDDGTIGGPPDSVLDDIRLLFPKLRDVGLEVNTGKCEVYFSTEVSASVVNDFQELVPGIKVLNKSNFILLGTPIFQDGVPSSLEIKRQLLSSLRGNLLSLSSHVALVLLRCCFSMPRLTYLVRTCPTWLFTQDVAQLDALLRDTLEAILNVSLDDRQWCQAVLPIRHGGLGVRQMERTGLAAFLASCYGVVDFVAKLLGTNGDGSAIPFASEALAAWGLLCPNEALPVNRSSQRCWDDVLCKLTLSTLLGDAAGVELARLKAVSSPESGAWLQALPSPQLGTLLDNNSLRVATALRLGCSICEPHRCVCGSMVDAAGLHGLSCVRSAGRFPRHHALNDIIRRALVSANIPCVLEPPGLSRSDGKRPDGLTLIPWERGRCLLWDATCSCTYAACHLSGTRQCAGFAAEASAKTKHAKYDDLKSTYLFVPVAVETTGVWSSEAKKFIAAIGHRLRGQGHDPRSGSYLVQRLSIAIQRGNAASVMGTFGPGAIQSGLFD

SEQ ID NO: 16383 - protein, 1005 aa, Listronotus bonariensis
MKIKKFYIRPQNKSTVNNVNEILQTKIVQISQSSKNEACKRRLIKNSIYVAGVLLRQLIIGKHTPTQNNSYLATEKKIKKLEKHKKNAEKLLAAKGGRLSRALLQEKQIIGKLKVTVKQYISSTTERLKILKNNLEQQKRGTRSTQFDTKCITPPQSEYYNKQKPTNVLSCKRLKLLHKFVQKETDNTPTPVLNKWLSKLKTFSNTKQKDHQINEINIKTKINKILTRTAPWKASGEDKIPAYMYKIFPAAQNYLIKFVTKSLQGKLILNQADTRANVILLYKKGNEKDAANYRPIALLNTDYKVLTAVITDTIKESMPDWAIPPEQLAREKIWGTTHGFMLDKSITQLARLRRSKNYSAWYDFKKAFDSIYHKHLKRLVDCLPLHNNIQKAFKHAMKLWSVRVTVGKQQTKAIPIQRGVYQGDSISPLLFKLITAGIMNHIKTNEEITKAAKGKQHIIAFMDDIKCHAPTIKSMKIITNCLEKGAAEVGLELNRSKCGWYSRETLPAEENDAVPFLPEIREGYQYLGLDQLERDNLENYEAIENKIEEKLDLILQSDLTTNQKIDLLNTTINPAINYVMGNIFPNEKRSSTLKRCQDLDKKIRKKLVDNNVKGKTTSNARVYLPRTKGGLGLKSIEFEVETQYVRKGIYLRMHPEMQKVHESFKALKKAGWRNPINDCDYVLEKYEINLNIEDYNNYKKCCYATLKKIKQKHQQNTEKEWAANLAYAKNVLKEGEKIKFPAYKSPSMDSWRLSVLNSAAEEQLHGLGANPQRPKCIKGCQADENAYHVANACPTRAFASRHDFVVHWSLKCMLKSLGAPEEVQKNLQFGKATIKCQFEVGKRSIVIEAGNKILTEKKLYHNRPDICVRLNNPPEIFIFEIAVSHIQNYREQERLKNIRYSVNSVTKLTNTNISNVRRDLNLVTELENIYRCPVHLGVFVVGCFGEVIETDAHMEFCRLIQRMGVPKLELQTLINKCSYSVAVSTSNLLLRRIEERKNKDQSVIE

SEQ ID NO: 16384 - protein, 1076 aa, Tenebrio molitor
MPMSTSSNISLDENDSFFEFKYPQDSRFRLRTTHWKISDKDLTDAGPSNVNINLDEKFGNVKKCQNTIYEDKLVFQCEECNRNFKNEKGLKIHRTRIHGLMGQSFLCESFSSKIDKTRRKNETIHQSLLTSMDYEKQSGSQDSQPDGSQRLRCTLCPGKSFKDNNRLKIHVDKYHVDNNLSTFSTSSSTDSITNLLINLKLQLPTIRRIPKACRHLAADKLSSIINNCLSTKSLSSFENLLLFSYRAFNVAEKSDKSLNKHIKENLSNFEVPQIRTGSKKRTNLSLAKKVEAKVADFDIRGAVKLLSSDDSLASFNEDVAEELKKKHPSPSRELFFPDPFKPGDISLIVNEQNVREAINSFPAGSSPGLDGMRPQYLKDIISLSAGEAGQKALRALTKLCNFLLSGQLPSEICHLLYGASLCALNKKDGGIRPIAIGNCLRRLTSKLACFQSRNIVNSYLSPHQLGVATKLGCEAAIHTTRTFVNNDQNRGKVLLKLDFKNAFNSVERDCILKEVQCHTPLLYPYLYQCYRNPSTLFFGNHLISSSVGAQQGDPCGPMIFSLAIQPIILSLDSQMNIWYLDDGTLADYPEVVLSDFKKVINLSQEIGLELNFNKCEIFCCSGDTDLKVIKEFQNLAPGIKICDRESLSLLGSPIFDQGFKNTVEKTIITVENLLNKTELLNRHVAYTLIKNCLFIPKFNFLLRTTPFWKFSNYVNSIDSSLKSCLERILNLRLTDLQWRQSTLPIRFGGLGIRRISFCLPAFLSSINGVKKLVSLLLNSKDNELNIHHYDEALAAWGVANENEIPTIPQFQKNWDNINIKGIIANDLIFNSPRDLARFKALQCRESGSWLHAIPSPNIGTLLDNTSFQVCIGLRLGCNLCTPHICKCNAKVDEIGTHGLSCFKSSGRFSRHTEINSIINRSLTSIHVNSTLEPNGLSRDDGKRPDGMTLVPWIKGQPLVWDVTVVDTLADSYVLKSSEVSGFAAEMACKRKHSKYSSIISSNYVFKGLAFETLGPWCKEAIDFINVIGNRLIAESGDSKSKRFLFERISLAIQRGNAASIRGTFPDSAILSEIFVL

SEQ ID NO: 16385 - protein, 1074 aa, Tenebrio molitor
MRLSTSFDNSLEESNSYLEFKYPQDTRFRLRTTDWKISDQDLTDAGPSNANLEHKFGNVKKCHKISGEKLVFRCEDCNRDFKKEKGLKIHRSRIHGLMSQSFSSKSFSSEINKTRRKTEEINNTSFNCTDYEKQFGSQDNHSSGQQRLNCNLCPGKSFKDNTRLKIHVDKYHTNSNLPTSSNFSSTVSITKLLINLKQQLPTIRRLPKACRHLAADKLSSIINNCLSTKSISSFEDLLLFSYRAFNVAEKSDKSLNKHIKENISNFEVPQIRTSSKRRTNLSLAKKVEAKVADFDIKGAVKLLSSDDSLASFNEDVTEELKKKHPSPSRELFFPDAFKTGDFSLIVNEQNVREAINSFPAGSSPGLDGMRPQYLKDIISLSAGEAGQRALRALTKLCNFLLSGQLPSEICHLLYGASLCALHKKDGGIRPIAIGNCLRRLTSKLACFQSRNIVNSYLSPHQLGVATKLGCEAAIHTTRTFVNNDLNRSKVVLKLDFKNAFNSVERDCILKEVQCHTPLLYPYLYQCYRNPSTLFFGDHLISSSVGAQQGDPCGPMIFSLAIQPIILSLNSELNIWYLDDGTLADYPEVVLSDFKKVINFSRKIGLELNFNKCEIFSCSGDTDLKIIKEFQNLAPGIKICDRGSLSLLGSPIFDQGFKNTVEKTIITVENLLNKAEFLSRHVAYTLIKNCLFIPKFNFLLRTTPFWKFSNYVNSIDSSLKSSLEKVLNLRLTDLQWCQSTLPIRFGGLGIRRISDICLPAFLSSIHGVKKLVSQLLNSKDNELIIHHYDEALAVWDVENDNERPTIPQFQKNWDNINIKRTIDNDLIFNSSRDLARFKALQCRESGSWLHAIPSPNIGTLLDNTSFQVCIGLRLGCNLCTPHICKCNAKVDEIGIHGLSCSKSSGRFSRHTEINSIINRSLTSIHVNSTLEPNGLSRDDGKRPDGMTLVPWNKGQPLVWDVTVVDTLADSYVLKTSEVSGFAAEMACKRKHNKYRSIISSNYIFKGLAFETLGPWCKETIDFINVIGDRLIAESGDSKSKKFLFERISLAIQRGNAASIRGTFPDSALLSEIFAL

SEQ ID NO: 16386 - protein, 977 aa, Tenebrio molitor
MGQSFLCESFSSKIDKTRRKNETVHQSIPTSMDYEKKSGSQDSQPDGSQRLRCTLCPGKSFKDNNRLKIHVDKYHVDNNLSTFSISSSTDSITKLLINLKLQLPTIRRIPKACRHLAADKLSSIINNCLSIKSLSSFENLLLFSYRAFNVAEKSDKSLNKHIKENLSNFEVPQIRTGSKKRTNLSLAKKVEAKVADFDIRGAVKLLSSDDSLASFNEDVAEELKKKHPSPSRELFFPDPFKPGDISLIVNEQNVREAINSFPAGSSPGLDGMRPQYLKDIISLSAGEAGQKALRALTKLCNFLLSGQLPSEICHLLYGASLCALNKKDGGIRPIAIGNCLRRLTSKLACFQSRNIVNSYLSPHQLGVVTKLGCEAAIHTTRTFVKNDQNRGKVLLKLDFKNAFNSVERDCILKEVQCHTPLLYPYLYQCYRNPSTLFFGNHLISSSVGAQQGDPCGPMIFSLAIQPIILSLDSQMNIWYLDDGTLADYPEVVLSDFKKVINLSQEIGLELNFNKCEIFCCSGDTDLKVIKEFQNLAPGIKICDRESLSLLGSPIFDQGFKNTVEKTIITVENLLNKAELLNRHVAYTLIKNCLFIPKFNFLLRTTPFWKFSNYVNSIDSSLKSCLERILNLRLTDLQWRQSTLPIRFGGLGIRRISDICLLAFLSSINGVKKLVSLLLNSKDNELNIHHYDEALAAWGVANENEIPTIPQFQKNWDNINIKRIIDNDLIFNSPRDLARFKALQCRESGSWLHAIPSPNIGTLLDNTSFQVCIGLRLGCNLCTPHICKCNAKVDEIGTHGLSCFKSSGRFSRHTEINSIINRSLTSIHVNSTLEPNGLSRDDGKRPDGMTLVPWIKGQPLVWDVTVVDTLADSYVLKSSEVSGFAAEMACKRKHSKYSSIISSNYVFKGLAFETLGPWCKEAIDFINVIGNRLIAESGDSKSKKFLFERISLAIQRGNAASIRGTFPDSAILSEIFVL

SEQ ID NO: 16387 - protein, 1074 aa, Tenebrio molitor
MRLSTSFDNSLEDSNSYLEFKYPQDTRFRLRTTDWKISDQDLTDAGPSNANLEHKFGSVKKYHKISGKKLVFRCEDCNRDFKREKGLKIHRSRIHGLMSQSFSSKSFSSEINKTRRKIEEINNTPFISTDYEKQFGSQDNHSSGPQRLNCNLCPGKSFKDNTRLKIHIDKYHINSNLPTSSNFSSTVSITKLLINLKQQLPTIRRLPKACRHLAADKLSSIINNCLSTKSISSFEDLLLFSYRAFNVAEKSDKSLNKHIKENLSNFEVHQIRTSSKRRTHLSLAKKVKAKVADFDIKGAVKLLSSDDSLASFNEDVAEELKKKHPSPSRELFLPDAFKTRDFSLIVNEQNVREAINSFPAGSSPGLDGMRPQYLKDIISLSAGEAGQQALRALTKLCNFLLSGQLPSEICHLLYGASLCALHKKDGGIRPIAIGNCLRRLTSKLACFQSRNIVNSYLSPHQLGVVTKLGCEAAIHTTRTFVNNDLNRSKVVFKLDFKNAFNSVERDCILKEVQCHTPLLYHYLYQCYRNPSTLFFGDHLISSSVGAQQGDPCGPMIFSLAIQPIILSLNSELNIWYLDDGTLADYPEVVLSDFKKVINLSRKIGLELNFNKCEIFSCSGDTDLKVIKEFQNLAPGIKICDRGSLSLLGSPIFDQGFKNTVEKTIITVENLLNKAEFLSRHVAYTLIKNCLFIPKFNFLLRTTPFFFFFNYVNSIDSSLKSSLEKILNLRLTDLQWCQSTLPIRFGGLGIRRISDICLPAFLSSVHGVKKLVSQLLNSKDNELIIHHYDEALAVWDVENENERPTIPQFQKNWDNINIKRIIDNDLIFNSSRDLARFKALQCRESGSWLHAIPSPNIGTLLDNTSFQVCIGLRLGCNLCTPHICKCNAKVDEIGIHGLSCSKSSGRFSRHTEINSIINRSLTSIHVNSTLEPNGLSRDDGKRPDGMTLVPWNKGQPLVWDVTVVDTLADSYVLKTSEVSGFAAEMACKRKHNKYRSIISSNYIFKGLAFETLGPWCKETIDFINVIGDRLIAESGDSKSKKFLFERISLAIQRGNAASIRGTFPDSALLSEIFAL

SEQ ID NO: 16388 - protein, 1074 aa, Tenebrio molitor
MRLSTSFDNSLEESNSYLEFKYPQDTRFRLRTTDWKISDQDLNDAGPSNANLENKFGNVKKCHKIFGEKLVFRCEDCNRDFKKEKGLKIHRSRIHGLMSQSFSSKSFSSEINKTRRKTEEINNTSFNCTDYEKQFGSQDNHSSGQQRLNCNLCPGKSFKDNTRLKIHVDKYHTNSNLPTSSNFSSTVSITKLLINLKQQLPTIRRLPKACRHLAADKLSSIINNCLSTKSISSFEDLLLFSYRAFNVAEKSDKSLNKHIKENLSNFEVPQIRTSSKRRTNLSLTKKVEAKVADFDIKGAVKLLSSDDSLASFNEDVAEELKKKHPSPSRELFFPDAFKMGDFSLIVNEQNVREAINSFPAGSSPGLDGMRPQYLKDIISLSAGEAGQRALRALTKLCNFLLSGQLPSEICHLLYGASLCALHKKDGGIRPIAIGNCLRRLTSKLACFQSRNIVNSYLSPHQLGVATKLGCEAAIHTTRTFVNNDLNRSKVVLKLDFKNAFNSVERDCILKEVQCHTPLLYPYLYQCYRNPSTLFFGDHLISSSVGAQQGDPCGPMIFSLAIQPIILSLNSELNIWYLDDGTLADYPEVVLSDFKKVINFSRKIGLELNFNKCEIFSCSGDTDLKIIKEFQNLAPGIKICDRGSLSLLGSPIFDQGFKNTVEKTIITVENLLNKAEFLSRHVAYTLIKNCLFIPKFNFLLRTTPFWKFSNYVNSIDSSLKSSLEKILNLRLTDLQWCQSTLPIRFGGLGIRRISDICLPAFLSSVHGVKKLVSQLLNSKDNELIIHHYDEALAVWDVENENERPTIPQFQNNWDNINIKRIIDNDLIFNSSRDLARFKALQCRESGSWLHAIPSPNIGTLLDNTSFQVCIGLRLGCNLCTPHICKCNAKVDEIGIHGLSCSKSSGRFSRHTEINSIINWSLTSIHVNSTLEPNGLSRDDGKRPDGMTLVPWNKGQPLVWDVTVVDTLADSYVLKTSEVSGFAAEMACKRKHNKYRSIISSNYIFKGLAFETLGPWCKETIDFINVIGDRLIAESGDSKSKKFLFERISLAIQRGNAASIRGTFPDSALLSEIFAL

SEQ ID NO: 16389 - protein, 706 aa, Tenebrio molitor
MRPQYLKDIISLSAGEAGQRALRALTKLCNFLLSGQLPSEICHLLYGASLCALHKKDGGIRPNAIGNCLRRLTSKLACFQSRNIVNSYLSPHQLGVATKLGCEAAIHTTRTFVNNDLNRSKVVLKLDFKNAFNSVERDCILKEVQCHTPLLYPYLYQCYRNPSTLFFGDHLISSSVGAQQGDPCGPMIFSLAIQPIILSLNSELNIWYLDDGTLADYPEVVLSDFKKVINLSRKIGLELNFNKCEIFSCSGDTDLKVIKEFQNLAPGIKICDRGSLSLLGSPIFDQGFKNTVEKTIITVENLLNKAEFLSRHVAYTLIKNCLFIPKFNFLLRTTPFWKFSNYVNSIDSSLKSSLEKILNLRLTDLQWCQSTLPIRFGGLGIRRISDICLPAFLSSVHGVKKLVSQLLNSKDNELIIHHYDEALAVWDVENENERPTIPQFQKNWDNINIKRIIDNDLIFNSSRDLARFKALQCRESGSWLHAIPSPNIGTLLDNASFQVCIGLRLGCNLCTPHICKCNAKVDEIGIHGLSCSKSSGRFSRHTEINSIINRSLTSIHVNSTLEPNGLSRDDGKRPDGMTLIPWNKGQPLVWDVTVVDTLADSYVLKTSEVSGFAAEMACKRKHNKYRSIISSNYIFKGLAFETLGPWCKETIDFINVIGDRLIAESGDSKSKKFLFERISLAIQRGNAASIRGTFPDSALLSEIFAL

SEQ ID NO: 16390 - protein, 977 aa, Tenebrio molitor
MSQSFSSKSFFSEINKTRRKTEEINNTSFNCTDYEKQFGSQDNHSSGQQRLNCNLCPGKSFKDNTRLKIHVDKYHTNSNLPTSSNFSSTVSITKLLINLKQQLPTIRRLPKACRHLAADKLSSIINNCLSTKSISSFEDLLLFSYRAFNVAEKSDKSLNKHIKENLSNFEVPQIRTSSKRRTHLSLAKKVEAKVADFDIKGAVKLLSSDDSLASFNEDVAEELKKKHPSPSRELFFPDAFKTGDFSLIVNEQNVREAINSFPAGSSPGLDGMRPQYLKDIISLSAGEAGQRALRALTKLCNFLLSGQLPSEICHLLYGASLCALHKKDGGIRPIAIGNCLRRLTSKLACFQSRNIVNSYLSPHQLGVATKLGCEAAIHTTRTFVNNDLNRSKVVLKLDFKNAFNSVERDCILKEVQCHTPLLYPYLYQCYRNPSTLFFGDHLISSSVGAQQGDPCGPMIFSLAIQPIILSLNSELNIWYLDDGTLADYPEVVLSDFKKVINLSRKIGLELNFNKCEIFSCSGDTDLKVIKEFQNLAPGIKICDRGSLSLLGSPIFDQGFKNTVEKTIITVENLLNKAEFLSRHVAYTLIKNCLFIPKFNFLLRTTPFWKFSNYVNSIDSSLKSSLEKILNLRLTDLQWCQSTLPIRFGGLGIRRISDICLPAFLSSVHGVKKLVSQLLNSKDNELIIHHYDEALAVWDVENENERPTIPQFQKNWDNINIKRIIDNDLIFNSSRDLARFKALQCRESGSWLHAIPSPNIGTLLDNTSFQVCIGLRLGCNLCTPHICKCNAKVDEIGIHGLSCSKSSGRFSRHTEINSIINRSLTSIHVNSTLEPNGLSRDDGKRPDGMTLVPWNKGQPLVWDVTVVDTLADSYVLKTSEVSGFAAEMACKRKHNKYRSIISSNYIFKGLAFETLGPWCKETIDFINVIGDRLIAESGDSKSKKFLFERISLAIQRGNAASIRGTFPDSALLSEIFAL

SEQ ID NO: 16391 - protein, 1080 aa, Tenebrio molitor
MKYAMPMSTSSNISLDENDSFFEFKYPQDSRFRLRTTHWKISDKDLTDAGPSNVNINLDEKFGNVKKCHNTIYEDKLVFQCEECNRNFKNEKGLKIHKTRIHGPMGQSFLCESFSSKIDKTRKNEKIHQTPPTSMDFEKQSGLEDSQPDGSQRLCCTLCPGKSFKDNNRLKIHVDKYHVDNNLSTSSTYSSTDSITKLLINLKLQLPTIRRIPKACRHLAADKLSSIINNCVSTKSLSSFENLLLFSYRAFNVAEKSDKSLNKHIKENLSNFEEPQIRTGFKKRTNLSLAKKVEAKVADFDIRGAVKLLSSDDSLASFNEDVAEELKKKHPSPSRELFFPDPFKPGDISLIVNEQNVREAINSFPAGSSPGLDGMRPQYLKDIISLSAGEAGQKALRALTKLCNFLLSGQLPSEICHLLYGATLCALNKKDGGLRPIAIGNCLRRLTSKLACFQSRNIVNSYLSPHQLGVATKLGCEAAIHTTRTFVNNDQNRGKVLLKLDFKNAFNSVERDCILKEVQCHTPLLYPYLYQCYRNPSTLFFGNHLISSSVGAQQGDPCGPMIFSLAIQPIILSLDSQMNIWYLDDGTLADYPEVVLSDFKKVINLSQEIGLELNLNKCEIFCCSGDTDLKVIKEFQNLAPGIKICDRESLSLLGSPIFDQGFKNTVEKTIITVENLLNKAELLNRHVAYTLIKNCLFIPKFNFLLRTTPFWKFSNYVNSIDSSLKSCLERILNLRLTDLQWRQSTLPIRFGGLGIRRISDICLPAFLSSINGVKKLVSLLLNSKDNELNIHHYDEALAVWGVANENEIPTIPQFQKNWDNINIKGIIANDLIFNSPRDLARFKALQCRESGSWLHAIPSPNIGTLLDNTSFQVCIGLRLGCNLCTPHICKCNAKVDEIGTHGLSCFKSSGRFSRHTEINSIINRSLTSIHVNSTLEPNGLSRDDGKRPDGMTLVPWIKGQPLVWDVTVVDTLADSYVLKSSEVSGSAAEMACKRKHSKYSSIISSNYVFKGLAFETLGPWCKEAIDFINVIGNRLIAESGDSKSKKFLFERISLAIQRGNAASIRGTFPDSAILSEIFVL

SEQ ID NO: 16392 - protein, 1073 aa, Tenebrio molitor
MPMSTSSDISLDENDSFFEFKYPQDSRFRLRTTHWKISDKDLTDAGPSNVNINLDQKFGNVKKCHNTISEDKLVFQCEECNRNFKNEKGLKIHRTRIHGIMGQSVLCESLSSKSDKTRRKNETTPPTSMDYEKQSGSEDSQPDGSQRLSCTLCPGKSFKDNNRLKIHVDRYHVDNNLSTSSTSSTESITKLLINLKLQLPTIRRLPKACRHLAADKLSSIINNCLSTKSLSSFENLLLFSYRAFNVAEKSDKSLNKHIKENLSNFEVPQIRTGSKKRTNLSLAKKVEAKVADFDIRGAVKLLSSDDSLASFNEDVAEELKKKHPSPSRELFFPDPSTRGDISLIVNEQNVREAINSFPAGSSPGLDGMRPQYLKDIISLSAGEAGQRALRALTKLCNFLLSGQLPSEICHLLYGASLCALNKKDGGLRPIAIGNCLRRLTSKLACFQSRNIVNSYLSPHQLGVATKLGCEAAIHTTRTFVNNDQNRGKVLLKLDFKNAFNSVERDCILKEVQCHTPLLYPYLYQCYRNPSTLFFGNHLISSSVGAQQGDPCGPMIFSLAIQPIILSLDSQMNIWYLDDGTLADYPEVVLSDFKKVINLSQEIGLELNFNKCEIFCCSGDTDLKVIKEFQNLAPGIKICDRESLSLLGSPIFDQGFKNTVEKTMITVENLLNKAELLNRHVAYTLIKNCLFIPKFNFLLKTTPFWKFSNYVNSIDSSLKSCLERILNLRLTDLQWRQSTLPIRFGGLGIRRISDICLPAFLSSINGVKKLVSLLLNSKDNELNIHHYDEALAVWGVANENEIPTIPQFQKNWDNINIKGIIANDLIFNSPRDLARFKALQCRESGSWLHAIPSPNIGTLLDNTSFQVCIGLRLGCNLCTPHICKCNAKVDEIGTHGLSCFKSSGRFSRHTEINSIINRSLTSIHVNSTLEPNGLSRDDGKRPDGMTLVPWIKGQPLVWDVTVVDTLADSYVLKSSEVSGSAAEMACKRKHSKYSSIISSNYVFKGLAFETLGPWCKEAIDFINVIGNRLIAESGDSKSKKFLFERISLAIQRGNAASIRGTFPDSAILSEIFVL

SEQ ID NO: 16393 - protein, 1072 aa, Tenebrio molitor
MPCLCQHHLIFLLTKMIVFFEFKYPQDSRFRLRTTHWKISDKDLTDAGPSNVNINLDEKFGNVKKCQNTIYEDKLVFQCEECNRNFKNEKGLKIHRTRIHGLMGQSFLCESFSSKIDKTRRKNEAIHQSLPTSMDYEKQSGSQDSQPDGSQRLRCTLCHNRLKIHVDKYHVDNNLSTFSTSSSTDSITKLLINLKLQLPTIRRIPKACRHLAADKLSSIINNCLSTKSLSSFENLLLFSYRAFNVAEKSDKSLNKHIKENLSNFEVPQIRTGSKKRTNLSLAKKVEAKVADFDIRGAVKLLSSDDSLASFNEDVAEELKKKHPSPSRELFFPDPFKPGDISLIVNEQNVREAINSFPAGSSPGLDGMRPQYLKDIISLSAGEAGQKALRALTKLCNFLLSGQLPSEICHLLYGASLCALNKKDGGIRPIAIGNCLRRLTSKLACFQSRNIVNSYLSPHQLGVATKLGCEAAIHTARTFVNNDQNRGKVLLKLDFKNAFNSVERDCILKEVQCHTPLLYPYLYQCYRNPSTLFFGNHLISSSVGAQQGDPCGPMIFSLAIQPIILSLDSQMNIWYLDDGTLADYPEVVLSDFKKVINLSQEIGLELNFNKCEIFCCSGDTDLKVIKEFQNLAPGIKICDRESLSLLGSPIFDQGFKNTVEKTIITVENLLNKAELLNRHVAYTLIKNCLFIPKFNFLLRTTPFWKFSNYVNSIDSSLKSCLERILNLRLTDLQWRQSTLPIRFGGLGIRRISDICLPAFLSSINGVKKLVSLLLNSKDNELNIHHYDEALAAWGVANENEIPTIPQFQKNWDNINIKGIIANDLIFNSPRDLARFKALQCRESGSWLHAIPSPNIGTLLDNTSFQVCIGLRLGCNLCTPHICKCNAKVDEIGTHGLSCFKSSGRFSRHTEINSIINRSLTSIHVNSTLEPNGLSRDDGKRPDGMTLVPWIKGQPLVWDVTVVDTLADSYVLKSSEVSGFAAEMACKRKHSKYSSIISSNYVFKGLAFETLGPWCKEAIDFINVIGNRLIAESGDSKSKKFLFERISLTIQRGNAASIRGTFPDSAILSEIFVL

SEQ ID NO: 16394 - protein, 700 aa, Tenebrio molitor
MRPQYLKDIISLSAGEAGQKTLRALTKLCNFLLSGQLPSEICHLLYGASLCALNKKDGGIRPIAIGNCLRRLTSKLACFQSRNIVNSYLSPHQLGVATKLGCEAAIHTTRTFVNNDQNRGKVLLKLDFKNAFNSVERDCILKEVQCHTPLLYPYLYQCYRNPSTLFFGNHLISSSVGAQQGDPCGPMIFSLAIQPIILSLDSQMNIWYLDDGTLADYPEVVLSDFKKVINLSQEIGLELNFNKCEIFCCSGDTDLKVIKEFQNLAPGIKICDRESLSLLGSPIFDQGFKNTVEKTIITVENLLNKAELLNRHVAYTLIKNCLFIPKFNFLLRTTPFWKFSNYVNSIDSSLKSCLERILNLRLTDLQWRQSTLPIRFGGLGIRRISDICLPAFLSSINGVKKLVSLLLNSKDNELNIHHYDEALAVWGVANENEIPTIPQFQKNWDNINIKGIIANDLIFNSPRDLARFKALQCRESGSWLHAIPSPNIGTLLDNTSFQVCIGLRLGCNLCTPHICKCNAKVDEIGTHGLSCFKSSGRFSRYTEINSIINRSLTSIHVNSILEPNGLSRDDGKRPDGMTLVPWIKGQPLVWDVTVVDTLADSYVLKSSEVSGFAAEMACKRKHSKYSSIISSNYVFKGLAFETLGPWCKEAIDFINIAESGDSKSKKFLFERISLAIQRGNAASIRGTFPDSAILSEIFVL

SEQ ID NO: 16395 - protein, 926 aa, Epargyreus clarus
MQNISISSSSDANTCSQYNNSQCGNLLKCQLCSQPRYFKGNRGLRVHFGKAHKNVEHVKSTEITQTEASSDFVKTLGRLKGSIPVVKRIPRGSRVIVATTLNTIIKDVVNKNDLQSWEHLLTFPYVVLHAKKDSRSSLTQIIKTNCTSLIKYNDIVIKSKTSHKNSNIFKKVEQKVTDGDLKGAATILFSNDVIAPDSPATLSALLEKHPPTSIHGSPEFLNIEDDPQITPKQVLAAVMCFKNGSAGGLDGLTPQHLKDLVGGHVGDAVQLLLNSITQLINIMLAGKVTSDVTHILHGANICALKKKDGGIRPIAVGCTLRRLASKICCNVIKPDISEKLSPIQLGFGSQGGCEAAVHAARTLLMKERGDVFLKLDIKNAFNSVDRITLLDQVKQVTPSIYPFLWQCYGTPSKLVYKHHLLNSSVGCQQGDPLGPAIFSLAIHPIVSNLNSKFNVWYLDDGSLGGDTETVFTDFQEIMDKFSNIGLEVNFSKCELFVSNSKNVNEKNSIIERFKTLAPNIKISDKHSLHLLGSPIFPESIPSFIENNIHNFNETSDRLCLQPIYGPLLSTGLSSQVEKAWSILHHAAPMRIGGDRSDRADRLLKINSHMALFIIRFCLFVPKCTYLLRSTPLWKFNELCLKLDDIIMKTLSSVLNCHMNERAWTQASLPVRYGGLGIRKISSVALPAFLFSVHKTQNLTSDVLSKIFEEPQITFMDEAKDAWLQAGPNLKFPVHLNLQKFWDEPLCILVRHQLLDSAHDIAERARLLAVAERESGFWLQAYPSGNIGTLLDNLTLSVCTRLRLGVKTVEHHHCHCGADVDVFGHHGLSCQRSAGRLSRHATINDVIRRAFVTVNVPACLEPNGLARDDGKRPDGMTLIPWKGGRMLVWDATCVDTLAPSHLQASSSGAGAAATAAENAKRHKYVSL

SEQ ID NO: 16396 - protein, 960 aa, Chioides vintra
MQNTSASTSSDANACSQDDNICGNFVKCELCSQPRYFKGYRGLRVHFGKTHKNVSQSEPSVTIQNVTSIDLVKSLGFLKGSVPVVKRIPRGSRIAVATALNSVIKNIINKNDLESWEHLLTFPYVALHAKKDNRSSLTQIIKTNCSILKNYKDLTINSNNYSHKSNNIFKKVEQKVSDGDLKGAATILFSDDIIAPDSPATLSALLEKHPSASTHTSPEVLTNAVDPLQAAPKDVLAAVMSFKNGSAGGLDGLTPQHLKDLICGAVGEAGRALLNGITQLINLMLAGKVSTDVTHIIYGANLCALTKKDGGIRPIAVGCTLRRLASKICCKFIKPSVAEKLSPIQLGFGSQGGCEAAVHAARTFLLNDRGDVFLKLDIKNAFNSVNRITLLNEIKQVTPSIYPFMWQCYGSSSKLVYKSHTFDSSVGCQQGDPLGPAIFSLAIHPVVSSLNSKFNVWYLDDGTLGGDTDTVFSDFQKLLCKFSDIGLEVNFSKCELYISDSKSINEKISIVEKFKGLAPNIKILDKSSLHLLGSPIFPESVPSFIQNQSDFYNKNSLRLLKINSHMALFIIRFCLFVPKFTYILRCTPLWQFNNLCLNLDHIVNKILSSVLNCSLDDRAWTQASLPIRHGGLGIRKISSVALPAFLSSVHRTQNLTANILCKIFDEPKVIFMDEAKDAWLQSGPNLKFPVNLNLQKLWDEPLCLLVRNQLLDSAHDIAERARLLAVAEPESGFWLQAYPSGNIGTLLDNQTLSTCTSLRLGVKSVERHRCHCGTDVDALGHHGLSCQRSAGRLSRHSTINDVIRRALVSVNVPACLEPNGLARDDGKRPDGMTLIPWRRGRMLVWDATCVDTLAPSHLQATSSGAGAAATAAENAKRHKYVSLCDNYIFVAFGVETLGPWGPEAWEFYKHLSARLVDVSGDPRAGMHFAQRIAIAIQRGNAASILGTLPKDIDNDANNFL

SEQ ID NO: 16397 - protein, 959 aa, Epargyreus clarus
MQNISISSSSDANTCSQSNNSQCGNLLKCQLCSQPRYFKGNRGLRVHFGKAHKNVEHVESTEITQTEASSDFVKTLGRLKGSIPVVKRIPRGSRVTVATTLNTIIKDVVNKNDLQSWEHLLTFPYVVLHAKKDSRSSLTQIIKTNCTSLIKYNDIVIKSKTSHKNSNIFKKVEQKVTDGDLKGAATILFSNDVIAPNSPATLSALLEKHPPASIHGSPEFLNIEDDPLQITPKQVLAAVMCFKNGSAGGLDGLTPQHLKDLVGGHVGDAGQLLLNSITQLINIMLAGKVTSDVTRILYGANICALKKKDGGIRPIAVGCTLRRLASKICCNVIKPDISEKLSPVQLGFGSQGGCEAAVHAARTLLMKERGDVFLKLDIKNAFNSVDRITLLDQVKQVTPSIYPFLWQCYGTPSKLVYKHHLLNSSVGCQQGDPLGPAIFSLAIHPIVSNLNSKFNVWYLDDGSLGGDTETVFTDFQEVMDKFSNIGLEVNFSKCELFVSNSKNVNEKNSIIERFKTLAPNIKISDKHSLHLLGSPIFPESIPSFIENNIHNFNETSDRLLKINSHMALFIIRFCLFVPKFTYLLRSTPLWKFNELCLKLDDIIMKTLSSVLNCHMNERAWTQASLPVRHGGLGIRKISSVALPAFLSSVHKTQNLTSDILSKIFEEPQITFMDEAKDAWLQAGPNLKFPVQLNLQKFWDEPLCLLVRHQLLDSAHDIAERARLLAVAERESGFWLQAYPSGNIGTLLDNLTLSVCTRLRLGVKTVEHHRCHCGADVDVFGHHGLSCQRSAGRLSRHATINDVIRRAFVTVNVPACLEPNGLARDDGKRPDGMTLIPWKGGRMLVWDATCVDTLAPSHLQASSSGAGAAATAAENAKRHKYVSLCNNYIFVAFGVETLGPWGPDAWQLYKQLSTRLVDVSGDPGAGTHFAQRIAIAIQRGNAASILGTLPKDSDGDHFLW

SEQ ID NO: 16398 - protein, 914 aa, Urbanus evona
MQNISFSSSSDANACNQNDSSSCENLVKCELCPQPRYFKGNRGLRIHYGKAHKNVCHNESSETTQFDSTSDLVKTLGLLKNSVPVIKRIPRGSRVTVAYTLNTLIKDTINKNDLQSWEHLLTFPFVVLHAKKDNRSSLTQIIKTNCTILKNYKDILDKSIIKNRHINSNIFKKVEQKVTDGDLKGAATILFSNDVIAPDSPATLSALLEKHPSASTQSFSEFVDDVEDPLQATPKDVLAAIMSFKNGSAGGLDGLTPQHLKDLVSGAVGEAGQLLLDGITQLINLMLSGKVNPHVTNILYGANLCALKKKDGGIRPIAVGCTLRRLASKICCKSIKPYISEKLSPIQLGFGSQGGCEAAVHAARTFVMNGGGDVFLKLDIKNAFNSVDRITLLNQIKQETPSIYPFLRQCYGSPSKLIYKNHSLDSSMGCQQGDPLGPAIFSLAIHPIISSLNSKFNVWYLDDGTLGGDTESVFTDFQEILSKFNNIGLEVNFSKCELYVSDTKSLNEKISIIQKFKNLAPNIKILDKQSLQLLGSPIFPEAVPSFIENYIQNYNEISDRLLKINSHMALFIIRFCLFVPKFTYLLRCTPFWKFKDYCLKLDDIIKNTISSVLNCHLNERAWTQASLPVRHGGLGIRKISSVALPAFLSSVHKTQELIFNVLSRTFDTPNIIFMDEAKDAWLQAGPSLKLPSFLNLQKLWDEPLCRLVRNQLLDSAHDVVERARLLAVTERESGFWLQAYPSANVGTLLDNMTLSICTRLRLGVKTVETHRCLCGANVDVLGHHGLSCQRSAGRLSRHASINDVIRRALVTANVPACLEPNGLARDDGKRPDGMTLIPWKGGRMLVWDATCVDTLAPTHLQGSSTGAGAAAAAAESAKRRKYASLCNNYIFAAFGVETLGPWGPDAWQLFKQLS

SEQ ID NO: 16399 - protein, 963 aa, Chioides albofasciatus
MQNTSVPFLSDANTCSQHDNSECGNLVKCELCSQPRYFKGNRGLKIHYGKAHKNVGQVESPEIPPQTESSEISNSFVKTLGRLKGSIPIIKRIPRGSRFVVATTLNTLIKDVINKNDSQSWEHLLTFPYVVLHAKKDNRSSLTQVIKSNCNSLKNYKDITFKSNISHKNSNIFYKVEQKVSDGDLKGAATILFSNDVIAPDSPATLSALLEKHPLASNHGSPDFLNNENDPLQASPKQVLEAIMSFKNGSAGGLDGLTPQHLKDLVGGAVRDEGQMLLNSITQLINLMLSGKVTPNMTHIIYGANICALKKKDGGIRPIAVGCTLRRLASKICCKIIKSHVTEKLSPIQLGFGSQGGCEAAVHAARTFLMNDRGDVFLKLDIKNAFNSVHRITLLDEIKRTTPSIYPFLWQCYGSPSKLIYKQHILESSVGCQQGDPLGPAIFSLAIHPIVSKLNSKFNVWYLDDGSLGGETETVFTDFQELLNKFRDIGLEINFSKCELYVSNSKSIIEKNCIIERFQTLAPNIKILDKHSLHLLGSPIFPESIPSFIHNHIHNYNETSDRLLKINSHMALFIIRFCLFVPKFTYLLRSTPLWKYNEICLKLDNIIMKTISSVLNCNLNERAWTQASLPVRHGGLGIRKISSVALPAFLSSIHKTQNLTSNVLSKIFEEPKITFMDEAKDAWLLAGPNLKFPVYPNLQKLWDEPLCLLVQNQLLDSAHDMAERARLLAVAERESGFWLQAYPSGNLGNLLDDTTLSICTRLRLGVKTVEHHRCLCGADVDVFGHHGLSCQRSAGRLSRHATINDVIRRAFVTVNVPACLEPNGLARDDGKRPDGMTLIPWKRGRMLVWDATCVDTLAPSHLQASSSGAGAAATAAEGTKRRKYVSLCNNYIFVAFGVETLGPWGPNAWQLFKQLSTRLVDASGDPRAGTYFAQRIAIAIQRGNAASILGTFPRDSDADHFLW

SEQ ID NO: 16400 - protein, 954 aa, Polygonus savigny
MQNNFLPSSSDANSSQSSCDNLVKCELCSQPRYFKGNRGLKVHLGKTHKNVSQFEPSNPLQNKVEFLTTLGLLKRSVPVVKRIPKGSRVAVATALSSVINDVVKKNDLQSWEHLLTFSYTILHAKKDNSSSLTQIIKKNCLNPIKYEEIDIKAYRNSNNNNNIFKKVEQKVTDGDLKGAANILFSNDVIAPDSPATLSALLEKHPSALYHNSPDVPSFTGEPLQTSPKLVSAAIMSFVNGSAGGLDGLTPQHLKDLLGVAVGDTQLSLLNGITQLVNLMLAGKVCPHVAHIIYGANLCALKKRDGGIRPIAVGCTLRRLASKICCNSIKTSISEKLSPIQLGFGSPGGCEAAVHAARTFLINNRGDVFLKLDIKNAFNSIDRTTLLNQIQQNAPSIYSYIRQCYGFPSKLIYKNHIIDSSVGCQQGDPLGPALFSLAIHPIISSLNSKFNVWYLDDGTLGGDTESVLKDFQKLCFEFNNIGLEINFSKCELYISDTKSIKERNKISDKFKSLAPSLKILDKDSLHLLGSPIFPDAIPSFIQNHIHKFNESSDRLLKINSHMALFIIRFCLFVPKFTYNLRSAPFWKFNDLCLKLDCLISNILSLVLNCDLSERAWVQASLPVRHGGLGIRKISKVALPAFLSSVHKTESLTSRILCNLFVEPKVAFMEEAKDAWLSVGPNLNFPVNPKFQKLWDEPLCVLVRNQLFDSANNDAERARLLAVAQNESGFWLQAYPSGNTGTLLDSQTLSICTRLRLGLRTVVPHRCHCGADVDAFGHHGLSCQRSAGRLSRHASINDVIRRAFVAVNVPATLEPNGLARDDGKRPDGMTLIPWKCGKMLVWDATCVDTLAPCHLHASAKGASAAATAAETAKRRKYVSLFNNYIFAPFGVETLGPWGPDAKIIFKQLSARLIDVSGDPRAGMYFAQRIAIAIQRGNAASILGTLPKVSDGGYFLW

SEQ ID NO: 16401 - protein, 959 aa, Epargyreus clarus
MQNISISSSGANACSQYDNSLCENLVKCELCSQPRYFKGNRGLRVHCGKAHKNVGQPETYENQQAEASMDFVKTLGRLKGSIPVIKRIPRGSRVTVANTLNTLIKDVINKNDLQSWEHLLAFPYVILHAKKDNRSSLTQIIKSNCTSLKTYNDIIVKSNNTFHNNSNIFKKVEQKVADGDLKGAATILFSNDVIAPDSPATLSALLEKHPPASTHVSPVFLNNEVDPLQATPKQVLAAIMSFKNGSAGGLDGLTPQHLKDLVGSAVGDAGQLLLNSITHLINLMLAGKVSPSMIHILYGANLCALKKKDGGIRPIAVGCTLRRLASKICCRFIKPHIAEKLSPVQLGFGSQGGCEAAVHAARTFLMKDRGDVFLKLDIKNAFNSVDRITLLDQIKQITPSIYPFLWQCYGSPTKLLYKHHAFESSIGCQQGDPLGPAIFSLAIHPIISNLNSKFNVWYLDDGSLGGDTETVFKDFQEVLDKFSNIGLDVNFSKCELFVSDSKSLDEKKYIIERFKTLAPNIKILNKHSLHLLGSPIFPESIPSFIQNHIQNYNESSDRLLKINSHMALFIIRFCLFVPKFTYILRSTPLWKFNEICLKLDDIIMKTLSAVLNCHMNERAWTQASLPIRHGGLGIRKISSVALPAFLSSVHKTQNLTSNVLSKIFEEPIITFMDEAKDAWLQAGPNLKFPVHLNLQKLWDEPLCILVRNQLLNSAHDIAERARLLAVAERESGFWLQAYPSGNLGTLFDNLTLSICTCLRLGVKTVERHRCHCGADVDVFGHHGLSCQRSAGRLSRHATINDVIRRAFVTVNVPACLEPNGLARDDGKRPDGMTLIPWKGGRMLVWDATCVDTLAPSHLQASSCGAGAAATTAENTKRRKYISLCNNYIFVAFGVETLGPWGPDAWQLFKQLSTRLVDVSGDPRAGMHFAQRIGIAIQRGNAASVLGTLPKDSDGDNFLW

SEQ ID NO: 16402 - protein, 961 aa, Urbanus esmeraldus
MQNISFSSSSDANACNQNGSSSCENLVKCELCPQPRYFKGNRGLRIHYGKAHKNVCHNESSETTQFDSTSDLVKTLGLLKSSVPVIKRIPRGSRVTVAYTLNTLIKDTISKNDLQSWEHLLTFPFVVLHAKKDNRSSLTQIIKANCTTLKNYKDILDKSIIQNRHINSNIFKKVEQKVTDGDLKGAATILFSNDVIAPDSPATLSALLEKHPSASIHSSSEFVDDVEDPLQATPKDVLAAIMSFKSGSAGGLDGLTPQHLKDLVGGAVGEAGELLLNGITQLINLMLSGKINPLVTNILYGANLCALKKKDGGIRPIAVGCTLRRLASKICGKSIKPYISEKLSPIQLGFGSQGGCEAAVHAARTFVMNGGGDVFLKLDIKNAFNSVDRITLLNQIKQETPSIYPFLRQCYGSPSKLIYKNHSLVSSMGCQQGDPLGPAIFSLAIHPIISSLNSKFNVWYLDDGTLGGDTESVFTDFQEILSKFSNIGLEVNFSKCELYVSDTKSLNEKISIIQKFKNLAPNIKILDKQSLQLLGSPIFPEAVPSFIENYIQNYNEISDRLLKINSHMALFIIRFCLFVPKFTYLLRCTPFWKFKDCCLKLDDIIKNTISSVLNCHLNERAWTQASLPVRHGGLGIRKISSVALPAFLSSVHKTQELIFNILSRSFDTPKIVFMDEAKDAWLQAGPSLKLPSIPDLQKLWDEPLCRHVRNQLLDSAHDVVERARLLAVTERESGFWLQAYPSANVGTLLDNMTLSICTRLRLGVKTVETHRCLCGANVDVLGHHGLSCQRSAGRLSRHASINDVIRRALVTANVPACLEPNGLARDDGKRPDGMTLIPWKGGRMLVWDATCVDTLAPTHLQGSSTGAGAAAAAAESAKRRKYASLCNNYIFAAFGVETLGPWGPDAWQLFKQLSTRLVDVSGDPRAGTHFAQRISIAIQRGNAASILGTLPKDIDGDNFLW

SEQ ID NO: 16403 - protein, 933 aa, Ectomis pervivax
MQNISLASSSNVNTCNQFDSSSCSGLVKCDLCSQPRYFKGNRGLKVHFGKTHKNVSQSEPSNSSQNGSFDFITTLGHLKASVPVLKRIPKGSRVAVATALTRIIQNVIKNNDLNSWEHLLTFSFTILHAKKDNRSSLTKIIKSNCLNSLNYKDIAINQNKYPYNNNNIYKKIEQKISDGDLRGAANILFSNDVIAPDSPSTLSALLEKHPSATAEYSPVIPSIDPLQVTPKQVLAAIMSFRSGSAGGLDGLTPQHLKDLVGAAVGDVGQSLLNAITQLLNIMLSGKTCAEVTPIVYGANLCALKKKDGGIRPIAVGCTLRRLASKLCCTFIKPHVAEKLSPLQLGFGSPGGCEAAVHAARSFLMNDRGDVFLKLDIKNAFNSIDRTTLLNQIEEITPSIYHYLRQCYGSPSKLLYKNHIFHSSVGCQQGDPLGPAIFSLGIHPIISSLNSKFNVWYLDDGTLGGDVETVLKDFQELCFKFNSIGLEINFSKCELFISNSKTLDEKIAIIEKFKLLAPSLKILDKNSLNLLGSPLFPESVPSFIQNHIHKFNETSDRLLKINSHMALFIMRYCLFVPKFTYILRSAPLWKFYDLCVKLDTIISKTISSVLNCHLNERAWIQASLPVRHGGLGIRKISSVALPAFLSSVHKTKNLVSKILCNIFDDPKIIFMDEAKEAWSLVGPSLNLPVNPNFQNLWDEPLCILVRNQLLDSALDAVEKARLLAVAEKESGYWLQAYPSGTTGTLLDNLTLSICTRLRLGVKAVEPHRCHCGVDVDAFGHHGLSCQRSAGRLSRHATLNDVIHRALVNVNVPATLEPNGLARDDGKRPDGMTLIPWKCGKVLVWDATCVDTLAPSHLQASSEGAGAAATAAEIAKRRKYVVLSNNYIFTPFGVETLGPWGPDAKHLYKQLSARLIGVSGDLRAGTYFAQRIGIK

SEQ ID NO: 16404 - protein, 906 aa, Urbanus sp.
MLNISNSSPPDANACNQNDSSSCGNLVKCELCSQPRYFKGNRGLRVHCGKAHKNVSHGEPSKTNLFASTSDLVKTLGLLKGSTPVVKRIPKGSRVTVAYTLNNLIKDATSKNDLQSWEHLLTFPFVVLHAKKDNRSSLTQIIKTNCNNFQNYKDILGQFSIQNRHNNNSNIFKKVEQKVSDGDLKGAATILFSNDVIAPNSPATLSALLEKHPSASMHSSPEFVDDVEDPLQAAPKEVLDAIMSFKNGSAGGLDGLTPQHLKDLVCGAVGEAGQLLLNGITQLINMMLTGKVNPNVTKILYGANLCALKKKDGGIRPIAVGCTLRRLASKICCKSIKSSISEKLAPIQLGFGSQGGCEAAVHAARTFVLNGGGDVFLKLDIKNAFNSVDRITLLNQIKQETPSIYPFLWQCYGSPSKLIYKNHTFDSSMGCQQGDPLGPAIFSLAIHPIISSLNSKFNVWYLDDGTLGGDTETVFTDFQEILSKFSNIGLEVNFSKCELYVSDTKSLIEKIGIIQKFKYLAPNIKILNKQSLHLLGSPIFPEAVPSFIENYIQNYNEISDRLLKINSHMALFIIRFCLFVPKFTYLLRCTPFWKFNDGCLKLDDIIKNTISSVLNCDLNERAWSQASLPVRHGGLGVRKISSVALPAFLSSVHKTQDLILNVLSHSFDSQKIILMDEAKDAWLQAGPNLKLPSIQNLQKLWDEPLCRLVRNQLLDSAHGFAERARLLAVTERESGFWLQAYPSANVGTLLDNMSLSICTRLRLGVKTVEHHRCHCGADVDVLGHHGLSCQRSAGRLSRHASINDVIRRAFVTANVPACLEPNGLARDDGKRPDGMTLIPWREGRMLVWDATCVDTLAPTHLQASATGAGAAAAAAESAKRRKYAVLSNNYIFAAFGVETLGPWGPD

SEQ ID NO: 16405 - protein, 958 aa, Chioides vintra
MQDISIPSLSDANTCSQYDNSQCGNMVKCELCSQPRYFKGNRGLKVHYGKAHKNVSQPKSPEIIPGPSNNFVETLGRLKGSIPIIKRIPKGSRITVATTLNSLIKDAIDKNDSQSWEHLLTFPYVVLHAKKDNRSSLTQIIKSNCSNLKKYNDIIFKTNISNKQSNIFKKVEQKVSDGDLKGAATILFSNDVIAPDSPATLSALLEKHPLTSNHGSPVFLNIENDSLQASSKQVLDAIMSFKNGSAGGLDGLTPQHLKDLVGGAVRDAGHILLNSITQLINLMLSGKVTPNITHILYGANVCALKKKDGGIRPIAVGCTLRRLASKICCKIIKPHVTEKLAPVQLGFGSLGGCEAAVHAARTFLTNDRGDVFLKLDIKNAFNSVDRITLLDQIKRVTPSIYPFLWQCYGSPSKLVYKQHTFDSSVGCQQGDPLGPAIFSLAIHPIISNLNSKFNVWYLDDGSLGGETETVLTDFQEVLNKFRDIGLEVNFSKCELYISNSKSENEKKNIIERFNTLAPNIKILDKHSLHLLGSPIFPESIPSFIQNHIHNYNETSDRLLKINSHMALFIIRFCLFVPKFTYLLRSAPLWKYNELCLKLDDIIMKILSSVLNCNLDERAWAQASLPVRHGGLGIRKISSVALPAFLSSVHKTLNLTSNILSNIFEEPKITFMDEAKDAWLLAGPNLKFPVHPNLQKLWDEPLCVLVRNQLLDSAHDITERARLLAVAERESGFWLQAYPSGNLGTLLDNSTLSICTRLRLGVKTVEHHRCLCGADVDVYGHHGLSCQRSAGRFSRHATINDVIRRAFVTVNVPACLEPNGLARDDGKRPDGMTLIPWKGGRMLVWDATCVDTLAPSHLQASSSGAGAAATAAEGTKRRKYVSLCNNYIFVAFGVETLGPWGPDAWQLFKQLSTRLVDVSGDPRAGTYFAQRISMAIQRGNAASILGTFRGDNDGDNFLW

SEQ ID NO: 16406 - protein, 963 aa, Astraptes hopfferi
MQNISIPSSSDANACNQNDNSSCGNLVKCELCSQPRFFKGNRGLRVHYGKAHKNFGHTESPETTQIDYSNDFAQTLGLLKGTIPVIKRIPRGARVTVAYTLNTLIKDVINKNDLISWEHLLTFPFVILHAKKDNHSSLTQVIKTNCSDLKNYKHILGQCSVKNRLNNSNIFKKVEQKVADGDLKGAATILFSNDVIAPDSPGTLSVLLEKHPAVSIHGSSDFIDDTGDPLQASPKQVLAAIMSFKNGSAGGLDGLTPQHLKDLVCGAVGEAGQLLLNGITQLVNMMLAGKVNPIVTKVLYGANLCAFKKKDGGIRPIAVGCSLRRLASKICCKCIKPYISEKLSPIQLGFGSQGGCEAAVHAARSFLMNDGGDVFLKLDITNAFNSVDRITLLNRIKQETPSIYPFLWQCYGSPTKLMYKNHPLDSSVGCQQGDPLGPAIFSLAIHPIVSSLNSKFNVWYLDDGTLGGETETVFRDFKEILTKFSDIGLKVNFSKCELYVSDSKTLNEKISITQKFKDLAPNIKILDKHSLQLLGSPIFPESVPSFIQKNIQNYNEISDRLLKINSHMALFIIRFCLFVPKFTYLLRSTPLWKFTDLCLKLDEIVKNTISSVLNCDFNERAWTQASLPVRHGGLGIRKISSVALPAFLSSVHKTQNLIFNVLSQSFDEPNIVFMDEAKDAWLQAGPSLKLPTHENLNLQKLWDEPLCRLVRNQLLDSAHDIAERARLLAVTERESGFWLQAYPSANVGTLLDNLTLSICTRLRLGVKTVEHHRCLCGADVDVLGHHGLSCQRSAGRFSRHATINDVIRRALVAVNVPACLEPNGLARDDGKRPDGMTLIPWRGGRMLVWDATCVDTLAPSHLQASSSGAGAAAAAAENAKRRKYSNLCNNYIFAAFGVETLGPWGPNAWQLFKQLSTRLVDVSGDPKAGTHFAQRISIAIQRGNAASVMGTLPRDSDGENFLW

SEQ ID NO: 16407 - protein, 960 aa, Hyalothyrus neleus
MQNVFTRTGANSCSQYNDSSCDNLVQCHLCSQPRYFKGNRGLNVHLGKSHKNVSQVERSASQLFDSSTDFVKRLGALKGNIPLVKRIPRGARIAVANSLTTRVNDVVNNNNKESWENLLIFPYVVLHASKDSGRSLTQTIKENCLSTKETRNILLNENPVAIKQRNVFKIVEQKVSDGDLKGAATILFSNDVIAPDSPATLSALLEKHPSASTHISSQTFDSSEVPLQATPKQVLAAIMSFRNGSAGGLDGLSPQHLKDLVSVAVGEAGSALLSSIAQLINLMLAGKVNQETLNILYGANICALKKKDGGIRPIAVGCTLRRLASKISCKFIKKKVTDTLSPIQLGFGSQAGCEAAVHAARTFLLNCRGDVFLKLDVKNAFNSVDRAALLTQTKQVCPSIFPYLWQCYSTPSKLLYKNHMLDSSMGCQQGDPLGPAIFSLAIHPIISRLNSKFNVWYLDDGTLGGKTDTVLDDFQNLLLNFRNIGLELNFAKCELYVSDTKSYEERNEIIEKFKILAPSIKVIEKHHVHLLGSPIFPEAIPSFVNDHINHFNEISDRLLKINSHMALFIIRFCLFVPKFTYLLRTTPLWNFSDVCLNLDNIIKKTISSVLNCNLDERAWSQASLPVRHGGLGIRKISSVALPAFLSSVHKTQNLISIILGKILPNYQPKVIYMDEAKDAWIRAGPSLNFPSFLNSQKLWDEPLCIQVYVQLLETTDNMAERARLLALVKRESGHWLQAYPSANIGTLLDNQTLSICVRLRLGLKTVEPHRCPCGADVGSLGHHGLSCQRSAGRLSRHASLNDVIRRALVTVNVPASLEPNGLARDDGKRPDGMSLIPWRRGKMLVWDATCVDTLAPSHLQATSRGAGAAAAAAEIAKRRKYVDLGSSYIFSAFGVETLGPWGPEAWELYKQLSSRLVDVSGDPRAGIHFAQRIAIAVQRGNAASILGTLPKVSDADYFLW

SEQ ID NO: 16408 - protein, 901 aa, Euriphellus phraxanor
MENIHIFTSSDANTCSQSGSSSCEDFVKCDLCSQPCYFKGNRGLRIHYGKVHKNSRQTESSDSKQNESITVFFEKLRLLKGSIPIVKRIPRGSRIAVATALTKLINNVINQNDLQSWEHLLTFPYVVLHAKKDNRSSLTQIIKSNCTSSLNYKDININRKSYSHKNSNVFKKVEQKVADGDLKGAAAILFSNDIVAPDSPATLSALLEKHPSASTHISPEIVEHIEDPVQTTPKQTLAAIMSFPNGSTGGLDGLSPQHLKDLVGGSVGEAGQALLRGITQLINLMLAGGISTDITHIIYGANICALKKKDGGIRPIAVGCTLRRLASKICCKFIKPYIAEKLSPIQLGFGSEGGCEAAVHAARTFLTNNGGDVFLKLDIKNAFNSVDRTTLLNQIKSVTPSIYPYLWQCYGSPSKLAYKNHTFNSSVGCQQGDPLGPAIFSLAIHPIISDLTSKFNVWYLDDGTLGGDTESVLTDFQELLCKFSNIGLEINFSKCELYVSDTKTLDEKNRIIEKFNCLAPNIKILDRFSVHLLGSPIFSESVQSFVKNHIHKFNESSDRLLKINSHMALFIIRFCLFVPKFTYLLRSTPLWQFNDLCTNLDDIIRKTLSSVLNCSLTDERTWIQASLPIRHGGLGIRKISSVALPAFLSSVHKTQNLTSNILRNIFDEPNVIFMDEAKNTWLRAGPSLNLPKYPKFQKLWDDPLCLIVRKQLFDSANNVVERARLLAVTQRESGFWLQAYPSGNTGTLLDSQTLSICTRLRLGVKTVEPHRCLCGADVDCFGHHGLSCQRSAGRISRHATINDVIRRALVTVHVPACLEPNGLARDDGKRPDGMTLIPWKGGKMLVWDATCVDTLAPSHLHLSSCGAGLAAAAAESTKRRKYCCLSNNYILHKLRAVDFFL

SEQ ID NO: 16409 - protein, 902 aa, Drephalys kidonoi
MQNTYSSLGANTSSQCDDSCGNLVQCTLCSQPRYFKGNRGLSVHLGKTHKNRVGLSDKQAVSTTGFSNILGALKSSLPLVKRIPRGARVAVANSFIRSINNVINKNDVQSWENLLTLPYVILHAKKDSRRSLTQIIKENCNSTKTFKDLSFQRNTFTQKNNDIFKIVEQKVTDGDLKGAATILFSNDVIAPDSPATLSALLEKHPSAPTHISIEDPDSTEVPLQATSKQVLAAIMSFRNGSAGGLDGLSPQHLKDLAVGESGQTLLNGITQLINLMLSGKVNKEILHIFYGANIVALKKKDGGIRPIAVGSTFRRLASKICCKSIKNSVTKKLAPIQLGFGSQCGSEAAVHSARTFLMYNHGDVFLKLDIKNAFNSIDRTTFLNQIKLLTPSIYPYLWQCYGAPSKLLYKFHSLESSVGCHQGDPLGPAIFSLGIHPIISRLTSKLNIWYLDDGTLGGDTESVLTDLQNLLRHFRNIGLEINFAKCELYISDNKTLIEKTEIIKKFRNVAPQIKIIDKYTINLLGSPIFPESFPSFIQDRINLFQDISDRLLKINSHMALFIIRFCLFVPKFTYLLRTTPLWKFNDLCVKLDNIINKTISSVLNCNLDERAWTQASLPVRYGGLGIRKVSSVALPAFLSSVHKTQMLTSIVLNNIFTNPKIIFMDEAKNAWLQSDSSLNFPVDPNLQKQWDEPLCKLAQKKLLDSAIGLTDRARLLAVAEIESGFWLQAYPSVNIGTLLDNQTLSICVRLRLGIKSVEPHSCLCGAEVDSLGHHGLSCQRSAGRLSRHASLNDIIRRALVSVNVPASLEPKGLARDDGRRPDGMTLIPWKRGKMLVWDAICVDTLAPCHIQASSRSVGAAANAAENSKRRKYSVLSNNYIFNAFAVETLGPWGPDTWQLFKE

SEQ ID NO: 16410 - protein, 941 aa, Nicephellus nicephorus
MQNINSFSLSDANVCSQSDSTSCESLVKCELCSQPRYFKGNRGLKVHLGKTHKNVSQAESSNSGHNESIPDFLKTLESLKGSVPVVKRIPRGARIAVATALTKLVNDVIIKNDLQSWEHLLTFSYAVLHAKKDIRSSLTQIIKTNCTSPKKITDIVNKENIFSYRNNTIFKKVEQKVSDGDLKGAAKILFSNDTVAPDSPDTLSALLEKHPSASSHSSPEIVENLENPLQVTAKQIFGAIMSFPNGSAGGLDGLSPQHLKDLVGGTVGEAGQALLSGITQLINLMLAGNVTKDIIHIIYGANICALKKKDGGIRPIAVGCTFRRLASKVCCKFIKPCLAEKLAPIQLGFGSQGGCESAVHAARTFLMSNRGDVFLKLDIKNAFNSVYRTTLLNQIKLVTPSIYPYLWQCYGSPSKLVYKNHIFDSSVGCQQGDPLGPAIFSLAIHPIISSLNSKFNVWYLDDGTLGGDKESVLTDFQELLCKFSNIGLEINFSKCELYVSDTKTLDEKNRIIEKFKRLAPNIKIVDKYSLHLLGAPILPESVPSFVQNHINKFNESSDRLLKINSHMALFIIRFCLFVPKFTYILRSSPLWKFNDLCLELDNIICKTLSSVLNCNLNERAWTQASLPIRHGGLGVRKISSIALPAFLSSVHKTQNLTTKVLYKIFDEPKVTLMDEAKEAWFQAGPSLNYPNHPNLQKLWDEPLCLLVRDQLFDSAHNVVERARLLAVTRKESGFWLQAYPSANIGTLLDNLTLSICTRLRLGVQTVEPHRCLCSADVDAFGHHGLSCQRSAGRISRHATINDVIRRALVTVNVPACLEPNGLARDDGKRPDGMTLIPWKGGRMLVWDATCVDTLAPSHLQGSSSGAGAAAAAAESAKRRKYVGLCDNYIFTAFGVETLGPWGPEAWQFFKQISPRLVDVSGDPRAGMHFAQRIGIAIQRGN

SEQ ID NO: 16411 - protein, 835 aa, Sarmientola browni
MVLHAKKDHRTSLTQIIKTNCTSLQTYKDIAIKENLYFFRNNNIFKKVEQKVTDGDLKGAARILFSNDTVAPDSPATLSALLEKHPSAPNHSSPEILENVEHPLQATAKQILAAIMSFPNGSAGGLDGLSPQHLKDLVGGNVGEAGQALLSGITQLINLMLAGKVSKDITHIIYGANICALKKKDGGIRPIAVGCTFRRLASKVCCKFIKPSVAEKLAPIQLGFGSQGGCEAAVHAARTFLMSDRGDVFLKLDITNAFNSVYRTTLLNQIKLVTPSIYPYLWQCYGSPSKLVYKHHTFDSSLGCQQGDPLGPAIFSLAIHPIISNLNSKFNVWYLDDGTLGGDTESVLNDFQELLSKFSKIGLEINFSKCELYISDSKTSEEKNRIIQKFKGLAPNIKILDRHSLHLLGSPVLPESVPPFIQNYIHKFNESSDRLFKINSHMALFILRFCLFLPKFTYLLRSTPLWKFYELCLELDKIICKTLSSLLNCYMNERAWSQASLPIRHGGLGIRKISSVALPAFLSSVHKTQNLTSNILCNIFDEPKVIYMDEAKEAWFQTGPSLNFPLDPKIQKLWDEPICLLIRNELFDSALSVAERARLIAVTQKESGFWLQAYPSANIGTLLDDQTLSICTRLRLGVQTVEPHRCFCGSDVDAFGHHGLSCQRSAGRISRHATINDVIRRALVTVHVPACLEPNGLARDDGKRPDGMTLIPWRGGRMLVWDATCVDTLAPSHLQGSSSGAGVAAAAAESTKRRKYAGLCDNYIFTAFGVETLGPWGPDAWKFFKEISPRLVSVSGDPRAGMHFAQRIAIAIQRGNAASVLGTLPKDSDADYFLW

SEQ ID NO: 16412 - protein, 960 aa, Salatis canalis
MQSTHTSTPSDANICSQFGSTSCNNSMKCELCSQPRYFKGSRGLRVHLGKVHKNVSQAEPSDSAQFESTTGFTETLGLLKGTVPVIKRIPRGSRIAVATALTKLINDVINKNDLQSWECLLTFPYVVLHAKKDNRSSLTQTIKTNCASSKNYKDIVIKQNIFSYKNSNIFKKVEQKFTDGDLKGAARILFSNDTVAPDSPATLSALLEKHPLASTNPSPEVQENVPDPLQTTAKKILAAIMTFPNGSASGLDGLSPQHLKDLVGGTVGEAGQALLSGITQLVNLMLAGNVNKDITHIIYGANICALKKKDGGIRPIAVGCTLRRLTSKICCKFIKPCVTGKLSPIQLGFGCQGGCEAAVHAARTFVMNDGGGVFLKLDIKNAFNSIDRIALLNEIKSVTPSIYPYLWQCYGSPSKLVYKHHTFDSSVGCQQGDPLGPAIFSLAIHPTISSLNSKFNVWYLDDGALGGDSELVLTDFQDLLSKFRNIGLEINFSKCELYISDTKVSDERLSIIEKFKCLAPNIKILDKYSLHLLGSPLFTESVPSFVQNHIQNFNENSNRLFKINSHMALFIMRFCLFVPKFTYILRSTPLWKFNDLCVKLDDIISKTLSSVLNCNLSERTWAQASLPIRHGGLGIRKISSVALPAFLSSVHKTQNLTFNLIGKFFDEPKVAFMDEAKEAWLHAGPNLNFPVLSNLQKLWDEPLCLLVRNQLFDSAHNDVERARLIAVAQRESGFWLQAYPSGNIGTLLDNQTLSICTRLRLGVKTVEPHRCLCGTDVDAFGHHGLSCQRSAGRISRHAAINDVIRRALVTVHVPACLEPNGLARDDGKRPDGMTLIPWRGGKMLVWDATCVDTLAPSHLQGSSSGAGAAATAAEVMKRRKYAGLCDNYIFTAFGVETFGPWGPDAWKFFKQISPRLVDVSGDPRAGMHFAQRIGIAIQRGNAASVLGTLPKASDGDYFLW

SEQ ID NO: 16413 - protein, 717 aa, Cecropterus toxeus
MSFKNGSAGGLDGLTPQHLKDLVGGAVGEAGQSLLDGITQLINLMLAGKVSSSATRVLYGANICALKKKDGGIRPIAVGCTLRRLASKICCKFIKPLVSDKLSPIQLGFGSQGGCEAAVHAARTFLLNDRGDVFLKLDIKNAFNSVDRITLLNQIQETTPSIYPFLLQCYGSPTKLMYKQNSFDSSVGCQQGDPLGPAIFSLAIHPIVSTLNSKFNVWYLDDGSLGGDTETVFTDLKEILTQFSKIGLELNFSKCELFVSDSKSLKEKINIIEKFKTLAPSIKVLDKFSLHLLGSPLYPESIPNFINNYIQNYDKNSERLLKINSHMALFIIRFCLFVPKFTYLLRSTPLWKFKDICLNLDDTIKKTISSVLNCLLDERAWTQASLPVRHGGLGIRKISSIALPAFLSSVHKTQKLTFNIMSSIFEEPKVSFMDEAKDAWLQAGPNLKLPVDPNLQKLWDEPLCIGVRNQLIDSAHNIAERARLLAVTERESGFWLQAYPSPNTGTLLDNLTLSICTRLRLGVKTVEHHRCLCGADVDILGHHGLSCQRSAGRLSRHASINDVIRRALVTANVPACLEPNGLARDDGKRPDGMSLIPWSGGKVLVWDATCVDTLAPSHVQATSSGAGAAATVAENAKRRKYVSLSKNYIFVAFGVETLGPWGPDAWQFFKLLSSRLVDVFDDSRAGTHFGPRIGIAIQRGNAAKCQHLGNLAQRQRR

SEQ ID NO: 16414 - protein, 960 aa, Cecropterus takuta
MQSSCNSSSSDANVCNQKDDSSCGNLVKCGLCSQPRYFKGDRGLRIHLGKTHKNVSQIESSESTRIETSSDLVKKLGLLKGSVPVIKRIPRGSRVTVAATLNTLIRNVVNKNDLTSWEQLLTFPFLVLHAKKDGRNSLTQIIKTNCTNFKDYKEIIIKSDYASNKTSNIFRKVEQKVADGDLKGAATILFSNDVIAPDSPATLSALLEKHPQASIHCSPEFYNNSEDPLQVSTKDVLAAIMSFKNGSAGGLDGLTPQHLKDLVGGAVGEAGQSLLDGITQLINLMLAGKVISIATHVLYGANICALKKKDGGIRPIAVGCTLRRLASKICCKVIKPLVSEKLSPVQLGFGSQGGCEAAVHAARTFLMNDRGDVFLKLDIKNAFNSVDRITLLNQIQEITPSIYPFLLQCYGSPTKLMYKQHSFDSSVGCQQGDPLGPAIFSLAIHPIVSTLNSKFNVWYLDDGSLGGDTETVFRDFKEILTKFSKIGLELNFSKCELFVSDSKSLNEKIDIIEKFKTLAPSIKVLDKYSLHLLGSPLYPESIPNFINHYIQNYDENSDLLLKINSHMALFIIRFCLFLPKFTYLLRSTPLWKFKDLCLKLDDTIKKTISSVFNCLLDERAWTQASLPVRHGGLGIRKISSVALPAFLSSVHKTQKLTFNIMSNIFGEQKVSFMDEAKDAWLQAGPNLKLPVDLNSQKLWDEPLCIGVRNQLIDSAHNIAERARLLAVTERESGFWLQAYPSPNTGTMLDNLTLSICTRLRLGVKTVENHRCLCGADVDILGHHGLSCQRSAGRLSRHASINDIIRRALVTANVPACLEPNGLARDDGRRPDGMSLIPWSRGRVLVWDATCVDTLAPSHLQATSCGAGAAATIAENTKRRKYVSLSKNYIFVAFGVETLGPWGPDAWQFFKLLSSRLVDVSGDPRAGTHFAQRIGIAIQRGNAASVLGTLPRDSDANNFLW

SEQ ID NO: 16415 - protein, 1342 aa, Romanomermis culicivorax
MVILEETVLTDSARLWPDLGRTVNLCPMNPPTTPLYTDSWEASVADCLQPSADRGHVPTTVETRPTGPGDSSFGSPGPSIQTGDRSASSSPAPCSGTGLLTKQDGAHAVMGTDQPLKPFGDRVVGSTLLNDSRSQEQQPQRTVAPCEQVGRESHSKRAVKWNKEDGEALVRLIDGIKAQHGHIIRTVLRTEWDRLTQKGDVSQTHRTVDGLVSKYSAIVKPRQPVAVPPLVDLSVQPEQGGTVTSPESVLTDATLEGTSHLAPEVKEPEDQLTYSQYVAQFQKHLLRAKSFKSRAPLIPIRNNKVPATLLEFGNKAVSEIIESNPNDLTALNSAVYSAAKVTQDVMFGNLHRAHDQWVQESSDLRHKLLQELGWLCSVMAGLRAKGSLTARQKRNFNALHLKYGAKYEFRLRSDHISRMEVLYHDLTQHLAKSQRLETTRREEIKRQRTRKMPLGQVLRQMTVSSDTPVQAVRDYWEKVIGTPHEFRMNSMLTEWQQQVQKEVALADGTDTNDQEVWELVCKKARPFKAAGPDRIYNFWWKILPSARKALFELTQSIKAGHHQPFPSWVAEGRAISLYKGSGEKSDPGSYRTIACLNSCYKLVTGVITKWIERSIQGLPSVLPSNQLAVRKGIWATTHAHILDRTAVKDAARNKCRPLSMAWIDFAKAFDSVPHSYIHWVLEVCHIPEPIRITMAQLMQAWVLTYEGFENGRLRKSTRLRVVNGVLQGDTLSPLLFCMCVAPISHYLNIHSRPYVTAIGATIGESLKLNHIYYVDDLVIYTPSAVDLDSTLESLEAQAADFGCRLNARKSAKFHIGHGQVTPSRTQIPTLNSQQAYKYLGIEKSLDVDHDTMWSNIKQAVLAKVTLIFSNELTLRQKINAYNAIVLPKVKYLFANEIIGTGKYRSGSAQADELDKEIRNLLAQLKVRHYSSNVGRLYLESAVGGVGLRTLTEAVDEATIYSYSYLALRTDLDLSWKLMESLEASNKRNLISDFRQATSALNLTVERHLYPRSLLVNGVSYTHPTKAAQTVVKLLREKNQSRHLESLMTRKTASQVFHNPDLDPVRSHYWSHRGLLCTTAANNVMAAQEGQLVTRTHPSQTTKGLSRECRMQCHLGDETAEHILSVCAYWRQSLMVTRHNAVARDLYYELCKMLGFPTRHYRQFIEGHRRVDSIDLYWDHPIITTRKVRHHRPDIVVVNHNSHKVLIIEVSVSWHKNIITQENRKYAKYAVNSTLDEGQPLVNGTFPPGASLATEMGVDFNARVDVIPVVMGACGEVSTNLASNLGKLGFPQSTVERLIARMARSAALGSARIIKAHCSKNLSGVPLDRDRDPAASVGTPVDP

SEQ ID NO: 16416 - protein, 1114 aa, Diachasma alloeum
MTLLSHKWRCKGPTERRPESFACEKCNFTCATQRGLGQHERHKHPALRNEKRALISQPTGGTKGRRQYVWTDESTNLLRTLSERLENERAPMERIVAGLREHNINMTRKQISDKLRRLSMVERRREPLASEAQGEATREAVEEHDDSLDSDGSDDVFFDTVEVLRETSQERIEIAEHEESVQVIEEDRPRGGLDLVFQGIDTGMSLEDDFQGIEEPPGVANEDVWRWETLMEEFIDSMELCATNKYEECAEKLRRKWRLNRQDKSKLIDVINAHLEGEVIPLLKGGNSERVNRPTEHVERGQGRKRKVRAGRPPNHSQRKKHAFARCQELFNKCPKKLAEFTVKGDFSFAESKHDLPEKEKVEEVYGALWGESGPENIELKGTQNEGVDMCTHMKPFTLKEIRNRISALKCDTAAGVDGVKKPHIARKGVGELLGVLYNIVMLEGIYPEMWKTNRTTLIPKAGKDLTDVKNWRPITVGSILARMYSALLDGRIRGFVQQSERQKGFTSEDGCRHNILIFEQVLDEMKFVSGGVVSVLDVSKAFDTVPHTVIEPALKRKGVPEHVRGIIGKMYEGCKTVIKGTGGSVDITLKRGVKQGDPLSPLIFNLAMEPLLDRIVEETVGAKVGKEEVAVLAFADDLVLLSRSQIMAQVQLDKVQSYLVELGMSLAPSKCQAFRIVSRTKTWYMADPELRVGGDRVPAVKSDEVVTYLGGKISPWMGLTKGHEVSDMDNVLKNVRKVRLKPHQRMELLRVYILPRFTYRLTVNPPSSGVLKLIDSTIRQAVKSFLQLPLSTAKGFFYAPLSQGGLGLMKFERVIQLAALKTSVKIMNSRDPVMREVSEKAKLEHHFDKCARQLRIARPQTEEECEEAKRTLRKRDVDEWEGLDVQGKGVGTFRKDRVGNRWLSQPSLLSGAGYLSALRLRTNTFGTRTVLAQVHKGMDTTCRRCHMQRETLGHVLGICTFTKPARIRRHNEIRDLIASKMGRTCNVLVEPTFTEDNGELKKPDLVIYKGNKVLVADVTVVFEKGQYLREAAQRKIEKYNSLSKKICEDTEGCSEAKVLPIVIGCRGALPKSTVEALRELGVGKSDMLTMSMIALRTSIKIANGFIDYNQQLD

SEQ ID NO: 16417 - protein, 1046 aa, Loxosceles reclusa
MNKLVEGEATEQKWLEFTYSLKKITARVQEIVKLPVREEGKVAVREVNINDPQAVQKLYKRNRRRAIRLITEGEANRCSIEAEEVRDYFKEVWSPKCIQENIYTEISERGEVDMSRLCAPDVCRTLARCENTAPGPDRLTYNHWRSVDPDAKVITAILNKCIKHRKIPEEFKDTTTILIPKGSTQESLSDWRPITLANTIYKLLMKCLAQRLSAWMVGEEVLSKCQKGFLPYDGVFEHNFILEERLNQARTGKRDICIAWLDCANAFGSLPHEALLLAARKSGAGDDFVELLANIYRNNNTCVLTKNCLTEPIPQQAGIKQGCPISGLLFNLAIDPVVRHAQGDESSKHKILAYADDLVLISDDVKELQATIANVEAMLEAIQIKLNHKKSAALIYKARPHMQLLHERVIVGGERIRCLDEGELYKFLGRQTGINILPDKADLVETIEVGLKTAKSKLAPWQSIDALKTFFFPATNFAMRVGQFRKDDWSQVDRVIRAEVKRTLSLPQEAANEYLYGDKDSGCIGLPILAEDSDLAIVDGAFKLLTSGDLIIGKMAKDSLRETITKRLRREALDSDLAEYLSGHNEGQYRKTSNAISNIWTKARKASTRLGAVWCFGDSGPTIQYSDKTIAKRQRRKTMKVIRTERRKERAEKLKANPNQGKAMECVAKSKASSHFLRGGEYTRFAEWRFIHRARLNLVPLNGAKPWVKGIERKCRICNWGAETLPHVLNHCKMHSRAWKNRHNCIVARIRKAVERDYKIIGDNTEVENQSSERPDLVIAKGNAACILEVSCPFENRYGAFEEARKQKEAKYATLAGKMKATYKTVKIGVVLIGSLGSWDPANDTVLRPLMSKKYMGKFKKLCISDVIRWSRDIYIEHLTGTRQYKPEHEPKMETTKEKERRRKHRQVEEITSWARNDENSNQDSRVVIHTPQMEDVDQEPIPPTQPAQNISNPYIYKIYQGQDGQVWPRYKERTFVASRVRERNLQRNQKCGDSGNRTAEQPHKVTSQSEQLMEHEGNGRSCRTSELPPANNTPTQSHTKEKLAD

SEQ ID NO: 16418 - protein, 1166 aa, Girardia tigrina
MHWSLLVIDNRKLCSFILDSLSNSSFRNKTISLANRLLKIIYKQAHLGSRNLCSDPFLRTESQMNGKDCGPFICGFAERVMQNAPFFGIDITEIRSYVDSLHLKCDPQNLKQITHKLKGGVFQPQDSINILHLNDAHIATYAFAPIDSHKTLTVHPSLALAIWDNHLDYVTKHAQLSLFSNRHHIFLPIYILSSRWSLLYCNVLDRQVTFLDPFRNSIDPNILPQLQSATKLLSQLTLSPDEFHICSTPFQYFVTSKSEDSGPAICGYMDHIKSGTSFSSIDLKSIRREIFLINRKLKISNEVPNEIKQSSIPSSATLPIRILQAQNILNSIKDLNVESALEQFESLVFSCRFKSPRSPFISIKLQNDGGNLPNLYTKQPKRAFEFITKTNDIDAHPSTKDIELHFARRSTAPEISPLVDSLPIKRGTPFSFQPISIADIKSILKKSNDSAPGANNITYRDLQYCDPQCIIIKFLINKILSSQSVPASWCQYNTLLIPKPMIQGLYDQVCSWRPIALLECLYKILTSALCAQLHKWTISNSLLHPLQKSLGPFNGCTEHNFTLQAIFDKFQKQTESPIHCLLLDIEDAFCSISIDSVNKLLNRMGVSQSSCNCIAKLYGDCSSSFICGNTCTDPVPIRVGVRQGCPLSMLLFNVGINPALLQLDDCQSIGVLIGSHKISCLAYADDIIILADYKPGLQAAANTASAAIQAMNMRFRPDKCSVFSLPKPTESKIHINNAYIRNMSANETCIYLGGILSGSVRQTPESLFNEVVRDLQALARSSLLPWQKLQAYWTFIHSRLIYAFRIFHIPIESLHGSADSLDNQVRGPLKKILSVLPNCSNAYLYTPRALGGIGLTSILDEYLIQSLAQAFCMLGASDFDTMDIAITFLQRASSGKYKNCLIPKQKALIWLNHGDAHCTSDSWWDKVSYSIERLSTLHKINARIITNENGLCLALTQTLDPHDHSSVLITRKDKRNIAKIIRNLIGLSWSSKWDLQFSAGRFASMLRQSPLTAHLTFSGCICVAEWYFHHKFKLYSLPVRCWPGAKNHQDKLCRRCGSQDETVAHVFVICKFFSDFWSYRHNSIVSFLAAQIRQHVECELVVDSECPFVLSRLRPDLQIKIPLKKRIILIDVKCPYETEKNVENAESANVFHYSDLVKDIKSKWKG

SEQ ID NO: 16419 - protein, 1029 aa, Brachyptera putata
MKCPHCSSEVTSDLAHHIQLYHLDVYSNLSQSPGGSSTSVPSLVDGSHNTRSEVTDHSDECSDERKDDGRTAECPDCGIFFKPRGLPTHISRAHPDLARSRTANKYAGKSMVETPVEPKLSKNCQKLPSEPNVTNYSELEDNVMSIWEEKLIRFSASPVRDPQSFDLIVEELHTFLAGAVNTIRGPKHPAVKHFEARKKARENVPNLTYKNSNNPQRKSKRNKEKVRQQYDYDVAQFHYYNQRKKVVRKVMDSNKSASCKIDVEDIQKYFETTYSVPNNLSSYETNIPKGVTLAQSEEIFTTSVTLAEVNDAIKGMSMDTAAGPDRVILRVIKELKCSKVISRLATIIMEMNYIPKIMRKGRTILIHEGGDENELKNWRPITIFPIIRRIIERVIDKKLRYYAKFSTHQRGFVSTPGTYINASIMNSCLKEAKLKKKNCCIAFLDVSKAFDNVGHHHIHECLKNLRVPEILVNLIISSLEGNSTQVEANKKKTRPIKFLRGVPQGAPLSPTLLNIAIDHIIKQLTDKSISDSYGYSLVHDLDNISALAFADDIAVIAKDVNGASKLGSMTELALNTIGLHMNGAKSSAINIMNGMLSDSVITLDQGSSIRSITREERIRYLGIDFKNEISFDRAKVIKHLRDDIQNVTTSNLLKPDQKLNIMNQYLWPSLIYPLQCAPLSQLSKEFLEDIDRVVRSGIKEIIGLPGDTPTGMLYAPRKYKGLGIMRASWEAYLQHYNICIKLLKVQDGHLHHYDFVEEMKNCLEKLEMVQVNEGENQTARTMRIKLRERAFESWANLPSKGKGICLYKEYLRGNSWVFDHSGLSSSQWTNAIKMNCNVAAVRAIPGRSKDGTRCRHPGCDETETLPHVLGKCAKGELLRNARHHTVRTLIADAFRQQKWKVYEEIPCVAEDGSNKRVDIIAIRPDGKKAIIMDPTIRYETEYDQPSHVNTEKRQHYIPCIKDLSNKYQIDAKYWDVVGLMVGARGTVPAFLSTFLNTYNIPRKVLLRSIVLSVLINSVGLLQHHLYSFK

SEQ ID NO: 16420 - protein, 1040 aa, Desoria tigrina
MTTPDDPGGGASASAHLDDHLDDTINSSQLAVPHSRRNSASPSRTQTKARSIQWILYNLEVKVWSTLPRSEITDRYAHFMHEKEDVAVSTSTFGKYLREAFPNIQLDQGGRAGSKGISLRTYSNLGWVSQQPQHNRINWGTKLATLKGTIPTLRRCPRGARLQVAQALSVTLEKVTTLNDDESWGNLFLFPYATLNVPQVADEVSNLTKWVKGNTAKWTLDPNSALPRLPRPTLNRKVDPQQQVAKKVEAKLSDGDVRGAIRLLLSDDTIAPHDEVTLKALQKKHPPHPAPAHYPDDPEIEDLVPVSAEEVSRAVATFPNGSAGGLDGLRPQIIKDLLSIRTGDTSEKLSKAITLFMNMVLKGEVNPFFRHIFFGASLTALKKKTGGIRPVAVGNTWRRLAAKILVRRITPILVEKFAPHQLGVGIRGGAEAGAHTARLYFEATHSTPKALVKIDANNAFNEFRRDSMFSAVGSTIPTAYPFIKSCYWEPSTLFYGTTEIPSLSGVHQGDPLGPALFALVVQPIVESLRAELNIWYLDDGTFSDSPEKSLTALQTIISKGQEVGLTLNPSKCELAIFGAEDTDRRNIQQKFESVVPGIQVITPESAKLLGSPLTDSAMEKVLAEKTADLKSFSARLATLTAHSALYLLRASIATPRLIYFLRCAPTYKKMGLLADYDAVLKSAVEGTLNCHLSPEAWLQSSLPVKMGGLGMRHAVDTALPCFIASFHSVSPLISQLAPPQIFTAECSLAEAEERWSTLTCCDLPDPAQRGIQKCWEGPLVQQSVETLNLAANSQEDKARLMAIASPHAGDWLNALPSPQLGTHLPDESFRISCALRLGADICEPHKCPCGAQVSSRGYHGLSCKKSAGRWSRHESANDVIARALRSAEVPCIREPAGCSRSDGKRPDGQTLIPWARGKSLVWDFTCVDTFAPSYVAQSALRSGSAAETAEENKRRKYDFLLDRFIFVPVAIETIGIWGQEGLRLISSIGQRISQVTGEPRSSSFLLQRLGIAIQRGNVASILGTLPAGKELEEIFFIVTL

SEQ ID NO: 16421 - protein, 1036 aa, Desoria tigrina
MSTPDPGGGQNTAVSDDPDQSIDTSRLSAPPSRRGSSSPSRTQAETVSIQWILTSLEGEPGTKLLRSEVYDRYSIYIRGEGGIAVSASTFGKYLRKAFPNVPLDEGGRLGAKGASRTTYSNLNWISQQPQQIMVDWGTKLATLKGSIPTLRRCPRGARLQVAEALTETLEKVSSTNDEESWGNLFLFPYSTLLVPQEVDEVTNLTKWVKFNTAKWKLDPKSAVPKPRPPRPAFNKKSNPQQQVSKKVEAKLSDSDVRGAIRLLLSDDTIAPNDDVTLQALQKKHPPHPEPTNFPEDPELEVLMPVSEEEMARAVKTFPNGSAGGLDGLRPQILKDLLSIRSGDTSKKLSQAITRFTDLVLKGEVNQLFRPIFFGASLTALKKKTGGIRPVAVGNTWRRLAAKILVRRITPILVEKFSPHQLGVGIRGGAEAGAHTARLYFEASHDTPRALCKIDANNAFNEFRRDSMFSAVGLIIPSAYPFIKSCYWEPSSLFFGTTPIPSLSGVHQGDPLGPALFALVIQPIVEALQAELNVWYLDDGTVSDSPDKSLKALKTIISKGKEVGLSLNPSKCELAIFGADDAERLKIQQQFSDVVPGIQIITPESAKLLGSPLTDLAVEKVMAEKTADLKKFSARLATLSAHSALYLLRASIATPRLIYFLRCAPTYKQMGLLTDYDAELKLAVESTLNCRLSPEAWLQSSLPVKLGGLGIRHARETALPCFIASFHSVSALVSKLAPPEIFRADTSLAEAEERWSMITNCDLPEITERGIQKCWEGPLLQQTIETLNLAARDQEDKARLLAIAKPHAGDWLNSLPSPQLGTHLSNESFRIACALRLGADICEPHKCPCGTEVTARGYHGLSCKKSAGRWSRHESANDIIARALRSAEVPCIREPAGCSRSDGKKPDGQTLIPWARGKSLVWDFTCVDTFAPSYVAQSAIRSGSAAEVAEINKRRKYDFLLDRFIFVPVAMETIGIWGKEGLRLISSIGERISYVTGEPRSASFLIQRLGIAIQRGNVASILGTLPAGKELEEIFIL

SEQ ID NO: 16422 - protein, 1036 aa, Desoria tigrina
MSTPDPGGGQNTDENDGVDQSLDSSRLSAPPSRRGSCSPSRGRTETVSIQWILLSLEESPGSRFHRSEIYDRYAIYMQGEGVSAVSTSTFGKYLRKAFPGVLLDEGGKPGAKGASRTTYSNVGWKIEQPQQDNVNWGTKLASLKGTIPTLRRCPRGARLQVAQALTVTLEKVTTVNDEDSWGNLFLFPYATLQVPQAADEVNNLTKWVKANTAKWSLDPKNALPKPRPPRPPQNKKTDLQQQISKKVEAKLSDGDVRGAIRLLLSDDTIAPNDGVTLLALQKKHPPHPEPTHYPEDPEVEELMPVSEEEITRAVASFPNGSAGGLDSLRPQIIKDLLSIRSGDTSEKLSKAITHFMNLVLKGHINQSFRHIFFGASLTALRKKTGGIRPVAVGNTWRRLAAKILVRRITPILVEKFAPHQLGVGVRGGAEAGAHTARLYFEATHATPKALVKIDANNAFNEFRRDSMFSAVGSIIPTAYPFIKSCYWEPSTLFYGTTPIPSLSGVHQGDPLGPALFALVVQPIVESLKAELNVWYLDDGTISDSPEKSLKALETIISKGREVGLTLNPSKCDLAVFGADDADRRNIPQKFVNIVPGIQLITPETAKLLGSPLTDSATEKVLAEKTADLKNFSARLATLTAHSALYLLRASIATPRLIYFLRCAPTYKKMGLLADYDAVLKLAVEGALNCHLSPEAWLQSSLPVKMGGLGIRHAVDTALPCFIASFHSVSPLISQLAPPEIFGAEISLAEAEERWTTLTLCDLPDPGQRGIQKCWEGPLVLQTIESLNLAALSLEDKARLLAIARPHAGDWLNALPSPQLGTHLSNEAFRIACALRLGADICEPHKCPCGVEVTSRGYHGLSCKRSAGRRSRHEAANDVIARALRSAEVPCIREPAGCSRSDGKRPDGQTLIPWARGKSLVWDFTCVDTFAPTYVAQSATRSGSAAEMAEEKKRRKYDFLLDRYIFVPVAMETIGIWGLDGLRLIFSIGQRISQVTGEPRSSSFLIQRLGIAIQRGNVASILGTLPAGKELEEIFLL

SEQ ID NO: 16423 - protein, 1039 aa, Desoria tigrina
MDAPDDPGGGTLASVTINEDLDTTANTSQLSVPHSRRNSVSPSRAQTKARSIQWILNNLEAKEGSTLPRSEIFDRYALFMCDKEDIAVSTSTFGKYLREAFPNIQLDQGGRTGNKGVSNRTYSDLGWVNQQPQNNRIDWGTKLATLKGTIPTLRRCPRGARLQVAQALATTLEKVTTLNDEESWGNLFLFPYATLQVPQVTDEVTNLTKWVKGNTANWTLDPNSALPQPRPPRPTANKKVDPQQQIAKKVEAKLSDGDVRGAIRLLLSDDTIAPHDEVTLEALKKKHPPHPEPIHYPEDPEIEALVPVSTEEICRAVATFPNGSAGGLDSLRPQIIKDLLSIRLGDASEKLSKAISNFINLVLKGEVNPFFRHIFFGASLTALKKKTGGIRPVAVGNTWRRLAAKILVRRVTPILMEKFAPHQLGVGIKGGAEAGAHTARLYFEATHATPKALVKIDANNAFNEFRRDSMFSAVGSTIPAAYPFIKSCYWEPSTLFYGTTAIPSLSGVHQGDPLGLALFALVIQPIVESLKVELNIWYLDDGTILDSPEKSLKALRSIISKGQEVGLTLNPSKCELAIFGAADADRQNIQQQFQNTVPGIQIITPESAKLLGSPLTDSAIDNVLAEKIADLKKFSARLTTLTAHSAMFLLRASIATPRLIYFLRCAPSYKKRGLLSDYDAVLKLAVEGSLNCRLSPEAWLQSSLPVKMGGLGIRHAVETALPCFIASFQSVSPLVAQLAPPQILAADLSLTEAVENWSLQTMCDLPDPTVRGIQKCWEGPLVQRTVESLNLAAINLEDKARLLAIAKPHAGDWLNALPSPQLGTHLPNESFRIACALRLGADICEPHKCPCGAQVTSRGYHGLSCKKSAGRWSRHEGANDVIARALRSAEVPCIREPAGCSRSDGKRPDGQTLIPWARGKSLVWDFTCVDTFAPSYVAQSAIRSGSAAETAEENKRRKYDFLLDRFIFVPVAMETVGIWGQEGLRLISSIGQRISQVTGEPRSSSFLIQRLGIAVQRGNVASILGTLPAGKELEEIFLL

SEQ ID NO: 16424 - protein, 1042 aa, Desoria tigrina
MPTLDDPGGGSNPSGKCQDELDLTINSSGLPVPRSRRGGGSSPSRSQIKSRSMEWIRTTLEPRDGSTLLRSEVIDRYAHFMSNNGDIPVIPTTLVKWLKEAFPDVLLDGGPRTGGRGPVQRTFSGIFWIGQQPVSFQTTDWGRKLATLKGSIPVLRRCPRGARFQVAQALTSTLEKVIATNDEESWGNLLLFPYAVLQIPQETDKVTNLTKWVKGNAAKWALDPSTALPKSRPPRHNGTTTPQQQQQQIAKKVEAKLADGDTRGAIRLLLSDDTIAPNDDHTLQALLKKHPPHPEPVNLPQPPNFEDLVPASEEEVSKAVFSFPNGNAGGLDGLRPQILKDLISTTTGEVGEKLTKVIGFFVNLILRGEVIHIFRPVFFGASLTALKKKTGGIRPVAVGNTWRRIAAKILIRRITPKLLEIFTPHQLGVGLKGGAEAGAHTARMYFNADHTTPKVITKIDCNNAFNEFRRDIMLSAVGSTIPSAYPFISSCYGEPSNLYYGTTPIPSLAGVHQGDPLGPALFALVTQPIVEAMESELNIWYLDDGTIADEPKNSLKDLKTIISKGREVGLTLNTSKCELGVFGADDATCREIQQQFRELIPGIQDIALDSATLLGSPLTDLATEKVLADKTADLEKFSARLATLSAHSAFYLLRASIATPRLIYFLRCAPSYKKRAHLADYDAALKSAVETTLNCGLSQEAWLQSSLPVKKGGLGIRHAVDTALPCFIASFHSVLPLVSKLAPPTILAADTSLSDAHEQWKLLAHCDYPDPEQRGVQKCWEGPLVQHSVEALNLAAITPEDKARLLAVCKPHMGDWLYAVPSPQLGTHLANESFRIACALRLGANICEPHKCPCGAQVTARGYHKLSCKKSAGRWSRHEAANDVIARALRSAEVPCIREPAGCSRADGKRPDGQTLIPWARGKSLVWDFTCVDTFAPSYVAQSAVRSGAAAETAECNKRRKYDFLLERFIFVPVAMETMGIWGQEGLRLIKSIGQRISSLTGELRSTSFLIQRLGIAVQRGNIAAILGTLPAGKELEEVFYL

SEQ ID NO: 16425 - protein, 1032 aa, Desoria tigrina
MASPAPDDHGGGSGMSDSVSDSFLDQTVDPSRLSAPHSGRRSSSPSKPLLKARSLNWIRITLEERLGSKLSRSEIIDRYSTFMTEKGDVAVSTSTFGKYLREAFPDTILDQGGRGSYSNIMWVGQQPQQVEWGTKLAALKGSVPTLRRCPRGARLQVAQALTATLEKVISANDEDSWGNLFLFPYATLQVPQVADEVTNLTKWVKVNTGKWMVDPISALPLPRPPRPTLKKKVDPQQEIAKKVEAKLSDGDVKGAIRLLLSDDTIAPNNEDTLKALQKKHPPHPEPTNYPDDPVLEDLVPVSEEEVSRAVATFPNGSAGGLDSLRPQIIKDLLSIRSGDTSEKLSKAITLFINLVLKGEVNSCFRHIFFGAALTALKKKTGGIRPVAVGNTWRRLAAKILVRRVTPILVDKFAPHQLGVGIRGGAEAGAHTARLYFEATHCTPKAFVKIDANNAFNEFRRDSMFSAVGSAIPTAYPFIKSCYWEPSTLFYGTTPIPSLAGVHQGDPLGPALFALVVQPIVESLKAELNLWYLDDGTIADSPEKSLKALKSIISKGQEVGLTLNPSKCELAIFGANDADRQTIQQQFSDTMPGIQVITPESARLLGSPLTDSAMDNVLAEKIADLEKFSARLATLTAHSALYLLRASISTPRLIYFLRCAPTYKKMGLLADYDAILKLAVEGTLNCHLSPEAWLQSFLPVKMGGLGIRHAVDTALPCFIASFHSVSPLISQLAPPEIFSAEISLAEAVERWTSLTLLDLPDPVDRGIQKCWEGPLVLQAIESLNIAATSPEDKARLLAIARPHAGDWLNALPSPQLGTHLSNESFRIACALRLGADICEPHKCPCGAEVTSRGYHGLSCKRSAGRRSRHEAANDVIARALRSAEVPCIREPAGCSNSDGKRPDGQTLIPWARGKSLVWDFTCVDTFAPSYVVQSAARSGSAAESAEEKKKRKYDFLLNRYIFIPVAVETIGIWGQEGLRLISSIGQRISDVTGEPRSSSFLIQRLGIAIQRGNVASILGTLPAGKELEEIFLL

SEQ ID NO: 16426 - protein, 912 aa, Desoria tigrina
MWVGQQPQQVEWGTKLAALKGSVPTLRRCPRGARLQVAQALTATLEKVISANDEDSWGNLFLFPYATLQVPQVADEVTNLTKWVKVNTGKWMVDPISALPLPRPPRPTLKKKVDPQQEIAKKVEAKLSDGDVKGAIRLLLSDDTIAPNNEDTLKALQKKHPPHPEPTNYPDDPVLEDLVPVSEEEVSRAVATFPNGSAGGLDSLRPQIIKDLLSIRSGDTSEKLSKAITLFINLVLKGEVNSCFRHIFFGAALTALKKKTGGIRPVAVGNTWRRLAAKILVRRVTPILVDKFAPHQLGVGIRGGAEAGAHTARLYFEATHCTPKAFVKIDANNAFNEFRRDSMFSAVGSAIPTAYPFIKSCYWEPSTLFYGTTPIPSLAGVHQGDPLGPALFALVVQPIVESLKAELNLWYLDDGTIADSPEKSLKALKSIISKGQEVGLTLNPSKCELAIFGANDADRQTIQQQFSDTMPGIQVITPESARLLGRPLTDSAMDNVLAEKIADLEKFSARLATLTAHSALYLLRASISTPRLIYFLRCAPTYKKMGLLADYDAILKLAVEGTLNCHLSPEAWLQSFLPVKMGGLGIRHAVDTALPCFIASFHSVSPLISQLAPPEIFSAEISLAEAVERWTSLTLLDLPDPVDRGIQKCWEGPLVLQAIESLNIAATSPEDKARLLAIARPHAGDWLNALPSPQLGTHLSNESFRIACALRLGADICEPHKCPCGAEVTSRGYHGLSCKRSAGRRSRHEAANDVIARALRSAEVPCIREPAGCSNSDGKRPDGQTLIPWARGKSLVWDFTCVDTFAPSYVVQSAARSGSAAESAEEKKKRKYDFLLNRYIFIPVAVETIGIWGQEGLRLISSIGQRISDVTGEPRSSSFLIQRLGIAIQRGNVASILGTLPAGKELEEIFLL

SEQ ID NO: 16427 - protein, 1036 aa, Desoria tigrina
MSTPDPGGGQSFDGGDSLDQSIDDSRLSAPPSRRGSTSPSRSQTESASFQWIRAFLEEKPGSRLHRSEIYDRYTIYMQGEGDIAVSTSTFGKYLRRAFPGIPLDEGGRPGAKGSSRTTYSNISWINQQPHQVLADWGTKLATLKGSVPTLRRCPRGARLQVALALTVALEKVTSSNDEDSWGNLFLFPYATLQVPQVADEVTNLTKWVKGNTAKWTLDPNSALPLPRPPRPTLNKKIDPQQQVAKKVEAKLSDGDVKGAIRLLLSDDTIAPRDEVTLQALQKKHPPHPEPTHYPDDPEFEGLLPVSEEEIVRAVATFPNGSAGGLDSLRPQIIKDLLAIRSGDTSEKLCRALTLFINMVLKGEVNPLFRHIFFGASLTALKKKTGGIRPVAVGNTWRRLAAKILVRRITPILVEKFAPHQLGVGIKGGAEAGAHTARLYFEATHTSPKALVKIDANNAFNEFRRDSMFSAVGSAIPTAYPFIKSCYWEPSTLFYGTTAIQSLSGVHQGDPLGPALFALVVQPIVESLKAELNIWYLDDGTIADGPEKSLKALRSIISKGQEVGLTLNPTKCELAIFGADDADRRQIQQQFENTVPGIQVITPESAKLLGSPLTDSAMEKVLDDKTADLKNFSARLASLTAHSAMFLLRASIATPRLIYFLRCAPSYKKRGFLTDYDAVLKLAVEGTLNCRLSPEAWLQSSLPVKMGGLGIRHAVETALPCFIASFHSVSPLVAQLAPAEILAADVSLAEAVETWRLQTRCDLPDLAVRSIQKCWEGPLVQRTVESLNLAALSQEEKARMLAIAKPHAGDWLNVLPSPQLGTHLPNESFRIACALRLGADICEPHKCPCGANVTSRGYHGLSCKKSAGRWSRHEGANDVIARALRSAEVPCIREPAGCSRSDGKRPDGQTLIPWTRGRSLVWDFTCVDTFAPSHVAQSAIRSGSAAETAEINKRRKYDFLLDRFIFVPVAMETMGIWGRDGLRLISSIGQRISEVTGEPRSTSFLIQRLGIAVQRGNVASILGTLPAGKELEEIFLL

SEQ ID NO: 16428 - protein, 958 aa, Desoria tigrina
MRDKGDVAVLAVTFAKYLREAFPNIPLDEGGRPGSRGASLRVYSNLAWVAQQPQNDAVDWGAKLATLKGTVPTLRRCPRGARLQVAQALTKTLEQVISRNDEDAWGDLFLFPYAVLQVPQHADEVTNLTKWVKANTARWALDPNSALPMPRPPRPAHNENPQQQIAKKVEAKLADGDVRGAIRLLLSDDTIAPNDDVTLNALKKKHPPHPEPTTYPEDPELEDSIPVSEDEMSRAVASFPNGSAGGLDSLRPQILKDLLSIRSGDTSEKLGKVIRVFIDIILKGGVNAIFRPIFFGASLTALKKNTGGIRPVAVGNTWRRLAAKILVRRITPILVDKFSPHQLGVGVRGGAEAGAHTARLYFEATHSTPKALVKIDANNAFNEFRRDMMFSAVGSTIPTAYPFIKACYWEPSNLYYGTTPIQSLSGVHQGDPLGPALFALVIQPIVESLQSELNIWYLDDGTVADSPEKSLSALKTIILKGKEVGLTLNPTKCELAIFGAGDADRQKIQHQFSEMVPGIQVITPDSAKLLGSPLTDSAMETVLAEKTANLKIFSARLATLTAHSALFLLRASIATPRLIYFLRCAPSYKKRSLLADYDAVLKRAVEGALNCHLTPEAWLQSSLPVKLGGLGIRHAVETALPCFIASFHSVSPLVAQLAPPEIFAADVSLAEAVDSWSTQTLCDLPDPTERGIQKCWEGPLVKQTVESLLLAAGSQEDKARLLAIAKPHVGDWLNALPSPQLGTHLPNESFRIACALRLGADICEPHKCPCGALVTSRGYHGLSCKKSAGRWSRHEGANDVIARALRSAEVPCIREPAGCSRSDGKRPDGQTLIPWVRGKSLVWDFTCVDTFAPSYVAQSAVRSGSAAESAEEKKRRKYDFLLYRFIFVPVALETTGIWGKAGLRLISSIGQRISEVTGEPRSSSFLLQRIAIAVQRGNVASILGTLPAGKELEEIFLL

SEQ ID NO: 16429 - protein, 1040 aa, Desoria tigrina
MSTPDPGGGPDSEDNEGADQSIDVSRLSAPPHRRGSSSPSRGQVEISSIQWILLSLEGNPGSRLHRSEIYDRYASFMQGEGDNAVSTSTFGKYLRKAFPGVLLDEGGRPGAKGASRTTYSNICWKVQQPQQGHQPGNVNWGTKLATLKGTIPTLRRCPRGARLQVAQALTVTLEKVTTDNDEDSWGNLFLFPYATLQVPQAADEVCNLTKWVKANTANWSLNPIDALPKPRPPRPLHNKKSDPQQQIAKKVEAKLSDGDVRGAIRLLLSDDTIAPNDDVTLLALQNKHPPHPEPTHYPEDPEVEDLIPVSEEEISRAVASFPNGSAGGLDSLRPQILKDLLSIRSGDTSEKLSRAITHFINMVLKGDINPCFRHIFFGASLTALKKKTGGIRPVAVGNTWRRLAAKILVRRITPILVEKFAPHQLGVGIRGGAEAGAHTARLYFEATHATPKALVKIDANNAFNEFRRDSMFSAVGSTIPSAYPFIKSCYWEPSTLFYGTTPIPSLSGVHQGDPLGPALFALVVQPIVESLKAELNVWYLDDGTISDSPEKSLRALQSIISKGLEVGLTLNPSKCELAIFGADDAERQIIQQQFANTVPGIQLITPESAKLLGSPLTDSAMEKVLAEKTVDLKKFSARLATLTAHSALYLLRASIATPRLIYFLRCAPTYKKMGLLADYDAVLKLAVEGTLNCQLSPEAWLQSSLPVKMGGLGIRHATETALPCFIASFHSVSPLISQLAPPEIFDAENSLADAEESWRLMTHCDLPDPLNKGIQKCWECPRVQQTIETLNIAATSLEDKARLLAIARPHAGDWLNALPSPQLGTHLSNESFRIACALRLGADICEPHKCPCGAQVTSRGYHGLSCKKSAGRRSRHEAANDVIARALRSAEVPCIREPAGCSRSDGKRPDGQSLIPWTRGKSLVWDFTCVDTFAPSYVAQSAIRSGSAAEMAEEKKRRKYDFLLDRYIFVPIAMETIGIWGQDGLRLISTIGQRISQVTGEPRSSSFLIQRLGIAIQRGNVASILGTLPAGKELEEIFLL

SEQ ID NO: 16430 - protein, 1038 aa, Desoria tigrina
MTTPDDPGGGASASAHLDDHLDDTINSSQLAVPHSRRNSASPSRTQTKARSIQWILYNLEVKVGSTLPRSEITDRYAHFMHEKEDVAVSTSTFGKYLREAFPNIQLDQGGRAGSKGVSLRTYSNLGWVSQQPQHNRINWGTKLATLKGTIPTLRRCPRGARLQVAQALSVTLEKVTTLNDDESWGNLFLFPYATLNVPQVADEVSNLTKWVKGNTAKWTLDPNSALPLPRLPRPTLNRKVDPQQQVAKKVEAKLSDGDVRGAIRLLLSDDTIAPHDEVTLKALQKKHPPHPAPAHYPDDPEIEDLVPVSAEEVSRAVATFPNGSAGGLDGLRPQIIKDLLSIRTGDTSEKLSKAITLFMNMVLKGEVNPFFRHIFFGASLTALKKKTGGIRPVAVGNTWRRLAAKILVRRITPILVEKFAPHQLGVGIRGGAEAGAHTARLYFEATHSTPKALVKIDANNAFNEFRRDSMFSAVGSTIPTAYPFIKSCYWEPSTLFYGTTEIPSLSGVHQGDPLGPALFALVVQPIVESLRAELNIWYLDDGTFSDSPEKSLTALQTIISKGQEVGLTLNPSKCELAIFGAEDTDRRNIQQKFESVVPGIQVITPESAKLLGSPLTDSAMEKILAEKTADLKSFSARLATLTAHSALYLLRASISTPRLIYFLRCAPTYKKMGLLADYDAVLKSAVEGTLNCHLSPEAWLQSSLPVKMGGLGIRHAVDTALPCFIASFHSVSPLISQLAPPQIFTAECSLAEAEERWSTLTCCDLPDPAQRGIQKCWEGPLVQQSVETLNLAANSQEDKARLMAIASPHAGDWLNALPSPQLGTHLPDESFRISCVLRLGADICEPHKCPCGAQVSSRGYHGLSCKKSAGRWSRHESANDVIARALRSAEVPCIREPAGCSRSDGKRPDGQTLIPWARGKSLVWDFTCVDTFAPSYVAQSALRSGSAAETAEENKRRKYDFLLDRFIFVPVAIETIGIWGQEGLRLISSIGQRISQVTGVRSSSFLLQRLGIAIQRGNVASILGTLPAGKEMEEIFLL

SEQ ID NO: 16431 - protein, 870 aa, Nasonia vitripennis
MRWEICNASEEAGSYANWVTGLQELVRNNALSEIGLDSLYDQLIQIMRHPSDDNEQDRLRLNARGPPRRGHRKNRRRRRLTAADRKRFAFARCQDLWNNNPKKLAELVIANDLSILQRRQAPGRTETQTLYNELWGRVGPNIEAPRRTEDPIPVSRIFTPITPQEIMGRIRRIKNDSAAGPDGVTKDDLRGRGVSIALSKLFNSILLAGYYPKAWRENRTTLLPKPEEDPADVKNWRPITISSMVSRVYSGLLDQRVRAVIKQCDRQKGFTEENGCFSNIQLLDDAVSNAKKAGGVITILDVSKAFDTVPHAVIQGCLEKKGIPETVAAYISNMYRDCSTAIRTRSGDVKIGMKRGVKQGDPLSPLIFNLVLEPLLERLQETSGVEIEGMNLSCAAFADDIVCFANTAPEAGRQLRMVADYLGRLDMSLSVSKCIAVEYVPHRKTWYTKNPGLEANGNAVPSISPSETFKYLGAKVSPWKGLLKGFESDAFREVISRVQRLPLKPMQKVDLLQMYIFPRYTYGLITSPPAKAVLKTIDRIIRTKIKEILHLPESVSSSFLYTPRKQGGLGLLEVEKMVLIAALRNGLRARQSHDPVTRAAMNSNAADDRLKSYADALRLHWPLTTKELDTYKYQLRLSYAQKWAEQKWQGQGVEEFAQDPVGNSWLQRYDLLPASRYIDAIKLRTNTYPTRALMKIIDGRVDSSCRKCQGSSETLGHILGRCRYTKDKRISRHNEIKDLLKARLAKNHQVMDEPQITVRGQRFKPDLVVKTNEGRVHVIDVTVRYEHRTYLDEGRTEKIGKYRQILSTLRRDLHSNAEEVIPIVIGSRGAIPRETRKALSKLGIGKSDWLTISLIALRSSLEIVNAFMDD

SEQ ID NO: 16432 - protein, 1250 aa, Nasonia vitripennis
MDSGNNVASEPRGAVDVTSAAPIGAELNAEPCEGRNQRREAALSAQTRRRNPARRARNAQQADEPGDDEEIETHGPLTIRTAEPMEIVAIAKNPQACPKCLQGGTQLLCMGSWELSRHISKEHPSVDVTWVCGACQRRCTTLRSWSCHVPHCKGRQEPKDLPFKCEHCSLSFDSQIGLSQHERHVHPEVRNDKRAAEANKPKGKSGRRPSIWSDEDLLLIRELESEYHGARNINERIAEHFPDRTGRQVSDARRRKDYAALRERGGPQGPAEGVEAIEEVDEGEIPEGEELVATDGAALESGPPENGGSAPAEQVNAPALESSSQQDRECSPAVGSVEQIEDSSDDDEFCDALGEISLPEPLSVERTTISPPPRDDWKGPMRWEICNASEEAGSYANWVTGLQELVRNNALSEIGLDSLYDQLIQIMRHPSDDNEQDRPRLNARGPPRRGHRKNRRRRRLTAADRKRFAFARCQDLWNNNPKKLAELVIANDLSILQRRQAPGRTETQTLYNELWGRVGPNIEAPRRTEDPIPVSRIFTPITPQEIMGRIRRIKNDSAAGPDGVTKDDLRGRGVSIALSKLFNSILLAGYYPKAWRENRTTLLPKPEKDPADVKNWRPITISSMVSRVYSGLLDQRVRAVIKQCDRQKGFTEENGCFSNIQLLDDAVSNAKKAGGVITILDVSKAFDTVPHAVIQGCLEKKGIPETVAAYISNMYRDCSTAIRTRSGDVKIGMKRGVKQGDPLSPLIFNLVLEPLLERLQETSGVEIEGMNLSCAAFADDIVCFANTAPEAGRQLRMVADYLGRLDMSLSVSKCIAVEYVPHRKTWYTKNPGLEVNGNAVPSISPSETFKYLGAKVSPWKGLLKGFESDAFREVISRVQRLPLKPMQKVDLLQMYIFPRYTYGLITSPPAKAVLKTIDRIIRTKIKEILHLPESVSSSFLYTPRKQGGLGLLEVEKMVLIAALRNGLRARQSHDPVTRAAMNSNAADDRLKSYADALRLHWPLTTKELDTYKYQLRLSYAQKWAEQKWQGQGVEEFAQDPVGNSWLQRYDLLPASRYIDAIKLRTNTNPTRALMKIIDGRVDSSCRKCQGSSETLGHILDRCRYTKDKRISRHNEIKDLLKARLAKNHQVMDEPQITVRGQRFKPDLVVKTNEGRVHVIDVTVRYEHRTYLDEGRTEKIGKYRQILSTLRRDLHSNAEEVIPIVIGSRGAIPRETRKALSKLGIGKSDWLTISLIALRSSLEIVNAFMDD

SEQ ID NO: 16433 - protein, 1229 aa, Nasonia vitripennis
MDSENNVASEPRGAVDVTSAAPIGAELNAEPCEGRNQRREAALSAQTRRRNPARRARNAQQADEPGDDEEIETHGPLTIRTAVPMEIVAIAKNPQACPKCLQGGTQLLYMGSWELSRHLNKEHPSVDVTWVCGACQRRCTTLRSWSCHVPHCKGRQEPKDLPFKYEHCSLSFDSQIGLSQHERHVHPEVRNDKRAAEANKPKGKSGRRPSIWSDEDLLLIRELESEYHGARNINERIAEHFPDRTGRQVSDARRRKDYAALRGRGGPQGPAEGVEAIEEVDEGEIPEGEELVATDAPALESSSQQDRECSPAVGSDEQIEDSSDDDEFSDALGEISLPEPLSFERTTISPPPRDDWKGPMRWEICNASEEAGSYANWVTGLQELVRNNALSEIGLDSLYDQLIQIMRHPSDDNEQDRLQLNARGPPRRGHRKNRRRRRLTAADRKRFAFARCQDLWNNNPKKLAELVIANDLSILQRRQAPGRTETQTLYNELWGRVGPNIEAPRRTEDPIPVSRIFTPITPQEIMGRIRRIKNDSAAGPDGVTKDDLRGRGVSIALSKLFNSILLAGYYPKAWRENRTTLLPKPEKDPTDVKNWRPITISSMVSRVYSGLLDQRVRAVIKQCDRQKGFTEENGCFSNIQLLDDAVSNAKKAGGVITILDVSKAFDTVPHAVIQGCLEKKGIPETVAAYISSMYRDCSTAIRTRSGDVKIGMKRGVKQGDPLSPLIFNLVLEPLLERLQETSGVEIEGMNLSCAAFADDIVCFANTAPEAGRQLRMVADYLGRLDMSLSVSKYIAVEYVPHRKTWYTKNPGLEVNGNAVPSISPSETFKYLGAKVSPWKGLLKGFESDAFREVISRVQRLPLKPMQKVDLLQMYIFPRYTYGLITSPPAKAVLKTIDRIIRTKIKEILHLPESVSSSFLYTPRKQGGLGLLEVEKMVLIAALRNGLRARQSHDPVTRAAMNSNAADDRLKSYADALRLHWPLTTKELDTYKYQLRLSYAQKWAEQKWQGQGVEEFAQDPVGNSWLQRYDLLPASRYIDAIKLRTNTYPTRALMKIIDGLVDISCRKCQGSSETLGHILGRCRYTKDKRISRHNEIKDLLKARLAKNNQVMDEPQITVRGQRFKPDLVVKTNEGRVHVIDVTVRYEHRTYLDEGRTEKIGKYRQILSTLRRDLHSNAEEVIPIVIGSRGAIPRETRKALSKLGIGKSDWLTISLIALRSSLEIVNAFMDD

SEQ ID NO: 16434 - protein, 1250 aa, Pteromalus puparum
MDYGNDVASEPRGAVAGTSAAPIGVELITEIGEGSNPRREAALSAQIRRRNPARRARDAQQANEPGDKSDEEQEAQGPLTIRNAEPMEIVAVKEPQTCPKCLQRGLRLLCMGSGELAKHIAKEHPAVDVTWVCGPCQRRCASIRSWSCHVPFCKGRREPEELQFKCDHCSLSFDTQIGLSQHERHVHPTVRNDKRAAEANKPKGKGGRRPSLWTEDDLLAIWELECEYHGARDLNGKIAEHFPDKTARQVSDARRRKDYAALRERGGPQGPARQVEVIEEADEGEAPEGEEPVAADGTATEGGPPENGGCAPAETVNAPTPESESQRESNPAVGSEEQEPEDSSDNDEFSDALGEISLPEPLSVERTTVSPPPEDDWMGPLRWEICNTCENTGSYAHWVSSLQELARNNELSDEMLDSLYDQLIRNMRSLSDDEQQDRLQSNARGPPQRGRRKNRRGRRLTAADRKRFAFARCQELWDNNPKKLAELVVANDLSLLQRREAPSKAATQSLYNDLWGKTGPTVEAPARTEDPIPVSRIFTPVTPREVRDRIKNIQNDSAAGPDKVTKDDLRGEGLSIALSKLFNSLLLAGYYPKAWRENRTTLLPKADKDTADARNWRPITISSMVSRVYSGLIDQRMRAVIRQCDRQKGFTEENGCFSNIQLLNEAVSNAKKAGGVISILDVSKAFDTVPHSVIQGCLEKKGIPATVAVYISNMYRDCFTAIRTGDGDIRIEMKRGVKQGDPLSPLIFNLVLEPLLERLQETSGVEIEGMKLSCAAFADDIACFAKTAPEAGRQLQIVADYLGRLDMSLSVSKCSAIEYVPYRKTWYTQNPGLEVNGNAVPSISPDETFKYLGAKVSPWRGILKGFELDAFKEVISRVQRLPLKPMQKVDLLQMYIFPRYTYGLIVSPPAKAVLKNIDRVIRSKVKEILHLPESVSNSFLYTPRKQGGLGLLEVEQMVLIAALRNGLKARLSTDPVTRAAMNSNDSDRRLESYASALRLNWPVSIQELNAYKHKLRLSYAQKWAAQKWQGQGVEEFAQDPVGNSWLQRYDLLAPSRYIDAIKLRTNTYPTRAMMKIIDGRVDSSCRKCLDSSETLGHILGRCRYTKDKRISRHNEIKDLLKARLASRHLVMDEPQITVRGQKFKPDLVVKTNEGRVLVVDVTVRYEHRTYLAEGRAEKIGKYRRILSTLKRDLHSNSEEVIPIVVGSRGAIPKETRKALLKLGIGRKDWLTISLIALRSSLEIVNAFMDD

SEQ ID NO: 16435 - protein, 1204 aa, Cristatella mucedo
MRRTTINSTSGRTYPGGRSEPSLDCVTPQARSRHMLLRETEASLPVDRDNTGGGASAENVPPNSDSLCEVSGTTATVTIVRDIIWKCTICLETYTNLAVYASHLQNHHKCEVKYRCPTCKECRTALQGARIHAALCAQKLARGGMARPRNNGIAPTGITCRYCEHQFRSKSGLASHIRAEHKHEVNECLFACATCGERFASKSGVSQHEGHRHPEIANERRIRNPSGRSNHGRNPDNSGAHIRQKIWTPRKVQKLRELETELKSKGVTYINRAIANALGEGVTRHQVAWKRKNIKRSVTPRDPAFSSESSRASDETTEAGPLIDENPHVLPESSNEILLDREKWQEARCNEGPECLATLSLQCLDAALAGETTSDDSKLLAELRKACVNKERSNVRRATRRKDLSNKAASYKRTQELWKSRKHDLIREILDEKKGPQPRCGLTKDHVTNTYRERFSGGPGDVDLSDYPYSGECDASELMMPFSPDEVKEAIRNSNSHAAPGPDKITLRGLKSINKIEHILTNWFNAWLYSGKMAEEVKGCRSILLPKTDKHLDDISNWRPLTIASTVSRLYTSLLAKRLSTAVQLDTRQRGFVCSGSCSENIFLLRQIEKWAKAERKSYGVVFLDIAKAFDTVAHVHLTSALARMGVPDRFIRVVSNMYAGATTAFQLATGDTDPINIQRGVKQGDPLSPLLFNIALDPLMSRLNLLEGVRSPAGSFSALAYADDIALVCASKTGMQTLLNEVAMFVSRVGMALNVNKSDGFWREFTAKTAITNRGVEWTVGNTKLPLVRPGTTTRYLGVAIDPTYRLSKTNLTQRLKLWVTRISQAPLKPRQRLDLLHSVAVPRLLYELVYARDPGQRQLEELDIVARSAVRDWFHLPKSASSAMLHCKVREGGLGVHQLTQMIPRLKDRMFERLSRSTDPVTSLWARNTTLERNNRGETTRATDQWTHQAWQGKGAHYFQNPAASAWMLSNRISDGDVVKAIKLRCNLWPVKTCLAQTRPMEDVSCRLCKRTAETVGHISGYCEKLKRPRISRHNWVVDSLIQSLERNGIAFSREPIIRLGTSTSTEVLKPDLIITPEPTKDKPVRTAYVIDPVVTFEDKTALSKAHERKVATYRPLRDYICDKYKVSRVEMAGIVIGARGGWFTNNELVLERIGIGTHWLYQHLCAGVLRGTLTMLRNFADDHERERAGLDHQQPTPRQGQ

SEQ ID NO: 16436 - protein, 1344 aa, Aleochara bilineata
MLSCRSDDIALASGMRPCPREPDCFSNPFYEQPVLTFYPIFLPSQTQSHPPSYAGSACKLFYLKFMEFFKKASIKRKNRADTGSSASDNSGTHPDDDSAKAHNTGTTTAQGCEEDGIITSAIAIASTSTTGVHTGSIGRSFEPTSSTEAMNPSSLPSTSQQHTTKDVFACPRCSQTYSAKANLNRHIKDCGSRDRTKCLYCPYRAASFPAVRQHEARAHKLEYARDNEKKLPAPESKLLASMAHIEARCRKGPGGFIKSLMAATGLTEHQVRHRREKDIYKSYLKDAQEQVKKEALGFFAKPPKQSPSHTPAPNTSGNTIQPMSFAGAAAQPSSAAPILTVEHEASPHTPAGRTSIPKAGKRGRESSSGNPRPPARKPRRGPDTLELSTPCVPRSNAKPAAEKFKVLQNTLLTPSLTCKRPRSSGDLHLVAKSNDEPETKNDIISPACVQEPKRRANSTPEILTSELPPLENTNEQRFVFLQDLIRCQETCSADLKALITTSIKGTKQELSTHINTFLSNTFPAKSRSTVRKPPANPPPPANAKQKRVQNFKKAQDLYRKNPAALAEIIFSGQSLDQPPEHPSLIDTDALYRGILESPSPEDKEPISHPQSSGTIYTPVTDKDVSAALKGWKAAAPGPDNITVAQVKRCNISTLRCLFNIILYRNVTPTSWLRMRTILIPKDGDRRNPSNWRPISIGSAVQRLFHRVLAQRMQNNISLHIAQRGFINLDGTIANTTILHQYLSSRKLSGKAYNMVALDIRKAFDSISHHSILRALRRFEVDKGMYEYLEQVISSSRTNIQVGPLTTDDIRIQRGVKQGDPLSPLLFNLVIDELFYLLDEQRTGGSLSKGTVCPAIAFADDIVILQDNDVNIPPALRLIETFFNRRGMSLNPAKTVCVSAGTYKGTSVLRSKPCFKLGNKYLPNLHTSDSFKYLGLQFDASGTVKPSVRNAQVWLENLVKSPLKPLQKMTILNTYLLPRLMYGLQTTRTTGDILRSADRLVKRSVKRMLHLSVKTPDCLLYARVKDGGLGIPHLRTIIPRTLVKRIKNIMNVDAFTMALAATDEFKNTLYRLEKLANSGTEHFQWLDQIADSPIHHGLESVQQDQASSQWIRNPPKWLRSEDYIRAIQLRTNNLPTAGMVYNPAPVRKCRGGCGKIETISHVLQGCTVTHWDRISRHNTIVKKIRNHVKRLGHPVEDEPHVRHTDGRLYKPDLAIHLDEDNIIICDVQVSWEGPTPLHKTWQNKRLTYDNPHFREAGVRRWGEKNLKFLPLILGARGVWPDCNRETVETLRISKSLKTSCVIACLKWGSSIHRSFSRAVWSDNRQNGRRPKNTTEGTAARQSNRR

SEQ ID NO: 16437 - protein, 545 aa, Dermanyssus gallinae
MYHYVESSYRRPTCLVTSDLILSSETGIQQGDPLGPPLFCLAVNDLIKSLESPLNMWYLDDGVLAGNASTIASDIQKIIDFENVSGLALNPSKCELFVWNPDADSTTSEITHLLPGSANEVELLGVPLLQEGVAPVLQKWLDKLNTASERLPLIGYHSGLYLLRCSYSATRLTHILRGIELTGETDELRRFNDLTDNTITNLLNIKLDDTAKRQMFLPIAKGGLGLPDPTILALPAIVAATHQVSGKVCELLDEAGQLEFTSMRDRVTSNLVEVLGTSPNNVASQSEWSAMLADQHACLLINQADSDSTRAQLRATSAKHASDWLHALPSASLGLDDATTRICVGLRLGTPLVHPHICRCGEPVGIRAHHALSCALSEGRRPRHAAINDTIARALRTAGYPSTLEPTGLTRNDGKRPDGMTLIPFERGRTLIWDATVTDSLSPSMVGFGSLRAGHAATQAETNKMNKYAELARADNFSPVAFETLGPPGPLTERILTKLGERLKITTGDKRAAHFLRQRLSIDVQRGNAISVLGSLAEWCTPGLL

SEQ ID NO: 16438 - protein, 969 aa, Dermanyssus gallinae
MEDHAYLPSGSSSTPTTTTRLLVQPNIVDAEPSMKVPCPVCGLLYTRRGLLQHTRAKHPTDIAPSPDIDTSHPADPSVKDILVKLQDISKTFKLVRITPKSIRHILALTLTKVLDDVHTQNSFHAWLALFSFVPVILRLPANRNINQSLAQIIRKNLRDYECGTRLHNLTAHRTAQRNARTHADSDVARRVLTKLSEGDGTNAARILISTDTFSSGEDTANALRAKHPPAPAEPIWPEPPSTDSRSTSKEDIFAAVQSFPRSSSAGLDFIRPRLLADLLSPNLGETANKLAISIAKVIDILRFGQPPAELLPIIFGAKLFALKKKCGSIRPIACSSCLRRIASKVSIRDNTGQLAHLIDDRQLGFSVKAGVETAVHTTRSFLASRTCPTYLLKLDFSNAFNTIRRDHLLRTVKDSTPDMYHYVESSYRRPTCLVTSDLILSSETGIQQGDPLGPPLFCLAVNDLIKSLESPLNMWYLDDGVLAGNASTIASDIQKIIDFENVSGLALNPSKCELFVWNPDADSTTSEITHLLPGCKILSANEVELLGVPLLQEGVAPVLQKWLDKLNTASERLPLIGYHSGLYLLRCSYSATRLTHILRGIELTGETNELRRFNDLTANTITNLLNIKLDDTAKRQMFLPIAKGGLGLPDPTMLALPAIVAATHQVSGKVCELLDEAGQLEFTSMRDRVTSNLVEVFGTSPNNVASQSEWSAMLADQHACLLIDQADSDSTRARLRATSAKHASDWLHALPSASLGTLLDDATTRICVGLRLGTPLVHPHICRCGDPVGIRAHHALSCALSEGRRPRHAAINDTIARALRTAGYPSTLEPTGLTRNDGRRPDGMTLIPFERGRTLIWDATVTDSLSPSMVGFGSLRAGHAATQAETNKMNKYAELARAHNFSPVAFETLGPPGPLTERILTKLGERLKITTGDKRAAQFLRQRLSIDVQRGNAISVLGSLAEWCTPGLL

SEQ ID NO: 16439 - protein, 969 aa, Dermanyssus gallinae
MEDHAYLPSGSSSTPTTTTRLLVQPNIVDAEPSLKVPCPVCGLLYTRRGLLRHTRAKHPTDIAPSPDIDTSHPADPSVKDILVKLQDISKTFKLVRITPKSIRHILALTLTKVLDDVHTQNSFHAWLALFSFVPVILRLPANRNINQSLAQIIRKNLRDYECGTRLHNLTAHRTAQRNARTHADFDVARRVLTKLSEGDGTNAARILISTDTFSSGEDTANALRAKHPPAPAEPIWPEPPLTDSGSTSKEDIFAAVQSFPRSSSAGLDFIRPRLLADLLSPNLGETANKLAISIAKVVDILRFGQPPAELLPIIFGAKLFALKKKCGSIRPIACSSCLRRIASKVSIRDNTGQLAHLIDDRQLGFSVKAGVETAVHTTRSFLASRTCPTYLLKLDFSNAFNTIRRDHLLRTVKDSTPDMYHYVESSYRRPTCLVTSDLILSSETGIQQGDPLGPPLFCLAVNDVIKSLESPLNMWYLDDGVLAGNASTIASDIQKIIDFENVSGLALNPSKCELFVWNPDADSTTSEITHLLPGCKILSANEVELLGVPLLQEGVAPVLQKWLDKLNTASERLPLIGYHSGLYLLRCSYSATRLTHILRGIELTRETDELRRFNDLTANTITNLLNIKLDDTGKRQMFLPIAKGGLGLPDPTILALPAIVAATHQVSGKVCELLDEAGQLEFTSMRDRVTSNLVEVLGTSPNNVASQSEWSAMLADQHACLLIDQADSDSTRARLRATSAKHASDWLHALPSASLGTLLDDATTRICVGLRLATSLVHPHICRCGEPVGIRAHHALYCALSEGRRPRHAAINDTIARALRTAGYPSTLEPTGLTRNDGKRPDGMTLIPFERGRTLIWDATVTDSLSPSMVGFGSLRAGHAATQAETNKMNKYAELARAHNFSPVAFETLGPPGPLTERILTKLGKRLKITTGDKRAAQFFRQRLSIDVQRGNAISVLGSLAEWCTPGLL

SEQ ID NO: 16440 - protein, 969 aa, Dermanyssus gallinae
MEDHAYLPSGSSSTPTTTTRLLVQPNIVDAEPSLKVPCPVCGLLYTRRGLPRHTRAKHPTDIAPSPDIDTSHPADPSVKDILVKLQDISKTFKLVRITPKSIRHILALTLTKVLDDVHTQNSFHAWLALFSFVPVILRLPANRNINQSLAQIIRKNLRDYECGTRLHNLTGHRTAQRNARTHADFDVARRVLTKLSEGDGTNAARILISTDTFSSGEDTANALRAKHPPAPAEPIWPEPPSTDSGSTSKEDIFAAVQSFPRSSSAGLDFIRPRLLADLLSPNLGETANKLAISIAKVVDILRFGQPPAELLPIIFGAKLFALKKKCGSIRPIACSSCLRRIASKVSIRDNTGQLAHLIDDRQLGFSVKAGVETAVHTTRSFLASRTCPTYLLKLDFSNAFNTIRRDHLLRTIKDSTPDMYHYVESSYRRPTCLVTSDLILSSETGIQQGDPLGPPLFCLAVNDLIKSLESPLNMWYLDDGVLAGNASTIASDIQKIIDFENVSGLALNPSKCELFVWNPDADSTTSEITHLLPGCKILSANEVELLGVPLLQEGVAPVLQKWLDKLNTASERLPLIGYHSGLYLLRCSYSATRLTHILRGIELTGETDELRRFNDLTANTITNLLNIKLDDTAKRQMFLPIAKGGLGLPDPTILALPAIVAATHQVSGKVCELLDEAGQLEFTSMRDRVTSNLVEVLGTSPNNVASQSEWSAMLADQHACLLIDQADSDSTRARLRATSAKHASDWLHALPSASLGTLLDDATTRICVGVRLGTPLVHPHICRCGEPVGIRAHHALSCALSEGRRPRHAAINDTIARALRTAGYPSTLEPTGLTRNDGKRPDGMTLIPFERGRTLIWDATVTDSLSPSMVGFGSLRAGHAATQAETNKMNKYAELARAHNFSPVAFETLGPPGPLTKRILTKLGERLKITTGDKRAAQFLRQRLSIDVQRGNAISVLGSLAEWCTPGLL

SEQ ID NO: 16441 - protein, 969 aa, Dermanyssus gallinae
MEDHAYLPSGSSSTPTTTTRLLVQPNIVDAEPSLKVPCPVCGLLYTRRGLLRHTRAKHPTDIAPSPDIDTSHPADPSVKDILVKLQDISKTFKLVRITPKSIRHILALTLTKVLDDVHTQNSFHAWLALFSFVPVILRLPANRNINQSLAQIIRKNLRDYECGTRLHNLTAHRTAQRNARTHADFDVARRVLTKLSEGDGTNAARILISTDTFSSGEDTANALRAKHPPAPAEPIWPEPPSTDSGSTSKEDIFAAVQSFPRSSSAGLDFIRPRLLADLLSPNLGETANKLAISIAKVVDILRFGQPPAELLPIIFGAKLFALKKKCGSIRPIACSSCLRRIASKVSIRDNTGQLAHLIDDRQLGFSVKAGVETAVHTTRSFLASRTCPTYLLKLDFSNAFNTIRRDHLLRTVKDSTPDMYHYVESSYRRPTCLVTSDLILSSETGIQQGDPLGPPLFCLAVNNLIKSLESPLNMWYLDDGVLAGNASTIASDIQKIIDFENVSGLALNPSKCELFVWNPDADSTTSEITHLLPGCKILSANEVELLGVPLLQEGVAPVLQKWLDKLNTASERLPLIGYHSGLYLLRCSYSATRLTHILRGIELTGETDELRRFNDLTANTITNLLNIKLDDTAKRQMFLPIAKGGLGLPDPTILALPAIVAATHQVSGKVCELLDEVGQLEFTSMRDRVTSNLVEVLGTSPNNVASQSEWSAMLADQHACLLIDQADSDSTRARLRATSAKHTSDWLHALPSASLGTLLDDATTRICVGLRLGTPLVHPHICRCGEPVGIRAHHALSCALSEGRRPRHAAINDTIARALRTAGYPSTLEPTGLTRNDGKRPDGMTLIPFERGRTLIWDATVTDSLSPSMVGFGSLRAGHAATQAETNKMNKYAELARAHNFSPVAFETLGPPGPLTERILTKLGERLKITTGDKRAAQFLRQRLSIDVQRGNAISVLGSLAEWCTPGLL

SEQ ID NO: 16442 - protein, 551 aa, Dermanyssus gallinae
MYHYVDSSYRRPTCLVTSDLILLSETGIQQGDPLGPPLFCLAVNDLIKSLESPLNMWYLDDGVLAGNASTIASDIQKIIDFENVSGLALNPSKCELFVWNPDADSTTSEITHLLPGCKILSANEVELLGVLLLQEGVAPVLQKWLDKLNTASERLPLIGYHSGIYLLRCSYSATRLTHILRGIELTGETDELRRFNDLTANTITNLLNIKLDDTAKRQMFLPIAKGGLGLPDPRILALPAIVAATHQVSGKVCELLDEAGQLEFTSMRDRVTSNLVEVLGTSPNNVASQSEWSAMLADQHACLLIEQADSDSTRARLRATSAKHASDLLHALPSASLGTLLDYATTRICVGLRLGTPLVHPHICRCGEPVVIRAHHALSCALSEGRRPRHAAINDTIARALRTAGYPSTLEPTGLTRNDGKRPDGMTLIPFERGRTLIWDATVTDSLSPSMVGFGSLRAGHAATQAETNKMNRYAELARAHNFSPVAFETLGPPGPLTERILTKLGERLKITTGDKRAAQFLRQRLSIDVQRGNAISVLGSLAEWCTPGLL

SEQ ID NO: 16443 - protein, 969 aa, Dermanyssus gallinae
MEDHAYLPSGSSSTPTTTTRLLVQPNIVDAEPSLKVPCPVCGLLYTRRGLLRHTRAKHPTDIAPSPDIDTSHPADPSVKDILVKLQDISKTFKLVRITPKSIRHILALTLTKVLDDVHTQNSFHAWLALFSFVPVILRLPANRNINQSLAQIIRKNLRDYECGTRLHNLTAHRTAQRNARTHADFDVARRVLTKLSEGDGTNAARILISTDTFSSGEDTANALRAKHPPAPAEPIWPEPPSTDSGSTSKEDIFAAVQSFPRSSSAGLDFIRPRLLADLLSPNLGETANKLAISIAKVVDILRFGQPPAELLPIIFGAKLFALKKKCGSIRPIACSSCLRRIASKVSIRDNTGQLAHLIDDRQLGFSVKAGVETAVHTTRSFLASRTCPTYLLKLDFSNAFNTIRRDHLLRTVKDSTPDMYHFVESSYRRPTCLVTSDLILSSETGIQQGDPLGPPLFCLAVNDLIKSLESPLNMWYLDDGVLAGNASTIASDIQKIIDFENVSGLALNPSKCELFVWNPDADSTTSEITHLLPGCKILSANEVELLGVPLLQEGVAPVLQKWLDKLNTASERLPLIGYHSGLYLLRCSYSATRLTHILRGTELTGETDELRRFNDLTANTITNLLNIKLDDTAKRQMFLPIAKGGLGLPDPTILALPAIVAATHQVSGKVCELLDEAGQLEFTSMRDRVTSNLVEVLGTSPNNVASQSEWSAMLADQHACLLIDQADSDSTRARLRATSAKHASDWLHALPSASLGTLLDDATTRICVGLRLGTPLVHPHICRCGEPVGIRAHHALSCALSEGRRPRHAAINDTIARALRTAGYPSTLEPTGLTRNDGKRPDGMTLIPFERGRTLIWDVTVTDSLSPSMVSFGSLRAGHAATQAETNKMNKYAELARAHNFSPVAFETLGPPGPLTERILTKLGERLKITTGDKRAAQFLRQRLSIDVQRGNAISVLGSLAEWCTPGLL

SEQ ID NO: 16444 - protein, 969 aa, Dermanyssus gallinae
MEDHAYLPSGSSSTPTTTTRLLVQPNIVDAEPSLKAPCPVCGLRYTRRGLLRHTRAKHPTDIAPSPDIDTSHPADPSVKDILVKLQDISKTFKLVRITPKSIKHILALTLTKVLDDVHTQNSFHAWLALFSFVPVILRLPANRNINQSLAQIIRKNLRDYECGTRLHNLTAHRTAQRNARTHADFDVARRVLTKLSEGDGTNAARILISTDTFSSGEDTANALRAKHPPAPAEPIWPEPPLTDSGSTSKEDIFAAVQSFPRSSSAGLDFIRPRLLADLLSPNLGETANKLAISIAKVVDILRFGQPPAELLPIIFGAKLFALKKKCGSIRPIACSSCLRRIASKVSIRDNTGQLAHLIDDRQLGFSVKAGVETAVHTTRSFLASRTCPTYLLKLDFSNAFNTIRRDHLLRTVKDSTPDMYHYVESSYRRPTCLVTSDLILSSETGIQQGDPLGPPLFCLAVNDVIKSLESPLNMWYLDDGVLAGNASTIASDIQKIIDFENVSGLALNPSKCELFVWNPDADSTTSEITHLLPGCKILSANEVELLGVPLLQEGVAPVLQKWLDKLNTASERLPLIGYHSGLYLLRGSYSATRLTHILRGIELTGETDELRRFNDLTANTITNLLYIKLDDTAKRQMFLPIAKGGLGLPDPTILALPAIVAATHQVSGKVCELLDEAGQLEFTSMRDRVTSNLVEVLGTSPNNVASQSEWSAMLADQHACLLIDQADSDSTRARLRATSAKHASDWLHALPSASLGTLLDDATTRICVGLRLGTPLVHPHICRCGEPVGIRAHHALSCALSEGRRPRHAAINDTIARALRTAGYPSTLEPTGLTRNDGKRPDGMTLIPFERGRTLIWDATVTDSLSPSMVGFGSLRAGHAATQAETNKMNKYAELARAHNFSPVAFETLGPPGPLTERILTKLGERLKITTGDKRAAQFFRQRLSIDVQRGNAISVLGSLAEWCTPGLL

SEQ ID NO: 16445 - protein, 967 aa, Dermanyssus gallinae
MEDHAYLPSGSSSTPTTTTRLLVQPNIVDAEPSLKVPCPVCGLLYTRRGLLRHTRAKHPTDVAPSPDIDTSHPADPLVKDSLVKLQDISKTFKLVRITPKSIRHILALTLTKVLDDVHTQNSFHAWLALFSFVPVILRLPANRNINQSLAQIIRKNLRDYECGTRLHNLTAHRTAQRNARTHADFDVARRVLTKLSKGDGTNAARILISTDTFSSGEDTANALRAKHPPAPAEPIWPEPPSTDSGFTSKEDIFAAVQSFPRSSSAGLDFIRPRILADLLSPNLGETANKLAISIAKVVDILRFWQPPAELLPIIFGAKLFALKKKCGSIRPIACSSCLRRIASKVSIRDNTGQLAHLIDDRQLGFSVKAGVETAVHTTRSFLASRSCPTYLLKLDFSNAFNTIRRDHLLRTVKDSTPDMYHYVESSYRRPTCLVTSDLILSSETGIQQGDPLGPPLFCLAVNDLIKSLESPLNMWYLDDGVLAGNASTIASDIQKIIDFENVSGLALNPSKCELFVWNPDADSTTSEITHLLPGCKILSANEVELLGVPLLQEGVAPVLQKWLDKLNTASERLPLIGYHSGLYLLRCSYSATRLTHILRGIELTGETDELRRFNDLTANTITNLLNIKLDDTAKRQMFLPIAKGGLGLPDPTILALPAIVAATHQVSGKVCEFLDEAGQLEFTSMRDRVTSNLVEVLGTSPNNVASQSEWSAMLADQHACLLIDQADSDSTRARLRATSAKHASDWLHALPSASLGTLLDDATTRICVGLRLGTPLVHPHICRCGEPVGIRAHHALSCALSEGRRPRHAAINDTIARALRTAGYPSTLEPTGLTRNDGKRPDGMTLIPFERGRTLIWDATVTDSLSPSMVGSLRAGHAATQAETNKTNKYAELARAHNFSPVAFKTLGPPGPLTERILTKLGERLKITTGDKRAAQFLRQRLSIDVQRGNAISVLGSLAEWCTPGLL

SEQ ID NO: 16446 - protein, 1253 aa, Potamilus streckersoni
MKKSNKIKSNTERGGAVTTPHQLEASSNDGPTELQVTSDQVGRQGTIQDSALPKDARTDRMEQIPDVERVTIPLPDTVWTYPICLNCMFGSLNNLKDHFDKIHKLTTVKYQCIMCDKSFDKAHGASFHQPKCPNKNKPRDTLGDTSQDKFSCNLCSFRCNSSIGLGQHIRQAHPILANEKRIQNVELDKERKRMERRQQGKSTRERLWPGEDIERLVFLTEEANRSGVRKINEYISHHLTEYSSEQIKYQRRKMGLKSEPAISRNKQVAQKSTSKEKPEAINLSMIDITVAKDTETNTMDEAGKQPGNENEIYSLDIDADFSTVAKVPFITPGNADGSAEGSNPTREELTEGIIQHIDLNFFLTNSVPWEEETSTCINDCSVLSSLTHLSAIQLQNVIHLDIPSQNSETLFDKIIEKWQPTTTTSRLPRRQRRVEKYRGSRAKKKAEVYRRTQKMFEGNKKRLVEELLTGVEDTKCSIVIETVESTYKDRFSSLSQEVNLVMYPAPVELAKNDLLSIPICRAEVISTIKGKDLKSAPGPDKITLGDIVQQPDHPEVLTNLFNIWLLTGQVPKKAKLSRSILLPKTKTGLEDINNWHPLTISSAILRLYTSVLSNRLMKAITLNPRQRGFIPASGCVENIFLLETAIKQSKGFRKHLCVALLDLAKAFDTVSHKHLVAGLERHHINPHWINIVRDLYSGTSTTFRVNGKNTGEIAITLGVKQGDHLSPLLFNIALDPIFCLIEDQSNGYIYQGNIPTYADDSSLLTEKAAEQKNLDLFAGFGRDTGLSVNTKKSCAFMITPTNKTFLINYGRQFTINGANIPWVMPGESTRYLGGLFDPWTGLVRNSPVEQLEDWCRRVGRALLKPRQMVKILSENLLPKLLFGLTLGNPVKSTLQKLDHVAKTWTKRWLHLPESTSNHFMYSATCDGGLNLPKLEMIVPRVVIKNWQKLLDSECKIRKIAMVAGLEAKQNQIRQSFSLGNPKWRISEQIKWSAQRTQGNGVCNYMMTDKERKVQSTNMWLKNPNILREKEYSDAIRIRTNTFPTRVTANRGVRRHTAKISCRHCKAPGETICHVLCACPWTLPMRVRRHDRIVQLLVEQLKKRGFSVMEEPHYRVLGSLYKPDLVTTKGGRSWIIDPTIIWEGNDLGDRSVKANRTKAQKYDCLRDLVATQTNTVCEGAYGLVLGVRGRLPSVAADVLRMLSLDTKEFKNKLVEWTLRMSSRILRDFAGLSRHDQVPDLSGDDQMSENDESPR

SEQ ID NO: 16447 - protein, 1264 aa, Potamilus streckersoni
MRKQFITTMNKSNQSTSNTERGGAETTPHQLVASTNDGPSGLQVTGNQEGRQGTIGDSALPKDVSTEPSEQIPEVEMVIIPFPDTAWLCPLCPNSMFGTLTNMKDHCEKIHKFTTVKYQCTMCDKIFQKAHGASCHQPKCPNKNKPRETLGDTSQDIFTCTLCPFRCKSSIGLGQHIRHAHPILANEKRIQSVELDMERKRAERRLQGKSTQNKPWSREDIERLAFLNEEANRSGVRKINEYISTRLTEYSSEQIKYQRRKLGLKSVPAKSREITSKKKPEAESPSISNVGKGAESNITGETEHLPKASRENNVWIENTDAITNVDTTAPECIPVNANTNVEGTRPMREDSNIDLNYFLTNSVPWEQENSRCIIDCSDVSSLTHLSAAQLQSVLYNNVSLNSDALFDKIIDKWQPTTTTPRLPRRQRNVEKCRGGRARKKAGVYRRTQKMFEGNKKRLVEEILTGVEDTKCSIAIETIESTYKDRFGSLSQEVNLGMYPAPVDLAKNDLLRIPICREEVINTIKGKDLKSAPGPDRITLGDIVQQPDYPEVLTNLFNIWLLTGRVPKNAKLSRSILLPKTKTGLEDVNNWRPLTISSAILRLYTSILSNRLMKAVTLNPRQRGFIPASGCVENIFLLETAIKQSKSLKRHLCVALLDLAKAFDTVSHKHLVAGLERHDVNPQWINIVQDLYSDTSTSFRVNGKNTGEIAITRGVKQGDPLSPLLFNIALDPIFCLIEDQNNGFTYQGNIPIGSMAYADDSSLLTEKAAELQKNLDLFAEFGRDTGLSVNAKKSCAFMITPRNKTFLINYGKQFTINGAKIPWVMPGESTRYLGGLFDPWTGRVRISPVEQLEDWCRRVGRAALKPRQKVRILSENLLPKLLFGLTLGSPVKSTLQKVDSVARTWVKKWLHLPECTSNHFMYSATCDGGLNLPKLEVIVPRVVIKNWQKLLDSESKTREIAMVAGIEAKQHKVRHSFNLVNPKWRDNEQVKWSAQRTQGNGVCNYMTTDKQRRVQSTNMWLKNPNILREKEYTDAIRIRTNTFPTRVTANRGIRRHTAKINCRHCKAPGETICHVLCACPWTLPLRVKRHDKIVQLLVEQLKRGGFCVMEEPHYRVLGSLYKPDLVTTKGGRSWIIDPTIIWEGNDLGDRSVKANRTKAQKYDCLRDLVATQTNTVCEGAYGLVLGVRGTIPSVAEDVLRMLSLDTKEFKNRLVEWTLRMSARIMRAYAGLSKHDQIPDLPGDDQIEIDESLLDSPADTSVQDLS

SEQ ID NO: 16448 - protein, 1277 aa, Gammarus roeselii
MPRHLISDAHEGTMHDLHVVSLVKLNMQNEAAARPSGEPPATGSTAVVGSLVDTLTSAADIHAVTDLTQTSDKSSLERSKGQSDDPPARQGRAGLWKSAEEEELKRLVGIHTGPKGIISWVKVVDAWNSQRLPVRSKASLSSKWQDIKSRAIVLGSVSDHNITTSEPVLSRTSKTSVHDYHDISSTQEVNPAEVIPDATTQGPEKPVNNNIVRPVEKEDCSAATITSVFRKNLRKARKIGCQIRKPPKRVSGKHLQPIISKVDNLMSEEVDQKMKGQPSWNQLSILVYAGAMTVSEVGNQSLDEKRNRTKLWFKSTYREVDALRKIIGKATSELERRTNNAEVAPTYRQLNNIRLIEKKYQCRTFVEITSLVEKMKNRLQLLLSRVELRKADEQRFFVRNSPPKMIFRDKESKEVSNTADVHLIRRYWKTIVGVKKNFERKSPLLVAWKQSLPEHPENGNLIESLNLDLWQKVVSKLKPWKANGPDGLQGFWWKVFSTANTLLYKLVHHHLTSGAPLPQGWITEGRIVLLYKSGSRSDPSNFRPIACLNTCYKLLTGYVTAYLNQYVAERNIVVSEQRALQKGVWGCNHALLLDQTLIADAQDQKQRPISVGWVDYAKAFDSVPHNYIQWLFRVLRVPYPLRTFLKGLMSTWKVKYEVKNPGGEIERSRFLRIRSGVLQGDSFSPLLFCLAMVPISHALNNSNCHYTTASGKLTKTQLSLSHQFYMDDLKLYADSKESLSKLLRIVESISDAISMKINPKKCAVAHFVPKRLRKDKDIVDQPKEEGEIQTLEGGLHYKYLGIDQEFGTKESISWDRVEDKCIQKFRRLWTSDLTFRQKVEVHNSTIIPALTYVTSNIIKGSGKYDALLSKGEQLDKRFRKILVEEKARYKASAKSRLYLTSEKGGYGLTSVRDSIEESTIYTWAYLCTRGDLRPSYTLFDKMANRGKRTVISDARHVLKTYDIVVEIDATTSSVISRGVRYVKPTLLARHVVELMRNVNNIRRYEEWKGLTLAGRVLRSKQAVDLTISFEWLRKGGLSSIGVRNVLAAQEGCLLTRSHPAYANKNEGAECRMCRGATETVEHVISCCQKWLSTLYIDRHDSVARNIHYILCRQYGLQPPHYTQKVEPVKETDSVKLYWNQPVQTRAIIRHNKPDLIAFDKIKKTALIIEVAVSWFTGIEKQIELKRNRYCVNGNWEDELNFPYPRGDNIVSDLSSKCWKVTFLPIVIGATGEVVSELHDQIREGLGLSWQASLKLIERLQRSAVLGTSRIVRNHLRT

SEQ ID NO: 16449 - protein, 1411 aa, Hoplolaimus columbus
MSACYKGRLQASLTNSLWLATNKNRRWGGERVVTDGCCAGVLVAGWSMNMKSQTPNDLCAQTHKMFMAPVRTPNPNSPRLGLQNPNGHRDSTSDTGGRAIRRTLKTDPPGNNLPGRGLVNLRSVAWTEAELKAVFSEWCRLEHDALERGVTFRRDCAITKPQFFAHWLAVRDERALQWNVDEFPARTALAYYEKVRDLKMKKGWRWDAVNSQIVSPDGPTRLPRRLICEANREVVKRERLLHKGRRLIEEDRSPQQNTTSASLPGPSASPVAVVAVEEVGGELNQRQRASLAERSLGTQERPISEKACQNTDLSEPLADVDSVCRASEADLQKRYWEALKQERRRRLPVRPPLRINPANVKPRHWATLDKLIGETLNSRRKSRHQRDAELRLINASVYAAGVAIASIDDERRIAARKRLAEIQQCMERELSGLRRHIGWLSDELRRRASGASPTERQVRNFKKIQRLYQVKGKPVRDTRDLEIKCERLKVRLQLVRDNLVYSRKRDQQRVERSLPLRRRFEEPTGDSNLCPAEARSFWAGIIGERKEYLGIPELADWSAKTAGKVPAPQEFATNAEDLTVWKKVLRKARPLKAPGPDGIPNLLWKKLPSANRALFDWLMGVKCKRLYIPSWLTEGRVVLLPKKANDRSNPGNYRPIACLNTQYKLVTGLLTEWIAHHLTLHKILPEEQRAMVRKTWGCTHSMILDRVITSYAKAMNMPLYAVFIDLIKAFDSLSQCWVRHTLRCVKLHRRVLDLISTLMRHWVVRYEIVNRGKKTRSAKLEVRNGLLQGDTLSPLLFCLALAALSEALEKLPKLVVSVSGQEEQLQLNHLLYMDDFKGFASSAEGVAEIVSVLKRVTGAIGLMVNNEKSALVSSSSGPTAESTGATEGLPVLGIHDSYKYLGIEERVHVDFDVAWGRVSGEMLERTRRFLMGSHTFGELRNLFRTAVIPVGKYLFLNIIAEGPSWAAARDKARALDGDIRKLLYEHTETEVAWRFRSCCKARLYLKTEYGGLGLVSVVDALYESIIYSWAYLQCQPDLGAARALFGPERRGGISHSVTQGLRQLILLPLLNTEDSTQKVTTPKGVARGFSIGGQRFTEPTLGARALVKLVRTCLNEKRLAEWKGKPLAGRVANAKPELVHQVLSFHWLHKAKIGRREFRDCIAAQEGMLKASERARNGGKEMPCRRCGKGTESEQHILTGCSWTKTGLMLARHDGVARQLLTFLCRKYGLPVAFHTQPVHAVLENNKAKILFDVPIRTPNCSVRGAGDETEYKGLRNNRPDLVVFDKVAGKIIVIEVAVSWWGNLLNQERIKFRKYAVNSQIDPEELAEREIPGINLRAVLGTMYGNEYHGGVAVVPIVIGACGETLPNILERLSELGAKRKPALDLLESIQRAALIGSARVIRAHLCLER

SEQ ID NO: 16450 - protein, 876 aa, Pissodes strobi
MYDLRRALSAPGDAPVLRMIDLALLGCGESVAAALEVWLSSLSEPIARGVQKGRARGSRNKVAESGGGRAKTPTNNYRQKNTGRGNRASAYKKCQDLWGKNKSGLADIILSGRDLLEKEVFPPMSDVLDLYGDILESPSPDDWDPVTDKKPDWDFEPITAADVTASIRSWKNSAPGRDGVTVSRVKSVPVAQLAAVFNIVVHLNIHPLSFREMRTVLVPKEGDRRQATNWRPITIGPAVQRLLHRVLHAQMRKSCSLNLHQRGFCEIDGTLANVLVLDHYISTRLAQGKAYNVASLDVRKAFDTVSHRSIERALRRMGVPSILRNYITTGLRDTMTVFKVDGVVSRSVTMSRGVRQGDPLSPLLFNMVMDELLETVNAGFERGSITSDSKCALMAFADDLVLLADKQVDVPLILDVVHTFLRKRGMSINAGKCIALSSAPLGGDKRPTAVTRSIFTIGGQKIPAVQHLNSFKYLGHRFGASGVEKSNVPNLRRWLHLVGQAPIKPDQRVEVLRTFLIPKLLYGLKNNRITAAVLKECDRLIRTAVKRYVHLGRTTPDSLVHASMRDGGLGIVELTKAVPYQLMGRYRKLLDQNNDRLASEILQSERMRSVMHKLAKSGDIPAFQAWRERIVQGPTTRGLEECSSDLASREWLRGRPSGWSGRDWVRAVQLRTGNLPTAGLPWREHDQRLCRAGCGVVETLCHVLQKCPAVHDQRIARHDEIVRKIGRHCSLLGQTVETEPHIRSDSGVLFKPDLAIHINALTTVVADVQVSWDGADRSLAQSWLDKTAKYECPGFLEGARKRWPGRCLLFRPVILGARGIWPRCNGPTEDTLRLTKPLKGSCVHSVLKWGSTSQAAFGRRTWGNNPATRTALPPQP

SEQ ID NO: 16451 - protein, 702 aa, Gigantopelta aegis
MKRDSACGPDRVTVSALRGNSAITPLLNIFLLTGRVSKHLERCRSILLPKSGDSDDLGNWRPLTISSVILRLFTKMLASRLEKAVTINPRQRGFISGGGCADDNVQCLDSVIQAAKKTGKPVAVALLDLAKAFDTVSHKHLRKGLERLGVNSHFVGLVEGMYTGVTTYFKTPKGETGPIPMSRGVKQGDPLSPILFHIAMDPLFCLLEEEGDAFRFEEGIEVSTLAYADDAATIAKDKVGLEHNLGLVVKFTEATGMKLNIGKCCAFTISPAGSGSYAVNDCEPIEVNGNAIPWLEPGECTKYLGAYVDPWIGLRMTKPLEKLSVWYVKIQRALLKPRQKLEILTSYAIPRVKFSLALSIPGKGVLLEMDTLIRKYVRRWTHLSDNATSHVLYCSGRDGGLGIPRLAKEVPVAAMNNLTNCLYSSDDTIRGIATAGGYANKVVQLGSLHGLVPTGSRHKVSNKGWRREEASEWASLQSQGKGCELWRNDSISNAWLSDRSFLRDREMVQALKLRTNTIPTREALSRSGRVGSVLCRRCGRTVETIGHIMGACPAVRQNRIKCHNHVCYAIHQKVVKRGWKVLEEPRIIVAGQTFKPDLIVWKDNKAHIIDPTVVWDDCMDSMTNASEAKKVKYSVLSDSVKTLTGCKEVEVHKGFVVGARGTWYKGNDHFCDAVGLDVSTKRYICQIVLCETIKLVSIFMNM

SEQ ID NO: 16452 - protein, 2232 aa, Steinernema khuongi
MRTTTTTTTTTTPMTKMTTTKTTPTRHWTRTTMTKATWPRTRTATEKMTTEKTTPALSGPMRPNMVFSRTSTTDSTKRTPTTRVYPGSARASQSSERAPTGCATRSGNEHHMARSTMTTKSGVCEKLKKENRRGRSTVKMYTQLEAMDVDGATSSNGFGDTGLGGLPQYGSPLRTDKRAATGTALSSRPSVPIEARVHVYSGWRRLPESTVMPCTAMTRWVAYGTAPWTPSGEHLQRPRDTPESSHRSECGLSILASGRLVGPDAVNQNTASSAFSGCSPWVRPQYQESEACLGGLVLRRMAKTERPCDGVNGSGWHSSLSSESTLSSDVAHSPCPEVPPSGVEKDVPKAERSGDVGGSMGRVFGSDPCFQGPTAARGSTKETPQIDTGGRLDECCRAPEVRRANVVTASMSPTCSEASAAGPTLTGKKMSNPSASGKSKVGRREAYGEGPQALRSESCDGTDTPPGSQGNRSSSDPIWADRGLVVGSCRSETKPYPSYAGVVHGSMGDRRELGGAHTSAQGKNNGEKCIGDALRPCECVRAWLKWYTGCLSDERPRMLCACKGGADTENTLSPSTLHQTRVVTPDRPKTALLSETVTLADGSSSISHTLVVSLPDEGGLPCPICRKQYVGVRCETSVTRHLLKEHELGNVTIRYQCRFCDFTPVASHKYPKKLFLGHITEAHANVAQGGPEVDAPFPCRHCGRGFQSGIGLGNHLRSKHNGGPEAVADMAKKVKSGDKTPAAVKSRDIRDSEGWTLVGPRKKTPSSRVFTPSASKGKHRAEEGAQPMETSSRESSPQPQRMDGVITLTDSPPHAVRLPSLLEPLNYVENRAAWLGSDLVVAYLQRRVPEFLFVDPLIFTQPEDPTVRRDVWPSLSEGTGQGQIFVPIIYEEHWRLAAFEAHEETIRYYDTQLHTPLTEELERRLLAIARALNCDATSVVRMPTRFFHHQTDGYNCGAYVLMLIERLAFGKDTRFTKNDADRWRDEALEYMLNERSLEVPRQPVGYTERMTVDTCSLAEHRAFALAQAEAHGIGRSADLTNADPDVDMEMSSPRPSPVGRKLVESPQPTQKRAVKGSPSGDHPSPQKRKVRGTKPAMRAPTLDSGIGRPNPESPVEVDSRIHGQTAEEAATVQDGHRSPEMKVTEYLLSRDLTSWTDVEEMARAIPHMVRALEKGKDPLDKRQWREKLVRPSDEDGGIGIQACGRGSRGRRALGNPAALSRGDWIRLYKESRAKCMSLLLPNTSAQCTIPKADVESYFTETLSAPPALQYKLLLQQCRSLPTIDEDAQRRLVSPFSPSEVLAALQRSSTAPGPDGVSYSQLKRIDPSGRALARLYTNCLAKSRIPACWKEAKTILLYKKGDRSDLANWRPITLSNVVYKTYTAILAKRVSTITDLISRAQKGFSHFDGCGDHTATLSVLIERAVGTRRDLAVGWLDLKNAFGSVPHNVIAETLRGLGFPEQLVLTLVDFYESASTRVQTQGGPTRPIPILSGVKQGDPISPVLFNLCLEPMIRTMSDRFPDLRLLAFADDLALVAPNAPSLQSALDAITHVASLMGLHFNPKKCASLVVEGGSPAIVPMRVNDAVITSLDRENVYTYLGIQLGVHSRTNLHGPLRDSLRDAEVIGTSILAPWQKLDALRTFILPRFSFFIRNGDPFMRTLKSFDTDLAKIVKAITNVPQGASRSYIYGDSMLGGLGISSLIDEYHIGSVATLSRLLFSRDPTVASAMDEELARLVRKWLGGNTVTMEDKIDFLNCSNRFNGRLMSSEAHSIWTRMRRSTRHFVKFFGTFKFIITSSQTLGIEVGDLPKVIDLSSEHAASSLRQAVKTMHIMSFTQKCKSQGKVLASAMHSPHSNSYVRAGLYISFSSYRWLHRARLNLHLVNKTNRMRKGDRCRRCDHEETLPHIVNHCRPALRLITRRHNALQDRLVRAIPARSTQTIRVNQTVPEACTANRPDIVVIDEALRTAVICDIAIPFENGSDALYRAYDFKVRKYQPEAAALTSKGYAVTVCAVIAGALGSWCPLNSIAIRALGIRRAYAAKMIPLMLSEVVESSKDIFWRHILGERYKVRANRFFKCILDEVPGQGPVPTTAARQPSSTTQKKAAQPAPPKTPTGPLKKPTPHPAPSQKRPRTTPPPSVHGKRLCFRRTPPEKKLTPRTKEEDPKTPTTKPKKQPRHQPPDQWTSPGDKTPVAKRRCQQATPPTTTTMATTTTTTTTSSMTRPAGTSSSSPPA

SEQ ID NO: 16453 - protein, 877 aa, Megastigmus stigmatizans
MCEYEGPEKWAKWENKLRAAVRDEEEIDENMLDVLYTELSDLVLTGTEQEVGKRGDRKKITNRRRNHGRNRRLPNRSERKRYTFARCQDLYNKEPKKLAEIVMANDFSLIEKHAPPNKEDVEKLYNELWGTAGPAECAFQACEQELAIENVLTPIMPIEILNKLKKIDNSSAAGLDKIKKNDIRKKGIEVLIAKFFNVLLLSQYYPKEWRRNRTTLIPKIGKNHGDVRNWRPITISSMLSRLFSAMMDKRLRLVIKQNDRQKGFTNENGCYANVKILNAAIRQAKTEGGVFGIQDAAKAFDTVPHSAIEPALCRKGIHPTIAKYIRSMYKDSETTIRTSEGDTTIKILRGVKQGDPLSPLIYNLCIEPMLERIQKESEGVQIGGMNVAAMAFADDLVVIGKNAQVAKRQTEIVVEYLGDLGMSLSLEKCNTFEIVHTNKSWYIKDPNIYIGREKITALTAAQAFSYLGAKITAWGGVLQDHEKETICEIIKRSKRLPLKPMQKIELLTTYLLPRFTYGLIISPPSIKSIQSIDTMIRGEIKKILHISEKTSTAFIYSPRRQGGLGIQNMEKMILIAALRNATRALNSADRITREAVATESEAKRMTAYAAALGIQWPTTVRVLDECKERVKETFLKTWAEQRVQGQGVKDFCLPVSNKWLSSSGLLKHSRIADAIKMRTNTYPTKMCMKRAGYMNINRYDTSCRKCGHPFETMGHILGQCIHTKDKRIHRHDEIKNLLVERFSRGKLTLVEQTFASGNENYRPDLVVKSNEKEAVIIDVSVRFEKGNYLHKGAEEKISKYNNIIDAVSGELGVTTVRIAPIVVGSRGAIPRRTATELRRLGIGRDDTLTISLIALRSSIEILNSFMDYDRLRHPPIL

SEQ ID NO: 16454 - protein, 1178 aa, Cecidostiba fungosa
MLSQNDTASDPTGDDVCASQVRYNKTDKTKNPKKIIEAEVLTVRVPLENGGSCPKCQLEGINRIHIKAKELAKHFEEKHLSVRAKWECSGCGKLWDKIHAWNCHWPHCKKTAPEELAFKCESCGKSFATKVGLSQHERHEHPVVRNAKRAGEACKEQSKKGAPLSAWTEEEITTLKRLCKQFEGTRHINVEIAKILTTKTNRQIGEKRRTLSFSDEESESEPNTSSNINGNIDEEEQAAESRRSDEQNLSVVEIVDSSIDEFQDAEDTLQEPPPISEIENWKVALKDAIAHNEDPPEKWKEWVEKVQEISISRVITGDEIESLYKELVEKILPQEEQEDTQRGIGGGRRNRGTEKNGRKPRNDRRRHGRARRPPNRKERKAYSYARCQDLFNKEPKKLADVVAANDFSLIERHKPPPSEDVRLLYESLWGVRGPDRMPNLGPAENHVGIERIFIPIRTKEVQNKIADIDNSSAAGPDKISKGDIRNRGTYIALAKLFNLLMMHRYYPEQWRNNRTTLIPKPGKDSEDVKNWRPITISSILSRIYSAMIDRRIRSVIKQIDRQKGFTSENGCHANVHLLGEALQAAKSAGGVFGVKDVSKAFDTVPHDIIQPALLRKGIDHRVADYIAAMYQNCSTTIRAEGPDINIQLERGVKQGDPLSPLIFNLCIEPIVQRIQTETRGVRIQGHNLAIMAFADDVVVLASDKDQCQRQTELLADYLDSLGMSLSLDKCNVFQYVPHGKTWYMCDPAITVRGTRIPYTPADEIIKYLGAKLSPWKGLIKGQEENIILEMILRTAKLPLKPMQKLELLSSYLLPRFTYGLILNPPSLSALKSIDTMVRTQVKKILHISAKTSNAFLYSPRKRGGLGLVNLEKMVQIAALRNGIKALNSPDVLVKDTIQGHSSLERLKGYAEALQLGWKPNMKEINKRKETIKSDYVKEWSRQSVQGQGANEFSERVSNTWLQNHTLLKHSRIADAIKMRTNTYPTRMCLKRFAHKNNPQFDTKCRKCEKPFETMGHILGECLSTKAKRIKRHDEIKELLAQKLGRGNQIMVEQSFVANGERLRPDLVVKTNENEAFIVDVTVRFEKGNYLRAAAKEKVDKYKKIHKEVKKVLKVKSVKTIPIVIGSRGAIPRDTVNELRRLKIKQSDQLTISMIALRSSIEMINCFMDYDRIAEPPLL

SEQ ID NO: 16455 - protein, 1011 aa, Andricus grossulariae
MYTARPTGQALTLTDDNVRTTTFDCDFPGCQRSFTTKTGLGVHRRAKHPEHADNLVKAQRVKSQWSEEEERIMARREAELTLSGEKFLNKALEPEFTERTKEAIKAHRKIPAYKALVQNAIIQIQEEQRIDHERERIDRSLSPEMEETAMDPFVAFFQSLEPPLPDQTEFKEHVLFRICVDALHQSKDDIATRIASYIRQILPASKGGLKIIKAPSLQVPLNKRKERRRKYAIVQSSYTKNRSRCIKEILDGTEDSKQPPRRLMEPFWVRVLTQEANQAPVYDVTEQPRVNCWQPISIDEILRYKIKGKTAPGPDGLVAKDYARIPNGTLLMLFNVLLWTERLPRSLLASRTIFIPKKGHEEEPEKYRPITISSIIVRALHRILAARLESAIQIDQRQRGFRTRVDGCRDNVFQLDMVLRQHHQSFKKLYMASIDVAKAFPSVSHAALIETMRSFGIPEQFLRYTEFIYKNGFTILQGQGWNSDEIIPRRGVRQGDPLSSPMFNMLTHRLLETLPKEVGVKIGDKTVNSSAFVDDLNLYATTPRGLQSLIDKAVDFLAQCGMTINTDKSFALGFKPSGKDKINTVDITTKFSAAGRILNTITRSDSWIYLGVQFSWAGRVKIKLDEVSEDIERLGKAPLKPQQRLFALRTILLPKVYHQLALGNVLLGTLKKVDKVVRAAIRKWLNLPHDTTNAYFHAPIKEGGLGIPAMRWIAPLIRRSRLESLKTGINAAAHPFLHKEIESCERRLIDHLTVFRSAVDIDNWWAHELHSSVDGTGLSQSARTSGQHQWVGDGTKFLSGRDFINSCRLRISALPTRSRTSRGRTTDRRCRGGCDATETLDHVIQKCFRSKLIRIKRHDAVTKYVANKLRNNGYKIILEPHIKTPIGLRKPDIIATNNDKALVIDAQVITEQFDLQEAYNNKRRYYESNMGIRIYVSDHLKMPNAEIQFSAVTLNWKGVWSKKSVDDLQGWGFVRNDFKTISSRVLIGGVAAFRMFNETTAVNRYNRLGIG

SEQ ID NO: 16456 - protein, 896 aa, Andricus quercusramuli
MVQQAITQIQEEQRINLEREEIDRSLSPEQVEDAIDPFIAFFQSIQPPKTDQTAFKAHALYQICVDALHQSKDEIAIRIALYIRQILPMSNKSVKVIKAPSLQVPLSKRKDRRRQYAIVQNSYTKNRSRCIKQILDGTEESIQPPRRLMEPYWVHVLTQESDQTPVYEQVEPAKIDFWQPITIEEILKYRIKGKTAPGPDGLTAKDYNRIPNETLMIIFNVILWTERLPKGLLASRTIFIPKKGHEQEPDKYRPITISSILVRGLHRILAARLESAIEIDQRQRGFRTQVDGCRDNVFQLDMVLRQHHQSLKKLYMASIDVAKAFPSVSHTALIEAMRSFGIPEQFLRYTEFVYKKGFTILQGQGWCSGEIIPKRGVRQGDPLSSPMFNILTHRLLESLPKEPGVRVGDKIVNSSAFVDDLNLYATTPRGLQSLIDRAVEFLAQCGMAINTDKSFALGFKPSGKDKINTVDITTKFSAAGRNLRTITRQDTWKYLGVSFSWAGRTKVKLNEVSEDIKSISKAPLKPQQRLFALRTILMPKVYHQLALGNVLLGTLKKVDKVVRAAIRKWLNLPHDTPNAYFHAPIKEGGLGIPAMRWIAPLIRKSRLESLRRGVNEAAHPFLEKEIEGCKRRLIDHATVFHSAVDIDNWWAHKLHTSVDGVGLRQSAKTPGQHQWVGDGTRFLSGKDFINSCRLRISALPTRSRTSRGRTTERRCRGGCDATETLDHVIQKCFRSKLTRTKRHDAVIKYVANKLRSKGYDIILEPHINTPIGLRKPDMIATIKDQALVIDAQVITEQFDLQEAYNTKKRYYESNTGISAFITENLKIPNAVIKFSAISLNWKGVWSRKSAEDLQGWGFVRSDLKTISSRVLIGGFSAFRMFNETTAVKRYNRLGIG

SEQ ID NO: 16457 - protein, 1012 aa, Andricus grossulariae
MERARPTGQAPPLTGANVGLTQSFKCDYPGCERAFTTKIGLGVHRRSKLPEHADQRTNTDRTKDRWLIEEERMMARREAEMTLVGVRNLNQTLDEEFKERTYEAIKAHRRIPAYRRLVQEAIEQIRTEERPEPVRERRSRSSSSESSENQEDPFIAFFKSLEPPKPDQKAYKADDLYRICFDAITQSKEIIAIRIANYLSNVLPKTKPNLNKIRSPVIQVAVNKRKQRRMLYAKTQQLYSKNRSRCIKEILEETGETKQPHRRLMEPYWTAVLTQESLQTPDFNTVDDTIQDFWTPITMEEIVRHMIKGKTSPGPDGLTAHGYSRIPKGILLSLFNLLLWTEKLPESLLASRTIFIPKKGHEEEPEKYRPITISSVLVRGLHRILAARLDKAIMIDQRQRGFRTNIDGCRDNVFQLDMILRSHHQSFKKLYMASIDVAKAFPSVSHKALIEALRSFGMPIEFLRYTEYLYKKGFTILQGQGWSSNKIIPKRGVRQGDPLSSPMFNILTHRLLENLPKTVGVKIGEHTINASAFVDDMNLYATTPRGLQALINSSVEFLSQCGMNINTEKSFALGFKPSPKDKISTVDVDTRFEASGRFLKTMTRGDSWMYLGIPFTWAGRQKVKLREILNDIEKLTKAPLKPQQRMFALRTMILPKVYHQLALGSVLIGTLKSADKAVRSAVRRWLNLPHDTPNAYIHAPINEGGLGIPSMRWIAPLVRKTRLESLRRVVNAAAHSFLEKEIEICVRRLKDHSMVLNSLSDVDKWWTHKLHSAVDGVGLSQSAKTSGQHQWVSDGTKFLSGKDYINSCRLRISALPTRSRTSRGRNTERRCRGGCNAQETLNHVLQGCFRTHVGRIERHDAICKYVIRKLETKGYTVLKEPKINTPLGLRKPDIIATKDDEALVLDAQIITEQFDLHAAYNTKKLYYESNKGIHTYIKDTLAMPNANIKFSTITLNWKGVWSKKSAEDLKGWGFVKNDIKIISSRALIGGILTFRLFNQTTAVRTSNRLGIG

SEQ ID NO: 16458 - protein, 899 aa, Callirhytis sp.
MAREAVQKGAFRPHPPQYADARVRTQKVKELWSEEEERMMARREAELTMLETRFLNKALEPEFPERTLEAIKAHRKNPAYKAMVQQAITIIQEERRIDRERQVIVRPLSPEREGIAVDSFKEFFQSLEPPRTDQASYQPHVLHQICVDALHQRKPEIATRISLYLKTVLKTSSKGLKIIKTPSLKVALNKRKERRRRYALTQITYNKNRGRCIRDILSGTEESKQPPRELMEPYWVRVLTERSDKAPVYEAKDDTKVELWKPISMGEIEKHRIRGKTAPGPDGLTVNDYTRIPSEILLRLYNLILWTEKLPKRLLASRTIFIPKKGHEEEPEKYRPITISSILVRGLHRILAARLESLVEIDQRQRGFRTHIDGCRDNIFQLDMVLRQHHHALRKLYMASIDVAKAFPSVSHAALLETMRSFGVPEQFMRYTEFIYNKSYTVLQGQGWNSEKIIPKRGVRQGDPLSSPIFNMLTHRLLETLPKEVGVKIGDNIVNSSAFVDDLNLFATTPKGLQMLIDKTVEFLERCGLKINADKSFALGFKPSGKDKINTVDITTKFSAAGRSLKTITRLDTWKYLGVPFSWAGRVKVKLDEVSQDIGSLVKAPLKPQQRLFALRTIVLPKVYHQLALGNVLLGTLKKVDKVVRAAVRKWLNLPHDTPNAYIHAPIKEGGLGIPAIRWIAPLARKARLESLRRGVNEAAHPFLEKEIQGCVRRLTDHSTVFNSKMDIEDWWAQKLHSSVDGAGLCQSAKTSGQHQWVGDGSRFLSGRDYINSCRLRISALPTRSRTSRGRTTDRTCRAGCEAKETLDHVIQKCFRSKNTRMKRHDAVVKYVANKLKSKAYNIVLEPHINTPMGLRKPDIIATKNDEALVIDAQVITEQFDLQEAYNNKRRYYEFYYSF

SEQ ID NO: 16459 - protein, 1020 aa, Trialeurodes vaporariorum
MEGYNYPQRPIYDTAITEEDQLLQKVEDEYAEQVNVRIEEREQLSKLQNVKKANMTIHRVNKIIGKMIEEKGEQMGLKEINALVFSGAKVVLELENPVERPKNNAKRGGPTTPPWVRRIETKILGLRRHLSTLENYRRDGSGENKAETLLHFYAEKDLQTTEEVCEYLKQRITALAQRIRRYKRRAAQFQENKQFRANQKAFFRKLRGGKVEGGPTPEPTAVDQFWRGIFEDDTQHNQEAKWIGKFKCNTQMEFDPISETEVKTVVSRMANWKSPGPDMIQNFWLKQFRTMHKKLAMELNKLLESDDFPEWMARGKTFLIPKTPETDNPQNYRPITCLNTTFKLYTGILAEKIGRYAEKTGIIPLEQKGCRRGARGCLDQLLISKRVVEDCKARNKNLSLAWIDYRKAFDSVPHSWILQSMKMVGINEKIVGTCGAMMKKWATRIHVNLGSWSMVTDTMAIKRGIYQGDSLSPLLFCISLVPLSQMLKALKRGYKMESMEMEVHHLFFVDDLKLFAEDDRGLKKQLNVVHEFSSDIRMEFGITKCAKAEFKSGRYAYGENIQIEQGLEIRNMEEGELYKYLGMEENDNISQKRMKAQMKAEYVRRVRCILKTELSANNKFRAIGTFAVPVLEYGFGILNWKKHEIRAIDTKTRKMLTMGKMHHPSADVDRLYVARKYGGRGLRQIEAAFKSSLINLKDYLTRKATEDPYLKLVLKLDQRPRQENSIVKEAKKYEEEEGCSKAEDRTPIQRKQDVKAKISSNIKNRWKQKPMHGQHPRLLEEARINGDESVLWLTGGHLKGETESLIVAAQDQALATRYRTVRIHKVPGTTKCRMCGQFDETIDHLVSGCPVLAKEEYIYRHNRVGAHLHFEICRAVGAPVDTDKWYEHQPRPVVKSADGKTTIMWDYSIQTDRTVPANRPDIVVKQEGELCLLIDVSIPMDRNVHTKEAEKLLKYKSLEIEIQRMWKTKTKVIPVVIGATGVVTKTMHAYLKSVPGTTPLASIQKTAVLGTATILRKVLM

SEQ ID NO: 16460 - protein, 1184 aa, Trialeurodes vaporariorum
MASETGSQQASQSGQALSDASGAEPQPPSRVKWTKSDNLEVVRCYYLAQKRNSASEKEVYDLWRMRNPGVRPNMDSKKLASQRRYIIKNKKITPEEIQTMQNEIKEDLEEDPEQTTEEQTPEGPIHPPSPRIHSDPHPQEVPAGLENSNCTISQGPGEPPAEDEMEGYNYPQRPIYDTAITEEDQLLQKVEDEYAEQVNVRIEEREQLSKLQNVKKANMTIHRVNKIIGKMIEEKGEQMGLKEINALVFSGAKVVLELENPVERPKNNAKRGGPTTPPWVRRIETKILGLRRHLSTLENYRRDGSGENKAETLLHFYAEKDLQTTEEVCEYLKQRITALAQRIRRYKRRAAQFQENKQFRANQKAFFRKLRGGKVEGGPTPEPTAVDQFWRGIFEDDTQHNQEAKWIGKFKCNTQMEFDPISETEVKTVVSRMANWKSPGPDMIQNFWLKQFRTMHKKLAMELNKLLESDDFPEWMARGKTFLIPKTPETDNPQNYRPITCLNTTFKLYTGILAEKIGRYAEKTGIIPLEQKGCRRGARGCLDQLLISKRVVEDCKARNKNLSLAWIDYRKAFDSVPHSWILQSMKMVGINEKIVGTCGAMMKKWATRIHVNLGSWSMVTDTMAIKRGIYQGDSLSPLLFCISLVPLSQMLKVLKRGYKMESMGMEVHHLFFVDDLKLFAEDDRGLKKQLNVVHEFSSDIRMEFGITKCAKAEFKSGRYAYGENIQIEQGLEIRNMEEGELYKYLGMEENDNISQKRMKAQMKAEYVRRVRCILKTELSANNKFRAIGTFAVPVLEYGFGILNWKKHEIRAIDTKTRKMLTMGKMHHPSADVDRLYVARKYGGRGLRQIEAAFKSSLINLKDYLTRKATEDPYLKLVLKLDQRPRQENSIVKEAKKYEEEEGCSKAEDRTPIQRKQDVKAKISSNIKNRWKQKPMHGQHPRLLEEARINGDESVLWLTGGHLKGETESLIVAAQDQALATRYRTVRIHKVPGTTKCRMCGQFDETIDHLVSGCPVLAKEEYIYRHNRVGAHLHFEICRAVGAPVDTDKWYEHQPRPVVKSADGKTTIMWDYSIQTDRTVPANRPDIVVKQEGELCLLIDVSIPMDRNVHTKEAEKLLKYKSLEIEIQRMWKTKTKVIPVVIGATGVVTKTMHAYLKSVPGTTPLASIQKTAVLGTATILRKVLM

SEQ ID NO: 16461 - protein, 1135 aa, Trialeurodes vaporariorum
MASETGSQQASQSGQALSDASGAEPQPPSRVKWTKSDNLEVVRCYYLAQKRNSASEKEVYDLWRIRNPGVRPNMDSKKLASQRRYIIKNKKITPEEIKTMQNEIKEDLEEDPEQTTEEQTPEGPIHPPSPRIHSDPHPQEVPAGLENSNCTISQGPGEPPAEDETEGYNYPQRPIYDTAITEEDQLLQKVEDEYAEQVNVRIEEREQLSKLQNVKKANMTIHRVNKIIGKMIEEKGEQMGLKEINALVFSGAKVVLELENPVERPKNNAKRGGPTTPPWVRRIEAKILGLRRHLSTLENYRRDGSGENKAETLLHFYAEKDLQTTEEVCEYLKQRITALAQRIRRYKRRAAQLQENKQFRANQKAFFRKLRGGKVEGGPTPEPTAVDQFWRGIFEDDTQHNQEAKWIGKFKCNTQMEFDPISETEVKTVVSRMANWKSPGPDMIQNFWLKQFRTMHKKLAMELNKLLDSDDFPEWMARGKTFLIPKTPETDNPQNYRPITCLNTTFKLYTGILAEKIGRYAEKTGIIPVEQKGCRRGARGCLDQLLISKRVVEDCKARNKNLSLAWIDYRKAFDSVPHSWILQSMKMVGINEKIVGTCGAMMKKWATRIHVNLGSWSMVTDTMAIKRGIYQGDSLSPLLFCISLVPLSQMLKVLKRGYKMESMEMEVHHLFFVDDLKLFAEDDRGLKKQLNVVHEFSSDIRMEFGITKCAKAEFKSGRYAYGENIQIEQGLEIRNMEEGELYKYLGMEENDNISQKRMKAQMKAEYVRRVRCILKTELSANNKFRAIGTFAVPVLEYGFGILNWKKHEIRAIDTKTRKMLTMGKMHHPSADVDRLYVARKYGGRGLRQIEAAFKSSLINLKDYLTRKATEDPYLKLVLKLDQRPRQENSIVKEAKKYEEEEGCSKAEDRTPIQRKQDVKAKISSNIKNRWKQKPMHGQHPRLLEEARINGDESVLWLTGGHLKGETESLIVAAQDQALATRYRTVRIHKVPGTTKCRMCGQFDETIDHLVSGCPVLAKEEYIYRHNRVGAHLHFEICRAVGAPVDTDKWYEHQPRPVVKSADGKTTIMWDYSIQTDRTVPANRPDIVVKQEGELCLLIDVSIPMDRNVHTKEAEKLLNINRWKSKYNGCGKRKPR

SEQ ID NO: 16462 - protein, 1184 aa, Trialeurodes vaporariorum
MASETGSQQASQSGQALSDASGAEPQPPSRVKWTKSDNLEVVRCYYLAQKRNSASEKEVYDLWRMRNPGVRPNMDSKKLASQRRYIIKNKKITPEEIKTMQNEIKEDLEEDPEQTTEEQTPEGPIHPPSPRIHSDPHPQEVPAGLENSNCTISQGPGEPPAEDEMEGYNYPQRPIYDTAITEEDQLLQKVEDEYAEQVNVRIEEREQLSKLQNVKRANMTIHRVNKIIGKMIEEKGEQMGLKEINALVFSGAKVVLELENPVERPKNNAKRGGPTTPPWVRRIETKILGLRRHLSTLENYRRDGSGENKAETLLHLYAEKDLQTTEEVCEYLKQRITALAQRIRRYKRRAAQFQENKQFRANQKAFFRKLRGGKVEGGPTPEPTAVDQFWRGIFEDDTQHNQEAKWIGKFKCNTQMEFDPISETEVKTVVSRMANWKSPGPDMIQHFWLKQFRTMHKKLAMELNKLLESDDFPEWMARGKTFLIPKTPETDNPQNYRPITCLNTTFKLYTGILAEKIGGYAEKTGIIPLEQKGCRRGARGCLDQLLISKRVVEHCKARNKNLSLAWIDYRKAFDSVPHSWILQSMKMVGINEKIVGTCGAMMKKWATRIHVNLGSWSMVTDTMAIKRGIYQGDSLSPLLFCISLVPLSQMLKVLKRGYKMESMGMEVHHLFFVDDLKLFAEDDRGLKKQLNVVHEFSSDIRMEFGITKCAKAEFKSGRYAYGENIQIEQGLEIRNMEEGELYKYLGMEENDNISQKRMKAQMKAEYVRRVRCILKTELSANNKFRAIGTFAVPVLEYGFGILNWKKHEIRAIDTKTRKMLTMGKMHHPSADVDRLYVARKYGGRGLRQIEAAFKSSLINLKDYLTRKATEDPYLKLVLKLDQRPRQENSIVKEAKKYEEEEGCSKAEDRTPIQRKQDVKAKISSNIKNRWKQKPMHGQHPRLLEEARINGDESVLWLTGGHLKGETESLIVAAQDQALATRYRTVRIHKVPGTTKCRMCGQFDETIDHLVSGCPVLAKEEYIYRHNRVGAHLHFEICRAVGAPVDTDKWYEHQPRPVVKSADGKTTIMWDYSIQTDRTVPANRPDIVVKQEGELCLLIDVSIPMDRNVHTKEAEKLLKYKSLEIEIQRMWKTKTKVIPVVIGATGVVTKTMHAYLKSVPGTTPLASIQKTAVLGTATILRKVLM

SEQ ID NO: 16463 - protein, 966 aa, Trialeurodes vaporariorum
MTIRRVSKIIGKMIEEKGEQMGLKEINALVFSGAKVVLELENPVERPKNNAKRGGPTTPPWVRRIETKILGLRRHLSTLENYRRDGSGENKAETLLHFYAEKDLQTTEEVCEYLKQRITALAQRIRRYKRRAAQFQENKQFRANQKAFFRKLRGGKVEGGPTPEPTAVDQFWRGIFEDDTQHNQEAKWIGKFKCNTQMEFDPISETEVKTVVSRMANWKSPGPDMIQNFWLKQFRTMHKKLAMKLNKLLDSDDFPEWMARGKTFLIPKTPETDNPQNYRPITCLNTTFKLYTGILAEKIGRYAEKTGIIPVEQKGCRRGARGCLDQLLISKRVVEDCKARNKNLSLAWIDYRKAFDSVPHSWILQSMKMVGINEKIVGTCGAMMKKWATRIHVNLGSWSMVTDTMAIKRGIYQGDSLSPLLFCISLVPLSQMLKVLKRGYKMESMEMEVHHLFFVDDLKLFAEDDRGLKKQLNVVHEFSSDIRMEFGITKCAKAEFKSGRYAYGENIQIEQGLEIRNKEEGELYKYLGMEENDNISQKRMKAQMKAEYVRRVRCILKTELSANNKFRAIGTFAVPVLEYGFGILNWKKHEIRAIDTKTRKMLTMGKMHHPSADVDRLYVARKYGGRGLRRIEAAFKSSLINLKDYLTRKATEDPYLKLVLKLDQRPRQENSIVKEAKKYEEEEGCSKAEDRTPIQRKQDVKAKNSSNIKNRWKQKPMHGQHPRLLEEARINGDESVLWLTGGHLKGETESLIVAAQDQALATRYRTVRIHKVPGTTKCRMCGQFDETIDHLVSGCPVLAKEEYIYRHNRVGAHLHFEICRAVGAPVDTDKWYEHQPRPVVKSADGKTTIMWDYSIQTDRTVPANRPDIVVKQEGELCLLIDVSIPMDRNVHTKEAEKLLKYKSLEIEIQRMWKTKTKVIPVVIGATGVVTKTMHAHLKSVPGTTPLASIQKTAVLGTATILRKVLM

SEQ ID NO: 16464 - protein, 1421 aa, Spodoptera frugiperda
MEMSKRGYNLRSLPGGRRGASGADAGCHSMRTIGGVELSKRAPTKKHATADRCELTRRAHSEEATADSTGDDTISLFSSIPSTRPSYMTRSKSTLSTTTTLDSVVRDVNFDSELAPATSASSKRRRWTPEMNMFILRTYFHLTLLDTDKRTYLEPLHLKFIEKFPDMQVSRQRVGDQRRAIINNKLLPQQTIDTIRDEVKRELDLLQLNHNNIQTENTIDHTHQTRTQLQLHTRTTETHITQNKTQSRMRWTNEQNEGIMRSYYRVTDLGRNETVYRKRMYDDFISNFPSLAHLTEQRVADQRRAIINNKYISSDKLNSLKAQVAEELLLRNPNSQDNRYTDTQAISNNIPNTQSAHNTFYSIDEPNTQTLDNTEINIIETAPNPEINLERELSIDETFQQALTHYKNTSPINRSYIPKQKPSKNLARLINYFNKFILPENIDSNTDFDTFQTIIYCAAWTAAKLNGARITLEPRESFRRPKSEHKPKWQRRLERKVKDLRKKIGRLTQFINGSRSRKLKRHVNKILTHYRIHTIHEEPNTQPIHTLDTLKQKLSVVNGRLERYSACTLRKQQNIQFYQNEKLFYRNMKQATTNNNRHNTTRNNEHTIPDPETLQNFWAGIWERPTEHNSQAEWLQSDFSSGIQPMSFEHIPVDTFHKVLSKLHNWKAPGSDHIHSYWYKKFTAIHCHLYNFINTFIKNPELTPSYLTAGTTFMIPKDHNDLSNPAKYRPITCLQTLYKIMTSCISELIYTHIDANKILAEQQKGCRRFSQGCKEQLIIDSVVLKNVQKSKSDLFTMYIDYKKAYDSVPHSWLAQVLDMYKINPSIVTFLKTVMSSWTTVLRLTTPTETINTNPIKIQRGIFQGDALSPLWFCLALNPLSKLLNTTSLGIPLNSITDEQDVILNHLMYMDDIKLFAKTENQLIQLADLTETFTNDIKMEFGIDKCKINSVRAGQNYQHQYTLTTGEHIEPMDEQDTYKYLGYIQSTTIHHKEIKQKLKQQFQHRLNTILKTQLYSRNTIKAINTFAIPVLTYSFGIINWTKTDLKNLQRKVNTTMTKFRKHHPRSCVQRLTLPRKEGGRGLIDILNLHNRQITTLRTYFFAKSESSTLHRLITHNDRHFTPLNLNDRTIQRNETVTDNKTKCLEWTQKSLHGRHRQDLCQPNVDKEASNAWLNRGELFPETEGFMLAIQDQVIETKNYRKHIIKNLSNDTCRKCNSSPETIQHITGACKSIAQTDYKHRHDQVANIIHQKLAYQYKLIESIVPYYKYNPEIVLENSTTKLYYDRAIFTDRTVHYNRPDITLIDKRNNTGLLIDIAIPNTHNLQTTIAEKLSKYTELKDEITRLWRLQKVIIVPIVISSTGVIPKQLNQSLSSLNLPTSTYYLLQKAVILNTCRLVRKFLQIDAETTVQPSHNHNPTGEHLA

SEQ ID NO: 16465 - protein, 1421 aa, Spodoptera frugiperda
MEMSNRAYNLRSLPGGRRGASGADAGCHSMRTIGGVELSKRAPTKKHATADRCELTRRAHSEEATADSTGDDTISLFSSIPSTRPSYMTRSKSTLSTTTTLDSVVRDVNFDSELAPATSASSKRRRWTPEMNMFILRTYFHLTLLDTDKRTYLEPLHLKFIEKFPDMQVSRQRVGDQRRAIINNKLLPQQTIDTIRDEVKRELDQLQLNHNNIQTENTIDHTHQTRTQLQLHPRTTETHITQNKTQSRMRWTNKQNEGIMRSYYRVTDLGRNETVYRKRMYDDFISNFPSLAHLTEQRVADQRRAIINNKYISSDKLNSLKAQVAEELLLLNPDSQDNRYTDTQAISNNIPNSQLAHNTFYSIDEPNTQTLDNTEINIIETVPNPEINLERELSIDETFQQALAHYKNTSPINRSYIPKQKPSKNLARLINYFNKFILPENIDSNTDFDTFQTIIYCAAWTAAKLNGARITLEPRESFRISKSEHKPKWQRRLERKVKDLRKKIGRLTQFINGSRSRKLKRHVNKILTHYRIHTIHEEPNTQPIHTLDTLKQKLSVVNGRLERYSACTLRKQQNIQFYQNEKLFYRNMKQATTNNNRHNTTRNNEHTIPNPESLQNFWAGIWERPAEHNSQAEWLQSDFSSGIQPMSSEHIPVDTFHKVLSKLHNWKAPGSDHIHSYWYKKFTATHCHLYNFINTFIKNPELTPSYLTAGTTFMIPKDHNDLSNPAKYRPITCLQTLYKIMTSCISELIYTHIDANKILAEQQKGCRRFSQGCKEQLIIDSVVLKNVQKSKSDLFTMYIDYKKAYDSVPHSWLAQVLDMYKINPSIVTFLKTVMSSWTTVLRLTTPTETINTNPIKIQRGIFQGDALSPLWFCLALNPLSKLLNTTSLGIPLNSITDEQDVILNHLMYMDDIKLYAKTENQLIQLADLTETFTNDIKMEFGIDKCKINSVRAGQNYQHQYTLTTGEHIEPMDEQDTYKYLGYIQSTTIHHKEIKQKLKQQFQHRLNTILKTQLYSRNTIKAINTFAIPVLTFSFGIINWTKTDLKNLQRKVNTTMTKFRKHHPRSCVQRLTLPRKEGGRGLIDILNLHNRQITTLRTYFFAKSESSTLHRLITHNDRHFTPLNLNDRTIQRNETVTDNKTKCLEWTQKSLHGRHRQDLCQPNVDKEASNAWLNRGELFPETEGFMLAIQDQVIETKNYRKHIIKNLSNDTCRKCNSSPETIQHITGACKSIAQTDYKHRHDQVANIIHQKLAYQYKLIESIVPYYKYNPEIVLENSTTKLYYDRAIFTDRTVHYNRPDITLIDKRNNTGLLIDIAIPNTHNLQTTIAEKLSKYTELKDEITRLWRLQKVIIVPIVISSTGVIPKQLNQSLSSLNLPTSTYYLLQKAVILNTCRLVRKFLQIDAETTVQPSYNHNPTGEHLA

SEQ ID NO: 16466 - protein, 1423 aa, Spodoptera frugiperda
MEMSNRGYNLRSLPGGRRGASGADAGCHSMRTIGGAELSKRAPTKKHATAGRSELNRRAQYEDATADSTGDDTISLFSSIPSTRPSYMTRSKASSTTSTLDSVARDVDLDRELAPTTSAHNKRKRWTPEMNIFILRTYFQLTLLDTDKTTYLEPLHLRFLEKFPYMQVSRQRIGDQRRAIINNKLLAQETIDTIRNEVEKELNQLQLNRTNQQTGNTINQSQPIFTQSQSHPTAVAIQNKTLTRMRWTNEQNEGIMRSYYRVTDLGRNETVYRKRMYDDFISYFPSLAHLSEQRIADQRRAIVNNKYISDDKLNSLKAQVAQELLLSNHNSHNSRDTFTDNRRINNPITQLTNNIELHCTEDPTPDTQIVNNTELNTILDIDITPTPQTNQERDTLIDETFQQALEHFKTTSPTNRNYIPKQKPSKNLARIVSYLNQTILPENVDRDTNFNTFQTIIYCAAWTAAKVNGARISLEPREGVRTQKKEYRPKWQRRLEKKLKDLRTKIGRMTQYVNGNRSRKLRKYVNKIMKTYRTHTIHEEPNTQPLHTLDTLKQKLSVVKGRLERYTACTLRKRQNFQFNHNEKLFYRNMKQVTTNNNQHNTPRDSENNTPDPETLQHFWANIWERPVCHNSQADWIQSDLSNSTQPMTFEQVPIAIFHKVLSKLHNWKAPGSDHIHSYWYKKFTAIHSYLYNFINLFIQDSELLPSYLTSGITFMIPKDPNDLSNPAKYRPITCLQTLYKIITSCISELMYEHIDANNILAEQQKGCRRFSQGCKEQLIIDSIVLGKVKKSKSDLYSMYIDYKKAYDSVPHSWLVQVLELYNIHPSVITFLKTIMTTWTTVLRLSTPTKTIDTSPIKIQRGIFQGDALSPLWFCLALNPLSKLLNATTLGTPLNSTREGQDYKLSHLMYMDDIKLFAETENQLKELADLTEEFTNDIKMEFGIDKCKINSVRAGQNYQHQHTLTTGAQIESLDEQGTYKYLGYIQSSQIHHKDIKQTLKQQFQHRLNIILKTQLYARNTVKAINTFAVPILTYSFGVIKWTKTDLKNIQRKINTTMTKFRKHHPRSCLQRLTLPRKEGGRGLIDILNLHNKQITTLRSYFFSKTESSALHKLVAQHDKHLTPLNLHDKTGQRNETVTDDKTKCLEWTRKSLHGRHRQDLCQPNVDKEASNAWLNRGELFPETEGFMLAIQDQVIETKNYRKHIIKNLLNDTCRKCNSSPETIQHITGACKSIAQTDYKHRHDQVANIIHQKLAYQYKFIESIVPYYKYNPEIVLENSTTKLYYDRAIFTDRTIHYNRPDITLIDKRNNTGFLIDIAIPNTHNLQTTIAEKLSKYTELKDEITRLWRLQKVIIVPIVISSTGVIPKQLNQSLSSLNLPTSTYYLLQKAVILNTCRLVRKFLQIDAETIVQPSYNHNPTGEHLA

SEQ ID NO: 16467 - protein, 1421 aa, Spodoptera frugiperda
MEMSNRGYNLRSLPGGRRGASGADAGCYSMRTIGGVELSKRAPTKKHVTADRCELTRRAHSEEATADSTGDDTISLFSSIPSTRPSYMTRSKSTLSTTTTLDSVVRDVNFDSELAPATSASSKRRRWTPEMNMFILRTYFHLTLLDTDKRTYLEPLHLKFIEKFPDMQVSRQRVGDQRRAIINNKLLPQQTIDTVRDEVKRELDQLQLNHNNIQTENTIDHTHQTRTQLQLHPRTTETHITQNKTQSRMRWTNEQNEGIMRSYYRVTDLGRNETVYRKRMYDDFISNFPSLAHLTEQRVADQRRAIINNKYISSDKLNSLKAQVAEELLLLNPNSQDNRYTDTQAISNNIPNTQLAHNTVYSIDEPNTQTLDNTEINIIETVPNPEINLERDSSIDETFQQALTHYKNTSPINRSYIPKQKPSKNLARLINYFNKFILPENIDSNTDFDTFQTIIYCAAWTAAKLNGARITLEPRESFRRPKSAYKPKWQRRLERKVKDLRKKIGRLTQFINGSRSRKLKRHVNKILTHYRIHTIHEEPNTQPIHTLDTLKQKLSVVNGRLERYSACTLRKQQNTQFYQNEKLFYRNMKQATTNNNRHNTPRNNEHTIPDPETLQNFWAGIWERPAEHNSQAEWLQSDFSSGIQPMSFEHIPVDTFHKVLSKLHNWKAPGSDHIHSYWYKKFTAIHCHLYNFINTFIKNPELTPSYLTTGTTFMIPKDHNDLSNPAKYRPITCLQTLYKIMTSCISELIYTHIDANKILAEQQKGCRRFSQGCKEQLIIDSVVLKNVQKSKSDLFTMYIDYKKAYDSVPHSWLAQVLDMYKINPSIVTFLKTVMSSWTTVLRLTTPTKTINTNPIKIQRGIFQGDALSPLWFCLALNPLSKLLNTTSLGIPLNSIADEQNVILNHLMYMDDIKLFAKTENQLIQLADLTETFTNDIKMEFGIDKCKINSVRAGQNYQHQYTLTTGEHIEPMDEQDTYKYLGYIQSTTIHHKEIKQKLKQQFQHRLNTILKTQLYSRNTIKAINTFAIPVLTYSFGIINWTKTDLKNLQRKVNTTMTKFRKHHPRSCVQRLTLPRKEGGRGLIDILNLHNRQITTLRTYFFAKSESSTLHRLITHNDRHFTPLNLNDRTTQRNETVTDNKTKCLEWTQKSLHGRHRQDLCQPNVDKEASNAWLNRGELFPETEGFMLAIQDQVIETKNYRKHIIKNLSNDTCRKCNSSPETIQHITGACKSIAQTDYKHRHDQVANIIHQKLAYQYKLIESIVPYYKYNPQIVLENSTTKLYYDRAIFTDRTVHYNRPDITLIDKRNNTGLLIDIAIPNTHNLQTTIAEKLSKYTELKDEITRLWRLQKVIIVPIVISSTGVIPKQLNQSLNSLNLPTSTYYLLQKAVILNTCRLVRKFLQIDAETIVQPSHNQIPTGEHLA

SEQ ID NO: 16468 - protein, 1408 aa, Codatractus alcaeus
MRLRSGNRIPQAGTRNGESRPELENSGSPTYSGEGNVSLQLAQSSAGASCNTHLGDDTTTIFSSIPSTRPSYMTRRTSTLSSATSTFDSVVQDVNPDPELAPTSSGHLKRRRWTPEMNMFILRTYLYLTTLDSDTKMYLEPLHLKFLEKYPHMQVSRQRVGDQRRAIVRNKLLPQKAIDQIYQEVKEDLKLRLTSLPSTNETQHYTFKINNFQTTRIRWTTELNETIMRLYYRLTQLEANRTTYRKPLHEAFISAFPSMAHISEQRVADQRRAIISNKYIHDNRLKEIKQQVAEELSMNSNNTNEINNTQEFNSDFINNAEEPNRPVEPQNNPMQSERNPEIDDIFQQTFNYFKDTNPTHRTYIPKQKASKQLAKIVHYINEIILPENVNMETDFKTFQTVIYCAAWTAAKVNGAKLSLEPSERSHENYKDYRPRWQRRLEQRLLDLRAKIGRITHFINGNTNKKLEKHVNNIVESYKIHSIHEAPNTQLTHILDTLKQKLAVVSGRLSRYKACTLRKQQNNQFNTNEKQFYRKIREAATNTQENNSNNDNLPDPEDLQKFWAGIWEQPIQHNAQADWIHYETENNNTTTQEMFFEHIPIDTLKLVLSNLHNWKAPGSDCIHSYWYKKFTYIHVYLHHYLNEFIKKPNSLPQYITFGTTYMIPKDRNDPTNPAKYRPITCLQTIYKILTSCISELIYKHVDVNNILAEQQKGCRKFSQGCKEQLVIDSIILKQVQKKKSDLFTMYIDYKKAYDSVPHSWLIQILQIYKVHPKIITFLQAAMTNWTTQLKLSTPNTTIETQPIKIQRGIFQGDALSPLWFCLALNPLSNILNSTAVGYPLKYTNTNRQTDNSEKLSHLLYMDDIKLYANNENNLYEIANITEQFTNDIKMEFGIDKCKINSIRAGRTYQHNYTLVSGEQIEPLDEQETYKYLGYNQSRLIQHKDTKQKLKQQFRHRLNTILKTQLNARNTLKAINTFAIPVLTYSFGIIKWTKSDLKTIQRIINTTMTKFRKHHPRSCIQRLTLPRKEGGRGLIDVVKLHNKQISNLRQYFFHKSESSPLHKAIVQNDRKLTPLNLQSNTVQNNEKLTDDMTKLAEWAGKSLHGRHRHDLCQLNVDKDASNAWLSRGELFPETEGFMMAIQDQVIETKNYQKHIIKSLKSDTCRKCNSCPETIQHITGACKTIAQTDYKHRHDQVANIIHQKLAHQQNLIKSNHPYYKYTPESVLENPKAKLYFDRAILTDRTIHYNRPDITLINKTNNTAYLVDIAIPNTHNLQTTIAEKLTKYTELKDEIIRIWHLQKVTIVPIVLSTTGVIPKQLHESIKTLNLPSTTYKLLQKAVILNTCRIVRKFLQSEQESVATSIRYTQTPILPATQVTTTLPSTRPGMTISQPTTQVTTKSHTQPDTLSST

SEQ ID NO: 16469 - protein, 1393 aa, Dendrolimus kikuchii
MEMSKKVYNLRSLPGGRRGASGADAGCHSMRTIGDEGLSRRAPVDKTTTADRHELNRRTRVVETTADFLSDDTTSLFSSIPSTCPSYGTRKSSTVSTISIPDSVVQDVNFDTELAPTSGARKKWTQEMNKFILRTYFLLTALETDTKNYLESLHIKFTEKYPNMQVSRQRVGDQRRAIIRNKLLPQNTIDQIFNEVKQELTQLQAVVQNHTQPETHSQTHVSNQTTQNIIDTRMKWTNQHNEAIMRSYYRTTNLGTNKTAYRKLMHTDLTQSYPPLANLSEQRIADQRRAIVNNQYISKERLTIIQQEIAKELEISNNTLINTYPSFNETPTLNNNISQNTEHDINRIHTTSELILSGRHSKIDETFQEAFEYYTYTDPTSRAYIPKQKTSKNLAKIIDYINRITLKENITSDTDFFKFQTIIYCAAWTAAKVNGTRITLQTRTDIQRKKKDYKPKWQIRLEMKLKDIRKKIGRLTQFIQGNRSRNITKHSERIMEQYKAHTLHEEPNTQAAHVLDTLKQKLSVVTGRLQRYKDCSLRKQQNTQFNLNEKLFYRNIRNTTTNTQENCFNSDVHDSITPEALKNFWAGIWEKPIQHNIEAEQISTDTFNNLKTMTYEFISTDILQKVIRYLHNWKSPGSDNIHSFWYKKFTTTHSNLHKYINSFIQDPTSIPSYLTMGTTYMIPKDPKDLSDPSKYRPITCLQTLYKIMTSCISEIIYNHIDTNQILAEQQKGCRKFSQGCKEQLTIDSVILKQVHKTKSNLFTMYIDYKKAYDSVPHSWLVKVLEIYKIHPTIITFLKTIMTKWSTVLRVSTIKETIETDPIQIQRGIFQGDALSPLWFCLALNPLSQLLNVTSHGYPLCLEKDRQTDIRESKLNHLLYMDDIKLYAATENELKDLADIVDKFSIDIKMEFGIDKCKINSVKNGQNYSHHYTTTTGDNIIPLCEWDVYKYLGYNQSLLIHHKDTKQKLTQQFQHRLNMILKTQLHSRNTVKAINTFVIPLLTYSFGIINWNKTEIKNLQRKINTTMTKFRKNHPRSCLQRLTLPRKEGGRGLIDILNLHNKQITTLRKYFFAKAQSSIIHKLIVQTDRKLTPLNLQNAAEQTNEKLTDDRTKITEWTQKSLHGRHRQDLCLEHVDKEASNAWLTRGELFPETEGFMIAIQDQVIETKNYRKHIIKNLAADYCRKCNSSPETIQHITGACKSIVQTDYKHRHDQVTNIIHQKLAHKYNLINTITPYYKYKPETVLENSTTKLYFDRAILTDRTIHYNRPDITLINKTTKTGYLIDIAIPNTHNIQTTISEKLTKYTELKDEITRLWHLQNVTIIPVVLSSTGVIPKLIHQSLKALDLPANSYHLMQKATILNTCRIVRKFLQGDTNEPTYNYTNISNQVAITTS

SEQ ID NO: 16470 - protein, 1282 aa, Dendrolimus kikuchii
MALCCSCLPRKGTGVKLCMYNNNNNNNTPTSGARKKWTQEMNKFILRTYFLLTALETDTKNYLESLHIKFTEKYPNMQVSRQRVGDQRRAIIRNKLLPQNTIDQIFNEVKQELTQLQAVVQNHTQPETHSQTHVSNQTTQNIADTRMKWTNQHNEAIMRSYYRTTNLGTNKTAYRKLMHTDLTQSYPPLANLSEQRIADQRRAIVNNQYISKERLTIIQQEIAKELEISNNNLINTYPSFNETPTLNNNISQNTEHDINRIHTTSELILSGRHSKIDATFQEAFEYYTYTDPTSRAYIPKQKTSKNLAKIIDYINRITLKENITSDTDFFKFQTIIYCAAWTAAKVNGTRITLQTRTDIQRKKKDYKPKWQIRLEMKLKDIRKKIGRLTQFIQGNRSRNITKHSERIMEQYKAHTLHEEPNTQAAHVLDTLKQKLSVVTGRLQRYKDCSLRKQQNTQFNLNEKLFYRNIRNTTTNTQENCFNSDVHDSITPEALKNFWAGIWEKPIQHNIEAEQISTDTFNNLKTMTYEFISTDILQKVIRYLHNWKSPGSDNIHSFWYKKFTTTHSNLHKYINSFIQDPTSIPSYLTMGTTYMIPKDPKDLSDPSKYRPITCLQTLYKIMTSCISEIIYNHIDTNQILAEQQKGCRKFSQGCKEQLTIDSVILKQVHKTKSNLFTMYIDYKKAYDSVPHSWLVKVLEIYKIHPTIITFLKTIMTKWSTVLRVSTIKETIETDPIQIQRGIFQGDALSPLWFCLALNPLSQLLNVTSHGYPLCLEKDRQTDIRESKLNHLLYMDDIKLYAATENELKDLADIVDKFSIDIKMEFGIDKCKINSVKNGQNYSHHYTTTTGDNIIPLCEWDVYKYLGYNQSLLIHHKDTKQKLTQQFQHRLNMILKTQLHSRNTVKAINTFVIPLLTYSFGIINWNKTEIKNLQRKINTTMTKFRKNHPRSCLQRLTLPRKEGGRGLIDILNLHNKQITTLRKYFFAKAQSSIIHKLIVQTDRKLTPLNLQNAAEQTNEKLTDDRTKITEWTQKSLHGRHRQDLCLEHVDKEASNAWLTRGELFPETEGFMIAIQDQVIETKNYRKHIIKNLAADYCRKCNSSPETIQHITGACKSIVQTDYKHRHDQVTNIIHQKLAHKYNLINTITPYYKYKPETVLENSTTKLYFDRAILTDRTIHYNRPDITLINKTTKTGYLIDIAIPNTHNIQTTISEKLTKYTELKDEITRLWHLQNVTIIPVVLSSTGVIPKLIHQSLKALDLPANSYHFYTNNLDKHKIMANTKQ

SEQ ID NO: 16471 - protein, 1043 aa, Noctua pronuba
MQKRGTIDLHILWEKTILDFIFWQKKIVQEIKHQSIEIEKLDVETSPIPTKKKKYTDKHNNNCSAWTVAKVNGARITFEPRESTRVPKTEYKPKWQRRLEQKVKDLRTKIGRMTQFMNGNSSRKLRKHVNKIIKQYRTHTIHEEPNTKAAHTLDTLKQKLCVVKGRLERYKACSLRKQQNTKFNHNEKLFYRNIRQTTTNIQQNTPHANENNTPDPETLKQFWASIWEQPVCHNSQADWIQSEVSNNKSNIQPMAFEHISPEIFHKVLSRLHNWKAPGSDHIHSYWYKKFTAIHCYLYNFINTFIKDPKSIPSFVTSGTTFMIAKDHNDLSNPAKYRPITCLQTLYKIITSCISELIYEHIDANNILAEQQKGCRKFSQGCKEQLIIDSVVLRKVQKSKSDLFTMYIDYKKAYDSVPHSWLVQVLEIYKIHPSVIAFLKTAMTTWTTVLRLTTPTETKDTSPIKIQRGIFQGDALSPLWFCLALNPLSKILNSTSLGIPLNSIVDGQEETHGSTLNHLMYMDDIKLFAKSEDQLNELANLTEKFTNDIKMEFGIDKCKINSVRAGQNYQHQYTLETGEQQQPLDEKDTYKYLGYIQSSQIHYKDIKQKLKQQFQHRLNTILKTQLYSRNTIKAINTFAIPVLTYSFGIINWTKTDLKNLQRKVNTTMTKFRKHHPRSCVQRLTLPRKEGGRGLIDILNLHNRQIITLRQYFFAKTESSTLHKLIAQNDQRLTPLNLKDTTEQKNERVTDDKTKFLEWTQKSLHGRHRQDLCQPNVDKEASNAWLNRGELFPETEGFMLAIQDQVIETKNYRKHIIKNLPNDTCRKCNSSSETIQHITGACKSIAQTDYKHRHDQVANVIHQKLAHQYKLVDTVVPYYKYNPETVLENTTTKLYFDRALFTDRTIHYNRPDITLINKVNNTGFLIDIAVPNTHNLQTTIAEKLSKYTELKDEITRLWRLHKVIIVPIVISSTGVIPKQLHQSLSSLNLPPNTYHLLQKAVILNTCRLVRKFLQCESDNIIQSAHNRVESNISIPALNPTDEHLA

SEQ ID NO: 16472 - protein, 1338 aa, Pythonides amaryllis
MEQSKHRYNLRSLLGGRRGASGAGAGCFSMRDTGGEALSRRALVTQNTTAGRRELIRRAHGVEATADTMGEDTSSLFSSIPSTRPSYMTRRTSTLSTVTTADRVVQDVNFDAEVVPTSTDTQKRRRWTPEMNMFILRTYLQLTALDTDTTTYLEPLHLKFTEKFPDFQASRQRVGDQRRAIVRNKLLPQNTIDQIYNDVKEELHNYQSSLPVLIQPTTTYNSKKQIRMRWTNEQNEIIIRSYYRITSLEKNRTTYRRPLHEAFISAFPSLAHLSEQRIADQRRAIIANKYICDSRLEEIKRDVAEELLLSQKNLYNYPTQLLNHTQDTNIDNLDIQFLNSIELNLPEVTSIHHTQQLERNKLIDETFQQTFKHFKNISPTNRIYIPKQKPSKKLAKIVHYLNEIIFPEHVNVDTDFHTLQTAIYCAAWTAAKVNGAKISLESNRTSRSSKTNYKPHWQQRLERRLDNLRTKIGRLTQYIDGNRNRNLEKHVKSILEQHKIHSIHEEPNKHIIHTLDTLKQKLSVAAGRLRRYKECTLRKHQNNQFNNNEKLFYRNIKETTTNLQVNTNDNRVGQLLDPETLCNYWTGIWEQTEHHNNLADWIKTETAQNSTTPEMSFDHIPIDIFKKVLQNLHNWKAPGSDFIHSYWYKKFTNIHAYLHNYLNDFIDKPDKIPEYLTVGTTYMIPKCQNDHTDPAKYRPITCLQTLYKILTSCISELIQKHVEDNKILAEQQKGCRKFSQGCKEQLIIDSVILKEVQRKKSDLFTMYIDYKKAYDSVPHTWLIQVLQIYKIHPKIITLLKTTMTNWRTRLRLTTPTITTDTEPIKIQRGLFQGDTLSPLWFCLAINPLSNILKSAAVGYNLQYRDTINQTDTHECINHLFYMDDIKLYADTDKNLHQLAEITEKFSNDIKMEFGINKCRINSVKAGHNYQHNYTLETGDKIEPLDEEETYKYLGYNQSRLIQYKTTKIKLQQEFRHRLNTILKTQLNARNTIKAINTFAIPVLTYSFGIINWSKSELKSLQRIINTTMTKFRKHHPRSCLQRLTLPRKDGGRGLIDIMNLHNKQISTLREYFFNKSESSSLHKVIVKTDNRLTPLNLQHRMKQNNEKLTDTKTKLAEWARKSLHGRHYHDLSQPNVDKKASNAWLCRGELFPETEGFIIAIQDQVIETKNYQKHIIKTLRSDTCRKCASCPETIQHIVGACKSIAQTDYKYRHDQVANIVHQKLAHQQNLINSLLPYYKYTPESVLENSTTKLYFDRAILTDRTIHYNRPDITLINKINKTGYLIDIAIPNTHNLQNTIAEKLSKYTELKDEITRLWHLQKVTIVPIVLSSTGVIPVQ

SEQ ID NO: 16473 - protein, 1393 aa, Dendrolimus kikuchii
MEMSKKVYNLRSLPGGRRGASGADAGCHSMRTIGDEGLSRRAPVDKTTTADRHELNRRTRVVETTADFLSDDTTSLFSSIPSTCPSYGTRKSSTVSTISIPDSVVQDVNFDTELAPTSGARKKWTQEMNKFILRTYFLLTALETDTKNYLESLHIKFTEKYPNMQVSRQRVGDQRRAIIRNKLLPQNTIDQIFNEVKQELTQLQAVVQNYTQPETHSQTHVSNQTTQNIADTRMKWTNQHNEAIMRSYYRTTNLGTNKTAYRKLMHTDLTQSYPPLANLSEQRIADQRRAIVNNQYISKERLTIIQQEIAKELEISNNNLINTYPSFNETPTLNNNISQNTEHDINRIHTTSELILSGRHSKIDATFQEAFEYYTYTDPTSRAYIPKQKTSKNLAKIIDYINRITLKENITSDTDFFKFQTIIYCAAWTAAKVNGTRITLQTRTDIQRKKKDYKPKWQIRLEMKLKDIRKKIGRLTQFIQGNRSRNITKHSERIMEQYKAHTLHEEPNTQAAHVLDTLKQKLSVVTGRLQRYKDCSLRKQQNTQFNLNEKLFYRNIRNTTTNTQENCFNSDVHDSITPEALKNFWAGIWEKPIQHNIEAEQISTDTFNNLKTMTYEFISTDILQKVIRYLHNWKSPGSDNIHSFWYKKFTTTHSNLHKYINSFIQDPTSIPSYLTMGTTYMIPKDPKDLSDPSKYRPITCLQTLYKIMTSCISEIIYNHIDTNQILAEQQKGCRKFSQGCKEQLTIDSVILKQVHKTKSNLFTMYIDYKKAYDSVPHSWLVKVLEIYKIHPTIITFLKTIMTKWSTVLRVSTIKETIETDPIQIQRGIFQGDALSPLWFCLALNPLSQLLNVTSHGYPLCLEKDRQTDIRESKLNHLLYMDDIKLYAATENELKDLADIVDKFSIDIKMEFGIDKCKINSVKNGQNYSHHYTTTTGDNIIPLCEWDVYKYLGYNQSLLIHHKDTKQKLTQQFQHRLNMILKTQLHSRNTVKAINTFVIPLLTYSFGIINWNKTEIKNLQRKINTTMTKFRKNHPRSCLQRLTLPRKEGGRGLIDILNLHNKQITTLRKYFFAKAQSSIIHKLIVQTDRKLTPLNLQNAAEQTNEKLTDDRTKITEWTQKSLHGRHRQDLCLEHVDKEASNAWLTRGELFPETEGFMIAIQDQVIETKNYRKHIIKNLAADYCRKCNSSPETIQHIIGACKSIVQTDYKHRHDQVTNIIHQKLAHKYNLINTITPYYKYKPETVLENSTTKLYFDRAILTDRTIHYNRPDITLINKTTKTGYLIDIAIPNTHNIQTTISEKLTKYTELKDEITRLWHLQNVTIIPVVLSSTGVIPKLIHQSLKALDLPANSYHLMQKATILNTCRIVRKFLQGDTNEPTYNYTNISNQVAITTS

SEQ ID NO: 16474 - protein, 1434 aa, Noctua pronuba
MEMSNKIIYNFRSLPGERRGASGADAGCHSMRTIGGEELSKRAPTEKMVTAGRSKLNRRAHYVDATADSTGDDTISLFSSVPSTRPSYMTRRKASLSTTSTLDSVVQDVILDNELEPTTSAPSKRRRWTPEMNMFILRTYFQLTLLDTDKRTYLEPLHLKFIEKFPDMQVSRQRIGDQRRAIINNKLLPQKAIDNIRNEVEKELDQLQLNHFTLQTQNALDCTQPIFTSSQMPLSTIEAHSTQNKTQTRMRWTSEQNEAIMRSYYRVTDLGTNETAYRKRMYDDFVNNFPSLAHLSEQRIADQRRAIINNKYISNDKLKSLKAEVAEELGLRTLNAHITSMNNTNTQVTNDTEINSMEEPTPNTQTSDNIELNTITDILPNPQINPERDSLIDDTFQQALDFFKETSPTNRIYIPKQKPSKNLARIISYLNKIILPENVDKDTDFNTLQTVIYCSAWTVAKVNGARITFEPRESTRVPKTEYKPKWQRRLEQKVKDLRTKIGRVTQFMNGNSSRKLRKHVNKIIKQYRTHTIHEEPNTKAAHTLDTLKQKLCVVKGRLERYKACSLRKQQNTKFNYNEKLFYRNIRQTTTNIQQHTPLANENNTPDPETLKQFWASIWEQPVCHNSQADWIQSEVSNNNSNIQPMAFEHISPEIFHKVLSRLHNWKAPGSDHIHSYWYKKFTAIHCYLYNFINTFIKDPKSIPSFVMSGTTFMIPKDHNDLSNPAKYRPITCLQTLYKIITSCISELIYEHIEANNILAEQQKGCRKFSQGCKEQLIIDSVVLRKVQKSKSDLFTMYIDYKKAYDSVPHSWLVQVLEIYKIHPSLIAFLKNAMTTWTTVLRLTTPTETKDTSPIKIQRGIFQGDALSPLWFCLALNPLSKILNSTSLGIPLNSIVDGQEETHGSTLNHLMYMDDIKLFAKSEDQLNELANLTEKFTNDIKMEFGIDKCKINSVKAGQNYQHQYTLETGEQIEPLDEHDTYKYLGYIQSSQIHYKDIKQKLKQQFQHRLNTILKTQLYSRNTIKAINTFAIPVLTYSFGIINWTKTDLKNLQRKVNTTMTKFRKHHPRSCVQRLTLPRKEGGRGLIDILNLHNRQITTLRQYFFAKTESSTLHKLIAQNDQRLTPLNLKDTTEQKNERVTDDKTKFLEWTQKSLHGRHRQDLCQPNVDKEASNAWLNRGELFPETEGFMLAIQDQVIETKNYRKHIIKNLPNDTCRKCNSSSETIQHITGACKSIAQTDYKHRHDQVANVIHQKLAHQYKLVDTVVPYYKYNPETVLENTTTKLYFDRALFTDRTIHYNRPDITLINKVNNTGFLIDIAVPNTHNLQTTIAEKLSKYTELKDEITRLWRLQKVIIVPIVISSTGVIPKQLHQSLSTLNLPPNTYHLLQKAVILNTCRLVRKFLQCESDNIIQSAHNRLESNISIPALNPTDEHLA

SEQ ID NO: 16475 - protein, 1439 aa, Ochropleura plecta
MEMSNKKIYNLRSLPGERRGASGADAGCHSMRTIGGEELSKRAPTEKNVTAGRSDLNRRAHYVEATADSTGDDTISLFSSIPSTRPSYMTRRKASLSTTSTLDSVVRDVIPDSEIAPTTSASTKRRRWTPEMNMFILRTYFQLTLLDTDKRTYLEPLHLKFVEKFPDMQVSRQRIGDQRRAIINNKLLPQKAIDDIRKEVEKELDQLQSNHFTLQTQHTLDCNQQICTPTQIPPTTIEAHSTQNKTQTRMRWTSEQNEAIMRSYYRVTDLGTNETVYRKRMYDDFVSNFPSLAHLSEQRIADQRRAIINNKYISNDKLNSLKAEVAKELGPQTLNSHNNRDRFAGTINRNITNSQLTNRTEINSVEELTLNSQTSDNFELHTATDALPNPQINPERDVLIDDTFQQALDFFKETNPTNRIYIPKQKPSKNLARIISYLNKITLLENINNDTDFNTLQTIIYCSAWTAAKVNGARITLEPRESIRVPKTEYKPKWQRRLEQKIKDLRTKIGRMTQFMNGNSSRKLRKHVNKIIKQYKTHTIHEEPNTKAAHTLDTLKQKLCVVKGRLERYKACTLRKQQNTQFIHNEKLFYRNIRQTTTNIQHNIPHDSENTTPDPETVQQFWANIWEQPVCHNSQADWIQSELSNNNSNIQPMVFEHISPEIFHKVLSKLHNWKAPGSDHIHSYWYKKFTAIHCYLYNFINAFIQDPTSIPSFITSGTTFMIPKDHNDLSNPAKYRPITCLQTLYKIITSCISELIYQHIDTNNILAEQQKGCRKFSQGCKEQLIIDSVVLKKVQKTKSDLFTMYIDYKKAYDSVPHSWLMQVLEIYKIHPSIIAFLKIAMTTWTTVLRLTTPTKTIDTSPIKIQRGIFQGDALSPLWFCLALNPLSKILNSTSLGIPLNSNVDGQEETHGSILNHLMYMDDIKLFAKSQIQLEELANLTEKFTDDIKMEFGIDKCKINSVIAGQNYQHQYTLATGEQIEPLNEQETYKYLGYIQSSQIHYKDIKQKLKQQFQHRLNTILKTQLHSRNTIKAINTFAIPVLTYSFGIVNWTKTDLKNLQRKVNTTMTKFRKHHPRSCVQRLTLPRKEGGRGLIDILNLHNRQITTLRQYFFAKTETSTLHKLIAQNDKHLTPLNLKDTTEQRNERVTDDKMKCLEWTQKSLHGRHRQDLCQPNVDKEASNAWLNRGELFPETEGFMLAIQDQIIETKNFRKHIIKNLPNDTCRKCNSSAETIQHITGACKSIAQTDYKHRHDQVANVIHQKLAHQYNLIDTVVPYYKYTPEIVLENTTTKLYFDRAIFTDRTIHYNRPDITLINKINNTGFLIDIAVPNTHNLQTTIAEKLSKYTELKDEITRLWRLQKVTIVPIVISTTGVIPKQLHQSLSSLNLPATTYHLLQKAVILNTCRLVRKFLQCEIDNISQSAHNRVESISIPAPTDEHLA

SEQ ID NO: 16476 - protein, 1439 aa, Ochropleura plecta
MEMSNKRIYNLRSLPGERRGASGADAGCHSMRTIGGEELSKRAPTEKIVTAGRSDLNRRAHYVEATADSTGDDTISLFSSIPSTRPSYMTRRKVSLSTTSTLDSVVRDAIPDSEIAPTTSASTKRRRWTPEMNMFILRTYFQLTLLDTDKRTYLEPLHLKFVEKFPDMQVSRQRIGDQRRAIINNKLLPQKAIDDIRKEVEKELDQLQSNHFTLQTQHTLDCNQQIFTPTQIPPTTIEAHSTQNKTQTRMRWTSEQNEAIMRSYYRVTDLGTNETVYRKRMYDDFVSNFPSLAHLSEQRIADQRRAIINNKYISNDKLNSLKAEVAKELRPQTLNSHNNGDRFAGTINRNITNSQLTNRTEINSVEELTLNSQTSDNFELHTVTDVLPNPQINPERDVLIDDTFQQAFDFFKETNPTNRIYIPKQKPSKNLARIISYLNKITLLENINNDTDFNTLQTIIYCSAWTAAKVNGARITLEPRESIRVPKTEYKPKWQRRLEQKIKDLRTKIGRMTQFMNGNSSRKLRKHVNKIIKQYKTHTIHEEPNTKAAHTLDTLKQKLCVVKGRLERYKACTLRKQQNTQFIHNEKLFYRNIRQTTSNIQHNIPHDNENTTPDPETVKQFWANIWEQPVCHNSQADWIQSELSNNNSNIQPMVFEHISPEIFHKVLSKLHNWKAPGSDHIHSYWYKKFTAIHCYLYNFINTFIQDPTSIPSFITSGTTFMIPKDHNDLSNPAKYRPITCLQTLYKIITSCISELIYQHIDTNNILAEQQKGCRKFSQGCKEQLIIDSVVLKKVQKTKSDLFTMYIDYKKAYDSVPHSWLMQVLEIYKIHPSIIAFLKIAMTTWTTVLRLTTPTKTIDTSPIKIQRGIFQGDALSPLWFCLALNPLSKILNSTSLGIPLNSNVDGQGETHGSILNHLMYMDDIKLFAKSQIQLEELANLTEKFTDDIKMEFGIDKCKINSVRAGQNYQHQYTLATGEQIEPLNEQDTYKYLGYIQSSQIHYKDIKQKLKQQFQHRLNTILKTQLHSRNTIKAINTFAIPVLTYSFGIVNWTKTDLKNLQRKVNTTMTKFRKHHPRSCVQRLTLPRKEGGRGLIDILNLHNRQITTLRQYFFAKTETSTLHKLIAQNDKHLTPLNLKDTTEQRNERVTDDKTKCLEWTQKSLHGRHRQDLCQPNVDKEASNAWLNRGELFPETEGFMLAIQDQIIETKNFRKHIIKNLPNDTCRKCNSSAETIQHITGACKSIAQTDYKHRHDQVANVIHQKLAHQYNLIDTVVPYYKYTPEIVLENTTTKLYFDRALFTDRTIHYNRPDITLINKINNTGFLIDIAVPNTHNLQTTIAEKLSKYTELKDEITRLWRLQKVIIVPIVISTTGVIPKQLHQSLSSLNLPATTYHLLQKAVILNTCRLVRKFLQCEIDNISQSTHNRVESISIPAPTDEHLA

SEQ ID NO: 16477 - protein, 1439 aa, Ochropleura plecta
MEMSNKKIYNLRSLPGERRGASGADAGCHSMRTIGGEELSKRAPTEKNVTAGRSDLNRRAHYVEATADSTGDDTISLFSSIPSTRPSYMTRRKASLSTTSTLDSVVRDVIPDSEIAPTTSASTKRRRWTPEMNMFILRTYFQLTLLDTDKRTYLEPLHLKFVEKFPDMQVSRQRIGDQRRAIINNKLLPQKAIDDIRKEVEKELDQLQSNHFTLQTQHTLDCNQQICTPTQIPPTTIEAHSTQNKTQTRMRWTSEQNEAIMRSYYRVTDLGTNETVYRKRMYDDFVSNFPSLAHLSEQRIADQRRAIINNKYISNDKLNSLKAEVAKELGPQTLNSHNNRDRFAGTINRNITNSQLTNRTEINSVEELTLNSQTSDNFELHTATDALPNPQINPERDVLIDDTFQQALDFFKETNPTNRIYIPKQKPSKNLARIISYLNKITLLENINNNTDFNTLQTIIYCSAWTAAKVNGARITLEPRESIRVPKTEYKPKWQRRLEQKIKDLRTKIGRMTQFMNGNSSRKLRKHVNKIIKQYKTHTIHEEPNTKAAHTLDTLKQKLCVVKGRLERYKACTLRKQQNTQFIHNEKLFYRNIRQTTTNIQHNIPHDSENTTPDPETVKQFWANIWEQPVCHNSQADWIQSELSNNNSNIQPMVFEHISPEIFHKVLSKLHNWKAPGSDHIHSYWYKKFTAIHCYLYNFINAFIQDPTSIPSFITSGTTFMIPKDHNDLSNPAKYRPITCLQTLYKIITSCISELIYQHIDTNNILAEQQKGCRKFSQGCKEQLIIDSVVLKKVQKTKSDLFTMYIDYKKAYDSVPHSWLMQVLEIYKIHPSIIAFLKIAMTTWTTVLRLTTPTKTIDTSPIKIQRGIFQGDALSPLWFCLALNPLSKILNSTSLGIPLNSNVDGQEETHGSILNHLMYMDDIKLFAKSQIQLEELANLTEKFTDDIKMEFGIDKCKINSVIAGQNYQHQYTLATGEQIEPLNEQETYKYLGYIQSSQIHYKDIKQKLKQQFQHRLNTILKTQLHSRNTIKAINTFAIPVLTYSFGIVNWTKTDLKNLQRKVNTTMTKFRKHHPRSCVQRLTLPRKEGGRGLIDILNLHNRQITTLRQYFFAKTETSTLHKLIAQNDKHLTPLNLKDTTEQRNERVTDDKMKCLEWTQKSLHGRHRQDLCQPNVDKEASNAWLNRGELFPETEGFMLAIQDQIIETKNFRKHIIKNLPNDTCRKCNSSAETIQHITGACKSIAQTDYKHRHDQVANVIHQKLAHQYNLIDTVVPYYKYTPEIVLENTTTKLYFDRALFTDRTIHYNRPDITLINKINNTGFLIDIAVPNTHNLQTTIAEKLSKYTELKDEITRLWRLQKVTIVPIVISTTGVIPKQLHQSLSSLNLPATTYHLLQKAVILNTCRLVRKFLQCEIDNISQSAHNRVESISIPAPTDEHLA

SEQ ID NO: 16478 - protein, 931 aa, Xestia c-nigrum
MTQFVNGNSSRKLLKHVNKIIKQYKTHTIHEEPNTKAAHTLDTLKQKLCVVKGRLERYKACSLRKQQNTKFNNNEKLFYRNIRQTTTNIQHNTPHTNENSTPDPDTLKQFWARIWEQPVCHNSQADWIQSEVSDNNSNIQPMAFEHIPPEIFHKVLSKLHNWKAPGSDHIHGYWYKKFTAIHCYLYNFINTFIQDPKLIPSFVTSGTTFMIPKDQNDLSNPAKYRPITCLQTLYKIITSCISELIYEHIDANNILAEQQKGCRKFSQGCKEQLIIDSVVLRKVQKSKSDLFTMYIDYKKAYDSVPHSWLVQVLEIYKIHPSVIAFLKTVMTTWTTVLRLTTQTETKDTSPIKIQRGIFQGDALSPLWFCLALNPLSKILNTTSLGIPLNSVAVGQEETHGKTLNHLMYMDDIKLYAKSEDQLSELANLTEKFTHDIKMQFGIDKCKINSVRAGQNYQHQYTLATGEQIEPLDEQGTYKYLGYIQSSQIHYRDIKQKLKQQFQHRLNTILKTQLYSRNTVKAINTFAIPVLTYSFGIINWTKTDLKNLQRKVNTTMTKFRKHHPRSCIQRLTLPRKEGGRGLSDILNLHNRQISTLRQYFFAKTEFSTLHKLIAQNDQRLTPLNLNNITEQKNERVTDDKTKYLEWTQKSLHGRHRQDLCQPNVDKEASNAWLNRGELFPETEGFMLAIQDQVIETKNYRKHIIKNLPNDTCRKCNSSPEKIQHITGACKSIAQTDYKHRHDQVANIIHQKLAHQCKLVDTIVPYYKYSPETVLENNTTKLYFDRALFTDRTIHFNRPDITLINKVNNTGFLIDIAVPNTHNLQPTIAEKISKYTELKDEITRLWRLQKVIIVPIVISSTGVIPKQIHQSLSSLNLPDSTYYLLQKAVILNTCRLVRKFLQCESDNIIQSAYNCMEPNVSVPALNPTDEHLA

SEQ ID NO: 16479 - protein, 921 aa, Dendrolimus punctatus
MKLKDIRKKIGRLTQFIQGNRSRNITKHSKRIMEQYKTHTLHEEPNTQAAHVLDTLKQKLSVVTGRLQRYKDCSLRKQQNTQFNLNEKLFYRNIRNTTTNTQENCFNSGVHDSITPEALKSFWAGIWEKPMQHNIEAEQIPTDTYNNLQTMTYEFISIDILQKVIRYLHNWKSPGSDNIHSFWYKKFTTTHSNLHKYINSFIQDPTTIPSYLTMGTTYMIPKDPKDLSDPSKYRPITCLQTLYKIMTSCISEIIYNHIDTNKILAEQQKGCRKFSQGCKEQLTIDSVILKQVHKTKSNLFTMYIDYKKAYDSVPHSWLAKVLEIYKIHPTIITFLKTIMVKWSTVLRVSTIKETIETDPIQIQRGIFQGDALSPLWFCLALNPLSQLLNTTSHGYPLCLEKDRQTDIRESKLNHLLYMDDIKLYAATENELKDLADIVDKFSIDIKMEFGIDKCKINSIKNGQNYSHHYTTTTGDTIIPLCEQDVYKYLGYNQSLLIHHKDTKQKLTQQFQHRLNMILKTQLDSRNTVKAINTFVIPLLTYSFGIINWNKTEVKNLQRKINTTMTKFRKNHPRSCLQRLTLPRKEGGRGLIDILNLHNKQITTLRQYFFAKAQSSIIHKLIVQTDRKLTPLNLQNAAEPTNEKLTDDRTKITEWTQKSLHGRHRQDLCLEHVDKEASNAWLTRGELFPETEGFMIAIQDQVIETKNYRKHIIRNLAADYCRKCNSSPETIQHITGACKSIVQTDYKHRHDQVTNIIHQKLAHKYNLINTITPYYKYKPETVLENSTTKLYFDRAILTDRTIHYNRPDITLINRTTKTGYLIDIAIPNTHNIQTTISEKLTKYTELKDEITRLWHLQNVTIIPVVVSTTGVIPKLLHQSLKALDLPANSYHLMQKATILNTCRIVRKFLQGDTNDLLAGTTT

SEQ ID NO: 16480 - protein, 1393 aa, Dendrolimus kikuchii
MEMSKKVYNLRSLPGGRRGASGADAGCHSMRTIGDEGLSRRAPVDKTTTADRHELNRRTRVVETTADFLSDDTTSLFSSIPSTCPSYGTRKSSTVSTISIPDSVVQDVNFDTELAPTSGARKKWTQEMNKFILRTYFLLTALETDTKNYLESLHIKFTEKYPNMQVSRQRVGDQRRAIIRNKLLPQNTIDQIFNEVKQELTQLQAVVQNHTQPETHSQTHVSNQTTQNTADTRMKWTNQYNEAIMRSYYRTTNLGTIKTAYRKLMHTDLTQSYPLLANLSEQRIADQRRAIVNNQYISKERLTIIQQEIAKELEISNNTLINTYPSFNETPTLINNISQNTEHDINRIHTTSELILSGRHSKIDETFQKAFEYYTYTDPTSRAYIPKQKTSKNLAKIIDYINRITLKENITSDTDFLKFQTIIYCAAWTAAKVNGARITLQTRTDIQRKKKDYKPKWQTRLEMKLKDIRKKIGRLTQFIQGNRSRNITKHSERIMEQYKAHTLHEEPNTQAAHVLDTLKQKLSVVTGRLQRYKDCSLRKQQNTQFNLNEKLFYRNIRNTTTNTQENCFNSDVHDSITPEALKNFWAGIWEKPIQHNIEAEQISTDTFNNLQTMTYEFISTDILQKVIRYLHNWKSPGSDNIHSFWYKKFTTTHSNLHKYINSFIQDPTSIPSYLTMGTTYMIPKDPKDLSDPSKYRPITCLQTLYKIMTSCISEIIYNHIDTNQILAEQQKGCRKFSQGCKEQLTIDSVILKQVHKTKSNLFTMYIDYKKAYDSVPHSWLVKVLEIYKIHPTIITFLKTIMAKWSTVLRVSTIKETIETDPIQIQRGIFQGDALSPLWFCLALNPLSQLLNVTSHGYPICLEKDRQTDIRESKLNHLLYMDDIKLYAATENELKDLADIVDKFSIDIKMEFGIDKCKVNSVKNGQNYSHHYTTTTGDNIIPLCEWDVYKYLGYNQSLLIHHKDTKQKLTQQFQHRLNMILKTQLHSRNTVKAINTFVIPLLTYSFGIINWNKTEIKNLQRKINTTMTKFRKNHPRSCLQRLTLPRKEGGRGLIDILNLHNKQITTLRQYFFAKAQSSIIHKLIVQTDRKLTPLNLQNAAEQTNEKLTDDRTKITEWTQKSLHGRHRQDLCLEHVDKEASNAWLTRGELFPETEGFMIAIQDQVIETKNYRKHIIKNLAADYCRKCNSSPETIQHITGACKSIVQTEYKHRHDQVTNIIHQKLAHKYNLINTITPYYKYKPETVLENSTTKLYFDRAILTDRTIHYNRPDITLINKTTKTGYLIDIAIPNTHNIQTTISEKLTKYTELKDEITRLWHLQNVTIIPVVLSTTGVMPKLIHQSLKALDLPANSYHLMQKATILNTCRIVRKFLQGDTNEPTYNYTNISNQVAITTS

SEQ ID NO: 16481 - protein, 1094 aa, Noctua pronuba
MNNTNTQVTNDTEINSMEEPTPNTQTSDNIELNTITDILPNPQINPERDSLIDDTFQQALDFFKETSPTNRIYIPKQKPSKNLARIISYLNKIILPENVDKDTDFNTLQTVIYCSAWTVAKVNGARITFEPRESTRVPKTEYKPKWQRRLEQKVKDLRTKIGRMTQFINGNSSRKLRKHVNKIIKQYRTHTIHEEPNTKAAHTLDTLKQKLCVVKGRLERYKACSLRKQQNTKFNYNEKLFYRNIRQTTTNIQQHTPLANENNTPDPETLKQFWASIWEQPVCHNSQADWIQSEVSNNNSNIQPMAFEHISPEIFHKVLSRLHNWKAPGSDHIHSYWYKKFTAIHCYLYNIINTFIKDPKSIPSFVMSGTTFMIPKDHNDLSNPAKYRPITCLQTLYKIITSCISELIYEHIEANNILAEQQKGCRKFSQGCKEQLIIDSVVLRKVQKSKSDLFTMYIDYKKAYDSVPHSWLVQVLEIYKIHPSLIAFLKNAMTTWTTVLRLTTPTETKDTSPIKIQRGIFQGDALSPLWFCLALNPLSKILNSTSLGIPLNSIVDGQEETHGSTLNHLMYMDDIKLFAKSEDQLNELANLTEKFTNDIKMEFGIDKCKINSVKAGQNYQHQYTLETGEQIEPLDEHDTYKYLGYIQSSQIHYKDIKQKLKQQFQHRLNTILKTQLYSRNTIKAINTFAIPVLTYSFGIINWTKTDLKNLQRKVNTTMTKFRKHHPRSCVQRLTLPRKEGGRGLIDILNLHNRQITTLRQYFFAKTESSTLHKLIAQNDQRLTPLNLKDTTEQKNERVTDDKTKFLEWTQKSLHGRHRQDLCQPNVDKEASNAWLNRGELFPETEGFMLAIQDQVIETKNYRKHIIKNLPNDTCRKCNSSSETIQHITGACKPIAQTDYKHRHDQVANVIHQKLAHQYKLVDTVVPYYKYNPETVLENTTTKLYFDRALFTDRTIHYNRPDITLINKVNNTGFLIDIAVPNTHNLQTTIAEKLSKYTELKDEITRLWRLQKVIIVPIVISSTGVIPKQLHQSLSTLNLPPNTYHLLQKAVILNTCRLVRKFLQCESDNIIQSAHNRLESNISIPALNPTDEHLA

SEQ ID NO: 16482 - protein, 1422 aa, Ernsta colotes
MEPSSTSKYNLRSLLGGRRGAPGAGAGCYSLRDTGGEALSRRAPVTQYATAGRRELNRRAHGVDATADSSGDDTISLFSSIPSTRPSYMTRSTSTLSSVSTVVDVVPDVLPDYELAPTSTVSSTRRRWTPEMNMFILRTYLQLTAMNTDTKTYLEPLHLKFIEKFPDMQVSRQRVGDQRRAILRNKLLSQDIIDRIYNEVEEELNLLQANIPRDTQTQLHTPETQILQTRMRWTTEQNETILRLYYKITHLETNKTAYRQPLHRAFISAYPSLAHLSEQRLADQRRAIVYNKYISPTRLNEIKQQVAEELAINLDNPTINTTIIQMTNNTNDTNFSDTNTNFLRSIELSIPEESIPDRQQLDRNPEIDKQFQEAFEYYKNIEPTARNHIPKQKPSRKLAIIVNYLNQVTLPEHVNLDTEFITLQTAIYSAAWTAAKINGSKISLEPFLRSRTLQIDKRPNWQRRLERKLEDLRTKIARVTQYINGNRNRNLEKHVNKIREQYRIHSIHEEPNTHLSHTLDTLKQKLTVTSGRLRRYKECTLRKQQNSQFTNNEKQFYRNIRQTTSNVQENTNNINITPDPEDLQNFWGSIWEQPVYHNSQAEWIQTETDKNNTTTTDMTFNNIPIDIFKKVLQELHNWKAPGSDFLHSYWYKKFTSVHPYLHNYLNEFIKNPNTLPSYLTLGTTYMISKDSNDRTNPAKYRPITCLQTLYKIITSCISELIYEHIDGNKVLAEQQKGCRKYSQGCKEQLIIDSVILKQVQKNKSDLFSMYIDYRKAYDSVPHSWLIQVLKIYKINPTIISFLETTMEKWTTQLKLSTPNSTIETDPIKIQRGLFQGDALSPLWFCLALNPLSNILNSTEIGYQLKHKDTDGQTDTIENINHLLYMDDIKLYADTEYNLNKLANNTEKFSNDIKMDFGIDKCKINSIVAGKNYQHCYTLESGTQIEALDEQDTYKYLGYNQSHQIQYKETKLKLKQQFRHKLNAVLKTQLNSRNTIKAINTFAIPILTYSFGIINWSKSDLKALQRIVNTTMSKCRKHHPRSCSQRLTLPRKEGGRGLIDITNLHNKQIATLRQYFFSKLESSPLHHAVIATDQKLTPLNLKDNRTQNNEKLTDDKIKCAEWAGKSLHGRHYHDLCQSNVDKQASNAWLSRGELFPETEGFIMAIQDQVIETRNYQKHITKTLTSDTCRKCNSCPETIQHITGACKSIAQTDYKHRHDQIANIIHQKLAHQQNLISSLQPYYKYTPDSVLENSTSKLYFDRAILTDRTIHCNRPDITLINKNDKTAYLIDIAVPNTHNLQSTIAEKLTKYTELKDEIIRLWHLHKVTIVPVVLSTTGVIPTQLHQSIRSLNLPPNTYSLLQKAAILNTCRIVRKFLQTEHEGPLLSTTPPNTQLAIHPIIQLSTQNPTAHHTTHSLSTSQNSS

SEQ ID NO: 16483 - protein, 1358 aa, Codatractus cyledis
MRLRSGNRIPQAGTRNGESRPELENSGSPTYSGEGNVSLQLAQSRAGESCNTHLGDDTTSIFSSIPSTRPSYMTRRTSTLSSATSTLDSVVQDVNPDSELAPTSSGCLTRRRWTPDMNMFILRTYLYLTILESDTKMYLEPLHLKFIEKYPHMQVSRQRVGDQRRAIVRNKLLPQKTIDQIYQEVKEDLKPRPTSHSVSQDEAQHYTFKIINPQTTRIKWTTELNETIMRIYYRITQLDTNRTTYRKPLHEAFISAFPSMAHISEQRIADQRRAIISNKYIHDNRLKEIKQQVAEELSMNPNNTNEINNTQRHDFINNAEEPSRAVEPQNNLIQSEKNPKIDDIFQQSFNYFKDTNPTHRIYIPKQKTSKKLAKIVHYLNEIILPKNVNTETDFKTLQTIIYCAAWTAAKVNGAKLSFESSERSCENCKDYTPRWQRRLERRLLDLRAKIGRITHFINGNTNRKLEKHVNNIVESYKIHSIHEAPNTQLTHILDTLKQNLAVVTGRLSRYKACTLRKQQNNQFNNNEKRFYRKIREATTNTQENNSNNDNLPDPEDLQKFWAGIWEQPIRHNAQADWIHYETENNNRTTQEMFFEHIPIDTLKLVLTNLRNWKAPGSDCIHNYWYKKFTHIHVYLHHYLNEFIQKPNSLPQYITFGTTYMIPKDRNDQTNPAKYRPITCLQTIYKILTSCISELIYKHVDVNNILAEQQKGCRKFSQGCKEQLVIDSIILKQVQKKKSDLFTMYIDYKKAYDSVPHSWLIQILEIYKVHPKIISFLQVPMTNWTTRLKLSTPNTTIETQPIKIQRGIFQGDALSPLWFCLALNPLSNILNSTAVGYPLKYTKTNRQTDNSENLNHLLYMDDIMLYANTENNLYQIANITEQFTNDIKMEFGIDKCRINSIRAARNYQHNYTLVSGEQIEPLDEQETYKYLGYNQSRLIQHKDTKQKLKQQFRHRLNTILKTQLNARNTVKAINTFAIPVLTYSFGIIKWTKSDLKTIQRIINTTMTKFRKHHPRSCIQRLTLPRKEGGRGLTDVVKLYNKQILNLRQYFFHKSESSPLHKAIVQSDRKLTPLNLQSNTVQNNEKLTDDKTKLAEWAGKSLHGRHRHDLCQLNVDKDASNAWLSRGELFPETEGFMMAIQDQVIETKNYQKHIIKSLKSDTCRKCNSCPETIQHITGACKTIAQTDYKHRHDQVANVIHQKLAQQQNLITSNHPYYKYIPESVLENATTKLYFDRAILTDRTIHYNRPDITLINKINNTAYLVDIAIPNTHNLQTTIAEKLTKYTELKDEITRIWHLQKVTIVPIVLSTTGVIPKQLHESIKTLNLPSTTYKLLQKAVILNTCRIVRKFLQTEQETVAN

SEQ ID NO: 16484 - protein, 1442 aa, Noctua pronuba
MEMSNKRMYNLRSLPGERRGASGADAGCHSMRTIGGEELSKRAPTEKIVTAGRSKLNRRAHYVEATADSTGDDTTSLFSSVPSTRPSYMTRRTASLSTTSTLDTVVQDVILDNEIAPTTSAPSKRRRWTPEMNMFILRTYFQLTLLDTDKRTYLEPLHLKFIEKFPDMQVSRQRIGDQRRAIINNKLLPQKAIDNIRNEVEKELDQLQINHFTQQTQNAIDCTQSIFTPTQMPPSTIEAHGTQNKTQTRMRWTSEQNEAIMRSYYRVTDLGTNETAYRKRMYDDFIRNFPLLARLSEQRIADQRRAIINNKYISNDKLNSLKAEVAEELGLRTLNAHNNRDRFVGITSINNTNNQLTNNTEINSIEEPTPNTQTSDNIELYTITDILPNPQINPERDSLIDDTFQQALEFFKETSPTNRIYIPKQKPSKNLARIISYFNKIILPENVDKDTDFNTLQTVIYCSAWTVAKVNGARITFEPRESTRVPKTEYKPKWQRRLEQKVKDLRTKIGRMTQFMNGNSSRKLRKHVNKIIKQYRTHTIHEEPNTKAAHTLDTLKQKLCVVKGRLERYKACSLRKQQNTNFNHNEKLFYRNIRQTTTNIQQNTPHANENNTPDPETLKQFWASIWEQPVYHNSQADWIQSEVSNNNSNIQPMAFEHISPEIFHKVLSRLHNWKAPGSDHIHSYWYKKFTAIHCYLYNLINTFIKDPKSIPSFVTSGTTFMIPKDHNDLSNPAKYRPITCLQTLYKIITSCISELIYEHIDANNILAEQQKGCRKFSQGCKEQLIIDSVVLRKVQKSKSDLFTMYIDYKKAYDSVPHSWLVQVLEIYKIHPSVIAFLKTAMTTWTTVLRLTTPTETKDTSPIKIQRGIFQGDALSPLWFCLALNPLSKILNSTSLGIPLNSIVDGQEETHGSTLNHLMYMDDIKLFAKSEDQLNELANLTEKFTTDIKMEFGIDKCKINSVRAGQNYQHLYTLETGEQIEPLDEKDTYKYLGYIQSSQIHYKDIKQKLKQQFQHRLNIILKTQLYSRNTIKAINTFAIPVLTYSFGIINWTKTDLKNLQRKINTTMTKFRKHHPRSCVQRLTLPRKEGGRGLIDILNLHNRQITTLRQYFFAKTESSTLHKLIAQNDQRLTPLNLKDTTEQKNERVTDDKTKFLEWTQKSLHGRHRQDLCQPNVDKEASNAWLNRGELFPETEGFMLAIQDQVIETKNYRKHIIKNLPNDTCRKCNSSSETIQHITGACKSIAQTDYKHRHDQVANVIHQKLAHQYKLVDTVVPYYKYNPETVLENTTTKLYFDRALFTDRTIHYNRPDITLINKVNNTGFLIDIAVPNTHNLQTTIAEKLSKYTELKDEITRLWRLHKVIIVPIVISSTGVIPKQLHQSLSSLNLPPNTYHLLQKAVILNTCRLVRKFLQCESDNIIQSAHNRVESNISIPALNPTDEHLA

SEQ ID NO: 16485 - protein, 1390 aa, Laothoe populi
MESNEKRYNLRSLPGGRRGAPGAGAGCLSLRDTGGVALSRRARATQDATAGRCELSRRTRGVEATADLTGEDTVSLFSAIPSTRPSYMTRQTKTLSTSSTLDGVVQDVDLDSELASTAGASSTRRRWTSQMNQFILRTYLQLTTLDTDTKAYLEPLHLKFIEKFPNMHEVSRQRVGDQRRAIIRNNLLPQNIIDKVYNEVKQEIANLHTRQTQLQVFTIAPNCNTHTPNNVVTTQKLTNRMRWTTEQNEAIMRSYYRVTNLETNKTAYRKLLHRDFLNSFPSLAHLSEQRIADQRRIIVNNKYISNDRLHSIKQAVAEEFLQSSTNKNTYSDITQHSHTNCNETVFLKNIDIYIPEDHTLNLETPENSYPEIDETFQKAINFYKNTDPTSRTYIPKQKPSKKLAKITHYLNNKTLPEYITQDTDFKTFQTVVYCAAWTAAKVNGSKMNLTGSSQYTKKQHKPHWQRRLEHRLDDLRIKIGRLTQFINGNRNKKLTKHVEQIIEQYKIHSIHEEPNTHLSQTLDTLKQKLSVITGRLQRYKNCTLRKQQNNLFSNNEKHFYRTIKQTTTNTQHNTEIKINNSPDLGKLKDFWAKIWEKSETHNAQANWIEVETINHDRYAEMNFQHIPLGTFIKVLQNLHNWKAPGSDYIHSYWYKKFTHIHPYLHNFINDFLQDPSKVPSYITSGITFMIPKDPNDATNPAKYRPITCLQILYKIMTSCITELVYQHIDANNILAEQQKGCRKFSQGCKEQLIIDSVILKHVQKTKANLFSMYIDYKKAYDSVPHSWLLHVLDIYKIHPKIIAFLETMMKNWTTRLRLTTPTETIIETDSIKIQRGIFQGDSLSPLWFCLALNPLSNILNSTELGYPLNYNTSTDGVTDKQFITNKLNHLLYMDDIKLYAQDENKLYQLANLTEQFSKDIKMEFGIDKCKINSIKSGHHYQHHYTLETGEKIDPLSEQDTYKYLGYNQSLQIHHKDTKQNLKLQFRHRLNTILKTQLCSRNTIKAINSFAIPILTYSFGIISRTKSELKNLQRIVNTSMTRFRKHHPRSCIQRLTLPRNEGGRGLIDIVNSQNKQIITLRQYFFNKMTSSTLHNSIAQNDHKFTPLNLKDTTAQRNEKLTYDKEKIEEWSRKSLHGRHRHDLSQPNVDKEASNAWLSRGELFPETEGFMTAIQDQVIETRNYKKYIMKIPNLASDMCRKCNSSSETIQHITGACKSIAQTDYKFRHDQVANIIHQKLAAKYKLITTTPITPYYKYTPDTVLENPSHKLYFDRAILTDKTVHYNRPDITLVDKINKTAYIIDIAIPNTHNLQTTISEKLTKYVDLKDEIIRMWKLQKVSIVPIVLSTTGIIPKQLSQSLGLLDLPQQTYLQVQKAVVLNTCRIVRKFMQTD

SEQ ID NO: 16486 - protein, 1390 aa, Laothoe populi
MESNEKRYNLRSLPGGRRGAPGAGAGCLSLRDTGGVALSRRARATQDATAGRCELSRRTRGVEATADLTGEDTVSLFSSIPSTRPSYMTRQTKTLSTSSTLDGVVQDVDLDSELASTAGASSTRRRWTSQMNQFILRTYLQLTTLDTDTKAYLEPLHLKFIEKFPNMHEVSRQRVGDQRRAIIRNNLLPQNIIDKVYNEVKQEIANLHTRQTQLQVFTIAPNCNTQTPNNVVTTQKLTNRMRWTTEQNEAIMRSYYRVTNLETNKTAYRKLLHRDFLNSFPSLAHLSEQRIADQRRIIVNNKYISNDRLHSIKQAVAEEFLQSSTNKNTYSGITQHSHTNCNETVFLKNIDIYIPEDHTLNLETPENSYHEIDETFQKAINFYKNTDPTSRTYIPKQKPSKKLAKITHYLNNKTLPEYITQDTDFKTFQTVVYCAAWTAAKVNGSKMNLTGSSQYNKKQHKPHWQRRLEHRLDDLRIKIGRLTQFINGNRNKKLTKHVEQIIEQYKIHSIHEEPNTHLSQTLDTLKQKLSVITGRLQRYKNCTLRKQQNNLFSNNEKHFYRTIKQTTTNTQHNTEIKINNSPDLGKLKDFWAKIWEKSETHNAQANWIEVETINHDRYAEMNFQHIPLGTFIKVLQNLHNWKAPGSDYIHSYWYKKFTHIHPYLHNFINDFLQDPSKVPSYITSGITFMIPKDPNDATNPAKYRPITCLQILYKIMTSCITELVYQHIDANNILAEQQKGCRKFSQGCKEQLIIDSVILKHVQKTKANLFSMYIDYKKAYDSVPHSWLLHVLDIYKIHPKIIAFLETMMKNWTTRLRLTTPTETIIETDSIKIQRGIFQGDSLSPLWFCLALNPLSNILNSTELGYPLNYNTSTDGVTDKQLITNKLNHLLYMDDIKLYAQDENKLYQLANLTEQFSKDIKMEFGIDKCKINSIKSGHHYQHHYTLETGEKIDPLSEQDTYKYLGYNQSLQIHHKDTKQNLKLQFRHRLNTILKTQLCSRNTIKAINSFAIPILTYSFGIISWTKSELKNLQRIVNTSMTRFRKHHPRSCIQRLTLPRNEGGRGLIDIVNLQNKQIITLRQYFFNKMTSSTLHNSIAQNDHKFTPLNLKDTTAQRNEKLTYDKEKIEEWSRKSLHGRHRHDLSQPNVDKEASNAWLSRGELFPETEGFMTAIQDQVIETRNYKKYIMKIPNLASDMCRKCNSSSETIQHITGACKSIAQTDYKFRHDQVANIIHQKLAAKYKLITTTPITPYYKYTPDTVLENPSHKLYFDRAILTDKTVHYNRPDITLVDKINKTAYIIDIAIPNTHNLQTTISEKLTKYVDLKDEIIRMWKLQKVSIVPIVLSTTGIIPKQLSQSLGLLDLPQQTYLQVQKAVVLNTCRIVRKFMQTD

SEQ ID NO: 16487 - protein, 1390 aa, Laothoe populi
MESNEKRYNLRSLPGGRRGAPGAGAGCLSLRDTGGVALSRRARATQDATAGRCELSRRTRGVEATADLTGEDTVSLFSSIPSTRPSYMTRQTKTLSTSSTLDGVVQDVDLDSELASTAGASSTRRRWTSQMNQFILRTYLQLTTLDTDTKAYLEPLHLKFIEKFPNMHEVSRQRVGDQRRAIIRNNLLPQNIIDKVYNEVKQEIANLHTRQTQLQVFTIAPNCNTQTPNNVVTTQKLTNRMRWTTEQNEAIMRSYYRVTNLETNKIAYRKLLHRDFLNSFPSLAHLSEQRIADQRRIIVNNKYISNDRLHSIKQAVAEEFSQSSTNKNTYSGITQHSHTNCNETVFLKNIDIYIPEDHTLNLETPENSYPEIDETFQKAINFYKNTDPTSRTYIPKQKPSKKLAKITHYLNNKTLPEYITQDTDFKTFQTVVYCAAWTAAKVNGSKMNLTGSSQYTKKQHKPHWQRRLEHRLDDLRIKIGRLTQFINGNRNKKLTKHVEQIIEQYKIHSIHEEPNTHLSQTLDTLKQKLSVITGRLQRYKNCTLRKQQNNLFSNNEKHFYRTIKQTTTNTQHNTEIKINNSPDLGKLKDFWAKIWEKSETHNAQANWIEVETINHDRYAEMNFQHIPLGTFIKVLQNLHNWKAPGSDYIHSYWYKKFTHIHPYLHNFINDFLQDPSKVPSYITSGITFMIPKDPNDATNPAKYRPITCLQTLYKIMTSCITELVYQHIDANNILAEQQKGCRKFSQGCKEQLIIDSVILKHVQKTKANLFSMYIDYKKAYDSVPHSWLLHVLDIYKIHPKIIAFLETMMKNWTTRLRLTTPTETIIETDSIKIQRGIFQGDSLSPLWFCLALNPLSNILNSTELGYPLNYNTSTDGVTDKQFITNKLNHLLYMDDIKLYAQDENKLYQLANLTEQFSKDIKMEFGIDKCKINSIKSGHHYQHHYTLETGEKIDPLSEQDTYKYLGYNQSLQIHHKDTKQNLKLQFRHRLNTILKTQLCSRNTIKAINSFAIPILTYSFGIISWTKSELKNLQRIVNTSMTRFRKHHPRSCIQRLTLPRNEGGRGLIDIVNLQNKQIITLRQYFFNKMTSSTLHNSIAQNDHKFTPLNLKDTTAQRNEKLTYDKEKIEEWSRKSLHGRHRHDLSQPNVDKEASNAWLSRGELFPETEGFMTAIQDQVIETRNYKKYIMKIPNLASDMCRKCNSSSETIQHITGACKSIAQTDYKFRHDQVANIIHQKLAAKYKLITTTPITPYYKYTPDTVLENPSHKLYFDRAILTDKTVHYNRPDITLVDKINKTAYIIDIAIPNTHNLQTTISEKLTKYVDLKDEIIRMWKLQKVSIVPIVLSTTGIIPKQLSQSLGLLDLPQQTYLQVQKAVVLNTCRIVRKFMQAD

SEQ ID NO: 16488 - protein, 938 aa, Laothoe populi
MNLTGSSQYAKKQHKPYWQRRLEHRLDDLRIKIGRLTQFINGNRNKKLTKHVEQIIEQYKIHSIHEEPNTHLSQTLDTLKQKLSVITGRLQRYKNCTLRKQQNNLFSNNEKHFYRTIKQTTTNTQHNTEIKINNSPDLGKLKDFLGKIWEKSETHNAQANWIEVETINHDRYAEMNFQHIPLGTFIKVLQNLHNWKAPGSDYIHSYWYKKFTHIHPYLHNFINDFLQDPSKVPSYITSGITFMIPKDPNDATNPAKYRPITCLQILYKIMTSCITELVYQHIDANNILAEQQKGCRKFSQGCKEQLIIDSVILKHVQKTKANLFSMYIDYKKAYDSVPHSWLLHVLDIYKIHPKIIAFLETMMKNWTTRLRLTTPTETIIETDSIKIQRGIFQGDSLSPLWFCLALNPLSNILNSTELGYPLNYNTSTDGVTDKQFITNKLNHLLYMDDIKLYDQDENKLYQLANLTEQFSKDIKMEFGIDKCKINSIKSGHHYQHHYTLETGEKIDPLSEQDTYKYLRYNQSLQIHHKDTKQNLKLQFRHRLNTILKTQLCSRNTIKAINSFAIPILTYSFGIISWTKSELKNLQRIVNTSMTRFRKHHPRSCIQRLTLPRNEGGRGLIDIVNLQNKQIITLRQYFFNKMTSSTLHNSIAQNDHKFTPLNLKDTTAQRNEKLTYDKEKIEEWSRKSLHGRHRHDLSQPNVDKEASNAWLSRGELFPETEGFMTAIQDQVIETRNYKKYIMKIPNLASDMCRKCNSSSETIQHITGACKSIAQTDYKFRHDQVANIIHQKLAAKYKLITTTPYYKYTPDTVLENPSHKLYFDRAILTDKTVHYNRPDITLVDKINKTAYIIDIAIPNTHNLQTTISEKLTKYVDLKDEIIRMWKLQKVSIVLSTTGIIPKQLSQSLGLLDLPQQTYLQVQKAVVLNTCRIVRKFMQTD

SEQ ID NO: 16489 - protein, 1419 aa, Hestina assimilis
MEPHERRYNLRSLPGGRRGAPGAGAGCFSLRDTGGAALSRRALATQDATAGHCGLSRRTHSVDATADLSGDDTISLFSSIPSTRPSYMTRRTKTLSTTSTLDGVVQDVNLDSDPAPISGVSGTRRRWTSEMNQFILRTYLQLTILDTDTKTYLESLHLKFIEKFPNMHDVSRQRVGDQRRAIIRNNLLPQNTINKIYNEVREEIANLQTLNTNNIHTHKENSSGSPQSNTQTLISFSTTNTQNPRTRMKWTTEQNEAIMRSYYRVTSIETNKTAYRKLLHKDFINTFPSLAHLSEQRIADQRRTIVNNNYISKDRLITIKETVAKELPQASTDRDTYNKNTVDSNSNSNVTHPRQMVNIELNAPKDQGVNIDVHEHRYPEIDETFAQAIDYYKNTEPTSRSYIPKQKPSKKLAKIINYLNTKTLPENITQDTEFHTFQTVLYCAAWTAAKENGSKMTLKTTNTSKNIKKQHKPHWQIRLERRLDDLRIKIGRLTQFINGNRNRKLTKHVEKIIEKYKIHSIHEEPNTHLIQILDTLKQKLSLITARLQRYKNCTLRKQQNTLFTHNERHFYRTIKQTSTNIQDNNTENRGNKYPDPENLKDFWKGIWEETEQHNTQSNWIQAETKNNERYAHMNFEHISVDTLTKVLHNLHSWKAPGSDNIHSYWYKKLTYIHTHLHKYINNFLQDPSKVPSYITSGTTFMIPKDVNDTANPAKYRPITCLQTLYKIITSCITELVYHHINTNNILAEQQKGCRRFSQGCKEQLIIDSVILKHVQKTKANVFTMYIDYKKAYDSVPHSWLLHILEIYKIHPKIISFLKTIMKNWTTRLKLNTSFETIETDPIKIKRGIFQGDSLSPLWFCLALNPLSSILNSTAFGYPLKYTITDGDTDKQTTTSKLNHLLYMDDIKLYAQDEEQLNQLANLTEQFSNDIKMEFGIDKCKINSIKAGQKYQHQYTLQNGENIDPLNEQDTYKYLGYNQSLQIHHKDTKQTLKQQFHHRLNTILKTQLYSRNTIKAINTFAIPILTYSFGILNWTKSELKSLQRMINTSMTRFRKHHPRSCIQRLTLPRSEGGRGLIDIINLHNRQILTLRQYFFNKKTSSPLHNSIAQNDHNFTPLNLKQSTGHRNEKLTDDKAKIEEWNRKSLHGRHRRDLSQSNVDKDASNAWLRRGELFPETEGFMTAIQDQVIETRNYKKIIMKLPNAPSDICRKCNSSSETIQHITGACKSIAQTDYKFRHDQVAKIIHQKLASKYKLITDAPTTPYYKYNPETVLENANHKLYFDRAILTDKTVHYNRPDITMVDKINKTAYVIDIAIPNTHNLQATISEKLTKYVDLKDEITRMWRLQKVYIVPIVLSTTGVIPKQLSQSIHILNLPNQTYLQLQKAVILSTCRIVRKFMQTESSHFLNTNSVHTPSDNHLA

SEQ ID NO: 16490 - protein, 1399 aa, Hemaris fuciformis
MVTQLWSMENHRYNLRSLPGGRRGAPGAGAGCFSMRNTGGAALSRRAHAIQNTTAGRHGLTRRTHDVEATADASEDDATVSLFSSIPSTCPSYMTRQTPTLSTSSLDGVVQDVELDTDLVPTTSNTNTRRRWTSEMNQFILRTYLQLTSLDTDRKNYLEPLHTKFTEKFPHMNVSRQRVGDQRRAIVRNKLIPQNIIDVIYNDVKTEISGLIVPQTATSSSQLNNSYNSKTRMRWTTEQNEFIMRSYYRITNLETNKTAYRQLLHRDFISKFPTLSHLSEQRIADQRRTIVANKYVSDDRLSTIKEEVAMELSLNTNNISPVPTCAQDPDGSSHDIPALNDPLISEPEEHTTNTELSDTRDEHIDKTFQKALIFFKNTDPTNRMYIPKQKPSKNFAKIVQYLNKITLPENIDQNTDFNTFQTIIYSAAWTAVKLNGSKISLDSVEQSNNSRKEFKPQWQIRLERKLDNLRVKIGRLTQYINGNRNKKLTGHVNKIIEEYKTHTLHEEPNTRLTHTLDTLKQKLSVVTGRLRRYKNCTLRKQQNSRFNNNEKQFYRFIRQKTANIQINDPINNLNNSPDPEDLKKFWTGIWGTTEKHNSQSDWIGNETVNNSSYTQMDFQHIPLDIFNTVLRKLHNWKAPGSDYIHSYWYKKFTYLHPYLHNYINDFLLEPSKMPSYITSGITYMIPKNPNDLINPANYRPITCLQTFYKIITSCLSELIYHHIDSNNILAEQQKGCRRFSQGCKEQLIIDSVVHRHAQKNKTDLFTMYIDYKKAYDSVPHSWLLQSLQIYKIHPKIIVFLETIMKNWTTRLKVSTPIKTIETDPIAIQRGIFQGDALSPLWFCLALNPLSNILNSTSFGYPLRHQNLESETQSLVTHKLNHLLYMDDIKLYAKNEYQLQELASLTEQFSKDIKMEFGIDKCKINSIKSGRPFEHNYKLETGEIINALNENETYKYLGYHQSTQIHHKEIKHKLKQQFQHRINTILKTQLHARNTIKAINTFAIPILTYSFGIIKWTKSDLKNLQRLINTSMTRLRKHHPRSCIQRLTLPRKEGGRGLIDITNLHNTQIKTLRQYFFDKINSSTLHKSIVDNDSNFTPLNMKDTTVQKNEQLTDDQTKISEWIQKSLHGRHRQDLSQPNVDKEASNAWLSHGELFPETEGFLQAIQDQVIETRNYQKHIIKNLKSDACRKCNSSPETIQHITGACKAITQTDYKHRHDQVANIIHQKLAFNYKMIQKTQPYYKYSPETVLENATTKLYFDRAILTDRTVPYNRPDITLINKINKTGYLIDIAVPNTHNLQTTIAEKLTKYVELKDEITRLWHLSKVTIVPIVLSSTGVIPKQLHQSLKTLNLPSSTYFLLQKAAILNTCRIVRKFLQTDPCEATFNSRTITENQPDTHLA

SEQ ID NO: 16491 - protein, 1399 aa, Hemaris fuciformis
MVTQLWSMENHRYNLRSLPGGRRGAPGAGAGCFSMRNTGGAALSRRAHAFQNTTAGRHGLTRRTHDVEATADASEDDATVSLFSSIPSTCPSYMTRQTPTLSTSSLDGVVQDVELDTDLVPTTSNTNTRRRWTSEMNQFILRTYLQLTSLDTDRKNYLEPLHTKFTEKFPHMNVSRQRVGDQRRAIVRNKLIPQNIIDVIYNDVKTEISGLIVPQTATSSSQLNNSYNSKTRMRWTTEQNEFIMRSYYRITNLETNKTAYRQLLHRDFISKFPTLSHLSEQRIADQRRTIVANKYVSDDRLSTIKEEVAMELSLNTNNISPVPTCAQDPDGSSHDIPALNDPLISEPEEHTTNTELSDTRDEHIDKTFQKALIFFKNTDPTNRMYIPKQKPSKNFAKIVQYLNKITLPENIDQNTDFNTFQTIIYSAAWTAVKLNGSKISLDSVEQSNNSRKEFKPQWQIRLERKLDNLRVKIGRLTQYINGNRNKKLTGHVNKIIEEYKTHTLHEEPNTRLTHTLDTLKQKLSVVTGRLRRYKNCTLRKQQNSRFNNNEKQFYRFIRQKTANIQINDPINNLNNSPDPEDLKKFWTGIWGTTEKHNSQSDWIGNETVNNSSYTQMDFQHIPLDIFNTVLRKLHNWKAPGSDYIHSYWYKKFTYLHPYLHNYINDFLLEPSKMPSYITSGITYMIPKNPNDLMNPANYRPITCLQTFYKIITSCLSELIYHHIDSNNILAEQQKGCRRFSQGCKEQLIIDSVVHRHAQKNKTDLFTMYIDYKKAYDSVPHSWLLQSLQIYKIHPKIIVFLETIMKNWTTRLKVSTPIKTIETDPIAIQRGIFQGDALSPLWFCLALNPLSNILNSTSFGYPLRHQNLESDTQSLVTHKLNHLLYMDDIKLYAENEYQLQELASLTEQFSKDIKMEFGIDKCKINSIKSGRPFEHNYKLETGEIINALNENETYKYLGYHQSTQIHHKEIKHKLKQQFQHRINTILKTQLHARNTIKAINTFAIPILTYSFGIIKWTKSDLKNLQRLINTSMTRFRKHHPRSCTQRLTLPRKEGGRGLIDITNLHNTQIKTLRQYFFDKINSSTLHKSIVDNDSNFTPLNMKDTTVQKNEQLTDDQTKISEWIQKSLHGRHRQDLSQPNVDKEASNAWLSHGELFPETEGFLQAIQDQVIETRNYQKHIIKNLKSDACRKCNSSPETIQHITGACKAITQTDYKHRHDQVANIIHQKLAFNYKMIQKTQPYYKYSPETVLENATTKLYFDRAILTDRTVPYNRPDITLINKINKTGYLIDIAVPNTHNLQTTIAEKLTKYVELKDEITRLWHLSKVTIVPIVLSSTGVIPKQLHQSLKTLNLPSSTYFLLQKAAILNTCRIVRKFLQTDPCESTFNSRTITENQPDTHLA

SEQ ID NO: 16492 - protein, 1399 aa, Hemaris fuciformis
MVTQLWSMENHRYNLRSLPGGRRGAPGAGAGCFSMRNTGGAALSRRAHAIQNTTAGRHGLTRRTHDVEATADASEDDATVSLFSSIPSTCPSYMTRQTPTLSTSSLDGVVQDVELDTDLVPTTSNTNTRRRWTSEMNQFILRTYLQLTSLDTDRKNYLEPLHTKFTEKFPHMNVSRQRVGDQRRAIVRNKLIPQNIIDVIYNDVKTEISGLIVPQTATSSSQLNNSYNSKTRMRWTTEQNEFIMRSYYRITNLETNKTAYRQLLHRDFISKFPTLSHLSEQRIADQRRTIVANKYVSDDRLSTIKEEVAMELSLNTNNISPVPTCAQDPDGSSHDIPALNDPLISEPEEHTTNTELSDTRDEHIDKTFQKALIFFKNTDPTNRMYIPKQKPSKNFAKIVQYLNKITLPENIDQNTDFNTFQTIIYSAAWTAVKLNGSKISLDSVEQSNNSRKEFKPQWQIRLERKLDNLRVKIGRLTQYINGNRNKKLTGHVNKIIEEYKTHTLHEEPNTRLTHTLDTLKQKLSVVTGRLRRYKNCTLRKQQNSRFNNNEKQFYRFIRQKTANIQINDPINNLNNSPDPEDLKKFWTGIWGTTEKHNSQSDWIGNETVNNSSYTQMDFQHIPLDIFNTVLRKLHNWKAPGSDYIHSYWYKKFTYLHPYLHNYINDFLLEPSKMPSYITSGITYMIPKNPNDLMNPANYRPITCLQTFYKIITSCLSELIYHHIDSNNILAEQQKGCRRFSQGCKEQLIIDSVVHRHAQKNKTDLFTMYIDYKKAYDSVPHSWLLQSLQIYKIHPKIIVFLETIMKNWTTRLKVSTPIKTIETGPIAIQRGIFQGDALSPLWFCLALNPLSNILNSTSFGYPLRHQNLESDTQSFVTHKLNHLLYMDDIKLYAENEYQLQELASLTEQFSKDIKMEFGIDKCKINSIKSGRPFEHNYKLETGEIINALNENETYKYLGYHQSTQIHHKEIKHKLKQQFQHRINTILKTQLHARNTIKAINTFAIPILTYSFGIIKWTKSDLKNLQRLINTSMTRFRKHHPRSCIQRLTLPRKEGGRGLIDITNLHNTQIKTLRQYFFDKINSSTLHKSIVDNDSNFTPLNMKDTTVQKNEQLIDDQTKISEWIQKSLHGRHRQDLSQLNVDKEASNAWLSHGELFPETEGFLQAIQDQVIETRNYQKHIIKNLKSDACRKCNSSPETIQHITGACKAITQTDYKHRHDQVANIIHQKLAFNYKMIQKTQPYYKYSPETVLENATTKLYFDRAILTDRTVPYNRPDITLINKINKTGYLIDIAVPNTHNLQTTIAEKLTKYVELKDEITRLWHLSKVTIVPIVLSSTGVIPKQLHQSLKTLNLPSSTYFLLQKAAILNTCRIVRKFLQTDPCESTFNSRTITENQPDTHLA

SEQ ID NO: 16493 - protein, 784 aa, Hemaris fuciformis
MDFQHIPLDIFNTVLRKLHNWKAPGSDYIHSYWYKKFTYLHPYLHNYINDFLLEPSKMPSYITSGITYMIPKNPNDLMNPANYRPITCLQTFYKIITSCLSELIYHHIDSNNILAEQQKGCRRFSQGCKEQLIIDSVVHRHAQKNKTDLFTMYIDYKKAYDSVPHSWLLQSLQIYKIHPKIIVFLETIMKNWTTRLKVSTPIKTIETDPIAIQRGIFQGDALSPLWFCLALNPLSNILNSTSFGYPLRHQNLESETQSLVTHKLNHLLYMDDIKLYAENEYQLQELASLTEQFSKDIKMEFGIDKCKINSIKSGRPFEHNYKLETGEIINALNENETYKYLGYHQSTQIHHKEIKHKLKQQFQHRINTILKTQLHARNTIKAINTFAIPILTYSFGIIKWTKSDLKNLQRLINTSMTRFRKHHPRSCIQRLTLPRKEGGRGLIDITNLHNTQIKTLRQYFFDKINSSTLHKSIVDNDSNFTPLNMKDTTVQKNEQLTDDQTKISEWIQKSLHGRHRQDLSQPNVDKEASNAWLSHGELFPETEGFLQAIQDQVIETRNYQKHIIKNLKSDACRKCNSSPETIQHITGACKAITQTDYKHRHDQVANIIHQKLAFNYKMIQKTQPYYKYSPETVLENATTKLYFDRAILTDRTVPYNRPDITLINKINKTGYLIDIAVPNTHNLQTTIAEKLTKYVELKDEITRLWHLSKVTIVPIVLSSTGVIPKQLHQSLKTLNLPSSTYFLLQKAAILNTCRIVRKFLQTDPCESTFNSRTITENQPDTHLA

SEQ ID NO: 16494 - protein, 1232 aa, Hemaris fuciformis
MTRQTPTLSTSSLDGVVQDVELDTDLVPTTSNTNTRRRWTSEMNQFILRTYLQLTSLDTDRKNYLEPLHTKFTEKFPHMNVSRQRVGDQRRAIVRNKLIPQNIIDVIYNDVKTEISGLIVPQTATSSSQLNNSYNSKTRMRWTTEQNEFIMRSYYRITNLETNKTAYRQLLHRDFISKFPTLSHLSEQRIADQRRTIVANKYVSDDRLSTIKEEVAMELSLNTNNISPVPTCAQDPDGSSHDIPALNDPLISEPEEHTTNTELSDTRDEHIDKTFQKALIFFKNTDPTNRMYIPKQKPSKNFAKIVQYLNKITLPENIDQNTDFNTFQTIIYSAAWTAVKLNGSKISLDSVEQSNNSRKEFKPQWQIRLERKLDNLRVKIGRLTQFYRFIRQKTANIQINDPINNLNNSPDPEDLKKFWTGIWGTTEKHNSQSDWIGNETVNNSSYTQMDFQHIPLDIFNTVLRKLHNWKAPGSDYIHSYWYKKFTYLHPYLHNYINDFLLEPSKMPSYITSGITYMIPKNPNDLINPANYRPITCLQTFYKIITSCLSELIYHHIDSNNILAEQQKGCRRFSQGCKEQLIIDSVVHRHAQKNKTDLFTMYIDYKKAYDSVPHSWLLQSLQIYKIHPKIIVFLETIMKNWTTRLKVSTPIKTIETDPIAIQRGIFQGDALSPLWFCLALNPLSNILNSTSFGYPLRHQNLESETQSLVTHKLNHLLYMDDIKLYAENEYQLQELASLTEQFSKDIKMEFGIDKCKINSIKSGRPFEHNYKLETGEIINALNENETYKYLGYHQSTQIHHKEIKHKLKQQFQHRINTILKTQLHARNTIKAINTFAIPILTYSFGIIKWTKSDLKNLQRLINTSMTRLRKHHPRSCIQRLTLPRKEGGRGLIDITNLHNTQIKTLRQYFFDKINSSTLHKSIVDNDSNFTPLNMKDTTVQKNEQLTDDQTKISEWIQKSLHGRHRQDLSQPNVDKEASNAWLSHGELFPETEGFLQAIQDQVIETRNYQKHIIKNLKSDACRKCNSSPETIQHITGACKAITQTDYKHRHDQVANIIHQKLAFNYKMIQKTQPYYKYSPETVLENATTKLYFDRAILTDRTVPYNRPDITLINKINKTGYLIDIAVPNTHNLQTTIAEKLTKYVELKDEITRLWHLSKVTIVPIVLSSTGVIPKQLHQSLKTLNLPSSTYFLLQKAAILNTCRIVRKFLQTDPCEPTFNSRTITENQPDTHLA

SEQ ID NO: 16495 - protein, 1349 aa, Hemaris fuciformis
MVTQLWSMENHRYNLRSLPGGRRGAPGAGAGCFSMRNTGGAALSRRAHAIQNTTAGRHGLTRRTHDVEATADASEDDATVSLFSSIPSTCPSYMTRQTPTLSTSSLDGVVQDVELDTDLVPTTSNTNTRRRWTSEMNQFILRTYLQLTSLDTDRKNYLEPLHTKFTEKFPHMNVSRQRVGDQRRAIVRNKLIPQNIIDVIYNDVKTEISGLIVPQTATSSSQLNNSYNSKTRMRWTTEQNEFIMRSYYRITNLETNKTAYRQLLHRDFISKFPTLSHLSEQRIADQRRTIVANKYVSDDRLSTIKEEVAMELSLNTNNISPVPTCAQDPDGSSHDIPALNDPLISEPEEHTTNTELSDTRDEHIDKTFQKALIFFKNTDPTNRMYIPKQKPSKNFAKIVQYLNKITLPENIDQNTDFNTFQTIIYSAAWTAVKLNGSKISLDSVEQSNNSRKEFKPQWQIRLERKLDNLRVKIGRLTQYINGNRNKKLTGHVNKIIEEYKTHTLHEEPNTRLTHTLDTLKQKLSVVTGRLRRYKNCTLRKQQNSRFNNNEKQFYRFIRQKTANIQINDPINNLNNSPDPENLKKFWTGIWGTTEKHNSQSDWIGNETVNNSSYTQMDFQHIPLDIFNIVLRKLHNWKAPGSDYIHSYWYKKFTYLHPYLHNYINDFLLEPSKMPSYITSGITYMIPKNPNDLMNPANYRPITCLQTFYKIITSCLSELIYHHIDSNNILAEQQKGCRRFSQGCKEQLIIDSVVHRHAQKNKTDLFTMYIDYKKAYDSVPHSWLLQSLQIYKIHPKIIVFLETIMKNWTTRLKVSTPIKTIETDPIAIQRGIFQGDALSPLWFCLALNPLSNILNSTSFGYPLRHQNLESDTQSLVTHKLNHLLYMDDIKLYAENEYQLQELASLTEQFSKDIKMEFGIDKCKINSIKSGRPFEHNYKLETGEIINALNENETYKYLGYHQSTQIHHKEIKHKLKQQFQHRINTILKTQLHARNTIKAINTFAIPILTYSFGIIKWTKSDLKNLQRLINTSMTRFRKHHPRSCIQRLTLPRKEGGRGLIDITNLHNTQIKTLRQYFFDKINSSTLHKSIADNDSNFTPLNMKDTTVQKNEQLTDDQTKISEWIQKSLHGRHRQDLSQPNVDKEASNAWLSHGELFPETEGFLQAIQDQVIETRNYQKHIIKNLKSDACRKCNSSPETIQHITGACKAITQTDYKHRHDQVANIIHQKLAFNYKMIQKTQPYYKYSPETVLENATTKLYFDRAILTDRTVPYNRPDITLINKINKTGYLIDIAVPNTHNLQTTIAEKLTKYVELKDEITRLWHLSKVTIVPIVLSSTGVCYILCNVYLCPS

SEQ ID NO: 16496 - protein, 1415 aa, Clostera curtula
MEQNKKVYNLRSLPGGRRGALGAGAECFSSGDTGDDVSSRRARVTQNATADRRELSRRAHDVNATAESLGDETNSLFSSVPSTRPSYMTRRTLTLSTVSTAESVVHDINPDDTHVPTSGTQKRRRWTTEMNQFIMRTYFQLTDLDTDTKTYLEPLHSKFIEKFPDMQISRQRVGDQRRAIIRNKLLPQTTIDKIYNEVKMELEILRDNIHSQQTNYNDRTQQPPTPRQVENENPISHTAKRTQTRMKWSNQHNETIMRLFLQITNLGTNLSAYRKPLHQQFISIFPDLAHLSEQRIADQRRLIETNRYISRDRLNLIRQQVSEELSQNNNTSDDINDNTPLIEPTTPLPIVQPLTNSQINTSSELPFNSGPFSRNSNIDETFHKALEFYRDTNPTERTYIPKQKSSRKLLTTLEYINKIIFPETVNDDTDFDTFQTVMYCGARTVAKINGAKLSLETTGNSHPNNHRKPHKPKWQRRLEQKIKSLRASIGRLTQFINGNRSNKIKKHIDTILEKYKIHSLHEEPNTQLTHTLDTLKQKLSVTAGRLHRYEACTLRKQQNTQFTHNERQFYRNIKETAGNTHIPNNVSNPNNTPDTETLRSFWANIWEEPAHHNHDADWIESETSNNNFNIEPMSIHTVPAEIFDKVIRNLHNWKSPGSDFLHSYWYKKFTSAHKYLHKFINNFIQNPNSMPCYIMNGITYMIPKDPNDTTNPAKYRPITCLQTFYKIITACISEIIYQHTESNNILAEQQKGCRKFSQGCKEQLIIDSVILKHVHKSKSDLFTMYIDYKKAYDSVPHSWLIHVLEIYKVNPKIIYFLSTIMTQWTTRLRFSNHTDTKETDSIKIKRGIFQGDSLSPLWFCLALNPLSNILNNSSAGFPLCYKGDDVTVNTNLLSHLMYMDDIKLYAKTEYQLRDLANITERFTHDIKMEFGTEKCKINSIKSGNKYIHQYTLETGENIDSLNEQETYKYLGYHQSSQIHIKDTKIKLKQQFRHRLNVILKTQLHGRNTIKAINTYAIPILTYSFGIINWNKTELKSLQRLINTSMTRFRKHHPRACIQRLTLPRKEGGRGLIDVKNLHSKQISTLRQYFTFKMQTSLLHKSIGQNDNKFTPLNLKDTTTQNNEQLTDNSTKIDEWTRKSLHGRHRQDLCQPNVDKEASNAWLSRGDVFPETEGFIIAIQDQVIETRNYQKYIIKKSTSDICRKCNTTSETIQHITGACRTIAQTDYKHRHDQVASIVHQKLAHQYNLIESTVAYYKYTPNVVLENTTAKLYFDRAILTDRTIHFNRPDITLIDKINRIGYLIDIAVPNTHNLQATISEKLTKYTELKDEITRLWHLQKVTIVPIVLSTTGVIPKSLHQSLNTLNLPPNICITLQKAVILNTCRLVRKFLQTEPDIPQPRTINQPSQTPQITTNQN

SEQ ID NO: 16497 - protein, 1393 aa, Clostera curtula
MELNKRVYNLRSLPGGRRGALGAGAECLSSGDTGDDVSSRRARVTQNATADRRELSRRARDVDATAESLGDETCSLFSSVPSTRPSYMTRRTPTLSTVSTTESVVHDVNLDDIHVPTSAVQKRKRWTSEMNHFIMRTYFQLTDLNRDTKTYLEPLHLKFIEKFPDMQVTRQRVGDQRRAIMRNKLLPQTTIDKIYDEVKEELEFLRDHIHTQQSVGNSRSQQSTPRRQIDDANSISQTTNRPQTRMKWTNQHNETIIRLFLHITNLGTNLSAYRKPLHQQFISTFPDLAHLSEQRIADQRRLIETNKYINTDRLDLIRQQVSEELAQNNNSSNEINDYTPSTEQANNIEPLSNSQTNITSEPFAYVDHLSRDAQIDETLKKAFEFYQNTNPTERTYIPKQKPSKKLASILEYMNKVILPEAINNSTDFNTFQTVVYCGAWTVAKMNGAKVLLQTIQNSHSYSQGQKYKPKWQRRLEQKVQHLRTSIGRLTQFINGNRSNRLKQYVDIILEKYKIHSVHEEPNTQLTHTLDTLKQKLSVTAGRLRRYEACTLRKQQNSQFTHNERQFYRNIKDTAGNTQNQNMVRNSNNTPDPETFKKFWAEIWEEPSTHNKDADWIELEISKNNINVEPMTFNCISPEILDKILRNLHNWKSPGSDFIHSYWYKKFTSIHKYLHNFINNFIQNPNSMPSYIMNGVTYMIPKDPNNPNDPSKYRPITCLQTFYKIITACISEIIYQHTESNNILAEQQKGCRKFSQGCKEQLLIDSVIMKQVHKSKSNLFTMYIDYKKAYDSVPHSWLLQVLEIYKINPKIIDFLSTTMTRWTTRLRLPTQTQTIETDIIKIQKGIFQGDSLSPLWFCLALNPLSNTLNASSLGYPLLYKDVDSGINTNVLSHLMYMDDIKLYANTENQLQDLAHLTEKFTNDIKMEFGIDKCKINSIKSGNKYTHQYTLETGENIDSLNEQETYKYLGFHQSLQIHIKETKTKLKQQFRHRLNVILKTQLHGRNTVKAINTYAIPILTYSFGVINWSKTELKSLQRLINTSMTRFRKHHPRACMQRLTLPRKEGGRGLIDIKNLHNKQISSLRQYFFNKIQSSPLHKSIVENDNKLTPLNLKDSTTQNNEQLIDHNTKLDEWTRKSLHGRHRQDLCQPNVDKEASNAWLSRGDVFPETEGFMIAIQDQVIETRNYQKYIIKNITSDICRKCNSSPETIQHITGSCSTIAQTDYKHRHDQVAHIIHQKIAHQYKLIESIVPYYKYTPNVVLENTTTKLYFDRAILTDRTIHFNRPDITLIDKINKIGFLIDIAIPNTHNLQTTISEKLTKYTELKDEITRLWHLQKVSIIPVVLSTTGVIPKQLHQSLNSLKLPSNIYHTLQKAVILNTCRLVRKFLQVQPDRI

SEQ ID NO: 16498 - protein, 1415 aa, Clostera curtula
MEQNKKVYNLRSLPGGRRGALGAGAECFSSGDTGDDVSSRRARVTQNATADRRELSRRAHDVNATAESLGDETNSLFSSVPSTRPSYMTRRTLTLSTVSTAESVVHDINPDDTHVPTSGAQKRRRWTTEMNQFIMRTYFQLTDLDTDTKTYLEPLHSKFIEKFPDMQISRQRVGDQRRAIIRNKLLPQTTIDKIYNEVKMELEILRDNIHSQQTNYNDRTQQPPTPRQVENENPISHTAKRTQTRMKWSNQHNETIMRLFLQITNLGTNLSAYRKPLHRQFISIFPDLAHLSEQRIADQRRLIETNKYISGDRLNLIRQQVSEELSQNNNTSNDINDNTPLIEPTTPLPIVQPLTNSQINTSSELPFNSGPFSRNSNIDETFQKALEFYRDTNPTERTYIPKQKSSRKLLTTLEYINKIIFPETVNDDTDFDTFQTVMYCGAWTVAKINGAKLSLETTGNSHPNNHRKPHKPKWQRRLEQKIKSLRASIGRLTQFINGNRSNKIKKHIDTILEKYKIHSLHEEPNTQLTHSLDTLKQKLSVTAGRLHRYEACTLRKQQNTQFTHNERQFYRNIKETAGNTHIPNNVSNPNNTPDTETLRSFWANIWEEPAHHNHDANWIESETSNNNFNIEPMSIHTVPAEIFDKVIRNLHNWKSPGSDFLHSYWYKKFTSAHKYLHKFINNFIQNPNSMPCYIMNGITYMIPKDPNDTTNPAKYRPITCLQTFYKIITACISEIIYQHTESNNILAEQQKGCRKFSQGCKEQLIIDSVILKHVHKSKSDLFTMYIDYKKAYDSVPHSWLIHVLEIYKVNPKIIYFLSTIMTQWTTRLRFSNHTDTKETDSIKIKRGIFQGDSLSPLWFCLALNPLSNILNNSSAGFPLCYKSDDVTVNTNLLSHLMYMDDIKLYAKTEYQLRDLANITERFTHDIKMEFGTEKCKINSIKSGNKYIHQYTLETGENIDSLNEQETYKYLGYHQSSQIHIKDTKIKLKQQFRHRLNVILKTQLHGRNTIKAINTYAIPILTYSFGIINWNKTELKSLQRLINTSMTRFRKHHPRACIQRLTLPRKEGGRGLIDVKNLHSKQISTLRQYFTFKMQTSLLHKSIGQNDNKFTPLNLKDTTTQNNEQLTDNSTKIDEWTRKSLHGRHRQDLCQPNVDKEASNAWLSRGDVFPETEGFIIAIQDQVIETRNYQKYIIKKSTSDICRKCNTTSETIQHITGACRTIAQTDFKHRHDQVASIVHQKLAHQYNLIESTVAYYKYTPNVVLENTTAKLYFDRAILTDRTIHFNRPDIALIDKINRIGYLIDIAVPNTHNLQATISEKLTKYTELKDEITRLWHLQKVTIVPIVLSTTGVIPKSLHQSLNTLNLPPNIYITLQKAVILNTCRLVRKFLQTEPDIPQPRTINQPSQTPQITTNQN

SEQ ID NO: 16499 - protein, 971 aa, Clostera curtula
MYCGAWTVAKINGAKLSLETTGNSHPNNHRKPHKPKWQRRLEQKIKSLRASIGRLTQFIDGNRSNKIKKKYKIHSLYEEPNTQLTHTLDTLKQKLSVTAGRLHRYEACTLRKQQNTQLTHNERQFYRNIKETAGNTHIPNNVSNPNNTPDTETLRSFWANIWEEPVHHNHDADWIESETSNNNFNIEPMSIHTVPAEIFDKVIRNLHNWKSPGSDFLHSYWYKKFTSAHKYLHKFINNFIQNPNSMPCYIMNGITYMIPKDPNDTTNPAKYRPITCLQTFYKIITACISEIIYQHTESNNILAEQQKGCRKFSQGCKEQLIIDSVILKHVHKSKSDLFTMYIDYKKAYDSVPHSWLIHVLEIYKVNPKIIYFLSTIMTQWTTRLRFSNHTDTKETDSIKIKRGIFQGDSLSPLWFCLALNPLSNILNNSSAGFPLCYKGDDVTVNTNLLSHLMYMDDIKLYAKTECQLRDLANITERFTHDIKMEFGTEKCKINSIKSGNKYIHQYTLETGENIDSLNEQETYKYLGYHQSSQIHIKDTKIKLKQQFRHRLNVILKTQLHGRNTIKAINTYAIPILTYSFGIINWNKTELKSLQRLINTFMTRFRKHHPRACIQRLTLPRKEGGRGLIDVKNLHSKQISTLRQYFTFKMQTSLLHKSIGQNDNKFTPLNLKDTTTQNNEQLTDNNTKIDEWTRKSLHGRHRQDLCQPNVDKEASNAWLSRGDVFPETEGFIIAIQDQVIETRNYQKYIIKKSTSDICRKCNTTSETIQHITGACRTIAQTDYKHRHDQVASIVHQKLAHQYNLIESTVAYYKYTPNVVLENTTAKLYFDRAILTDRTIHFNRPDITLIDKINRIGYLIDIAVPNTHNLQATISEKLTKYTELKDEITRLWHLQKVTIVPIVLSTTGVIPKSLHQSLNTLNLPPNIYITLQKAVILNTCRLVRKFLQTEPDIPQPRTINQPSQTPQITTNQN

SEQ ID NO: 16500 - protein, 1304 aa, Clostera curtula
MEQNKKVYNLRSLPGGRRGALGAGAECFSSGDTGDDVSSRRARVTQNATADRRELSRRAHDVNATAESLGDETNSLFSSVPSTRPSYMTRRTLTLSTVSTAESVVHDINPDDTHVPTSGTQKRRRWTTEMNQFIMRTYFQLTDLDTDTKTYLEPLHSKFIEKFPDMQISRQRVGDQRRAIKRNKLLPQTTIDKIYNEVKMELEILRDNIHSQQTNYNDRTQQPPTPRQVENENPISHTAKRTQTRMKWSNQHNETIMRLFLQITNLGTNLSAYRKPLHQQFISISPDLAHLSEQRIADQRRLIETNKYISGDRLNLIRQQVSEELSQNNNTSNDINDNTPLIEPTTPLPIVQPLTNSQINTSSELPFNSGPFSRNSNIVETFHKALEFYRDTNPTERTYIPKQKSSRKLLTTLEYINKIIFPETVNDDTDFDTFQTVMYCGAWTVAKINGAKLSLETTGNSHPNNHRKPHKPKWQRRLEQKIKSLRASIGRLTQFINGNRSNKIKKHIDTILEKYKIHSLHEEPNTQLTHTLDTLKQKLSVTAGRLDRYEACTLRKQQNTQFTHNERQFYRNIKETAGNTHIPNNVSNPNNTPDTETLTSFWANIWEEPAHHNHDADWIESETSNNNFNIEPMSIHTVPAEIFDKVIRNLHNWKSPGSDFLHSYWYKKFTSAHKYLHKFINNFIQNPNSMPCYIMNGITYMIPKDPNDTTNPAKYRPITCLQTFYKIITACISEIIYQHTESNNILAEQQKGCRKFSQGCKEQLIIDSVILKHVHKSKSDLFTMYIDYKKAYDSVPHSWLIHVLEIYKVNPKIIYFLSTIMTQWTTRLRFSNHTDTKETDSIKIKRGIFQGDSLSPLWFCLALNPLSNILNNSSAGFPLCYKGDDVTVNTNLLSHLMYMDDIILYAKTEYQLRDLANITERFTHDIKMEFGTEKCKINSIKSGNKYIHQYTLETGENIDSLNEQETYKYLGYHQSSQIHIKDTKIKLKQQFRHRLNVILKTQLHGRNTIKAINTYAIPILTYSFGIINWNKTELKSLQRLINTSMTRFRKHHPRACIQRLTLPRKEGGRGLIDVKNLHSKQISTLRQYFTFKMQTSLLHKSIGQNDNKFTPLNLKDTTTQNNEQLTDNSTKIDEWTRKSLHGRHRQDLCQPNVDKEASNAWLSRGDVFPETEGFIIAIQDQVIETRNYQKYIIKKSTSDICRKCNTTSETIQHITGACRTIAQTDYKHRHDQVASIVHQKLAHQYNLIESTVAYYKYTPNVVLENTTAKLYFDRAILTDRTIHFNRPDITLIDKINRIGYLIDI

SEQ ID NO: 16501 - protein, 789 aa, Curetis bulis
MTFEHVPIETFQKVLRCLHNWKSPGSDFIHCYWYKKFTTVHSLLHNFINIFIKDPSTLPTYLTSGKTYMIPKDHSDISNPAKYRPITCLQTLYKIITSCISDLIYQHIDSNNILAEQQKGCRKCSQGCKEQLIIDSVILKNVQKSKSDLFSMYIDYKKAYDSVPHSWLIKVLELYKIHPEIITFLKNVMSKWSTVLRVTNITGTIETRPIQIQRGIFQGDALSPLWFCLALNPLSYMLNSSSLGYPLKSIDTDAQETVLSHLLYMDDIKLYAKTENHLNHLAHITEQFTIDIKMEFGIDKCRINSIIAGKNYQHRYTLESGEQIEPLDEQETYKYLGYQQSVQIHHKDTKQKLTQQFQHRLNTIMRTQLNSKNTAKAVNTFVIPVLTYSFGIISWTKTELKKLQRKINTTLRSFRKNHPRACLQRLTLPRKEGGRGFIDIYNLHNKQIKTLRQYFSHKSHSSTLHKAIAEHDKKFTPLNLADITEQNNEKTVDDKAKLTEWTQKSLHGRHRQDLCQQNVDKEASNEWLHRGELFPETEGFMIAIQDQVIETKNYRKYIIKNLASDICRKCHSSPETIQHITGACKSIVQTDYKHRHDQVANIIHQKLAHHFKFIDAIVPYYKYQPQTVLENSTAKLYFDRAILTDRTVHYNRPDITIINKTTKTGYLIDIAVPNTHNLQNTISEKLTKYQELKDEITRIWHLHNVTIVPIVLSTTGIIPKQLHLSLQTLNLPKNTYYLLQKAVILNTCRIVRKFLQVDLENTHTFIQPSASTTTPHTQINTQQNNTGEN

SEQ ID NO: 16502 - protein, 1412 aa, Curetis bulis
MSSNKYNLRPLPGGRRGASGANARCYSMRSIGDAELSRRTPIDKNTTAGRRQLSRRALGEEATAENSGEDTISLFSSIPSTCPSYMTRRTATLSTTSTSESVVQDVNFDSELAPTSGAPSKRRQWTKEMNEFILRTYLQLTALGTDTKAYLEPLHTKFLEKYPNMQVSRQRIGDQRRAIIRNNLLSQEIIDKINNEVAESQNHLQTISQITQNHTQDLTSQYITHIENTVARPRNTPQTRMRWTNDQNEMIMRAYYRVTNLGTNETAYRKRMYEEFISSYPSLVHLSEQRVADQRRAIVNNQYISNSRLNILKEEVSRELEINSPICNENITTSIFTTNHISEYENTVSQTPISISCEPVEEALSANLTYTRQPHIDEIFEQAFQFYKDTTPTRRTYIPKQKPSKKLAKIINYINEIIIPENINQNSDFYSLQTVIYCAAWTAAKANGSKIILQTEDNPQRRQTQHKPNWQKRLERKVDDLRIKIGRLTQFINGNRHRKLIKHVNKITEQYKTHTIHEESNTQPIHTLDTLKQKLSVVSGRLHRYKACTLRKQQNSKFIHNEKLFYRNIREATTNVQQNTINDTTSSQGPSPETLQNFWAKIWENPIQHNDHAEWINVQDCSQIQTMTFEHIPLETFQKVLRNLHNWKSPGSDLIHCYWYKKFTSIHSLLLNFINQFIQDPCTLPPYLTLGKTYMVPKDNNDLSNPAKYRPITCLQNLYKIITSCLSELIYQHIDSNNILAEQQKGCRKSSQGCKEQLIIDSVILKNVQKSKSDLFSMYIDYKKAYDSVPHSWLIKVLEIYNIHPAIVTFLKTVMTKWSTVLKITNTTQTIETRPIQIQRGIFQGDALSPLWFCLALNPLSNLLNSSSLGYPLKNPETDINETVISHLLYMDDIKLYAKTENHLNTLANLTEQFTSDIKMEFGIDKCRINSIRSGQNYQHQYTLDTGEQIEPLDQHETYKYLGYQQSQQIHHKDTKQKLTQQFQHRLNTIMKTQLNSRNTTKAINTFVIPLLTYSFGIINWTKTELKNLQRKINTTLRKFRKNHPRACIQRLTLPRKEGGRGLIDIHNLHNKQIKALRQYFFHKSNSSILHKLIAEYDKKFTPLNLKDTTEQNNEKTTDDKTKIAEWTQKSLHGRHRQDLCQQNVDKEASNAWLHRGEFFPETEGFMIAIQDQVIETKNYRKHIIKNLTSDICRKCQSSPETIQHITGACKSIVQTDYKHRHDQVANIIHQKLAHNLKFIDTIIPYYKYEPQTVLENSTAKLYFDRAILTDRTIHYNRPDITIINKTTKTGFLIDIAVPNTHNIQNTIAEKLTKYLELKDEITRLWHLQKVTIVPIVLSTTGIIPKQLHQSLDSLNLPKNTFYLLQKAVILNTCRIVRKFLQVELENTQTFNQSSAHTTTPPTQIDTTTNTT

SEQ ID NO: 16503 - protein, 1410 aa, Acronicta aceris
MEMSSKKVYNLRSLPGGRRGASGAGAGCHSMGTIGGEELSRRAPTDKNVTADRHELNRRARDVEATADIMDDDTISLFSSIPSTRPSYMTRRTISLATTDTLDSVVHDVNVDCELAPTTNASNTRRRWTTEMNMFILRTYLQLTTLNTDTRAYLEPLHLKFIEKYPKMQVSRQRIGDQRRAIVRNKLLPQKTIDEIYKEVKDELNNIQSNIQSHSTQQTHTHNDNAQQPKQHTQLTQTRMRWTNEHNEAIMRSYYRVTALGTNITAYRKLMHEDFINSFPSLSHLSEQRIADQRRAILNNKYISYDRLNSLKAEVSEELGSINNNLNNSITEAVDIITLNSNNNDTHFSHAADIIDTEQTLINTQILNNNNNIQEPILVNPQTNLERDLQIDETFQQAFLFFRNTSPIGRNYIPKQKTSKELARIVSYINKIILPENINIDTDFYTLQTIIYCAAWTTAKVNGAKITLKPAESNQYDKREYKPNWQRRLEQKIGDIRAKIGRLTQFINGNRSRKLIKHVNSIIERYKTHTVHEEPNRQATHTLDTLKQKLSVVSGRLKRYKACTLRKQQNTTFTHNEKLFYRNIKQAATNTHENLVNDNNNAPDSETMQHFWAGIWESPTQHNNQADWIQTESTNNCANIPEMRFEYIPPQIFIKVLNRLHNWKSPGSDYIHNYWYKKFTYVHSYLHNYINNFILDPTTIPSYITNGTTFMLPKDRNDLTNPAKYRPITCLQTLYKIITSCITELIYQHTDDNNILAEQQKGCRKFSQGCKEQLIIDSVILKKVQKSKADLFSMYIDYKKAYDSVPHSWLIKVLEIYKIHPTIITFLKTIMTTWTTVLKYNTTNETIKTSPIKIQRGIFQGDTLSPLWFCLALNPLSNILNSTQLGIPLNDTNTNGETDPQKNALNHLMYMDDIKLYAKSESQLNELANLTEKFSNDIKMEFGIDKCKINSVRAGQSYQHQYTLGTGEQIESLDEQETYKYLGCNQSHQIHYKDTKNKLKQQFEHRLNTILKSQLYSRNTIKAINTFAIPILTYSFGVINWTKTDLKNIQRKINTTMTKFRKNHPRSCLQRQTLPRKEGGRGLIDVLNLHNRQISTLRQYFFAKADLSTLHNLIVQNDQKLTPLNLKDISQQKNETIIDDKTKLLEWTQKSLHGRHRQDLCQINVDKEASNAWLRRGELFPETEGFMIAIQDQVIETKNYRKHIIKNLTTDTCRKCNSSPETIQHITGACKSIAQTDYKHRHDQVANVIHQKLAYQYKLINSVVPYYKYTPETVLDNIATKLYFDRAILTDRTIHFNRPDITLINKISKTGYLIDIAVPNTHNLQTTIAEKLSKYAELKDEISRLWHLQKVIIVPIVLSTTGVIPKQLHQSLNTLNLPANTYYLLQKAAILNTCRLVRKFLQCEPDNTNT

SEQ ID NO: 16504 - protein, 1410 aa, Acronicta aceris
MEMSSKKVYNLRSLPGGRRGASGAGAGCHSMGTIGGEELSRRAPTDKNVTADRHELNRRARDVEATADIMDDDTISLFSSIPSTRPSYMTRRTISLATTDTLDSVVHDVNVDCELAPTTNASNTRRRWTTEMNMFILRTYLQLTTLNTDTRAYLEPLHLKFIEKYPKMQVSRQRIGDQRRAIVRNKLLPQKTIDEIYKEVKDELNNIQSNIQSHSTQQTHTHNDNAQQPKQHTQLTQTRMRWTNEHNEAIMRSYYRVTALGTNITAYRKLMHEDFINSFPSLSHLSEQRIADQRRAILNNKYISYDRLNSLKAEVSEELGSINNNLNNSITEAVDIITLNSNNNDTHFSHAADIIDTEQTLINTQILNNNNNIQEPILVNPQTNLERDLQIDETFQQAFLFFRNTSPIGRNYIPKQKTSKELARIVSYINKIILPENINIDTDFYTLQTIIYCAAWTTAKVNGAKITLKPAESNQYDKREYKPNWQRRLEQKIGDIRAKIGRLTQFINGNRSRKLIKHVNSIIERYKTHTVHEEPNRQATHTLDTLKQKLSVVSGRLKRYKACTLRKQQNTTFTHNEKLFYRNIKQAATNTQENLVNDNNNAPDSETMQHFWAGIWESPTQHNNQADWIQTESTNNCANIPEMRFEYIPPQIFIKVLNRLHNWKSPGSDYIHNYWYKKFTYVHSYLHNYINNFILDPTTIPSYITNGTTFMLPKDRNDLTNPAKYRPITCLQTLYKIITSCITELIYQHTDDNNILAEQQKGCRKFSQGCKEQLIIDSVILKKVQKSKADLFSMYIDYKKAYDSVPHSWLIKVLEIYKIHPTIITFLKTIMTTWTTVLKYNTTNETIKTSPIKIQRGIFQGDTLSPLWFCLALNPLSNILNSTQLGIPLNDTNTNGETDPQKNALNHLMYMDDIKLYAKSESQLNELANLTEKFSNDIKMEFGIDKCKINSVRAGQSYQHQYTLGTGEQIESLDEQETYKYLGYNQSHQIHYKDTKNKLKQQFEHRLNTILKSQLYSRNTIKAINTFAIPILTYSFGVINWTKTDLKNIQRKINTTMTKFRKNHPRSCLQRQTLPRKEGGRGLIDVLNLHNRQISTLRQYFFAKADLSTLHNLIVQNDQKLTPLNLKDISQQKNETIIDDKTKLLEWTQKSLHGRHRQDLCQINVDKEASNAWLRRGELFPETEGFMIAIQDQVIETKNYRKHIIKNLTTDTCRKCNSSPETIQHITGACKSIAQTDYKHRHDQVANVIHQKLAYQYKLINSVVPYYKYTPETVLDNIATKLYFDRAILTDRTIHFNRPDITLINKISKTGYLIDIAVPNTHNLQTTIAEKLSKYAELKDEISRLWHLQKVIIVPIVLSTTGVIPKQLHQSLNTLNLPANTYYLLQKAAILNTCRLVRKFLQCEPDNTNT

SEQ ID NO: 16505 - protein, 1451 aa, Noctua pronuba
MEMSKRVYSLRSLPGERRGASGADAGCHSMRTVGGAELSKRARTDKIVTAGRSELNRRAHNVEATADSTGDDTTSLFSSIPSTRPLYMTRRTTSLSTTTTLDSVVQEVNLDSELAPATSAPRTRRRWTPEMNKFILRTYLQLTSLDTDRKTYLEPLHLKFIEKYPNMQVSRQRVGDQRRAIINNKLLTQTTIDEIEAEVREEINQLQLSAQTQFPTNHTHSTATITQTQSTTLEIPTAQNKTKTRMRWTNEQNEAIMRSYYRVTTLETNQTVYRKLMHEDFIRKFPSLVHLSEQRIADQRRAIVNNKYISTERLNLLKLEISNELQLDNSNYNNLPITVSDNTTETQFNANNIDLNSTEDPIVQILNNDQVDVATDGLHNSQTSSEERDLLIDSTFQQTLQFYIETSPTNRMYIPKQKPSRNLARIVDYINKITLPEKINKDTDFHTLQTAIYSAAWTAAKVNGAKLTLLPREMNTNTNTKKIYMPHWQRRLERKLKDLRSKIGRMTQFINGNRSRKIIKHVKRINKQYNIHTIHEEPNTQPEHTLDTLKQKLAVVTGRLQRYKACTQRKRQNTQFTLNEKLFYRNIRQVSTNIQNNNPSDDIGHTNLDLETLQNFWAGIWEHPIEHNTQADWIKTEVSNANTNIQPMTFEQISPQVFHEVLARLHNWKAPGSDQIHSYWYKKFTAVHSFLYNHINNFIQDPKTIPPYLTSGTTYMIPKDHNDLSNPAKYRPITCLQTLYKIITSCVSSLIYQHTDTNNILAEQQKGCRKFSQGCKEQLIIDSIILKKAQKSKTDLYSMYIDYKKAYDSVPHSWLVQILEIYKIHPTIITFLKTTMTTWSTVLRFNTPTDAADTRPIKILRGIFQGDALSPLWFCLALNPLSNILNSTCVGFPLENTARDGQREVQNNTLNHLLYMDDIKIYAKSESQLNELANLTEQFTNDVKMEFGIDKCKINSVRAGKYYQHQYTLETGEQIDPLEEHDTYKYLGYNQSRQINHKETKQKLKQQFQHRLNTILKTQLYSRNTIKALNTFAIPVLTYSFGIINWSKTDLKNLQRKINTTMTKFRKHHPRSCVQRLTLPRKEGGRGLIDIQNLHNKQITTLRQYFFTKAESSTLHKQIADNDNHFTPLNLKDKSEQNNEKVTDNKTKLLEWSQKSLHGRHYQDLSQINVDKEASNAWLKRGELFPETEGFMLAIQDQVIETKNYRKYIIKNLSNDTCRKCNSSPETIQHITGACKSIAQSDYKHRHDQVAKVIHQKIAHQFKLVDSIVPYYKYTPETVLENPSTKLYFDRGIFTDRTIHFNRPDITLINKTNKTGYLIDIAVPNTHNLQTTIAEKLSKYIELKEEITRLWHLQKVTIVPIVLSTTGVIPKQLHQSLTSLNLPSNTYHLLQKAVILNTCRLVRKFLQCESDNPHQHIHLNIPSSLFQATTQNRNVPITTSLTLNPADNHLA

SEQ ID NO: 16506 - protein, 1410 aa, Acronicta aceris
MEMSSKKVYNLRSLPGGRRGASGAGAGCHSMGTIGGEELSRRAPTDKNVTADRHELNRRARDVEATADIMDDDTISLFSSIPSTRPSYMTRRTISLATTDTLDSVVHDVNVDCELAPTTNASNTRRRWTTEMNMFILRTYLQLTTLNTDTRAYLEPLHLKFIEKYPKMQVSRQRIGDQRRAIVRNKLLPQKTIDEIYKEVKDELNNIQSNIQSHSTQQTHTHNDNAQQPKQHTQLTQTRMRWTNEHNEAIMRSYYRVTALGTNITAYRKLMHEDFINSFPSLSHLSEQRIADQRRAILNNKYISYDRLNSLKAEVSEELGSINNNLNNSITEAVDIITLNSNNNDTHFSHAADIIDTEQTLINTQILNNNNNIQEPILVNPQTNLERDLQIDETFQQAFLFFRNTSSIGRNYIPKQKTSKELARIVSYINKIILPENINIDTDFYTLQTIIYCAAWTTAKVNGAKITLKPAESNQYDKREYKPNWQRRLEQKIGDIRAKIGRLTQFINGNRSRKLIKHVNSIIERYKTHTVHEEPNRQATHTLDTLKQKLSVVSGRLKRYKACTLRKQQNTTFTHNEKLFYRNIKQAATNTQENLVNDNNNAPDSETMQHFWAGIWESPTQHNNQADWIQTESTNNCANIPEMRFEYIPPQIFIKVLNRLHNWKSPGSDYIHNYWYKKFTYVHSYLHNYINNFILDPTTIPSYITNGTTFMLPKDRNDLTNPAKYRPITCLQTLYKIITSCITELIYQHTDDNNILAEQQKGCRKFSQGCKEQLIIDSVILKKVQKSKADLFSMYIDYKKAYDSVPHSWLIKVLEIYKIHPTIITFLKTIMTTWTTVLKYNTTNETIKTSPIKIQRGIFQGDTLSPLWFCLALNPLSNILNSTQLGIPLNDTNTNGETDPQKNALNHLMYMDDIKLYAKSESQLNELANLTEKFSNDIKMEFGIDKCKINSVRAGQSYQHQYTLGTGEQIESLDEQETYKYLGYNQSHQIHYKDTKNKLKQQFEHRLNTILKSQLYSRNKINAINTFAIPILTYSFGVINWTKTDLKNIQRKINTTMTKFRKNHPRSCLQRQTLPRKEGGRGLIDVLNLHNRQISTLRQYFFAKADLSTLHNLIVQNDQKLTPLNLKDISQQKNETIIDDKTKLLEWTQKSLHGRHRQDLCQINVDKEASNAWLRRGELFPETEGFMIAIQDQVIETKNYRKHIIKNLTTDTCRKCNSSPETIQHITGACKSIAQTDYKHRHDQVANVIHQKLAYQYKLINSVVPYYKYTPETVLDNIATKLYFDRAILTDRTIHFNRPDITLINKISKTGYLIDIAVPNTHNLQTTIAEKLSKYAELKDEISRLWHLQKVIIVPIVLSTTGVIPKQLHQSLNTLNLPANTYYLLQKAAILNTCRLVRKFLQCEPDNTNT

SEQ ID NO: 16507 - protein, 1277 aa, Tuta absoluta
MEHSNRKYNLRPLPGGRRGASGAGAGCYSLRDTGDEELSRRTPVTQYVTAGRRELSRRAHGEDATAEYSGDDTISLFSSIPSTRRSYMTRRTSTLSSSSTLADVVQQVNTDFELAPTSSAPTMRRRWTPEMNKFILRTYLQLTALDTDTKTYLEPLHLKFMERYPDMNASRQRVGDQRRAIVRNKLLSQNTINEIYNEVKEELRILEHNLSSQYPHSNTPTVPFTIPRTPLSDTQNTTRDTQNLQSSTRMRWTTEHNETIMRIYYRITELETNRTTYRQPLHEAFISAFPSLAHLSEQRIADQRRAIIYNKYFDDARLNTIKHQVAEELSINIPQCVNNTNYIQCDNTTPHTNAEDTYIQFSNCFEVESPAESLPEQRNPTSNPQIDETFNQTLNHFLDTNPTTRPYIPKQKTSKKFAAIVDYINQVTLPKTVNLDTDFSTLQTVIYCAAWTAAKVNGAKISFFNRSRSTQRENKPNWQRRLERRIEHFRRNIGRITQFINGNSNTQLKQQVEIIVDQYKIHSVHEEPNTQLAHTLDTLKQKLAVITGRLRRYQACTLRKKQNNQFRNNEKLFYRNLKQNTTNSQNNRDHNDVNDAPNPEVLQAFWAGIWEQPIEHNSQAEWIKTEVKNNTTTPQMNFEHIPIDTFQKVLLKLHNWKAPGSDNIHSYWYKKFTSIQGFLHNHLNYFIEDPSTIPSYITIGTTYMILKDRNDPSNPAKYRPITCLQTLYKILTACISELIYTHVDDNGILAEQQKGCRKFSQGCKEQLVIDSVILKQVQKLKSDLFSMYIDYRKAYDSVPHSWLMQILEVYKIHPKIITFLKTTMENWTTKLILTTNNQTLETEAIRIQRGIFQGDALSPLWFCLALNPLSNILNSSTLGYKLNYTNNDRQTDERQKINHLLYMDDIKLYADTESHLHQLATLTERFTNDIKMDFGIDKCKINSIKAGNSYKHPYTLQAGEQIEPLDEQETYKYLGYNQSLQIKFKETKDKLKQIFRHRLNSILKTQLDARNTFKAINSYAIPILTYSFGIINWSKSDLKALQRTINTTLTKYRKHHPRSCVQRLTLPRKEGGRGLIDITNLHNRQITTLRQYFFKKSESSLLHKSIAQNDKKATPLNLHDKTTQINEKLTDDKMKLAEWTQKSLHGRHRHDLCQSNVNKDASNAWLSRGELFPETEGFIMAIQDQVMETKNYQKHITKTLATDTCRKCNSCPETIQHITGACKSIAQTDYKHRHDQVANVIHQKLAYQQKFITNIQPYYKYSPQTVLENSTTKLYFD

SEQ ID NO: 16508 - protein, 1400 aa, Limenitis camilla
MVLTRSKAKRPQVPGGASNNVGCDGSLSEAGSRGAKNLRVGTDFCQMTQQAARYMDSEMPSERDSLTPSPFHLIQSPTSSLNSYIGSSRSSLSSMSVDVVQEAHAIKSAPTTGKNRTRKRWSEDMNKFIWRTYLIATKLNTSKIYLDYLHQEFTKKYPEMEASRQRLGDQCRAIIRNKLLPQDVIEQIKVEAAAYLQETEKLHYLHHEPDTYPISQFNTQDIPTSRMRWSTEQNEGIMRSYYRVTLLGTNETAYRKLMHLDFISMFPSLAHLSEQRIADQKRVIIKNKYISDDRLDSLKHEIYQELIIKNNSSNITPSLNNDSLNKKYDNVIQPLCSLNVNEEEELQSPAVDDDLINNTEKSPLNLQRDKQIDETFQEALHFYKNTDPVNRMYIPKQKISKNLAETVNYLNKLVIPENVNVDTDFNTLHTIIYSAAWTAAKINGAKITLQADKSFPRAKKDITPKWQVRLERKLEVLRSKIGRLTQFINGNSSRKLVNYVNNILNQHRIHTIHEEPNSHITETLDTLKQKLSVVSGRLQRYKACTLRKQQNSQFTHNEKGFYRNIRKETSNIHDRTMNENEHITPSPEILKDYWASIWENPTQHNTQTDWIKEEITNNTNIQSMTFEKIHFNIFQKVLNRLHNWKAPGSDYIHSYWYKKFTSIHTYLYSYINKFIQNPDALPRFLTQGITFMIPKDCEDLSDPSKYRPITCLPTLYKIITSCLSEVIYLHVDTNNLLAEQQKGCRKFSQGCKEQLIIDSVILKKVQKDKSNLYSMYIDYRKAYDSVPHTWLVQVLDIYKIHPTIATFLKTVMTTWTTILRLSTSTGTVETNPIKIQRGIFQGDALSPLWFCIALNPLSNSLNATSLGFPLENKDIDKQTDSRKNVLSHLLYMDDIKLYGETEFQLLELANITEQFTNDIKMKFGIEKCKINSIKTGKNYQHNFVLQTGEEIEPLNEGDAYKYLGYYQSLQIHDKDTKQKLKQQFKHRVNIILRTQLYSRNTIKAINTFAIPVLTYSFGIIKWTKTEIINLQRFINTTMTKNRKNHPRACVQRLTLPRKEGGRGLIDILNLHNRQITHLRSFFFTKSNSSTLHKLIAQNDQRLTPLNLKDATSQKIEILIDDKKKIEEWARKSLHGRHRQDLCQPNVDKDASNNWLTRGDLFPETEGFMLAIQDQVIETKNYRKFIIKNLTVDNCRKCNSAPETIQHITGACKAIAQTDYKHRHDQLANIIHQKLAFLHKLTDIIVPYYKYTPKTVLENDTTKLYFDRALLTDRTIHYNRPDITLVNKREKTGYLIDIAVCNTHNLQTTIAEKLSKYNDLKYEITRLWHLQKVIIVPIVVSTTGVIPKQLHQSLHTLNLVRNSYHLLQKAAILNTCRIVRKFLECEADTRNAVISHHLPST

SEQ ID NO: 16509 - protein, 1423 aa, Mimas tiliae
MESSERRYNLRTLPGGRRGAPGAGAGCFSLRDTGGGALSRRALATQDATADRRELSRRTHGVKVTADSSDDDTISLFSSIPSTRPSYMTRGSKILSTTSTNTLDGVMQDVDLDSEFASTASVTGMRRRWTSEMNQFILRTYLQLTSLETDTKSYLEPLHLKFIEKFPNMREVSRQRIGDQRRAIIRNKLVPQNIIDQIYSDVKDELTNLQTNLHTQTPQTCTQTQTDTKIILQNNKQTPNSGSTVTTQNYTTRMRWTTQQNEAIMTSYYRVTNLETNKTAYRKLLHRDVIKSCPSLAHLSEQRIADQRRIIVNSKYITQNKLDLIKEAVAKERVLNTTRIDTHNNDSPQDYQLNNNETLCSNNKDLIINHVPNFDTSQNRYPEIDETFKQALEFYKNTEATKRTYIPKQKTSKKLAQIVNYVDNITLPENINKDTDFNTLQTVIYCAAWTAAKVNGSKISLSPIDKAQCTKKLHKPHWQKRLEFRLDDLRAKIGRLTQYINGNRSRKLTKYVKEIIKQYKIHSVHEEPNTRLTHTLDTLKQKLAVITGRLQRYKNCTLRKQQNNSFSNNEKHFYRTIKHATTNTQNNCMENNTNNSPDPENLKKFWAGIWEKAERHNTQANWIEAEIIKNDRYPEMNFQHIPLETFVKVIRNLHNWKAPGSDYIHNYWYKKFTHIHPYLHNYINDFLQDPSKVPSYITAGTTFMIPKDTNDFTNPAKYRPITCLQTLYKIITSCISEIIYQHIDANNLLAEQQKGCRKFTQGCKEQLTIDSVILKQVQKTKANLFSMYIDYKKAYDSVPHSWLLQVLEIYKIHPKIITFLESIMKSWTTRLRLTTPIQTIETASIKIQRGIFQGDALSPLWFCLALNPLSNILNSTAFGYPLKYQDAEDHAHNHPITNKLNHLLYMDDIKLYAEDEHQLYELAHLTEQFSHDIKMEFGIDKCRINSIKAGHSYQHQYTLDTGEKIDPLNEEETYKYLGYNQSLQIHHTQTKQMLKQQFRHRLNTILKTQLYARNTIKAINTFAIPILTYSFGIINWTNSDLKNLQRTINTSMTKFRKHHPRSCIQRITLPRKEGGRGLIDINNLHNSQITTLRQYFFNRMSSSALHKSVVQNDHNFTPLNLKQRTAQRNEKITGDKEKIEEWSRKSLHGRHRQDLSQPNVDKEASNAWLSRGELFTETEGFMTAIQDQIIETRNYKKHIMKIANLSSDLCRKCNSSSETIQHITGSCKLLAQTDYKFRHDQVANIIHQKLATKYKLIAIPKTPTPYYKYTPETVLENDNHKLYYDRAILTDKTVHYNRPDITLVDKKNKTAFIIDIAIPNTHNIQNTIAEKVTKYIDLKDEISRMWHIQKVSIIPIVLSSTGIIPKQLAQSLTLLDLPQQTYIQLQKAVVLNTCRIVRKFLQIESIPLPISNLDSNLTGSHLA

SEQ ID NO: 16510 - protein, 752 aa, Mimas tiliae
MSFQHIPAETFLKVLRNLHNWKTPGSDYIHSYWYKKLTYIHPYLHNFINDFLYDPNKLPSYVTAGTTFMIPKDPNDSLNPAKYRPITCLQTLYKIITSCIAELVYQHIEQNNIIAEEQKGCRKFTQGCKEQLIIDSVILKHVQKTKADLYTMNIDYKKAYDSVPHSWLLQVLEIYKIHTKIITFLETVMRNWTTRLRLITPNKTIETDPIKIQRGIFHGDSLSPLWFCLALNPLSHILNLTPIGYPLQQREDEGLASTPPTTSRLNHLLYMDDIKLYAQDEEQLHQLANLTEKFSNDIKMEFGIDKCKINSIKAGRNYQHHYTLETGEKIDALNEQETYKYLGYNQSAQILHKDTKQTLKHQFRHRLNTILKTQLNSRNTIKAINSFAIPVLTYSFGIITWSKSDLKNLQRIINTSMTRFRKHHPRSCIQRLTLPRKEGGRGLIDIVNLHNTQITTLRQYFFNKMSSSALHKAIVQTDNKFTPLNMNQRTPQKNEKITQDKEKIEEWSRKSLHGRHRQDLSHPHVDKEASNAWLGRGELFPETEGFMTAIQDQVIETRNYQKFIMKVPSSSSDICRKCNGNSETIQHITGACKSIAQTDYKYRHDQVANIIHQKLATKYKLIPTLTTPIPYYKYNSETVLENADYKLYYDRAILTDKTVHYNRPDIILVDKKNKTAFIIDIAIPNTHNLQNTISEKLTKYIDLKDEISRMWRLHKVSIVPIVLSTTGIIPKQLSLSLTLLDVPEQTYIQIQK

SEQ ID NO: 16511 - protein, 1405 aa, Mimas tiliae
MEPCKRIYNLRSLPGGRRGALGAGAGCHSLRDTGGGALSRRALATQDATAGRRELNRRTRDVEATADSSGDDTSSLFSSIPSTRPSYMTRSTKALSTTSTLNDVVQDVDLDTDLASTASVPGKRRRWTSEMNQFILRTYLQLTTLESDTKNYLEPLHLKFMEKFPDRHISRQRIGDQRRAIIRNKLLPQNIIDKIYNEVKETLKIGTNLPTRQAYIQTQTFTPTTTTTTFTPQDNTQSLNPVISMRNPTARMRWTTEQNETIMRLYYRITNLETNKTAYRKLLHKDFINAFPSLAHVSEQRVADQRRIIVNNKYITIDRLNSIKQEVARDLSRIPINRDTYNNCSTQDPHINYSDTPPVDSNNVEITGADRILNLETPNQRYSEIDETFEQALEFYKNTEPTNRTYIPKQKSSKKFAKILHYLNNTILPENINQGTDFNTLQTVIYCAAWTAAKVNGSKIKLSPNERSPSAQKQYKPYWQRRLEHRLDDLRIKIGRLTQFINGNRSRKLSKHVNKIIEQYKIHSIHEAPNTHLTHTLDTLKQKLSVVTGRLKRYQNCTLRKQQNNIFSNNEKQFYRTIKNTTSNVQQNNSDNSLNNHPDPEALKKFWAGIWEQPEQHNTQANWIETETKSNDLHAEMSFQHIPAETFLKVLRNLHNWKTPGSDYIHSYWYKKLTYIHPYLHNFINDFLYDPNKLPSYVTAGTTFMIPKDPNDSLNPAKYRPITCLQTLYKIITSCIAELVYQHIEQNNIIAEEQKGCRKFTQGCKEQLIIDSVILKHVQKTKADLYTMYIDYKKAYDSVPHSWILQVLEIYKIHTKIITFLETVMRNWTTRLRLITPNKTIETDPIKIQRGIFQGDSLSPLWFCLALNPLSHILNLTPIGYPLQQREDDGLASTLPTTSRLNHLLYMDDIKLYAQDEEQLHQLANLTEKFSNDIKMEFGIDKCKINSIKAGRNYQHHYTLETGEKIDALNEQETYKYLGYNQSAQILHKDTKQTLKHQFRHRLNIILKTQLNSRNTIKAINSFAIPVLTYSFGIITWSKSDLKNLQRIINTSMTRFRKHHPRSCIQRLTLPRKEGGRGLIDIVNLHNTQITTLRQYFFNKMSSSALHKAIVQTDNKFTPLNMNQSTPQKNEKITQDKEKIEEWSRKSLHGRHRQDLSHPHVDKEASNAWLGRGELFPETEGFMTAIQDQVIETRNYKKFIMKVPSSSSDICRKCNGNSETIQHITGACKSIAQTDYKYRHDQVANIIHQKLATKYKLIPTLTTPIPYYKYNPDTVLENADYKLYYDRAILTDKTVHYNRPDITLVDKKNKTAFIIDIAIPNTHNLQNTISEKLTKYIDLKDEISRMWRLHKVSIVPIVLSVTGIIPKQLSLSLTLLDVPEQTYIQIQKSVILNTCRIVRKFLQTE

SEQ ID NO: 16512 - protein, 1423 aa, Mimas tiliae
MESSERRYNLRTLPGGRRGAPGAGAGCFSLRDTGGGALSRRALATQDATADRRELSRRTHGVKVTADSSGDDTISLFSSIPSTRPSYMTRGSKTLSTTSTNTLDGVMQDVDLDSEFASTASVTGMRRRWTSEMNQFILRTYLQLTTLETDTKSYLEPLHLKFIEKFPNMREVSRQRIGDQRRAIMRNKLVPQNIIDQIYNDVKDELTNLQTNLHTQTRQTCTQTQTDTKIILQNNKQTPNSGSTVTTQNYTTRMRWTTQQNEAIMTSYYRVTNLETNKTAYRKLLHRDVIKSCPSLAHLSEQRIADQRRIIVNSKYITQNKLDLIKEAVAKERVLNTTRIDTHNNDSPQDYQLNNNETLCSNNKDLIINHVPSFDTSQNRYPEIDETFKQALEFYKNTEATKRTYIPKQKTSKKLAQIVNYVDNITLPENINKDTDFNTLQTVIYCAAWTAAKVNGSKISLSPIDKAQCTKKLHKPHWQKRLEYRLDDLRAKIGRLTQYINGNRSRKLTKYVKEIIKQYKIHSVHEEPNTRLTHTLDTLKQKLAVITGRLQRYKNCTLRKQQNNSFSNNEKHFYRTIKHATTNTQNNRMEKNTNNSPDPENLRKFWAGIWEKTERHNTQANWIEAEIINNDRYPEMNFQHIPLETFVKVIRNLHNWKAPGSDYIHNYWYKKFTHIHPYLHNYINDFLQDPSKVPSYITAGTTFMIPKDTNDFTNPAKYRPITCLQTLYKIITSCISEIIYQHIDANNLLAEQQKGCRKFTQGCKEQLTIDSVILKQVQKTKANLFSMYIDYKKAYDSVPHSWLLQVLEIYKIHPKIITFLESIMKSWTTRLRLTTPIQTIETDSIKIQRGIFQGDALSPLWFCLALNPLSNILNSTAFGYPLKYQDAEDHAHNLPITNKLNHLLYMDDIKLYAEDEHQLYELAHLTEQFSHDIKMEFGIDKCRINSIKAGHSYQHQYTLDTGEKIDPLNEEETYKYLGYNQSLQIHHTQTKQMLKQQFRHRLNTILKTQLYARNTIKAINTFAIPILTYSFGIINWTNSDLKNLQRTINTSMTKFRKHHPRSCIQRITLPRKEGGRGLIDINNLHNSQITTLRQYFFNRMSSSALHKSVVQNDHNFTPLNLKQRIAQRNEKITGDKEKIEEWSRKSLHGRHRQDLSQPNVDKEASNAWLSRGELFPETEGFMTAIQDQIIETRNYKKHIMKIANLSSDLCRKCNSSSETIQHITGSCKLLAQTDYKFRHDQVANIIHQKLATKYKLIAIPKTPTPYYKYTPETVLENDNHKLYYDRAILTDKTVHYNRPDITLVDKKNKTAFIIDIAIPNTHNIQNTIAEKVTKYIDLKDEISRMWHIQKVSIIPIVLSSTGIIPKQLAQSLTLLDLPQQTYIQLQKAVVLNTCRIVRKFLQIESIPLPISNLDSNLTGSHLA

SEQ ID NO: 16513 - protein, 1161 aa, Mimas tiliae
MRNPTARMRWTTEQNETIMRLYYRITNLETNKTAYRKLLHKDFINAFPSLAHVSEQRVADQRRIIVNNKYITIDRLNSIKQEVARDLSRIPINRDTYNNCSTQDPHINYSDTPPLDSNNVEITGADHILNLETPNQRYSEIDETFEQALEFYKNTEPTNRTYIPKQKASKKFAKILHYLNNTILPENINQGTDFNTLQTVIYCAAWTAAKVNGSKIKLSPTERSPSAQKQYKPYWQRRLEHRLDDLRIKIGRLTQFINGNRSRKLSKHVNKIIEQYKIHSIHEAPNTHLTHTLDTLKQKLSVVTGRLKRYQNCTLRKQQNNIFSNNEKQFYRTIKNATSNVQQNNNDNSLNNHPDPEALKKFWAGIWEQPEQHNTQANWIETETKSNDLHAEMSFQHIPAETFLKVLRNLHNWKTPGSDYIHSYWYKKLTYIHPYLHNFINDFLYDPNKLPSYVTAGTTFMIPKDPNDSLNPAKYRPITCLQTLYKIITSCIAELVYQHIEQNNIIAEEQKGCRKFTQGCKEQLIIDSVILKHVQKTKADLYTMYIDYKKAYDSVPHSWLLQVLEIYKIHTKIITFLETVMRNWTTRLRLITPNKTIETDPIKIQRGIFQGDSLSPLWFCLALNPLSHILNLTPIGYPLQQREDEGLASTLPTTSRLNHLLYMDDIKLYAQDEEQLHQLANLTEKFSNDIKMEFGIDKCKINSIKAGRNYQHHYTLETGEKIDALNEQETYKYLGYNQSAQILHKDTKQTLKHQFRHRLNTILKTQLNSRNTIKAINSFAIPILTYSFGIITWSKSDLINLQRIINTSMTRFRKHHPRSCIQRLTLPRKEGGRGLIDIVNLHNTQITTLRQYFFNKMSSSALHKAIVQTDNKFTPLNMNQSTPQKNEKITQDKEKIEEWSRKSLHGRHRQDLSHPHVDKEASNAWLGRGELFPETEGFMTAIQDQVIETRNYKKFIMKVPSSSSDICRKCNGNAETIQHITGACKSIAQTDYKYRHDQVANIIHQKLATKYKLIPTLTTPIPYYKYNPETVLENADYKLYYDRAILTDKTVHYNRPDITLVDKKNKTAFIIDIAIPNTHNLQNTISEKLTKYIDLKDEISRMWRLHKVSIVPIVLSTTGIIPKQLSLSLTLLDVPEQTYIQIQKSVILNTCRIVRKFLQTE

SEQ ID NO: 16514 - protein, 1407 aa, Pyrrhopyge crida
MRLRNREIPQAGTHQGESRPGPSGSGCPAYSGGGNVSHNTAQSRTAAVAAAGRCELNRRTHSVEVTAEPLSGDNTQSLFPSIPSTRPSYMTRKTTASTVTTLDSVVQDVDLDSDLAPTSSVPKSRRRWTTEMNEFILRTYLHLTALETDTKTYLEPLHIQFIEKYPHMTVSRQRVGDQRRAIIRNNLLSQSTVEQITNQVREEIQNLQLISNTQTSTPTNSSAINNIPISKNNYTKNSSSSRMRWTNEHNETIIRSYLQITHLDKNKTAYRKLLHQDFINKFPNLAHLSEQRIADQRRAILNNKYISDERLAEIKGEVSEHLSLNNINEPYNSIIDTEIAIETETDNNSRTFLDAIELAEPEYQEIHQTNPIDNDPLIDDTFRLAFEYYKNTDPTKRTYIPKQKPSRKLAKIVEYLDRIVLPDTIDNHTDFLTMQTALYCAAWTAAKINGSKITMTPTDKHSTKKKEYIPKWQDRLVRRIKTLRGKIGRLTQYLNGNKSKKLTNQVNKILEQYKIHSVHEEPNTRHTHTLDTMKQKLSVTSGRLQRYKACTLRKKQNNQFTNNEKLFYRTIKQDTSNTQETRNTRNTNDTPNPDDLQKYWAKIWEDNTTHNTEAEWIDSEINKHAHITTMEFENISIDLLKKVIKNLHNWKAPGSDYIHCYWYKQFTSIHCHLKEHINKFIQDPTSMPTYITCGITYMISKDRNNLTDPAKYRPITCLQTIYKIITSCISELLYHHINSNNLLAEQQKGCKKLSQGCKEQLIIDSVVLNQVHKTKSNLFTMYIDYKKAYDSVPHSWLTQVLEIYKIHPSITNFLKTAMTNWTTQLKLSTPDQTIETQPIKIQRGIFQGDALSPLWFCLALNPLSNLLNSSDCGYPLKYTEEQQDNSYALNHLLYMDDIKLYAEDENQLNHLINLTEKFTQDIYMEFGIEKCKINSVINGQIYQHHYTLKTGEQIDPLDIQETYKYLGYNQSQQIHHKEIKQKIRLEFQHRLNSLLKTQLNSRNTIKSLNTFAIPILTYSFGIIKWTKSDLKSLQRKINTTMTKHRKHHPRSCIQRLTIPRKEGGRGLIDIVNLHNSQITNLRKYFFNKSASSALHKSTTQNDRKLTPLNLQDEATQNNENITDNNSKIAQWAAKSLHGRHRQDLCLPNVDKDASNAWLRHGDLFPETEGFMLAIQDQVIETRNYQKFIIKKINSDTCRKCSSCPETIQHITGACKSIAQTDYKHRHDQIANIIHQQLASREKLIDTTQPYYKYTPEAVLENPSAKLYFDRAILTDRTVHYNRPDITLIDKIHKTGYLIDIAVPNTHNLQSTIAEKVTKYTELKDEITRLWHLQKVSIIPIVISTTGVIPKQLHQSLNNLNLPSNLYLQLQKAAILNTCRIVRKFLNSDQEATPISHNTATHTHTPLT

SEQ ID NO: 16515 - protein, 1399 aa, Ardaris eximia
MRLRNRQIPQAGTREGESRPGPSGSGCPTYSGGGNVSRMTTQPRTAVVELNRRTRSVEVTAESLSGDDTKSLFSSIPSTRPSYMTRKTTASTVTTLDSVVQDVDLDSDLAPTSSVPKSRRRWTTEMNEFILRTYLHLTALETDTKTYLEPLHIQFTEKYPHMTVSRQRVGDQRRAIIRNNLLSQSTVEQITNQVREEIQNLQLISNTQTSTPTNSSAINNIPISKNNYTKNSSSSRMRWTNEHNETIIRSYLQITHLDKNKTAYRKLLHQDFINKFPNLAHLSEQRIADQRRAILNNKYISDERLSEIKGEVSEHLSLNNINEPYNSIIDTEIAIETETDNNSRTVLDAIELAEPEYQEMHQTNPRDNDPLIHDTFRLAFEYYKNTDPTKRTYIPKQKPSRKLAKIVEYLDRIVLPDTIDNHTDFLTMQTALYCAAWTAAKINGSKITMTPTDKHSTKKKEYIPKWQDRLVRRIKTLRGKIGRLTQYLNGNKSKKLTNQVNKILEQYKIHSVHEEPNTRHTHTLDTMKQKLSVTSGRLQRYKACTLRKKQNNQFTNNEKLFYRTIKQNTSNTQETRNTCNTNDIPNPDDLQKYWAKIWEDNTTHNTEAEWIDSEINKHAHITTMEVENISIDLLKKVIKNLHNWKAPGSDYIHCYWYKQFTSTHCHLTEHINKFIQDPTSMPTYITCGITYMIPKDRNNLTDPAKYRPITCLQTIYKIITSSISELLYHHINSNNLLAEQQKGCKKLSQGCKEQLIIDSVVLNQVHKTKSNLFTMYIDYKKAYDSVPHSWLTQVLEIYKIHPSITNFLKTAMTNWTTQLKLSTPDQTIETQPIKIQRGIFQGDALSPLWFCLALNPLSNLLNSSDCGYPLKYTEEQQDNSYTLNHLLYMDDIKLYAENENQLNHLINLTEKFTQDIYMEFGIEKCKINSVIKGQIYQHHYTLKTGEQIDPLDIQETYKYLGYNQSQQIHHKEIKQKIRLEFQHRLNSLLKTQLNSRNTIKALNTFAIPILTYSFGIIKWTKPDLKSLQRKINTTMTKHRKHHPRSCIQRLILPRKEGGRGLIDIVNLHNSQITNLRKYFFNKSALSALHKSTTQNDRKLTPLNLQDKATQNNENITDNNSKIAQWAAKSLHGRHRQDLCLPNVDKDASNAWLRHGDLFPETEGFMLAIQDQVIETRNYQKFIVKKINSDTCRKCNSCPETIQHITGACKSIAQTDYKHRHDQIANIIHQQLASREKLIDTTQPYYKYTPEAVLENPSAKLYFDRAILTDRTIHYNRPDITLIDKIHKTGYLIDIAVPNTHNLQSTIGEKVTKYTELKDEITRLWHLQKVSIIPIVISTTGVIPKQLHQSLNNLNLPSNLYLQLQKAAILNTCRIVRKFLNSDQEATPISHNTATHTPLT

SEQ ID NO: 16516 - protein, 972 aa, Ardaris sela
MQTALYCAAWTAAKINGSKITMTPTDKHSTKKKEYIPKWQDRLVRRIKTLRSKIGRLTQYLNGNKSKKLTNQVNKILEQYKIHSVHEEPNTRHTHTLDTMKQKLSVTSGRLQRYKACTLRKKQNNQFTNNEKLFYRTIKQDTSNTQETRNTCNTNDTPNPDDLQKYWAKIWEDNTTHNTEAEWIDSEINKHAHITTMEFENISIDLLKKVIKNLHNWKAPGSDYIHCYWYKQFTSTHCHLKEHINKFIQDPTSMPTYITCGITYMIPKDRNNLTDPAKYRPITCLQTIYKIITSCISELLYQHINSNNLLAEQQKGCKKLSQGCKEQLIIDSVVLNQVHKTKSNLFTMYIDYKKAYDSVPHSWLTQVLEIYKIHPSITNFLKTAMTNWTTQLKLSTPDQTIETQPIKIQRGIFQGDALSPLWFCLALNPLSNLLNSSDCGYPLKYTEEQQDNSYALNHLLYMDDIKLYAENENQLNHLINLTEKFTQDIYMEFGIEKCKINSVIKGQIYQHHYTLKTGEQIDPLDIQETYKYLGYNQSQQIHHKEIKQKIRLEFQHRLNSLLKTQLNSRNTIKALNTFAIPILTYSFGIIKWTKPDLKSLQRKINTTMTKHRKHHPRSCIQRLILPRKEGGRGLIDIVNLHNSQITNLRKYFFNKSALSALHKSTTQNDRKLTPLNLQDKATQNNENITDNNSKIAQWAAKSLHGRHRQDLCLPNVDKDASNAWLRHGDLFPETEGFMLAIQDQVIETRNYQKFIVKKINSDTCRKCNSCPETIQHITGACKSIAQTDYKHRHDQIANIIHQQLASREKLIDTTQPYYKYTPEAVLENPSAKLYFDRAILTDRTIHYNRPDITLIDKIHKTGYLIDIAVPNTHNLQSTIGEKVTKYTELKDEITRLWHLQKVSIIPIVISTTGVIPKQLHQSLNNLNLPSNLYLQLQKAAILNTCRIVRKFLNSDQEATPISHNTATHTPLT

SEQ ID NO: 16517 - protein, 1316 aa, Pyrrhopyge creona
MTRKTTASTVTTLDSVVQDVDLDSDLAPTSSEPKSRRRWTTEMNEFILRTYLHLTALETDTKTYLEPLHIQFIEKYPHMTVSRQRVGDQRRAIIRNNLLSQSTVEQITNQVREEIQNLQLISNTQTSTPTNSSAINNIPISKNNYTKNSSSSRMRWTNEHNETIIRSYLQITHLDKNKTAYRKLLHQDFINKFPNLAHLSEQRIADQRRAILNNKYISDERLAEIKGEVSEHLSLNNINEPYNSIIDTEIAIETETDNNSRTFLDAIELAEPEYQEINQTNPIDNDPLIDDTFRLAFEYYKNTDPTKRTYIPKQKPSRKLAKIVEYLDRIVLPDTIDNHTDFLTMQTALYCAAWTAAKINGSKITMTPTDKHSTKKKEYIPKWQDRLVRRIKTLRGKIGRLTQYLNGNKSKKLTNQVNKILEQYKIHSVHEEPNTRHTHTLDTMKQKLSVTSGRLRRYKACTLRKKQNNQFTNNEKLFYRTIKQDTSNTQETRNTRNTNDTPNPDDLQKYWAKIWEDNTTHNTEAEWIDSEINKHAHITTMEFENISIDLLKKVIKNLHNWKAPGSDYIHCYWYKQFTSTHCHLKEHINKFIQDPTSMPTYITCGITYMISKDRNNLTDPAKYRPITCLQTIYKIITSCISELLYHHINSNNLLAEQQKGCKKLSQGCKEQLIIDSVVLNQVHKTKSNLFTMYIDYKKAYDSVPHSWLTQVLEIYKIHPSITNFLKTAMTNWTTQLKLSTPDQTIETQPIKIQRGIFQGDALSPLWFCLALNPLSNLLNSSDCGYPLKYTEEQQDNSYALNHLLYMDDIKLYAENENQLNHLINLTEKFTQDIYMEFGIEKCKINSVINGQIYQHHYTLKTGEQIDPLDIQETYKYLGYNQSQQIHHKEIKQKIRLEFQHRLNSLLKTQLNSRNTIKALNTFAIPILTYSFGIIKWTKPDLKSLQRKINTTMTKHRKHHPRSCIQRLTLPRKEGGRGLIDIVNLHNSQITNLRKYFFNKSASSALHKSTTQNDRKLTPLNLQDKATQNNENITDNNSKIAQWAAKSLHGRHRQDLCLPNVDKDASNAWLRHGDLFPETEGFMLAIQDQVIETRNYQKFIIKKINSDTCRKCNSCPETIQHITGACKSIAQTDYKHRHDQIANVIHQQLASREKLIDTTQPYYKYTPEAVLENPSAKLYFDRAILTDRTVHYNRPDITLIDKIHKTGYLIDIAVPNTHNLQSTIGEKVTKYTELKDEITRLWHLQKVSIIPIVISTTGVIPKQLHQSLNNLNLPSNLYLQLQKAAILNTCRIVRKFLNSDQEATPISHNTATHTPLT

SEQ ID NO: 16518 - protein, 1316 aa, Pyrrhopyge kelita
MTRKTTASTVTTLDSVVQDVDLDSHLAPTSSVPKSRRRWTTEMNEFILRTYLHLTALETDTKTYLEPLHIQFIEKYPHMTVSRQRVGDQRRAIIRNNLLSQSTVEQITNQVREEIQNLQLISNTQTSTPTNSSAINNIPISKNNYTKNSSSSRMRWTNEHNETIIRSYLQITHLDKNKTAYRKLLHQDFINKFPNLAHLSEQRIADQRRAILNNKYISDERLAEIKGEVSEHLSLNNINEPYNSIIDTEIAIETETDNNSRTFLDAIELAEPEYQEIHQTNPIDNDPLIDDTFRLAFEYYKNTDPTKRTYIPKQKPSRKLAKIVEYLDRIVLPDTIDNHTDFLTMQTALYCAAWTAAKINGSKITMTPTDKHSTKKKEYIPKWQDRLVRRIKTLRGKIGRLTQYLNGNKSKKLTNQVNKILEQYKIHSVHEEPNTRHTHTLDTMKQKLSVTSGRLQRYKACTLRKKQNNQFTNNEKLFYRTIKQDTSNTQETRNTRNTNDTPNPDDLQKYWAKIWEDNTTHNTEAEWIDSEINKHAHITTMEFENISIDLLKKVIKNLHNWKAPGSDYIHCYWYKQFTSIHCHLKEHINKFIQDPTSMPTYITCGITYMISKDRNNRTDPAKYRPITCLQTIYKIITSCISELLYHHINSNNLLAEQQKGCKKLSQGCKEQLIIDSVVLNQVHKTKSKLFTMYIDYKKAYDSVPHSWLTQVLEIYKIHPSITNFLKTAMTNWTTQLKLSTPDQTIETQPIKIQRGIFQGDALSPLWFCLALNPLSNLLNSSDCGYPLKYTEEQQDNSYALNHLLYMDDIKLYAENENQLNHLINLTEKFTQDIYMEFGIEKCKINSVINGQIYQHHYTLKTGEQIDPLDIQETYKYLGYNQSQQIHHKEIKQKIRLEFQHRLNSLLKTQLNSRNTIKALNTFAIPILTYSFGIIKWTKPDLKSLQRKINTTMTKHRKHHPRSCIQRLTLPRKEGGRGLIDIVNLHNSQITNLRKYFFNKSASSALHKSTTQNDRKLTPLNLQDKATQNNENITDNNSKIAQWAAKSLHGRHRQDLCLPNVDKDASNAWLRHGDLFPETEGFMLAIQDQVIETRNYQKFIIKKINSDTCRKCNSCPETIQHITGACKSIAQTDYKHRHDQIANIIHQQLASREKLIDTTQPYYKYTPEAVLENPSAKLYFDRAILTDRTVHYNRPDITLIDKIHKTGYLIDIAVPNTHNLQSTIGEKVTKYTELKDEITRLWHLQKVSIIPIVISTTGVIPKQLHQSLNNLNLPTNLYLQLQKAAILNTCRIVRKFLNSDQEATPISHNTATHTPLT

SEQ ID NO: 16519 - protein, 1316 aa, Pyrrhopyge papius
MTRKTTASTVTTLDSAVQDVDRDSDLAPTSSVPKSRRRWTTEMNEFILRTYLHLTALETDTKTYLEPLHIQFIEKYPHMTVSRQRVGDQRRAIIRNNLLSQSTVEQITNQVREEIQNLQLISNTQTSTPTNSSAINNIPISKNNYTKNSSSSRMRWTNEHNETIIRSYLQITHLDKNKTAYRKLLHQDFINKFPNLAHLSEQRIADQRRAILNNKYISDERLAEIKGEVSEHLSLNNINEPYNSIIDTEIAIETETDNNSRTFLDAIELAEPEYQEIHQTNPIDNDPLIDDTFRLAFEYYKNTDPTKRTYIPKQKPSRKLAKIVEYLDRIVLPDTIDNHTDFLTMQTALYCAAWTAAKINGSKITMTPTDKHSTKKKEYIPKWQDRLVRRIKTLRGKIGRLTQYLNGNKSKKLTNQVNKILEQYKIHSVHEEPNTRHTHTLDTMKQKLSVTSGRLQRYKACTLRKKQNNQFTNNEKLFYRTIKQDTSNTQEIRNTRNTNDTPNPDDLQKYWAKIWEDNTTHNTEAEWIDSEINKHAHITTMEFENISIDLLKKVIKNLHNWKAPGSDYIHCYWYKQFTSIHCHLKEHINKFIQDPSSMPTYITCGITYMISKDRNNLTDPAKYRPITCLQTIYKIITSCISELLYHHINSNNLLAEQQKGCKKLSQGCKEQLIIDSVVLNQVHKTKSNLFTMYIDYKKAYDSVPHSWLTQVLEIYKIHPSITNFLKTAMTNWTTQLKLSTPDQTIETQPIKIQRGIFQGDALSPLWFCLALNPLSNLLNSSDCGYPLKYTEEQQDNSYALNHLLYMDDIKLYAENENQLNHLINLTEKFTQDIYMEFGIEKCKINSVINGQIYQHHYTLKTGEQIDPLDIQETYKYLGYNQSQQIHHKEIKQKIRLEFQHRLNSLLKTQLNSRNTIKALNTFAIPILTYSFGIIKWTKPDLKSLQRKINTTMTKHRKHHPRSCIQRLTLPRKEGGRGLIDIVNLHNSQITNLRKYFFNKSASSALHKSTTQNDRKLTPLNLQDKATQNNENITDNNSKIAQWAAKSLHGRHRQDLCLPNVDKDASNAWLRHGDLFPETEGFMLAIQDQVIETRNYQKFIIKKINSDTCRKCNSCPETIQHITGACKSIAQTDYKHRHDQIANIIHQQLASREKLIDTTQPYYKYTPEAVLENPSAKLYFDRAILTDRTVHYNRPDITLIDKIHKTGYLIDIAVPNTHNLQSTIGEKVTKYTELKDEITRLWHLQKVSIIPIVISTTGVIPKQLHQSLNNLNLPTNLYLQLQKAAILNTCRIVRKFLNSDQEATPISHNTATHTPLT

SEQ ID NO: 16520 - protein, 1400 aa, Pyrrhopyge sergius
MRLRNRQIPQAGTREGESRPGPSGSGCPTYSGGGGNVSRMTTQPRTAVVELNRRTRSVEVTAESLSGDDTQSLFSSIPSTRPSYMTRKTTASTVTTLDSVVQDVDLDSDLAPTSSVPKSRRRWTTEMNEFILRTYLHLTALETDTKTYLEPLHIQFIEKYPHMTVSRQRVGDQRRAIIRNNLLSQSTVEQITNQVREEIQNLQLISNTQTSTPTNSSAINNIPISKNNYTKNSSSSRMRWTNEHNETIIRSYLQITHLDKNKTAYRKLLHQDFINKFPNLAHLSEQRIADQRRAILNNKYISDERLAEIKGEVSEHLSLNNINEPYNSIIDTEIAIETETDNNSRTFLDAIELAEPEYQEIHQTNPIDNDPLIDDTFRLAFEYYKNTDPTKRTYIPKQKPSRKLAKIVEYLDRIVLPDTIDNHTDFLTMQTALYCAAWTAAKINGSKITMTPTDKHSTKKKEYIPKWQDRLVRRIKTLRGKIGRLTQYLNGNKSKKLTNQVNKILEQYKIHSVHEEPNTRHTHTLDTMKQKLSVTSGRLQRYKACTIRKKQNNQFTNNEKLFYRTIKQDTSNTQETRNTRNTNDTPNPDDLQKYWAKIWEDNTTHNTEAEWIDSEINKHAHITTMEFENISIDLLKKVIKNLHNWKAPGSDYIHCYWYKQFTSIHCHLKEHINKFIQDPTSMPTYITCGITYMISKDRNNLTDPAKYRPITCLQTIYKIITSCISELLYHHINSNNLLAEQQKGCKKLSQGCKEQLIIDSVVLNQVHKTKSNLFTMYIDYKKAYDSVPHSWLTQVLEIYKIHPSITNFLKTAMTNWTTQLKLSTPDQTIETQPIKIQRGIFQGDALSPLWFCLALNPLSNLLNSSDCGYPLKYTEEQQDNSYALNHLLYMDDIKLYAENENQLNHLINLTEKFTQDIYMEFGIEKCKINSVINGQIYQHHYTLKTGEQIDPLDIQETYKYLGYNQSQQIHHKEIKQKIRLEFQHRLNSLLKTQLNSRNTIKALNTFAIPILTYSFGIIKWTKPDLKSLQRKINTTMTKHRKHHPRSCIQRLTLPRKEGGRGLIDIVNLHNSQITNLRKYFFNKSASSALHKSTTQNDRKLTPLNLQDKATQNNENITDNNSKIAQWAAKSLHGRHRQDLCLPNVDKDASNAWLRHGDLFPETEGFMLAIQDQVIETRNYQKFIIKKINSDTCRKCNSCPETIQHITGACKSIAQTDYKHRHDQIANIIHQQLASREKLIDTTQPYYKYTPEAVLENPSAKLYFDRAILTDRTVHYNRPDITLIDKIHKTGYLIDIAVPNTHNLQSTIGEKVTKYTELKDEITRLWHLQKVSIIPIVISTTGVIPKQLHQSLNNLNLPTNLYLQLQKAAILNTCRIVRKFLNSDQEATPISHNTATHTPLT

SEQ ID NO: 16521 - protein, 873 aa, Ardaris pityusa
MKQKLSVTSGRLQRYKACTLRKKQNNQFTNNENLFYRTIKQDTSNTQETRNTCNTNDTPNPDDLQKYWAKIWEDNTTHNTEAEWIDSEINKHAHITTMEFENISIDLLKKVIKNLHNWKAPGSDYIHCYWYKQFTSTHCHLKEHINKFIQDPTSMPTYITCGITYMIPKDRNNLTDPAKYRPITCLQTIYKIITSCISELLYHHINSNNLLAEQQKGCKKLSQGCKEQLIIDSVVLNQVHKTKSNLFTMYIDYKKAYDSVPHSWLTQVLEIYKIHPSITNFLKTAMTNWTTQLKLSTPDQTIETQPIKIQRGIFQGDALSPLWFCLALNPLSNLLNSSDCGYPLKYTEEQQDNSYALNHLLYMDDIKLYAENENQLNHLINLTEKFTQDIYMEFGIEKCKINSVIKGQIYQHHYTLKTGEQIDPLDIQETYKYLGYNQSQQIHHKEIKQKIRLEFQHRLNSLLKTQLNSRNAIKALNTFAIPILTYSFGIIKWTKPDLKSLQRKINTTMTKHRKHHPRSCIQRLILPRKEGGRGLIDIVNLHNSQITNLRKYFFNKSALSALHKSTTQNDRKLTPLNLQDKATQNNENITDNNSKIAQWAAKSLHGRHRQDLCLPNVDKDASNAWLRHGDLFPETEGFMLAIQDQVIETRNYQKFIVKKINSDTCRKCNSCPETIQHITGACKSIAQTDYKHRHDQIANIIHQQLASREKLIDTTQPYYKYTPEAVLENPSAKLYFDRAILTDRTIHYNRPDITLIDKIHKTGYLIDIAVPNTHNLQSTIGEKVTKYTELKDEITRLWHLQKVSIIPIVISTTGVIPKQLHQSLNNLNLPSNLYLQLQKAAILNTCRIVRKFLNSDQEATPISHNTATHTPLT

SEQ ID NO: 16522 - protein, 1390 aa, Pyrrhopyge hadassa
MRLRNREIPQAGTHQGESRPGPSGSGCPAYSGGGNVSHNTAQSRTVAVAAAGRCELNRRTHSVEVTAEPLSGDATQSLFPSIPSTRPSYMTRKTTASTVTTLDSVVQDVDLDSDLAPTSSVPKSRRRWTTEMNEFILRTYLHLTALETDTKTYLEPLHIQFIEKYPHMTVSRQRVGDQRRAIIRNNLLSQSTVEQITNQVREEIQNLQLISNTQTSTTTNSSAINNIPISKNNYTKNSSSSRMRWTNEHNETIIRSYLQITHLDKNKTAYRKLLHQDFINKFPNLAHLSEQRIADQRRAILNNKYISDERLAEIKGEVSEHLSLNNINEPYNSIIDTEIAIETETDNNSRTFLDAIELAEPEYQEIHQTNPIDNDPLIDDTFRLAFEYYKNIDPTKRTYIPKQKPSRKLAKIVEYLDRIVLPDTIDNHTDFLTMQTALYCAAWTAAKINGSKITMTPTDKHSTKKKEYIPKWQDRLVRRIKTLRGKIGRLTQYLNGNKSKKLTNQVNKILEQYKIHSVHEEPNTRHTHTLDTMKQKLSVTSGRLQRYKACTLRKKQNNQFTNNEKLFYRTIKQDTSNTQETRNTRNTNDTPNPDDLQKYWAKIWEDNTTHNTEAEWIDSEINKHAHITTMEFENISIDLLKKVIKNLHNWKAPGSDYIHCYWYKQFTSIHCHLKEHINKFIQDPTSMPTYITCGITYMISKDRNNLTDPAKYRPITCLQTIYKIITSCISELLYHHINSNNLLAEQQKGCKKLSQGCKEQLIIDSVVLNQVHKTKSNLFTMYIDYKKAYDSVPHSWLTQVLEIYKIHPSITNFLKTAMTNWTTQLKLSTPDQTIETQPIKIQRGIFQGDALSPLWFCLALNPLSNLLNSSDCGYPLKYTEEQQDNSYALNHLLYMDDIKLYAENENQLNHLINLTEKFTQDIYMEFGIEKCKINSVINGQIYQHHYTLKTGEQIDPLDIQETYKYLGYNQSQQIHHKEIKQKIRLEFQHRLNSLLKTQLNSRNTIKSLNTFAIPILTYSFGIIKWTKSDLKSLQRKINTTMTKHRKHHPRSCIQRLTLPRKEGGRGLIDIVNLHNSQITNLRKYFFNKSASSALHKSTTQNDRKLTPLNLQDKATQNNENITDNNSKIAQWAAKSLHGRHRQDLCLPNVDKDASNAWLRHGDLFPETEGFMLAIQDQVIETRNYQKFIIKKINSDTCRKCNSCPETIQHITGACKSIAQTDYKHRHDQIANIIHQQLASREKLIDTTQPYYKYTPEAVLENPSAKLYFDRAILTDRTVHYNRPDITLIDKIHKTGYLIDIAVPNTHNLQSTIAEKVTKYTELKDEITRLWHLQKVSIIPIVISTTGVIPKQLHQSLNNLNLPSNSYLQLQKAAILNTCRIVRKFLNSDQE

SEQ ID NO: 16523 - protein, 1399 aa, Ardaris minthe
MRLRNRQIPQAGTREGESRPGPSGSGCPTYSGGGNVSRMTTQPRTAVVELNRRTRSVEVTAESLSDDDTQSLFSSIPSTRPSYMTRKTTASTVTTLDSVVQDVDLDSDFAPTSSVPKSRRRWTTEMNEFILRTYLHLTALETDTKTYLEPLHIQFTEKYPHMTVSRQRVGDQRRAIIRNNLLSQSTVEQITNQVREEIQNLQLISNTQTSTPTNSSAINNIPISKNNYTKNSSSSRMRWTNEHNETIIRSYLQITHLDKNKTAYRKLLHQDFINKFPNLAHLSEQRIADQRRAILNNKYISDERLAEIKGEVSEHLSLNNINEPYNSIIDTEIAIETETDNNSRTVLDAIELAEPEYQEIHQTNPIDNDPLIDDTFRLAFEYYKNTDPTKRTYIPKQKPSRKLAKIVEYLDRIVLPDTIDNHTDFLTMQTALYCAAWTAAKINGSKITMTPTDKHSTKKKEYIPKWQDRLVRRIKTLRGKIGRLTQYLNGNKSKKLTNQVNKILEQYKIHSVHEEPNTRHTHTLDTMKQKLSVTSGRLQRYKACTLRKKQNNQFTNNEKLFYRTIKQDTSNTQETRNTCNTNDTPNPDDLQKYWAKIWEDNTTHNTEAEWIDSEINKHAHITTMEFENISIDLLKKVIKNLHNWKAPGSDYIHCYWYKQFTSTHCHLKEHINKFIQDPTSMPTYITCGITYMIPKDRNNLTDPAKYRPITCLQTIYKIITSCISELLYHHINSNNLLAEQQKGCKKLSQGCKEQLIIDSVVLNQVHKTKSNLFTMYIDYKKAYDSVPHSWLTQVLEIYKIHPSITNFLKTAMTNWTTQLKLSTPDQTIETQPIKIQRGIFQGDALSPLWFCLALNPLSNLLNSSDCGYPLKYTEEQQDNSYALNHLLYMDDIKLYAENENQLNHLINLTEKFTQDIYMEFGIEKCKINSVIKGQIYQHHYTLKTGEQIDPLDIQETYKYLGYNQSQQIHHKEIKQKIRLEFQHRLNSLLKTQLNSRNTIKALNTFAIPILTYSFGIIKWTKPDLKSLQRKINTTMTKHRKHHPRSCIQRLTLPRKEGGRGLIDIVNLHNSQITNLRKYFFNKSALSALHKSTTQNDRKLTPLNLQDKATQNNENITDNNSKIAQWAAKSLHGRHRQDLCLPNVDKDASNAWLRHGDLFPETEGFMLAIQDQVIETRNYQKFIVKKINSDTCRKCNSCPETIQHITGACKSIAQTDYKHRHDQIANIIHQQLASREKLIDTTQPYYKYTPEAVLENPSAKLYFDRAILTDRTVHYNRPDITLIDKIHKTGYLIDIAVPNTHNLQSTIGEKVTKYTELKDEITRLWHLQKVSIIPIVISTTGVIPKQLHQSLNNLNLPSNLYLQLQKAAILNTCRIVRKFLNSDQEATPISHNTATHTPLT

SEQ ID NO: 16524 - protein, 1316 aa, Pyrrhopyge haemon
MTRKTTASTVTTLDSVVQDVDLDSDLAPTSSVPKSRRRWTTEMNEFILRTYLHLTALETDTKTYLEPLHIQFIEKYPHMTVSRQRVGDQRRAIIRNNLLSQSTVEQITNQVREEIQNLQLISNTQTSTPTNSSAINNIPISKNNYTKNSSSSRMRWTNEHNETIIRSYLQITHLDKNKTAYRKLLHQDFINKFPNLAHLSEQRIADQRRAILNNKYISDERLAEIKGEVSEHLSLNNINEPYNSIIDTEIAIETETDNNSRTFLDAIELAEPEYQEIHQTNPIDNDPLIDDTFRLAFEYYKNTDPTKRTYIPKQKPSRKLAKIVEYLDRIVLPDTIDNHTDFLTMQTALYCAAWTAAKINGSKITMTPTDKHSTKKKEYIPKWQDRLVRRIKTLRGKIGRLTQYLNGNKSKKLTNQVNKILEQYKIHSVHEEPNTRHTHTLDTMKQKLSVTSGRLQRYKACTLRKKQNNQFTNNEKLFYRTIKQDTSNTQETRNTRNTNDTPNPDDLQKYWAKIWEDNTTHNTEAEWIDSEINKHAHITTMEFENISIDLLKKVIKNLHNWKAPGSDYIHCYWYKQFTSIHCHLKEHINKFIQDPTSMPTYITCGITYMISKDRNNLTDPAKYRPITCLQTIYKIITSCISELLYHHINSNNLLAEQQKGCKKLSQGCKEQLIIDSVVLNQVHKTKSNLFTMYIDYKKAYDSVPHSWLTQVLEIYKIHPSITNFLKTAMTNWTTQLKLSTPDQTIETQPIKIQRGIFQGDALSPLWFCLALNPLSNLLNSSDCGYPLKYTEEQQDNSYALNHLLYMDDIKLYAENENQLNHLINLTEKFTQDIYMEFGIEKCKINSVINGQIYQHHYTLKTGEQIDPLDIQETYKYLGYNQSQQIHHKEIKQKIRLEFQHRLNSLLKTQLNSRNTIKSLNTFAIPILTYSFGIIKWTKSDLKSLQRKINTTMTKHRKHHPRSCIQRLTIPRKEGGRGLIDIVNLHNSQITNLRKYFFNKSASSALHKSTTQNDRKLTPLNLQDKATQNNENITDNNSKIAQWAAKSLHGRHRQDLCLPNVDKDASNAWLRHGDLFPETEGFMLAIQDQVIETRNYQKFIIKKINSDTCRKCNSCPETIQHITGACKSIAQTDYKHRHDQIANIIHQQLASREKLIDTTQPYYKYTPEAVLENPSAKLYFDRAILTDRTVHYNRPDITLIDKIHKTGYLIDIAVPNTHNLQSTIAEKVTKYTELKDEITRLWHLQKVSIIPIVISTTGVIPKQLHQSLNNLNLPSNLYLQLQKAAILNTCRIVRKFLNSDQEATPISHNTATHTPLT

SEQ ID NO: 16525 - protein, 1389 aa, Laothoe populi
MESNEKRYNLRSLPGGRRGAPGAGAGCLSLRDTGGVALSRRARATQDATAGRCELSRRTRGVEATADLTGEDTVSLFSSIPSTRPSYMTRRTKTLSTISTLDGVVQDVDLDSELAPTAGASNTRRRWTSEMNQFILRTYLQLTTLDTDTKTYLEPLHLKFIEKFPNMHEVSRQRLGDQRRAIIRAKLLPQNIIDRIYNEVKDEIANLTRQTHPQVVTTINPNCNTHTPSNVFPTQKSTTRMRWTTEQNEAIMRSYYRVTNLETNKTAYRKLLHRDLLNTFPSLAHLSEQRIADQRRIIVNNKYISNDRLNSIKQNVAEEFTQFSTSQNTYNGSSQYTHTNCNETLLENIDIHFPENHALNLETSDKSYPEIDETFQQALDFYKNTEPTSRVYIPKQKSSKKLAKITDYLNKKILPENITQDTDFKTFQTVIYCSAWTAAKVNGSKINLTDSSQNTKIQDKPHWQRRLEHRLNDLRVKIGRLTQFINGNRNRKLRKHVAKIIEQYKIHSIHEEPNTHLSHTLDTLKQKLSVITGRLQRYKNCTLRKQQNNNFCNNEKHFYRTIKQATTNIQHNSTENNGNTSPDPKQLKEFWAGIWEKSEKHNTHANWIEVETINNDRYAEMNFQHIPLDTFIKVIRNLHNWKAPGSDHIHSYWYKKLTHIHPYLHNYINEFLEDPSKVPSYVTSGTTFMIPKDASDTANPAKYRPITCLQNLYKIITSCITELVYQHIDAHNILTEQQKGCRKFSQGCKEQLIIDSVILKHVQKTKADLFTMYIDYKKAYDSVPHSWLLHVLDIYKIHPKLVAFLERMMRNWTTRLRLTTPTEIIETNPIKIQRGIFQGDSLSPLWFCLALNPLSNILNTTEFGYPLNCNTSIDGVTGNQSTTNKLNHLLYMDDIKLYALDEDQLYQLANLTEQFSNDIKMEFGIDKCKINSIKSGHSYQHHYTLETGEKIDPLNEQETYKYLGYNQSLQIHYKDTKQKLKLQFRHRLNTILKTQLYSRNTIKAINSFAIPILTYSFGIINWTKSELKNLQRMVNTSMTRFRKHHPRSCIQRLTLPRNEGGRGLIDIVNLQSKQIITLRQYFFSKMTYSLLHTSIAQNDHNFTPLNLKHTTIQRNEKITDDKQKIAEWSQKSLHGRHRYDLSQPNVDKEASNAWLTRGELFPETEGFMTAIQDQVIETRNYKKYIMKIPSLLSDMCRRCNSSSETIQHITGACKSIAQTDYKFRHDQVANIIHQKLAAKYNLIINTPTTPYYKYTPDIVLENSSRKLYFDRAILTDKTVHYNRPDITMVDKINKTAYIIDIAIPNTHNLQTTISEKLSKYNDLKDEIARMWKLHKVFIVPIVLSTTGIIPKQLSQSLELLNLPQQTYVQLQKAVVLNTCRIVRKFMQTE

SEQ ID NO: 16526 - protein, 1092 aa, Laothoe populi
MMLLKMKEIENHNNIKQNVAEEFTQFSTSQNTYNGSSQYTHTNCNETLLENIDIHFPENHALNLETSDKSYPEIDETFQQALDFYKNTEPTSRVYIPKQKSSKKLAKITDYLNKKILPENITQDTDFKTFQTVIYCSAWTAAKVNGSKINLTDSSQNTKIQDKPHWQRRLEHRLNDLRVKIGRLTQFINGNRNRKLRKHVAKIIEQYKIHSIHEEPNTHLSHTLDTLKQKLSVITGRLQRYKNCTLRKQQNNNFCNNEKHFYRTIKQATTNIQHNSTENNGNTSPDPKQLKEFWAGIWEKSEKHNTHANWIEVETINNDRYAEMNFQHIPLDTFIKVIRNLHNWKAPGSDHIHSYWYKKLTHIHPYLHNYINEFLEDPSKVPSYVTSGTTFMIPKDASDTANPAKYRPITCLQNLYKIITSCITELVYQHIDAHNILTEQQKGCRKFSQGCKEQLIIDSVILKHVQKTKADLFTMYIDYKKAYDSVPHSWLLHVLDIYKIHPKLVAFLERMMRNWTTRLRLTTPTEIIETNPIKIQRGIFQGDSLSPLWFCLALNPLSNILNTTEFGYPLNCNTSIDGVTGNQSTTNKLNHLLYMDDIKLYALDEDQLYQLANLTEQFSNDIKMEFGIDKCKINSIKSGHSYQHHYTLETGEKIDPLNEQETYKYLGYNQSLQIHYKDTKQKLKLQFRHRLNTILKTQLYSRNTIKAINSFAIPILTYSFGIINWTKSELKNLQRMVNTSMTRFRKHHPRSCIQRLTLPRNEGGRGLIDIVNLQSKQIITLRQYFFSKMTYSLLHTSIAQNDHNFTPLNLKHTTIQRNEKITDDKQKIAEWSQKSLHGRHRYDLSQPNVDKEASNAWLTRGELFPETEGFMTAIQDQVIETRNYKKYIMKIPSLLSDMCRRCNSSSETIQHITGACKSIAQTDYKFRHDQVANIIHQKLAAKYNLIINTPTTPYYKYTPDIVLENSSRKLYFDRAILTDKTVHYNRPDITMVDKINKTAYIIDIAIPNTHNLQTTISEKLSKYNDLKDEIARMWKLHKVFIVPIVLSTTGIIPKQLSQSLELLNLPQQTYVQLQKAVVLNTCRIVRKFMQTE

SEQ ID NO: 16527 - protein, 769 aa, Laothoe populi
MNFQHIPLDTFIKVIRNLHNWKAPGSDHIHSYWYKKLTHIHPYLHNYINEFLQDPSKVPSYVTSGTTFMIPKDASDTTNPAKYRPITCLQNLYKIITSCITELVYQHIDAHNILAVQQKGCRKFSQGCKEQLIIDSVILKHVQKTKADLFTMYIDYKKAYDSVPHSWLLHVLDIYKIHPKIVAFLERMMKNWTTRLRLTTPTEIIETNPIKIQRGIFQGDSLSPLWFCLALNPLSNILNSTEFGYPLNCNKSSDGVTGNQSTTNKLNHLLYMDDIKLYGLGEDQLYQLANLTEKFSNDIKMEFGIDKCKINSIKSGYNYQHLYTLETGEKIDPLNEQETYKYLGYNQSLQIHYKDTKQKLKLQFRHRLNTILKTQLYSRNTIKAINSFAIPILTYSFGIINWTKSELKNLQRMVNTSMTRFRKHHPRSCIQRLTCPRNEGGRGLIDIVNLQSKQIITLRQYFFNKMTYSLLHTSIAQNDHNFTPLNLKHTTIQRNEKITDDKQKITEWSQKSLHGRHRYDLSQPNVDKEASNAWLTRGELFPETEGFMTAIQDQVIETRNYKKYIMKIPSLLSDMCRRCNSSSETIQHITGACKSIAQTDYKFRHDQVANIIHQKLAAKYNLIINTPTTPYYKYTPDIVLENSTRKLYFDRAILTDKTVHYNRPDITMVDKINKTAYIIDIAIPNTHNLQTTISEKLSKYNDLKDEIARMWKLHKVFIVPIVLSTTGIIPKQLSQSLELLNLPQQTYVQLQKAVVLNTCRIVRKFMQTE

SEQ ID NO: 16528 - protein, 1389 aa, Laothoe populi
MESNEKRYNLRSLPGGRRGAPGAGAGCLSLRDTGGVALSRRARATQDATAGRCELSRRTRGVEATADLTGEDTVSLFSSIPSTRPSYMTRRTKTLSTISTLDGVVQDVDLDSELAPTAGASNTRRRWTSEMNQFILRTYLQLTTLDTDTKTYLEPLHLKFIEKFPNMHEVSRQRLGDQRRAIIRAKLLPQNIIDRIYNEVKDEIANLTRQTHPQVVTTINPNCNTHTPSNVFPTQKSTTRMRWTTEQNEAIMRSYYRVTNLETNKTAYRKLLHRDLLNTFPSLAHLSEQRIADQRRIIVNNKYISNDRLNSIKQNVAEEFTQFSTSQNTYNGSSQYTHTNCNETLLENIDIHFPENHALNLETSDKSYPEIDETFQQALDFYKNTEPTSRVYIPKQKSSKKLAKITDYLNKKILPENITQDTDFKTFQTVIYCSAWTAAKVNGSKINLTDSSQNTKIQDKPHWQRRLEHRLNDLRVKIGRLTQFINGNRNRKLRKHVAKIIEQYKIHSIHEEPNTHLSHTLDTLKQKLSVITGRLQRYKNCTLRKQQNNNFCNNEKHFYRTIKQATTNIQHNSTENNGNTSPDPKQLKEFWAGIWEKSEKHNTHANWIEVETINNDRYAEMNFQHIPLDTFIKVIRNLHNWKAPGSDHIHSYWYKKLTHIHPYLHNYINEFLEDPSKVPSYVTSGTTFMIPKDASDTANPAKYRPITCLQNLYKIITSCITELVYQHIDAHNILTEQQKGCRKFSQGCKEQLIIDSVILKHVQKTKADLFTMYIDYKKAYDSVPHSWLLHVLDIYKIHPKLVAFLERMMRNWTTRLRLTTPTEIIETNPIKIQRGIFQGDSLSPLWFCLALNPLSNILNTTEFGYPLNCNTSIDGVTGNQSTTNKLNHLLYMDDIKLYALDEDQLYQLANLTEQFSNDIKMEFGIDKCKINSIKSGHSYQHHYTLETGEKIDPLNEQETYKYLGYNQSLQIHYKDTKQKLKLQFRHRLNTILKTQLYSRNTIKAINSFAIPILTYSFGIINWTKSELKNLQRMVNTSKTRFRKHHPRSCIQRLTLPRNEGGRGLIDIVNLQSKQIITLRQYFFSKMTYSLLHTSIAQNDHNFTPLNLKHTTIQRNEKITDDKQKIAEWSQKSLHGRHRYDLSQPNVDKEASNAWLTRGELFPETEGFMTAIQDQVIETRNYKKYIMKIPSLLSDMCRRCNSSSETIQHITGACKSIAQTDYKFRHDQVANIIHQKLAAKYNLIINTPTTPYYKYTPDIVLENSSRKLYFDRAILTDKTVHYNRPDITMVDKINKTAYIIDIAIPNTHNLQTTISEKLSKYNDLKDEIARMWKLHKVFIVPIVLSTTGIIPKQLSQSLELLNLPQQTYVQLQKAVVLNTCRIVRKFMQTE

SEQ ID NO: 16529 - protein, 1406 aa, Mimas tiliae
MEQINKKYNLRPLPGGRRGAPGAGAGCHSMRDTGGDALSRRALATQDITAGRCELSRRTRDVEATADLSGDDTVSLFSSIPSTRPSYMTRRTKTLSTISKPDGVVQDVDLDTELAPTAGVSGTRRRWTSEMNQFILRTYLQLTTLGTDTKAYLEPLHLKFIEKFLNMREVSRQRVGDQRRAIIRSKLLPQNIIDKIYNEVKEEIDNLQNRRQTYTQPQTITTISPQTNTQTSNTEFASNSQNPTSRMRWTSEQNEAIMRSYYRVTNLETNKTAYRKLLHRDFVNTFPSLAHLSEQRIADQRRIIVNNKYISDDRLNSIKQAIAEELPHCSTNKNTHNESTLDSHTNCNEIMNSIELNFPENRVINSETPENRNPEIDDTFQKAIDFYKNTEPTNRTYIPKQKPSKKLAKITHYLNNKTLPKNITQETDFKTFQTVIYCAAWTAAKVNGSKINLIPTNTTQNTKKQYKPHWQRRLEYRLDDLRTKIGRLTQFINGNNNRKLTKHVKKIIEQYKIHSIHEEPNTQLTHTLDTLKQKLSVITGRIQRYKNCTLRKQQNNIFINNEKHFYRTIKQATTNTQHNIIEDSENNSPDPNELKEFWAGIWEKAEKHNTQADWIEVETINNDRYAEMNFQHIPLDTFIKVLHNLHNWKSPGSDYIHSYWYKKFTYIHPYLHNYINDFLQDPSKVPTYITSGITFMIPKDANDATNPAKYRPITCLQTLYKIITSCVTEVVYEHIDANNILSEQQKGCRKFSQGCKEQLIIDSVILKQVQKTKANLFTMYIDYKKAYDSVPHSWLLHVLDIYKIHPKIVSFLGTMMKNWTTRLRLTTPTELIETDAIKIQRGIFQGDSLSPLWFCLALNPLSNILNSSALGYPLKYTDIDGVTDDNESTTNKLNHLLYMDDIKLYAQDEDQLYQLANFTEQFSNDIRMEFGIDKCKINSVKAGHNFQHQYTLETGVKIDPLNEQETYKYLGYNQSLQIQYKETKQMLKLQFQHRLNTILKTQLNSRNTIKAINSFAIPILTYSFGIINWTKSELKNLQRTINTSMTRFRKHHPRSCIQRLTLPRTEGGRGLIDIINLNNRQIINLRQYFFNKIQSSVLHKSIAQNDHNFTPLNLKQTTAQRNEKLTDDTEKIEAWSRKSLHGRHRHDLSQPNVDKEASNACLSRGELFPETEGFMTAIQDQVIETRNYKKYIMKIPNLPSDLCRKCNSSSETIQHITGACKSIAQTDYKFRHDQVANIIHQKLALKYKLITTTPTVPYYKYNPDTVLENANTKLYFDRAILTDKTVHYNRPDITMVNKINRTAYIIDIAIPNTHNLQNTISEKLTKYIDLKDEMIRMWRLQKVSIVPIVLSTTGIIPKQLSQSLEFLSLPPQTFVQLQKAVVLNTCRIVRKFMQTESSPFPIVNLD

SEQ ID NO: 16530 - protein, 1406 aa, Mimas tiliae
MEQINKKYNLRPLPGGRRGAPGAGAGCHSMRDTGGDALSRRALATQDITAGRCELSRRTRDVEATADLSGDDTVSLFSSIPSTRPSYMTRRTKTLSTISKPDGVVQDVDLDTELAPTAGVSGTRRRWTSEMNQFILRTYLQLTTLGTDTKAYLEPLHLKFIEKFLNMREVSRQRVGDQRRAIIRSKLLPQNIIDKIYNEVKEEIDNLQNRRQTYTQPQTITTISPQTNTQTSNTEFASNSQNPTSRMRWTSEQNEAIMRSYYRVTNLETNKTAYRKLLHRDFVNTFPSLAHLSEQRIADQRRIIVNNKYISDDRLNSIKQAIAEELPHCSTNKNTHNESTLDSHTNCNEIMNSIELNFPENRVINSETPENRNPEIDDTFQKAIDFYKNTEPTNRTYIPKQKPSKKLAKITHYLNNKTLPENITQETDFKTFQTVIYCAAWTAAKVNGSKINLIPTNTTQNTKKQYKPHWQRRLEYRLDDLRTKIGRLTQFINGNNNRKLTKHVKKIIEQYKIHSIHEEPNTQLTHTLDTLKQKLSVITGRIQRYKNCTLRKQQNNIFINNEKHFYRTIKQATTNTQHNIIEDSENNSPDPNELKEFWAGIWEKAEKHNTQADWIEVETINNDRYAEMNFQHIPLDTFIKVLHNLHNWKSPGSDYIHSYWYKKFTYIHPYLHNYINEFLQDPSKVPTYITSGITFMIPKDANDATNPAKYRPITCLQTLYKIITSCVTEVVYEHIDANNILSEQQKGCRKFSQGCKEQLIIDSVILKQVQKTKANLFTMYIDYKKAYDSVPHSWLLHVLDIYKIHPKIVSFLGTMMKNWTTRLRLTTPTELIETDAIKIQRGIFQGDSLSPLWFCLALNPLSNILNSSALGYPLKYTDIDGVTDNNESTTNKLNHLLYMDDIKLYAQDEDQLYQLANLTEQFSNDIRMEFGIDKCKINSVKAGHNFQHQYTLESGVKIDPLNEQETYKYLGYNQSLQIQYKETKQMLKLQFQHRLNTILKTQLNSRNTIKAINSFAIPILTYSFGIINWTKSELKNLQRTINTSMTRFRKHHPRSCIQRLTLPRTEGGRGLIDIINLNNRQIINLRQYFFNKIQSSVLHKSIAQNDHNFTPLNLKQTTAQRNEKLTDDTEKIEAWSRKSLHGRHRHDLSQPNVDKEASNAWLSRGELFPETEGFMTAIQDQVIETRNYKKYIMKIPNLPSDLCRKCNSSSETIQHITGACKSIAQTDYKFRHDQVANIIHQKLALKYKLITTTPTVPYYKYNPDTVLENANTKLYFDRAILTDKTVHYNRPDITMVDKINRTAYIIDIAIPNTHNLQNTISEKLTKYIDLKDEMIRMWRLQKVSIVPIVLSTTGIIPKQLSQSLEFLSLPPQTFVQLQKAVVLNTCRIVRKFMQTESSPFPIVNLD

SEQ ID NO: 16531 - protein, 1315 aa, Mimas tiliae
MEQINKKYNLRPLPGGRRGAPGAGAGCHSMRDTGGDALSRRALATQDITAGRCELSRRTRDVEATADLSGDDTVSLFSSIPSTRPSYMTRRTKTLSTISKPDGVVQDVDLDTELAPTAGVSGTRRRWTSEMNQFILRTYLQLTTLGTDTKAYLEPLHLKFIEKFLNMREVSRQRVGDQRRAIIRSKLLPQNIIDKIYNEVKEEIDNLQNRRQTYTQPQTITTVSPQTNTQTSNTEFASNSQNPTSHMRWTSEQNEAIMRSYYRVTNLETNKTAYRKLLHRDFVNTFPSLAHLSEQRIADQRRIIVNNKYISDDRLNSIKQAIAEELPHCSTNKNTHNESSLDSHTNCNEIMNSIELNFPENRVINSETPENSNPEIDDTFQKAIDFYKNTEPNNRTYIPKQKPSKKLAKITHYLNNKTLPENITQETDFKNFQTVIYCAAWTAAKVNGSKINLIPTNTTQNTKKQYKPHWQRRLEYRLDDLRTKIGRLTQFINGNNNRKLTKHVKKIIEQYKTHSIHEEPNTQLTHTLDTLKQKLSVITGRIQRYKNCTLRKQQNNIFINNEKHFYRTIKQATTNTQHNIIEDSENNSPDPNELKEFWAGIWEKAEKHNTQADWIEVETINNDRYAEMNFQHIPLDTFIKVLHNLHNWKSPGSDYIHSYWYKKCTYIHPYLHNYINDFLQDPSKVPTYITSGITFMIPKDANDATNPAKYRPITCLQTLYKIITSCVTEVVYEHIDANNILSEQQKGCRKFSQGCKEQLIIDSVILKQVQKTKANLFTMYIDYKKAYDSVPHSWLLHVLDIYKIHPKIVSFLGTMMKNWTTRLRLTTPTELIETDAIKIQRGIFQGDSLSPLWFCLALNPLSNILNSSALGYPLKYTDIDGVTDDNESTTNKLNHLLYMDDIKLYAQDEDQLYQLANLTEQFSNDIRMEFGIDKCKINSVKAGHNFQHQYTLESGVKIDPLNEQETYKYLGYNQSLQIQYKETKQMLKLQFQHRLNTILKTQLNSVLHKSIAQNDHNFTPLNLKQTTAQRNEKLTDDTEKIEAWSRKSLHGRHRHDLSQPNVDKEASNAWLSRGELFPETEGFMTAIQDQVIETRNYKKYIMKIPNLPSDLCRKCNSSSETIQHITGACKSIAQTDYKFRHDQVANIIHQKLALKYKLITTTPTVPYYKYNPDTVLENANTKLYFDRAILTDKTVHYNRPDITMVDKINRTAYIIDIAIPNTHNLQNTISEKLTKYIDLKDEMIRMWRLQKVSIVPIVLSTTGIIPKQLSKSLEFLSLPPQTFVQLQKAVVLNTCRIVRKFMQTESSPFPIVNLD

SEQ ID NO: 16532 - protein, 1345 aa, Ectomis asine
MTRRTTTLPSVTTSDAVVRDVDLDIEPAPTLDVINKRRRWTNDMNQFILRTYLRLTALGTDTKTYLEPLHLQFIEKYPNMTVSRQRVGDQRRAIIRNKLLQQDTIDSIYEQVRLEMTRTDTHPNIHTLSNTPSIPENVTFNTRVRSTHTRMKWTNEHNEAIIRSYFRITHLDTNRTAYRKLLHQDFTQRFPTLDHLSEQRIADQRRAIINNKYISDTRLNEIKCEVSEELSIIQHNTNELCNYGNNDTQISDFNKTDRQDIQSPNNTEIGTLENHFPQIGTELDTERDAEIDETFRKVFQYYKDTDPTSRNYIPKQKSSKNLARIVDYLNKVILPDIVKNISDFTTLQTTIYCAAWTAAKMNGAKITIEPIEKPCLDKNKYKPFWQKRLEKRVSDLRIKIGRVTQFINGNKNKNLTKHVNDIMKQYKIHSVHEELNTQLIHTLDTLKQKLSLVSGRLRRYRACTLRKQQNRQFINNEKIFYRNIRQNTTNTQENKNVKNFSSTPNPNDLQKFWSGIWEESATHNSDADWIHIETANNNHTQVMIFENIPVNIFKKVLQNLHNWKAPGSDHIHSYWYKKFTSIHSSLHFYLNQFILEPNSLPSYITSGVTYMVPKDGDNLTDPSKYRPITCLQTIYKIITSCISELVYDHINRNNILAEQQKGCRKNSQGCKEQLVIDSVILKKVQKTKSNLFSMYIDYQKAYDSVPHSWLTQILDIYKVHPQIVTFLKTAMTTWNTRLKLSAPDKTIETGPIKIRRGIFQGDALSPLWFCLALNPLSNMLNSTAIGYSLNYTNEQTDNNTQINLLNHLLYMDDIKLYAENENQLHQLADLTERFTNDINMKFGIDKCKINSIRAGKNYQHHYTLRTGYVIDPLSDHETYKYLGCNQSRQIHHSEIKSKLKQEFQHRLNSLLKTQLNSRNTIKSINTFAVSILTYSFGIIKWSKSDLKALQRTINSSMTKFRKHHPRSCIQRLTLPRKEGGRGLIDILNLHNRQITNLRNYFFNKMKSSSLHTAIAQNDDKFTPLNLKDKKQQFNEFLTDNATKRSEWSSKSLHGRHRHDLCQSNVDIDASNAWLVRGDLFPETEGFLMAIQDQVIETRNYNRYITKTLSSDTCRKCNSCPETIQHITGACKAITQTDYKHRHDQVVNIIHQQIARQHKLITNLKPYYKYKPETVLENSTTKLYFDRAILTDRTVHYNRPDITLVNKTNKTGFLIDIAIPNTHNLQTTIAEKLSKYSELKDELRRLWHLQKVTIVPIVLSTTGVIPNQLQQSLKTLNLPSHIFCHLQKAAVLNTCRLVRKFLQIEQDNIHTHQQTRLSKSLLHSAIHTSQLHQLHQSHLQPDVHLA

SEQ ID NO: 16533 - protein, 1361 aa, Emesis russula
MEETERKYNLRPLPGGRRGAPGAGAGCFSLRDTGDVELSRRALVTQTVTADRRGLNRRAHDVEVTAESTSGDDTHSLFSSIPSTRPSYMTRRRTSSTLSNTTSLGSVVQEIHFDSEPAPTSGLPCTRKRWNNEMNQFILRTYLQLTALDTDTRTYLEPLHLKFSEKYPEMNASRQRIGDQRRAIIRNKLLPQTTIDLIYNQVREELARLENSTRPRQTQQQHLLESANTTYLIPTPNASSTQDSNTLTRNTNTRMKWTTKHNEAIIRSYFHITQLETNKTVYRKLLHQNFIQIFPELAHLSEQRISDQRRAIINNKYITEERINTIKLEVANELSPSSLAINNNILTNETDNTNNLYSRPLSNNDNDSFLHETETTIEIDSDKNEKIDTTFSQAFKFFTNSNPTTRNYIPKQKPSKKFAKIVDYLNKVTLPSIVDDNTDFETLQTAIYCAAWTAAKINGAKLSLEPIDNSRHNKKDHKPRWQKRLENRIDDLRAKIGRLTQFINGNRSTHLKKHVDNILRYYKTHSVHEEPNTQLSHTLDTLKQKLAVAAGRLSRYKACTIRKQQNNQFINNEKLFYRNLKSNTNNTQQSGNRNDLNNTVDPEHLQQFWANIWEESTTHNSEAQWIHNERHNNITTSSMDFDTIPPDIFQKVLQKQHNWKSPGTDCIHSYWYKKFSSIHNHLHKFLNNFIQEPSILPKYITEGVTYMIPKDYTDFTNPAKYRPITCLQTLYKILTACISEIVYTHLDKYKILAEQQKGCRKASQGCKEQILIDSVILSQVCKTKSDLFTMYIDYQKAYDSVPHSWLIQVLEIYKIHPTIITFLKSTMTNWTTRLRITTQHKVIDTNAIKINRGIFQGDSLSPLWFCLALNPLSNMLNSTETGYTLKYADENDDSEVHTSVLSHLLYMDDIKLYAETEHQLDYLATLTELFTNDINMKFGIDKCKTNSIKAGNIYQHQYTLETGEYIKPLDDNETYKYLGYQQARQIQQKDIKTKLKQEFKHRLNSLLKTQLNSRNTVKSINTYAIPILTYSFGIITWSKSDLKALQRTINTTMTKFRKHHPRSCFQRLTLPRKEGGRGLIDIVNLHNSQITNLRHYFFNKMEQSSLHKSIVHNDRKLTPLNLQDKNLQKNEKLTENNTKRAEWSVKPLHGRHYHDLCQPNVDIQASNAWLSRGDLFPETEGFIMAIQDQVIETKNYQKYIMKKLISDSCRKCLSAPETIQHVTGACKTIAQTDYKHRHDQIANIIHQQLATQYKLIGETQPYYKYNPEIVLENLSTKLYYDRAILTDRTIHYNRPDITLVDKINKTGYLIDIAVPNTHNVQSTICEKLTKYTELKEEIARLWHLQKVTIVPIVLSTTGIIP

SEQ ID NO: 16534 - protein, 1176 aa, Emesis opaca
MKWTTKHNEAIIRSYFHITQLETNKTVYRKLLYQNFIQIFPELAHLSEQRISDQRRAIINNKYITEERINTIKLEVANELSPSSLAINNNILTNETDNTNNLYSRPLSNNDNDSFLHETETTIEIDSDKNEKTDTTFSQAFKFFTNSNPTTRNYIPKQKPSKKFAKIVDYLNKVTLPSIVDDNTDFETLQTAIYCAAWTAAKINGAKLSLEPIDNSRHYKKDHKPRWQKRLENRIDDLRAKIGRLTQFINGNRSTHLKKHVDNILRYYKTHSVHEEPNTQLSHTLDTLKQKLAVAAGRLSRYKACTIRKQQNNQFINNEKLFYRNLKSNTSNTQQSGNRNDLNNTEDPEHLQQFWANIWEESTTHNSEAQWIHNERHNNITTSSMDFDTIPPDIFQKVLQKQHNWKSPGTDCIHSYWYKKFSSIHNHLHKFLNNFIQEPSILPKYITEGVTYMIPKDYTDFTNPAKYRPITCLQTLYKILTACISEIVYTHLDKYKILAEQQKGCRKASQGCKEQILIDSVILSQVCKTKSDLFTMYIDYQKAYDSVPHSWLIQVLEIYKIHPTIITFLKSTMKNWTTRLRLTTQHKVIDTNAIKINRGIFQGDSLSPLWFCLALNPLSNMLNSTETGYTLKYADENDDSEVHTSVLSHLLYMDDIKLYAETEHQLDYLATLTELFTNDINMKFGIDKCKTNSIKAGNIYQHQYTLETGEYIKPLDDNETYKYLGYQQARQIQQKDIKTKLKQEFKHRLNSLLKTQLNSRNTVKSINTYAIPILTYSFGIITWSKSDLKALQRTINTTMTKFRKHHPRSCFQRLTLPRKEGGRGLIDIVNLHNSQITNLRHFFFNKMEQSSLHKSIVHNDRKLTPLNLQDKNLQKNEKLTENNTKRAEWSVKPLHGRHYHDLCQPNVDIQASNAWLSRGDLFPETEGFIMAIQDQVIETKNYQKYIMKKLISDSCRKCLSAPETIQHVTGACKTIAQTDYKHRHDQIANIIHQQLATQYKLIGETQPYYKYNPEIVLENLSTKLYYDRAILTDRTIHYNRPDITLVDKINKTGYLIDIAVPNTHNVQSTICEKLTKYTELKEEIARLWHLQKVTIVPIVLSTTGIIPKQLHQSLKTLNLPPTIYYLLQKAAILNTCRIVRKFLQTDTQNSYSTTSAPLTIPVVHTDQTIIPNSEPI

SEQ ID NO: 16535 - protein, 1342 aa, Emesis heteroclita
MTRRRASSTLSNTTSLGSVVQEIHFDSEPAPTSGLPCTRKRWNNEMNQFILRTYLQLTALDTDTRTYLEPLHLKFSEKYPEMNASRQRIGDQRRAIIRNKLLPQTTIDLIYNQVREELARLENSTRPRQTQQHLLESANTTYLIPTPNASSTQDSNTLTRNTNTRMKWTTKHNEAIIRSYFHITQLETNKTVYRKLLHQNFIQIFPELAHLSEQRISDQRRAIINNKYITEERINTIKLEVANELSPSSLAINNNILTNETDNTNNLYSRPLSNNDNDSFLHETETTIEIDSDKNEKIDTTFSQAFKFFTNSNPTTRNYIPKQKPSKKFAKIVDYLNKVTLPSIVDDNTDFETLQTAIYCAAWTAAKINGAKLSLEPLDNSSRHNKKDHKPRWQKRLENRIDDLRAKIGRLTQFINGNRSTHLKKHVDNILRYYKTHSVHEEPNTQLSHTLDTLKQKLAVAAGRLSRYKACTIRKQQNNQFINNEKLFYRNLKSNTSNTQQSGNRNDLNNTVDPEHLQQFWANIWEESSTHNSEAQWIHSERHNNITTSSMDFDTIPPDIFQKVLQKQHNWKSPGTDCIHSYWYKKFSSIHNHLHNFLNNFIQEPSILPKYITEGVTYMIPKDYTDFNNPAKYRPITCLQTLYKILTACISEIVYTHLDKYKILAEQQKGCRKASQGCKEQILIDSVILSQVCKTKSDLFTMYIDYQKAYDSVPHSWLIQVLEIYKIHPTIITFLKSTMTNWTTRLRLTTQHKVIDTNAIKINRGIFQGDSLSPLWFCLALNPLSNMLNSTETGYTLKYADENDDSEVHTSVLSHLLYMDDIKLYAETEHQLDYLATLTELFTNDINMKFGIDKCKTNSIKAGNIYQHQYTLETGEYIKPLDDNETYKYLGYQQARQIQQKDIKNKLKQEFKHRLNSLLKTQLNSRNTVKSINTYAIPILTYSFGIITWSKSDLKALQRTINTTMTKFRKHHPRSCFQRLTLPRKEGGRGLIDIVNLHNSQITNLRHYFFNKMEQSSLHKSIVHNDRKLTPLNLQDKNLQKNEKLTENNTKRAEWSVKPLHGRHYHDLCQPNVDIQASNAWLSRGDLFPETEGFIMAIQDQVIETKNYQKYIMKKLISDSCRKCLSAPETIQHVTGACKTIAQTDYKHRHDQITNIIHQQLATQYKLIGETQPYYKYHPEIVLENLSTKLYYDRAILTDRTIHYNRPDITLVDKINKTGYLIDIAVPNTHNVQSTICEKLTKYTELKEEIARLWHLQKVTIVPIVLSTTGIIPKQLHQSLKTLNLPPTIYYLLQKAAILNTCRIVRKFLQTDTQNSYSTTSAPLTIPVLHTAQTIIPNSEPI

SEQ ID NO: 16536 - protein, 1430 aa, Carystus phorcus
MEETKRKYNLRPLPGGRRGAPGAGAGCFSLRDTGDVELSRRALVTQTVTADRRGLNRRAHDVEVTAESTSGDDTHSLFSSIPSTRPSYMTRRRASSTLSNTTSLGSVVQEIHFDSEPAPTPGLPCTRKRWNNEMNQFILRTYLQLTALDTDTRTYLEPLHLKFSEKYPEMNVSRQRIGDQRRAIIRNKLLPQTTIDLIYNQVREELARLENSTRPRQTQQQHLLESANTTYLIPTPNASSTQDSNTLTRNTNTRMKWTTKHNEAIIRSYFRITQLETNKTVYRKLLHQNFIQIFPELAHLSEQRISDQRRAIINNKYITEERINTIKLEVANELSPSSLAINNNILTSETDNTNNLYSRPLSNNDNDSFLHETETTIEIDSDKNEKIDTTFSQAFKFFTNSNPTTRNYIPKQKPSKKFAKIVDYLNKVTLPSIVDDNTDFETLQTAIYCAAWTAAKINGAKLSLEPIDNSRHNKKDHKPRWQKRLENRIDDLRAKIGRLTQFINGNRSTHLKKHVDNILRYYKTHSVHEEPNTQLSHTLDTLKQKLAVAAGRLSRYKSCTIRKQQNNQFINNEKLFYRNLKSNTSNTQQSGNRNDLNNTVDPEHLQQFWANIWEESTTHNSEAQWIHNERHNNITTSSMDFDTIPPDIFQKVIQKQHNWKSPGTDCIHSYWYKKFSSIHNHLHKFLNNFIQEPSILPKYITEGVTYMIPKDYTDFTNPAKYRPITCLQTLYKILTACISEIVYTHLDKYKILAEQQKGCRKASQGCKEQILIDSVILSQVCKTKSDLFTMYIDYQKAYDSVPHSWLIQVLEIYKIHPTIITFLKSTMTNWTTRLRLTTQHKVIDTNAIKINRGIFQGDSLSPLWFCLALNPLSNMLNSTETGYTLKYADENDDSEVHTSVLSHLLYMDDIKLYAETEHQLDYLATLTELFTNDINMKFGIDKCKTNSIKAGNIYQHQYTLETGEYIKPLDDNETYKYLGYQQARQIQQKDIKTKLKQEFKHRLNSLLKTQLNSRNTVKSINTYAIPILTYSFGIITWSKSDLKALQRTINTTMTKFRKHHPRSCFQRLTLPRKEGGRGLIDIVNLHNSQITNLRHYFFNKMEQSSLHKSIVHNDRKLTPLNLQDKNLQKNEKLTENNTKRAEWSVKPLHGRHYHDLCQPNVDIQASNAWLSRGDLFPETEGFIMAIQDQVIETKNYQKYIMKKLISDSCRKCLSAPETIQHVTGACKTIAQTDYKHRHDQIANIIHQQLATQYKLIGETQPYYKYNPEIVLENLSTKLYYDRAILTDRTIHYNRPDITLVDKINKTGYLIDIAVPNTHNVQSTICEKLTKYTELKEEIARLWHLQKVTIVPIVLSTTGIIPKQLHQSLKTLNLPPTIYYLLQKAAILNTCRIVRKFLQTDTQNSYSTTSAPLTIPVLHTAQTIIPNSEPI

SEQ ID NO: 16537 - protein, 1430 aa, Emesis brimo
MEETKRKYNLRPLPGGRRGASGAGAGCFSSRDTGDVELSRRALVTQTVTADRRGLNRRAHDVEVTAESTSGDDTHSLFSSIPSTRPSYMTRRRASSTLSNTTSLGSVVQEIHFDSEPAPTSGLPCTRKRWNNEMNQFILRTYLQLTALDTDTRTYLEPLHLKFSEKYPEMNASRQRIGDQRRAIIRNKLLPQTTIDLIYNQVREELARLENSTRPRQTQQQHLLESTNTTYLIPTPNASSTQDSNTLTRNTNTRMKWTTKHNEAIIRSYFHITQLETNKTVYRKLLHQNFIQIFPELAHLSEQRISDQRRAIINNKYITEERINTIKLEVANELSSSSLAINNNILTNETDNTNNLYSRPLSNNDNDSFLHETETTIEIDSDKNEKIDTTFSQAFKFFTNSNPTTRNYIPKQKPSKKFAKIVDYLNKVTLPSIVDDNTDFETLQTAIYCAAWTAAKINGAKLSLEPIDNSRHNKKDHKPRWQKRLENRIDDLRAKIGRLTQFINGNRSTHLKKHVDNILRYYKTHSVHEEPNTQLSHTLDTLKQKLAVAAGRLSRYKACTIRKQQNNQFINNEKLFYRNLKSNTSNTQQSGNRNDLNNTVDPEHLQQFWANIWEESTTHNSEAQWIHNERHNNITTSSMDFDTIPPDIFQKVLQKQHNWKSPGTDCIHSYWYKKFSSIHNHLHKFLNNFIQEPSILPKYITEGVTYMIPKDYTDFTNPAKYRPITCLQTLYKILTACISEIVYTHLDKYKILAEQQKGCRKASQGCKEQILIDSVILSQVCKTKSDLFTMYIDYQKAYDSVPHSWLIQVLEIYKIHPTIITFLKSTMTNWTTRLRLTTQHKVIDTNAIKINRGIFQGDSLSPLWFCLALNPLSNMLNSTETGYTLKYADENDDSEVHTSVLSHLLYMDDIKLYAETEHQLDYLATLTELFTNDINMKFGIDKCKTNSIKAGNIYQHQYTLETGEYIKPLDDNETYKYLGYQQARQIQQKDIKTKLKQEFKHRLNSLLKTQLNSRNTVKSINTYAIPILTYSFGIITWSKSDLKALQRTINTTMTKFRKHHPRSCFQRLTLPRKEGGRGLIDIVNLHNSQITNLRHYFFNKMEQSSLHKSIVHNDRKLTPLNLQDKNLQKNEKLTENNTKRAEWSVKPLHGRHYHDLCQPNVDIQASNAWLSRGDLFPETEGFIMAIQDQVIETKNYQKYIMKKLISDSCRKCLSAPETIQHVTGACKTIAQTDYKHRHDQIANIIHQQLATQYKLIGETQPYYKYNPEIVLENLSTKLYYDRAILTDRTIHYNRPDITLVDKINKTGYLIDIAVPNTHNVQSTICEKLTKYTELKEEIARLWHLQKVTIVPIVLSTTGIIPKQLHQFLKTLNLPPTIYYLLQKAAILNTCRIVRKFLQTDTQNSYSTTSAPLTIPVLHTAQTIIPNSEPI

SEQ ID NO: 16538 - protein, 944 aa, Ectomis octomaculata
MNGAKLTIASNNTLSFNKNKYKPIWQKRLEKRIDDIRIKIGRVTHFINGGRSRNLTKLVNDIIKQYKIHSVHEEPNTQLTHTLDTLKQKLSLMAGRLRRYKECTLRKQQNKQFINNEKIFYRKIRQTTTNTQQNKNTSDPSHTPDPDELQKFWSKIWENNVVHNSQAKWINFETSKNNSTLIMKFEKIPIDTFKNVLRNLHNWKAPGSDHIHSYWYKKFTSIHNCLYSYLNQFIMDPASMPTYITSGITYMIPKDQNNVTDPSKYRPITCLQTIYKIITSCISELIYQHVTSNNILAEQQKGCRKNSQGCKEQLLIDSVILNKVQKTKSDLFTMYIDYQKAYDSVPHSWLTQVLDIYKIHPQIITFLKTAMTNWSTRLKISSYDDTIQTGTIKIRRGIFQGDALSPLWFCLALNPLSNMLNSTATGYPINYTDEQTDSYTHTNLLSHLLYMDDIKLYAEKEDQLNQLANLTETFSNDIKMKFGIDKCKINSIRAGQNYQHHYVVNTGEIIDPLSAQESYKYLGYNQSRQIHHKDIKYKLKQEFQHRLNSLLKTQLNSRNIIKSINTFAISVLTYSFGIIKWSKSDLKALQRTINTTLTKFRKHHPRSCSQRLTLPRKVGGRGLIDIINLHNRQITHLRNYFFNKMKFSPLHLAIVQNDDKYTPLNLQDKTKQLNEIQTDYKTKLTEWAAKSLHGRHRHDLCQSNVDIEASNAWLSRGDLFPETEGFMVAIQDQVIETRNYQRYIIKSLSSDICRKCNSCPETIQHITGACKAITQTDYKHRHDQVANIIHQQLAHQHKLVTKFQPYYKYKPESVLENSTTKLYFDRAILTDRTIHYNRPDITLINKINKTAFLIDIAIPNTHNLQNTIAEKLSKYSELKDEVTRLWHLQKVIIVPIVLSATGVIPNQLQLSLKTLKLPLYIYRTLQKAAILNTCRIVRKFLQTE

SEQ ID NO: 16539 - protein, 1323 aa, Eurytides dolicaon
MEETKRKYNLRPLPGGRRGAPGAGAGCFSSRDTGDVELSRRALVTQTVTADRRGLNRRAHDVEVTAESTSGDDTHSLFSSIPSTRPSYMTRRRASSTLSNTTSLGSVVQEIHFDSEPAPTSGLPCTRKRWNNEMNQFILRTYLQLTALDTDTRTYLEPLHLKFSEKYPEMNASRQRIGDQRRAIIRNKLLPQTTIDLIYNQVREELATLENSTRPRQTQQQHLLESANTTYLTPTPNASSTQDSNTLTRNTNTRMKWTTKHNEAIIRSYFHITQLETNKTVYRKLLHQNFIQIFPELAHLSEQRISDQRRAIINNKYITEERINTIKLEVANELSPSSLAINNNILTNETDNTNNLYSRPLSNNDNDSFLHETETTIEIDSDKNEKIDTTFSQAFKFFTNSNPTTRNYIPKQKPSKKFAKIVDYLNKVTLPSIVDDNTDFETLQTAIYCAAWTAAKINGAKLSLEPIDNSRHNKKDHKPRWQKRLENRIDDLRAKIGRLTQFINGNRSTHLKKHVDNILRYYKTHSVHEEPNTQLSHTLDTLKQKLAVTAGRLSRYKACTIRKQQNNQFINNEKLFYRNLKSNTSSTQQSGNRNDLNNTVDPEHLQQFWANIWEESTTHNSEAQWIHNERHNNITTSSMDFDTIPPDIFQKVLQKQHNWKSPGTDCIHSYWYKKFSSIHNHLHKFLNNFIQEPSILPKYITEGVTYMIPKDYTDFTNPAKYRPITCLQTLYKILTACISEIVYTHLDKYKILAEQQKGCRKASQGCKEQILIDSVILSQVCKTKSDLFTMYIDYQKAYDSVPHSWLIQVLEIYKIHPTIITFLKSTMTNWTTRLRLTTQHKVIDTNAIKINRGIFQGDSLSPLWFCLALNPLSNMLNSTETGYTLKYADENDDSEVHTSVLSHLLYMDDIKLYAETEHQLDYLATLTELFTNDINMKFGIDKCKTNSIKAGNIYQHQYTLETGEYIKPLDDNETYKYLGYQQARQIQQKDTKTKLKQEFKHRLNSLLKTQLNSRNTVKSINTYAIPILTYSFGIITWSKSDLKALQRTINTTMTKFRKHHPRSCFQRLTLPRKEGGRGLIDIVNLHNSQITNLRHYFFNKMEQSSLHKSIVHNDRKLTPLNLQDKNLQKNEKLTENNTKRAEWSVKPLHGRHYHDLCQPNVDIQASNAWLSRGDLFPETEGFIMAIQDQVIETKNYQKYIMKKLISDSCRKCLSAPETIQHVTGACKTIAQTDYKHRHDQIANIIHQQLATQYKLIGETQPYYKYNPEIVLENLSTKLYYDRAILTDRTIHYNRPDITLVDKINKTGYLIDIAVPNTHNVQST

SEQ ID NO: 16540 - protein, 1430 aa, Emesis spreta
MEETKRKYNLRPLPGGRRGAPGAGAGCFSSRDTGDVELSRRALVTQTVTADRRGLNRRAHDVEVTAESTSGDDTHSLFSSIPSTRPAYMTRRRASSTLSNTTSLGSVVQEIHFDSEPAPTSGLPCTRKRWNNEMNQFILRTYLQLTALDTDTRTYLEPLHLKFSEKYPEMNASRQRIGDQRRAIIRNKLLPQTTIDLIYNQVREELARLENSTRPRQTQQQHLLESANTTYLIPTPNASSTQDSNTLTRNTNTRMKWTTKHNEAIIRSYFHITQLETNKTVYRKLLHQNFIQIFPELAHLSEQRISDQRRAIINNKYITEERINTIKLEVANELSPSSLAINNNILTNETDNTNNLYSRPLSNNDNDSFLHETETTIEIDSDKNEKIDTTFSQAFKFFTNSNPTTRNYIPKQKPSKKFAKIVDYLNKVTLPSIVDDNTDFETLQTAIYCAAWTAAKINGAKLSLEPIDNSRHNKKDHKPRWQKRLENRIDDLRAKIGRLTQFINGNRSTHLKKHVDNILRYYKTHSVHEEPNTQLSHTLDTLKQKLAVAAGRLSRYKACTIRKQQNNQFINNEKLFYRNLKSNTSNTQQSGNRNDLNNTVDPEHLQQFWANIWEESTTHNSEAQWIHNERHNNITTSSMDFDTIPPDIFQKVLQKQHNWKSPGTDCIHSYWYKKFSSIHNHLHKFLNNFIQEPSILPKYITEGVTYMIPKDYTDFTNPAKYRPITCLQTLYKILTACISEIVYTHLDKYKILAEQQKGCRKASQGCKEQILIDSVILSQVCKTKSDLFTMYIDYQKAYDSVPHSWLIQVLEIYKIHPTIITFLKSTMTNWTTRLRLTTQHKVIDTNAIKINRGIFQGDSLSPLWFCLALNPLSNMLNSTETGYTLKYADENDDSEVHTSVLSHLLYMDDIKLYAETEHQLDYLATLTELFTNDINMKFGIDKCKTNSIKAGNIYQHQYTLETGEYIKPLDDNETYKYLGYQQARQIQQKDIKTKLKQEFKHRLNSLLKTQLNSRNTVKSINTYAIPILTYSFGIITWSKSDLKALQRTINTTMTKFRKHHPRSCFQRLTLPRKEGGRGLIDIVNLHNSQITNLRHYFFNKMEQSSLHKSIVHNDRKLTPLNLQDKNLQKNEKLTENNTKRAEWSVKPLHGRHYHDLCQPNVDIQASNAWLSRGDLFPETEGFIMAIQDQVIETKNYQKYIMKKLISDSCRKCLSAPETIQHVTGACKTIAQTDYKHRHDQIANIIHQQLATQYKLIGETQPYYKYNPEIVLENLSTKLYYDRAILTDRTIHYNRPDITLVDKINKTGYLIDIAVPNTHNVQSTICEKLTKYTELKEEIARLWHLQKVTIVPIVLSTTGIIPKQLHQSLKTLNLPPTIYYLLQKAAILNTCRIVRKFLQTDTQNSYSTTSAPLTIPVLHTAQTIIPNSEPI

SEQ ID NO: 16541 - protein, 1430 aa, Emesis condigna
MEETKRKYNLRPLPGGRRGAPGAGAGCFSSRDTGDVELSRRALVTQTVTADHRGLNRRAHDVEVTAESTSGDDTHSLFSSIPSTRPSYMTRRRASSTLSNTTSLGSVVQEIHFDSEPAPTSGLPYTRKRWNNEMNQFILRTYLQLTALDTDTRTYLEPLHLKFSEKYPEMNASRQRIGDQRRAIIRNKLLPQTTIDLIYNQVREELARLENSTRPRQTQQQHLLESANTTYLIPTPNASSTQDSNTLTRNTNIRMKWTTKHNEAIIRSYFHITQLETNKTVYRKLLHQNFIQIFPELAHLSEQRISDQRRAIINNKYITEERINTIKLEVANELSPSSLAINNNILTNETDNTNNLYSRPLSNNDNDSFLHETETTIEIDSDKNEKIDTTFSQAFKFFTNSNPTTRNYIPKQKPSKKFAKIVDYLNKVTLPSIVDDNTDFETLQTAIYCAAWTAAKINGAKLSLEPIDNSRHNKKDHKPRWQKRLENRIDDLRAKIGRLTQFINGNRSTHLKKHVDNILRYYKTHSVHEEPNTQLSQTLDTLKQKLAVAVGRLSRYKACTIRKQQNNQFINNEKLFYRNLKSNTSNTQQSGNRNDLNNTVDPEHLQQFWANIWEESTTHNSEAQWIHNERHNNITTSSMDFDTIPPDIFQKVLQKQHNWKSPGTDCIHSYWYKKFSSIHNHLHKFLNNFIQEPSILPKYITEGVTYMIPKDYTDFTNPAKYRPITCLQTLYKILTACISEIVYTHLDKYKILAEQQKGCRKASQGCKEQILIDSVILSQVCKTKSDLFTMYIDYQKAYDSVPHSWLIQVLEIYKIHPTIITFLKSTMTNWTTRLRLTTQHKVIDTNAIKINRGIFQGDSLSPLWFCLALNPLSNMLNSTETGYTLKYADENDDSEVHTSVLSHLLYMDDIKLYAETEHQLDYLATLTELFTNDINMKFGIDKCKTNSIKAGNIYQHQYTLETGEYIKPLDDNETYKYLGYQQARQIQQKDIKTKLKQEFKHRLNSLLKTQLNSRNTVKSINTYAIPILTYSFGIITWSKSDLKALQRTINTTMTKFRKHHPRSCFQRLTLPRKEGGRGLIDIVNLHNSQITNLRHYFFNKMEQSSLHKSIVHNDRKLTPLNLQDKNLQKNEKLTENNTKRAEWSVKPLHGRHYHDLCQPNVDIQASNAWLSRGDLFPETEGFIMAIQDQVIETKNYQKYIMKKLISDSCRKCLSAPETIQHVTGACKTIAQTDYKHRHDQIANIIHQQLATQYKLIGETQPYYKYNPEIVLENLSTKLYYDRAILTDRTIHYNRPDITLVDKINKTGYLIDIAVPNTHNVQSTICEKLTKYTELKEEIARLWHLQKVTIVPIVLSTTGIIPKQLHQSLKTLNLPPTIYYLLQKAAILNTCRIVRKFLQTDTQNSYSTTSAPLTIPVLHTAQTIIPNSEPI

SEQ ID NO: 16542 - protein, 1430 aa, Emesis progne
MEETKRKYNLRPLPGGRRGAPGAGAGCFSSRDTGDVELSRRALVTQTVTADRRGLNRRAHDVEVTAESTSGDDTHSLFSSIPSTRPSYMTRRRASSTLSNTTSLGSVVQEIHFDYEPAPTSGLPCTRKRWNNEMNQFILRTYLQLTALDTDTRTYLEPLHLKFSEKYPEMNASRQRIGDQRRAIIRNKLLPQTTIDLIYNQVREELARLENSTRPRQTQQQHLLESANTTYLIPTPNASSTQDSNTLTRNTNTRMKWTTKHNEAIIRSYFHITQLETNKTVYRKLLHQNFIQIFPELAHLSEQRISDQRRAIINNKYITEERINTIKLEVANELSPSSLAINNNILTNETDNTNNLYSRPLSNNDNDSFLHETETTIEIDSDKNEKIDTTFSQAFKFFTNSNPTTRNYIPKQKPSKKFAKIVDYLNKVTLPSIVDDNTDFETLQTAIYCAAWTAAKINGAKLSLEPIDNSRHNKKDHKPRWQKRLENRIDDLRAKIGRLTQFINGNRSTHLKKHVDNILRYYKTHSVHEEPNTQLSHTLDTLKQKLAVAAGRLSRYKACTIRKQQNNQFINNEKLFYRNLKSNTSNTQQSGNRNDLNNTVDPEHLQQFWANIWEESTTHNSEAQWIHNERHNNITTSSMDFDTIPPDIFQKVLQKQHNWKSPGTDCIHSYWYKKFSSIHNHLHKFLNNFIQEPSILPKYITEGVTYMIPKDYTDFTNPAKYRPITCLQTLYKILTACISEIVYTHLDKYKILAEQQKGCRKASQGCKEQILIDSVILSQVCKTKSDLFTMYIDYQKAYDSVPHSWLIQVLEIYKIHPTIITFLKSTMTNWTTRLRLTTQHKVIDTNAIKINRGIFQGDSLSPLWFCLALNPLSNMLNSTETGYTLKYADENDDSEVHTSVLSHLLYMDDIKLYAETEHQLDYLATLTELFTNDINMKFGIDKCKTNSIKAGNIYQHQYTLETGEYIKPLDDNETYKYLGYQQARQIQQKDIKTKLKQEFKHRLNSLLKTQLNSRNTVKSINTYAIPILTYSFGIITWSKSDLKALQRTINTTMTKFRKHHPRSCFQRLTLPRKEGGRGLIDIVNLHNSQITNLRHYFFNKMEQSSLHKSIVHNDRKLTPLNLQDKNLQKNEKLTENNTKRAEWSVKPLHGRHYHDLCQPNVDIQASNAWLSRGDLFPETEGFIMAIQDQVIETKNYQKYIMKKLISDSCRKCLSAPETIQHVTGACKTIAQTDYKHRHDQIANIIHQQLATQYKLIGETQPYYKYNPEIVLENLSTKLYYDRAILTDRTIHYNRPDITLVDKINKTGYLIDIAVPNTHNVQSTICEKLTKYTELKEEIARLWHLQKVTIVPIVLSTTGIIPKQLHQSLKTLNLPPTIYYLLQKAAILNTCRIVRKFLQTDTQNSYSTTSAPHTIPVLHTAQTIIPNSEPI

SEQ ID NO: 16543 - protein, 1333 aa, Ectomis asine
MTRRTTTLPSVTTSDVVVRDVDLDTEPAPTLDVINKRRRWTNDMNQFILRTYLRLTALDTDTKAYLEPLHLQFIEKYPNMVVSRQRVGDQRRAIIRNKLLPQATIDSIYDQVRQEIIQDSTQQTFSNTLFMSNIPKMSKNPPVGTVQTQPLTPKVHNSTHTRIKWTNEQNEAIIRTYLRITKLDSNRTAYRKLLHRDFIQLFPQLGHLSEQRVADQRRAIVNNKYISETRFNEIKREVSEELSINSLSINQSHNFHNNNQITDLHNTDSDVYLANNTDLAPALDTLSQLHIEIDSERDTQIDITFQETFQFFKNTDPTNRTYIPKQKPSKNLAKIINYLNKVTLADIVKENPDFKTLQTAIYCAAWTAAKMNGAKIAIDSNNAIRFNKNEYKPIWQKRLEKRIDDIRIKIGRVTQFINGNRSIKLTKLVNHIIKQYKIHSVHEEPNTQLMHTLDTLKQKLSLMSGRLRRYKSCTLRKQQNKQFINNEKIFYRNIRQNTTNTQRNKNFTNANYTPDPDDLQNYWSGIWENNVAHNSQAEWIHTEIYNNNSTQIMKFENIPIDTFKNVLRNLHNWKAPGSDHIHSYWYKKFTSIHNCLYSYVNLFIIEPTSMPTYITSGITYMIPKDRNNLTDPSKYRPITCLQTIYKIMTSCISELIYKHINTNNILAEQQKGCRKNSQGCKEQLLIDSVILNKVQKTKSDLFTMYIDYQKAYDSVPHSWLMQVLDIYKINPQISIFLKTAMLNWSTRLKLSSFDKTIETGTIKIRRGIFQGDALSPLWFCLALNPLSNMLNSTATGYPLSYTEEQTDSYTRTNLLNHLLYMDDIKLYAENENQLYQLANLTETFTNDIKMRFGIDKCKINSIRAGQNYQHHYTVNTGEMIDPLNAQESYKYLGYNQSRQIHHKDMKSKLKQEFQHRLNSLLKTQLNSRNTIKSINTFAISVLTYSFGIIKWSKSDLKGLQRTINTTMTRFRKHHPRSCLQRLTLPRKEGGRGLIDITNLHNRQITNLRNYFFNKMKFSPLHLAIVQNDYKYTPLNLQDETKQNSEILTDNKTKLIEWASKSLHGRHRHDLCQSNVDIQASNAWLSRGDLFPETEGFMMAIQDQVIETRNYQRYIMKTVSSDICRKCNSCPETIQHITGACKAITQTDYRHRHDQVANIIHQQLAHQHKLITKFQPYYKYKPETVLENSTTRLYFDRAILTDRTIHYNRPDITLINKINKTGFLIDIAIPNTHNLQTTIAEKISKYTELKDEVTRLWHLQKVIIVPVVLSATGVIPNQLQQSLKTLKLPLYLCRLLQKAAVLNTCRLVRKFLQTEQDDSHTNPQILSSTSITHA

SEQ ID NO: 16544 - protein, 1430 aa, Epargyreus clarus
MEETKRKYNLRPLPGGRRGAPGAGAGCFSSRDTGDVELSRRALVTQTVTADRRGLNRRAHDVEVTAASTSGDDTHSLFSSIPSTRPSYMTRRRASSTLSNTNSLGSVVQEIHFDSEPAPTSGLPCTRKRWNNEMNQFILRTYLQLTALDTDTRTYLEPLHLKFTEKYPEMNASRQRIGDQRRAIIRNKLLPQTTIDLIYNQVREELARLENSTRPRQTQQQHLLESANTTYLIPTPNASSTQDSNTLTRNTNTRMKWTTKHNEAIIRSYFHITQLETNKTVYRKLLHQNFIQIFPELAHLSEQRISDQRRAIINNKYITEERINTIKLEVANELSPSSLAINNNILTNETDNTNNLYSRPLSNNDNDSFLHETETTIEIDSDKNEKIDTTFSQAFKFFTNSNPTTRNYIPKQKPSKKFAKIVDYLNKVTLPSIVDDNTDFETLQTAIYCAAWTAAKINGAKLSLEPIDNSRHNKKDHKPRWQKRLENRIDDLRAKIGRLTQFINGNRSTRLKKHVDNILKYYKTHSVHEEPNTQLSHTLDTLKQKLAVAAGRLSRYKACTIRKQQNNQFINNEKLFYRNLKSNTSNTQQSGNRNDLNNTVDPEHLQQFWANIWEESTTHNSEAQWIHNERHNNKTTSSMDFDTIPPDIFQKVLQKQHNWKSPGTDCIHSYWYKKFSSIHNHLHKFLNNFIQEPSILPKYITEGVTYMIPKDYTDFTNPAKYRPITCLQTLYKILTACISEIVYTHLDKYKILAEQQKGCRKASQGCKEQILIDSVILSQVCKTKSDLFTMYIDYQKAYDSVPHSWLIQVLEIYKIHPTIITFLKSTMTNWTTRLRLTTQHKVIDTNAIKINRGIFQGDSLSPLWFCLALNPLSNMLNSTQTGYTLKYADENEDSEVHTSVLSHLLYMDDIKLYAETEHQLDYLATLTELFTNDINMKFGIDKCKTNSIKAGNIYQHQYTLETGEYIKPLDDNETYKYLGYQQARQIQQKDVKTKLKQEFKHRLNSLLKTQLNSRNTVKSINTYAIPILTYSFGIITWSKSDLKALQRTINTTMTKFRKHHPRSCFQRLTLPRKEGGRGLIDIVNLHNSQIKNLRHYFFNKMEQSSLHKSIVHNDRKLTPLNLQDKNLQKNEKLTENNTKRAEWSVKPLHGRHYHDLCQPNVDIQASNAWLSRGDLFPETEGFIMAIQDQVIETKNYQKYIMKKIISDSCRKCLSAPETIQHVTGACKIIAQTDYKHRHDQIANIIHQQLATQYKLIGETQPYYKYNPEIVLENHSTKLYYDRAILTDRTIHYNRPDITLVDKINKTGYLIDIAVPNTHNVQSTICEKLTKYTELKEEIARLWHLQKVTIVPIVLSTTGIIPKQLHQSLKTLNLPPTIYYLLQKAAILNTCRIVRKFLQTDTQNSYSTTSAPLTIPVLHTAQTIIPNSEPI

SEQ ID NO: 16545 - protein, 1367 aa, Emesis fastidiosa
MCSRVNNNNDTHSLFSSIPSTRPSYMTRRRASSTLSNTTSLGSVVQEIHFDSEPAPTSGLPCTRKRWNNEMNQFILRTYLQLTALDTDTRTYLEPLHLKFSEKYPEMNASRQRIGDQRRAIIRNKLLPQTTIDLIYNQVREELARLENSTRPRQTQQQHLLESANTTYLIPTPNASSTQDSNTLTRNTNTRMKWTTKHNEAIIRSYFHITQLETNKTVYRKLLHQNFIQIFPEPAHLSEQRILDQRRAIINNKYITEGRINTIKLEVANELSPSSLAINNNILTNETDNTNNLYSRSLSNNDNDNFLHETETTIEIDSDKNEKIDTTFSQAFKFFTNSNPTTRNYIPKQKPSKKFAKIVDYLNKVTLPSIVDDNTDFETLQTAIYCAAWTAAKINGAKLSLEPIDNSRHNKKDHKPRWQKRLENRIDDLRAKIGRLTQFINGNRSTHLKKHVDNILRYYKTHSVHEEPNTQLSHTLDTLKQKLAVAAGRLSRYKACTIRKQQNNQFINNEKLFYRNLKSNTSNTQQSGNRNDLNNTVDPEHLQQFWANIWEESTTHNSEAQWIHNERHNNITTSSMDFDTIPPDIFQKVLQKQHNWKSPGTDCIHSYWYKKFSSIHNHLHKFLNNFIQEPSILPKYITEGVTYMIPKDYTDFTNPAKYRPITCLQTLYKILTACISEIVYTHLDKYKILAEQQKGCRKASQGCKEQILIDSVILSQVCKTKSDLFTMYIDYQKAYDSVPHSWLIQVLEIYKIHPTIITFLKSTMTNWTTRLRLTTQHKVIDTNAIKINRGIFQGDSLSPLWFCLALNPLSNMLNSTETGYTLKYADENDDSEVHTSVLSHLLYMDDIKLYAETEHQLDYLATLTELFTNDINMKFGIDKCKTNSIKAGNIYQHQYTLETGEYIKPLDDNETYKYLGYQQARQIQQKDIKTKLKQEFKHRLNSLLKTQLNSRNTVKSINTYAIPILTYSFGIITWSKSDLKALQRTINTTMTKFRKHHPRSCFQRLTLPRKEGGRGLIDIVNLHNSQITNLRHYFFNKMEQSSLHKSIVHNDRKLTPLNLQDKNLQKNEKLTENNTKRAEWSVKPLHGRHYHDLCQPNVDIQASNAWLSRGDLFPETEGFIMAIQDQVIETKNYQKYIMKKLISDSCRKCLSAPETIQHVTGACKTIAQTDYKHRHDQIANIIHQQLATQYKLIGETQPYYKYNPEIVLENLSTKLYYDRAILTDRTIHYNRPDITLVDKINKTGYLIDIAVPNTHNVQSTICEKLTKYTELKEEIARLWHLQKVTIVPIVLSTTGIIPKQLHQSLKTLNLPPTIYYLLQKAAILNTCRIVRKFLQTDTQNSYSTTSAPLTIPVLHTAQTIIPNSEPI

SEQ ID NO: 16546 - protein, 1430 aa, Emesis furor
MEETKRKYNLRPLPGGRRGAPGAGAGCFSSRDTGDVELSRRALVTQTVTADRRGLNRRAHDVEVTAESTSGDDTHSLFSSIPSTRPSYMTRRRASSTLSNTTSLGSVVQEIHFDSEPAPTSGLPCTRKRWNNEMNQFILRTYLQLTALDTDTRTYLEPLHLKFSEKYPEMNASRQRIGDQRRAIIRNKLLPQTTIDLIYNQVREELARLENSTRPRQTQQQHLLESANTTYLIPTPNASSTQDSNTLTRNTNTRMKWTTKHNEAIIRSYFHITQLETNKTVYRKLLHQNFIQIFPELAHLSEQRISDQRRAIINNKYITEERINAIKLEVANELSPSSLAINNNILTNETDNTNNLYSRPLSNNDNDSFLHETETTIEIDSDKNEKIDTTFSQAFKFFTNSNPTTRNYIPKQKPSKKFAKIVDYLNKVTLPSIVDDNTDFETLQTAIYCAAWTAAKINGAKLSLEPIDNSRHNKKDHKPRWQKRLENRIDDLRAKIGRLTQFINGNRSTHLKKHVDNILRYYKTHSVHEEPNTQLSHTLDTLKQKLAVAAGRLSRYKACTIRKQQNNQFINNEKLFYRNLKSNTNNTQQSGNRNDLNNTVDPEHLQQFWANIWEESTTHNSEAQWIHNERHNNITTSSMDFDTIPPDIFQKVLQKQHNWKSPGTDCIHSYWYKKFSSIHNHLHKFLNNFIQEPSILPKYITEGVTYMIPKDYTDFTNPAKYRPITCLQTLYKILTACISEIVYTHLDKYKILAEQQKGCRKASQGCKEQILIDSVILSQVCKTKSDLFTMYIDYQKAYDSVPHSWLIQVLEIYKIHPTIITFLKSTMTNWTTRLRLTTQHKVIDTNAIKINRGIFQGDSLSPLWFCLALNPLSNMLNSTETGYTLKYADENDDSEVHTSVLSHLLYMDDIKLYAETEHQLDYLATLTELFTNDINMKFGIDKCKTNSIKAGNIYQHQYTLETGEYIKPLDDNETYKYLGYQQARQIQQKDIKTKLKQEFKHRLNSLLKTQLNSRNTVKSINTYAIPILTYSFGIITWSKSDLKALQRTINTTMTKFRKHHPRSCFQRLTLPRKEGGRGLIDIVNLHNSQITNLRHYFFNKMEQSSLHKSIVHNDRKLTPLNLQDKNLQKNEKLTENNTKRAEWSVKPLHGRHYHDLCQPNVDIQASNAWLSRGDLFPETEGFIMAIQDQVIETKNYQKYIMKKLISDSCRKCLSAPETIQHVTGACKTIAQTDYKHRHDQIANIIHQQLATQYKLIGETQPYYKYNPEIVLENLSTKLYYDRAILTDRTIHYNRPDITLVDKINKTGYLIDIAVPNTHNVQSTICEKLTKYTELKEEIARLWHLQKVTIVPIVLSTTGIIPKQLHQSLKTLNLPPTIYYLLQKAAILNTCRIVRKFLQTDTQNSYSTTSAPLTIPVLHTAQTIIPNSEPI

SEQ ID NO: 16547 - protein, 1432 aa, Emesis lacrines
MEETKNKRKYNLRPLPGGRRGAPGAGAGCFSSRDTGDVELSRRALVTQTVTADRRGLNRRAHDVEVTAESTSGDDTHSLFSSIPSTRPSYMTRRRASSTLSNTTSLGSVVQEIHFDSEPAPTSGLPCTRKRWNNEMNQFILRTYLQLTALDTDTRTYLEPLHLKFSEKYPEMNASRQRIGDQRRAIIRNKLLPQTTIDLIYNQVREELARLENSTRPRQTQQQHLLESANTTYLIPTPNASSTQDSNTLTRNTNTRMKWTTKHNEAIIRSYFHITQLETNKTVYRKLLHQNFIQIFPELAHLSEQRISDQRRAIINNKYITEERINTIKLEVANELSPSSLAINNNILTNETDNTNNLYSRPLSNNDNDSFLHETETTIEIDSDKNEKIDTTFSQAFKFFTNSNPTTRNYIPKQKPSKKFAKIVDYLNKVTLPSKVDDNTDFETLQTAIYCAAWTAAKINGAKLSLEPIDNSRHNKKDHKPCWQKRLENRIDDLRAKIGRLTQFINGNRSTHLKKHVDNILRYYKTHSVHEEPNTQLSHTLDTLKQKLAAAAGRLSRYKACTIRKQQNSQFINNEKLFYRNLKSNTSNTQQSGNRNDLNNTVDPEHLQQFWANIWEESTTHNSEAQWIHNERHNNITTSSMDFDTIPPDIFQKVLQKQHNWKSPGTDCIHSYWYKKFSSIHNHLHKFLNNFIQEPSILPKYITEGVTYMIPKDYTDFTNPAKYRPITCLQTLYKILTACISEIVYTHLDKYKILAEQQKGCRKASQGCKEQILIDSVILSQVCKTKSDLFTMYIDYQKAYDSVPHSWLIQVLEIYKIHPTIITFLKSTMTNWTTRLRLTTQHKVIDTNAIKINRGIFQGDSLSPLWFCLALNPLSNMLNSTETGYTLKYADENDDSEVHTSVLSHLLYMDDIKLYAETEHQLDYLATLTELFTNDINMKFGIDKCKTNSIKAGNIYQHQYTLETGEYIKPLDDNETYKYLGYQQARQIQQKDIKTKLKQEFKHRLNSLLKTQLNSRNTVKSINTYAIPILTYSFGIITWSKSDLKALQRTINTTMTKFRKHHPRSCFQRLTLPRKEGGRGLIDIVNLHNSQITNLRHYFFNKMEQSSLHKSIVHNDRKLTPLNLQDKNLQKNEKLTENNTKRAEWSVKPLHGRHYHDLCQPNVDIQASNAWLSRGDLFPETEGFIMAIQDQVIETKNYQKYIMKKLISDSCRKCLSAPETIQHVTGACKTIAQTDYKHRHDQIANIIHQQLATQYKLIGETQPYYKYNPEIVLENLSTKLYYDRAILTDRTIHYNRPDITLVDKINKTGYLIDIAVPNTHNVQSTICEKLTKYTELKEEIARLWHLQKVTIVPIVLSTTGIIPKQLHQSLKTLNLPPTIYYLLQKAAILNTCRIVRKFLQTDTQNSYSTTSAPLTIPVLHMAQTIIPNSEPI

SEQ ID NO: 16548 - protein, 1430 aa, Lychnuchoides ozias
MEETKRKYNLRPLPGGRRGAPGAGAGCFSLRDTGDVELSRRALVTQTVTADRRGLNRRAHDVEVTAESTSGDDTHSLFSSIPSTRPSYMTRRRASSTLSNTTSLGSVVQEIHFDSEPAPTSGLPCTRKRWNNEMNQFILRTYLQLTALDTDTRTYLEPLHLKFSEKYPEMNASRQRIGDQRRAIIRNKLLPQTTIDLIYNQVREELARLENSTRPRQTQQQHLLESANTTYLIPTPNASSTQDSNTLTRNTNTRMKWTTKHNEAIIRSYFHITQLETNKTVYRKLLHQNFIQIFPELAHLSEQRISDQRRAIINNKYITEERINTIKLEVANELSPSSLAINNNILTNETDNTNNLYSRPLSNNDNDSFLHETETTIEIDSDKNEKIDTTFSQAFKFFTNSNPTTRNYIPKQKPSKKFAKIVDYLNKVTLPSIVDDNTDFETLQTAIYCAAWTAAKINGAKLSLEPIDNSRHNKKDHKPRWQKRLENRIDDLRAKIGRLTQFINGNRSTHLKKHVDNILRYYKTHSVHEEPNTQLSHTLDTLKQKLAVAAGRLSRYKACTIRKQQNNQFINNEKLFYRNLKSNTSNTQQSGNRNDLNNTVDPEHLQQFWANIWEESTTHNSEAQWIHNERHNNITTSSMDFDTIPPDIFQKVLQKQHNWKSPGTDCIHSYWYKKFSSIHNHLHKFLNNFIQEPSILPKYITEGVTYMIPKDYTDFTNPAKYRPITCLQTLYKILTACISEIVYTHLDKYKILAEQQKGCRKASQGCKEQILIDSVILSQVCKTKSDLFTMYIDYQKAYDSVPHSWLIQVLEIYKIHPTIITFLKSTMTNWTTRLRLTTQHKVIDTNAIKINRGIFQGDSLSPLWFCLALNPLSNMLNSTETGYTLKYADENDDSEVHTSVLSHLLYMDDIKLYAETEHQLDYLATLTELFTNDINMKFGIDKCKTNSIKAGNIYQHQYTLETGEYIKPLDDNETYKYLGYQQARQIQQKDIKTKLKQEFKHRLNSLLKTQLNSRNTVKSINTYAIPILTYSFGIITWSKSDLKALQRTINTTMTKFRKHHPRSCFQRLTLPRKEGGRGLIDIVNLHNSQITNLRHYFFNKMEQSSLHKSIVHNDRKLTPLNLQDKNLQKNEKLTENNTKRAEWSVKPLHGRHYHDLCQPNVDIQASNAWLSRGDLFPETEGFIMAIQDQVIETKNYQKYIMKKLISDSCRKCLSAPETIQHVTGACKTIAQTDYKHRHDQIANIIHQQLATQYKLIGETQPYYKYNPEIVLENLSTKLYYDRAILTDRTIHYNRPDITLVDKINKTGYLIDIAVPNTHNVQSTICEKLTKYTELKEEIARLWHLQKVTIVPIVLSTTGIIPKQLHQSLKTLNLPPTIYYLLQKAAILNTCRIVRKFLQTDTQNSYSTTSAPLTIPVLHTAQTIIPNSEPI

SEQ ID NO: 16549 - protein, 1430 aa, Befrostia lalannei
MEETKRKYNLRPLPGGRRGAPGAGAGCFSSRDTGDVELSRRALVTQTVTADRRGLNRRAHDVEVTAESTSGDDTHSLFSSIPSTRPSYMTRRRASSTLSNTTSLGSVVQEIHFDSEPAPTSGLPCTRKRWNNEMNQFILRTYLQLTALDTDTRTYLEPLHLKFSEKYPEMNASRQRIGDQRRAIIRNKLLPQTTIDLIYNQVREELARLENSTRPRQTQQQHLLESANTTYLIPTPNASSTQDSNTLTRNTNTRMKWTTKHNEAIIRSYFHITQLETNKTVYRKLLHQNFIQIFPELAHLSEQRISDQRRAIINNKYITEERINTIKLEVANELSPSSLAINNNILTNETDNTNNLYSRPLSNNDNDSFLHETETTIEIDSDKNEKIDTTFSQAFKFFTNSNPTTRNYIPKQKPSKKFAKIVDYLNKVTLPSIVDDNTDFETLQTAIYCAAWTAAKINGAKLSLEPIDNSRHNKKDHKPRWQKRLENRIDDLRAKIGRLTQFINGNRSTHLKKHVDNILRYYKTHSVHEEPNTQLSHTLDTLKQKLAVAAGRLSRYKACTIRKQQNNQFINNEKLFYRNLKSNTSNTQQSGNRNDLNNTVDPEHLQQFWANIWEESTTHNSEAQWIHNERHNNITTSSMDFDTIPPDIFQKVLQKQHNWKSPGTDCIHSYWYKKFSSIHNHLHKFLNNFIQEPSILPKYITEGVTYMIPKDYTDFTNPAKYRPITCLQTLYKILTACISEIVYTHLDKYKILAEQQKGCRKASQGCKEQILIDSVILSQVCKTKSDLFTMYIDYQKAYDSVPHSWLIQVLEIYKIHPTIITFLKSTMTNWTTRLRLTTQHKVIDTNAIKINRGIFQGDSLSPLWFCLALNPLSNMLNSTETGYTLKYADENDDSEVHTSVLSHLLYMDDIKLYAETEHQLDYLATLTELFTNDINMKFGIDKCKTNSIKAGNIYQHQYTLETGEYIKPLDDNETYKYLGYQQARQIQQKDIKTKLKQEFKHRLNSLLKTQLNSRNTVKSINTYAIPILTYSFGIITWSKSDLKALQRTINTTMTKFRKHHPRSCFQRLTLPRKEGGRGLIDIVNLHNSQITNLRHYFFNKMEQSSLHKSIVHNDRKLTPLNLQDKNLQNNEKLTENNTKRAEWSVKPLHGRHYHDLCQPNVDIQASNAWLSRGDLFPETEGFIMAIQDQVIETKNYQKYIMKKLISDSCRKCLSAPETIQHVTGACKTIAQTDYKHRHDQIANIIHQQLATQYKLIGETQPYYKYNPEIVLENLSTKLYYDRAILTDRTIHYNRPDITLVDKINKTGYLIDIAVPNTHNVQSTICEKLTKYTELKEEIARLWHLQKVTIVPIVLSTTGIIPKQLHQSLKTLNLPPTIYYLLQKAAILNTCRIVRKFLQTDTQNSYSTTSAPLTIPVLHTAQTIIPNSEPI

SEQ ID NO: 16550 - protein, 1430 aa, Emesis diogenia
MEETKRKYNLRPLPGGRRGAPGAGAGCFSSRDTGDVELSRRALVTQTVTADRRGLNRRAHDVEVTAESTSGDDTHSLFSSIPSTRPSYMTRRRASSTMSNTTSLGSVVQEIHFDSEPAPTSGLPCTRKRWNNEMNQFILRTYLQLTALDTDTRTYLEPLHLKFSEKYPEMNASRQRIGDQRRAIIRNKLLPQTTIDLIYNQVREELARLENSTRPQQTQQQHLLESANITYLIPTPNASSTQDSNTLTRNTNTRMKWTTKHNEAIIRSYFHITQLETNKTVYRKLLHQNFIQIFPELAHLSEQRISDQRRAIINNKYITEERINTIKLEVANELSPSSLANNNNILTNETDNTNNLYSRPLSNNDKDSFLHETETTIEIDSDKNEKIDTTFSQAFKFFTNSNPTTRNYIPKQKPSKKFAKIVDYLNKVTLPSIVDDNTDFETLQTAIYCAAWTAAKINGAKLSLEPIDNSRHNKKDHKPHWQKRLENRIDDLRAKIGRLTQFINGNRSTHLKKHVDNILRYYKTHSVHEEPNTQLSHTLDTLKQKLAVAAGRLSRYKACTIRKKQNNQFINNEKLFYRNLKSNTSNTQQSGNRNDLNNTVDPEDLQQFWANIWEESTTHNSEAQWIHNERHNNITTSSMDFDTIPPDIFQKVLQKQHNWKSPGTDCIHSYWYKKFSSIHNHLHKFLNNFIQEPSILPKYITEGVTYMIPKDYTDFTNPAKYRPITCLQTLYKILTACISEIVYTHLDKYKILAEQQKGCRKASQGCKEQILIDSVILSQVCKTKSDLFTMYIDYQKAYDSVPHSWLIQVLEIYKIHPTIITFLKSTMTNWTTRLRLTTQHKVIDTNAIKINRGIFQGDSLSPLWFCLALNPLSNMLNSTETGYTLKYADENDDSEVHTSVLSHLLYMDDIKLYAETEHQLDYLATLTELFTNDINMKFGIDKCKTNSIKAGNIYQHQYTLETGEYIKPLDDNETYKYLGYQQARQIQQKDIKTKLKQEFKHRLNSLLKTQLNSRNTIKSINTYAIPILTYSFGIITWSKSDLKALQRTINTTMTKFRKHHPRSCFQRLTLPRKEGGRGLIDIVNLHNSQITNLRHYFFNKMEQSSLHKSIVHNDRKLTPLNLQDKNLQKNEKLTENNTKRAEWSVKPLHGRHYHDLCQPNVDIQASNAWLSRGDLFPETEGFIMAIQDQVIETKNYQKYIMKKLISDSCRKCLSAPETIQHVTGACKTIAQTDYKHRHDQIANIIHQQLATKYKLIGETQPYYKYNPEIVLENLSTKLYYDRAILTDRTIHYNRPDITLVDKINKTGYLIDIAVPNTHNVQSTICEKLTKYTELKEEIARLWHLQKVTIVPIVLSTTGIIPKQLHQSLKTLNLPPTIYYLLQKAAILNTCRIVRKFLQTDTQNSYLTTSAPLTIPVLHTAQTIIPNSEPI

SEQ ID NO: 16551 - protein, 1430 aa, Emesis heteroclita
MEETKRKYNLRPLPGGRRGAPGAGAGCFSTRDTGDVKLSRRALVTQTVTADRRGLNRRAHDVEVTAESTSGDDTHSLFSSIPSTRPSYMTRRRASSTLSNTTSLGSVVQEIHFDSEPAPTSGLPCTRKRWNNEMNQFILRTYLQLTALDTDTRTYLEPLHLKFSEKYPEMNASRQRIGDQRRAIIRNKLLPQTTIDLIYNQVREELARLENSTRPRQTQQHLLESANTTYLIPTPNASSTQDSNTLTRNTNTRMKWTTKHNEAIIRSYFHITQLETNKTVYRKLLHQNFIQIFPELAHLSEQRISDQRRAIINNKYITEERINTIKLEVANELSPSSLAINNNILTNETDNTNNLNSRPLSNNDNDSFLHETETTIEIDSDKNEKIDTTFSQAFKFFTNSNPTTRNYIPKQKPSKKFAKIVDYLNKVTLPSIVDDNTDFETLQTAIYCAAWTAAKINGAKLSLEPIDNSSRHNKKDHKPRWQRRLENRIDDLRAKIGRLTQFINGNRSTHLKKHVDNILRYYKTHSVHEEPNTQLSHTLDTLKQKLAVAAGRLSRYKACTIRKQQNNQFINNEKLFYRNLKSNTSNTQQSGNRNDLNNTVDPEHLQQFWANIWEESSTHNSEAQWIHSERHNNITTSSMDFDTIPPDIFQKVLQKQHNWKSPGTDCIHSYWYKKFSSIHNHLHNFLNNFIQEPSILPKYITEGVTYMIPKDYTDFNNPAKYRPITCLQTLYKILTACISEIVYTYLDKYKILAEQQKGCRKASQGCKEQILIDSVILSQVCKTKSDLFTMYIDYQKAYDSVPHSWLIQVLEIYKIHPTIITFLKSTMTNWTTRLRLTTQHKVIDTNAIKINRGIFQGDSLSPLWFCLALNPLSNMLNSTETGYTLKYADENDDSEVHTSVLSHLLYMDDIKLYAETEHQLDYLATLTELFTNDINMKFGIDKCKTNSIKAGNIYQHQYTLETGEYIKPLDDNETYKYLGYQQARQIQQKDIKNKLKQEFKHRLNSLLKTQLNSRNTVKSINTYAIPILTYSFGIITWSKSDLKALQRTINTTMTKFRKHHPRSCFQRLTLPRKEGGRGLIDIVNLHNSQITNLRHYFFNKMEQSSLHKSIVHNDRKLTPLNLQDKNLQKNEKLTVNNTKRAEWSVKPLHGRHYHDLCQPNVDIQASNAWLSHGELFPETEGFIMAIQDQVIETKNYQKYIMKKLISDSCRKCLSAPETIQHVTGACKTIAQTDYKHRHDQITNIIHQQLATQYKLIGETQPYYKYHPEIVLENLSTKLYYDRAILTDRTIHYNRPDITLVDKINKTGYLIDIAVPNTHNVQSTICEKLTKYTELKEEIARLWHLQKVTIVPIVLSTTGIIPKQLHQSLKTLNLPPTIYYLLQKAAILNTCRIVRKFLQTDTQNSYSTTSAPITIPVLHTAQTIIPNSEPI

SEQ ID NO: 16552 - protein, 1430 aa, Emesis liodes
MEETKRKYNLRPLPGGRRGAPGAGAGCFSSRDTGDVELSRRALVTQTVTADRRGLNRRAHDVEVTAESTSGDDTHSLFSSIPSTRPSYMTRRRASSTLSNTTSLGSVVQEIHFDSEPAPTSGLPCTRKRWNNEMNQFILRTYLQLTALDTDTRTYLEPLHLKFSEKYPEMNASRQRIGDQRRAIIRNKLLPQTTIDLIYNQVREELVRLENSTRPRQTQQQHLLESANTTYLIPTPNASSTQDSNTLTRNTNTRMKWTTKHNEAIIRSYFHITQLETNKTVYRKLLHQNFIQIFPELAHLSEQRISDQRRAIINNKYITEERINTIKLEVANELSPSSLAINNNILTNETDNTNNLYSRPLSNNDNDSFLHETETTIEIDSDKNEKIDTTFSQAFKFFTNSNPTTRNYIPKQKPSKKFAKIVDYLNKVTLPSIVDDNTDFETLQTAIYCAAWTAAKINGAKLSLEPIDNSRHNKKDYKPCWQKRLENRIDDLRAKIGRLTQFINGNRSTHLKKHVDNILRYYKTHSVHEEPNTQLSHTLDTLKQKLAVAAGRLSRYKACTIRKQQNSQFINNEKLFYRNLKSNTSNTQQSGNRNDLNNTVDPEHLQQFWANIWEESTTHNSEAQWIHNERHNNITTSSMDFDTIPPDIFQKVLQKQHNWKSPGTDCIHSYWYKKFSSIHNHLHKFLNNFIQEPSILPKYITEGVTYMIPKDYTDFNNPAKYRPITCLQTLYKILTACISEIVYTHLDKYKILAEQQKGCRKASQGCKEQILIDSVILSQVCKTKSDLFTMYIDYQKAYDSVPHSWLIQVLEIYKIHPTIITFLKSTMTNWTTRLRLTTQHKVIDTNAIKINRGIFQGDSLSPLWFCLALNPLSNMLNSTETGYTLKYADENDDSEVHTSVLSHLLYMDDIKLYAETEHQLDYLATLTELFTNDINMKFGIDKCKTNSIKAGNIYQHQYTLETGEYIKPLDDNETYKYLGYQQARQIQQKDIKTKLKQEFKHRLNSLLKTQLNSRNTVKSINTYAIPILTYSFGIITWSKSDLKALQRTINTTMTKFRKHHPRSCFQRLTLPRKEGGRGLIDIVNLHNSQITNLRHYFFNKMEQSSLHKSIVHNDRKLTPLNLQDKNLQKNEKLTENNTKRAEWSVKPLHGRHYHDLCQPNVDIQASNAWLSRGDLFPETEGFIMAIQDQVIETKNYQKYIMKKLISDSCRKCLSAPETIQHVTGACKTIAQTDYKHRHDQIANIIHQQLATQYKLIGETQPYYKYNPEIVLENLSTKLYYDRAILTDRTIHYNRPDITLVDKINKTGYLIDIAVPNTHNVQSTICEKLTKYTELKEEIARLWHLQKVTIVPIVLSTTGIIPKQLHQSLKTLNLPPTIYYLLQKAAILNTCRIVRKFLQTDTQNSYSTTSAPLTIPVLHTAQTIIPNSEPI

SEQ ID NO: 16553 - protein, 1337 aa, Emesis temesa
MEETKRKYNLRPLPGGRRGAPGAGAGCFSSRDTGDVELSRRALVTQTATADRRGLNRRAHDVEVTAESTSGDDTHSLFSSIPSTRPSYMTRRRASSTLSNTTSLGSVVQDIHFDSEPAPTSGLPCTRKRWNNEMNQFILRTYLQLTALDTDTRTYLEPLHLKFSEKYPEMNASRQRIGDQRRAIIRNKLLPQTTIDLIYNQVREELARLENSTRPRQTQQQHLLESANTTYLIPTPNASSTQDSNTLTRNTNTRMKWTTKHNEAIIRSYFHITQLETNKTVYRKLLHQNFIQIFPELAHLSEQRISDQRRAIINNKYITEERINTIKLEVANELSPSSLAIDNNIVTNETDNTNNLYSRPLSNNDNDSFLHETETTIEIDSDKNEKIDTTFSQAFKFFTNSNPTTRNYIPKQKPSKKFAKIVDYLNKVTLPSIVDDNTDFKTLQTAIYCAAWTAAKINGAKLSLEPIDNSRHNKKDHKPCWQKRLENRIDDLRAKIGRLTQFINGNRSTHLKKHVDNILRYYKTHSVHEEPNTQLSHTLDTLKQKLAVAAGRLSRYKACTIRKQQNNQFINNEKLFYRNLKSNTSNTQQSGNRNDLNNTVDPEHLQQFWANIWEESTTHNSEAQWIHNERHNNITTSSMDFDTIPPDIFQKVLQKQHNWKSPGTDCIHSYWYKKFSSIHNHLHKFLNNFIQEPSILPKYITEGVTYMIPKDYTDFTNPAKYRPITCLQTLYKILTACISEIVYTHLDKYKILAEQQKGCRKASQGCKEQILIDSVILSQVCKTKSDLFTMYIDYQKAYDSVPHSWLIQVLEIYKIHPTIITFLKSTMTNWTTRLRLTTQHKVIDTNAIKINRGIFQGDSLSPLWFCLALNPLSNMLNSTETGYTLKYADENDDSEVHTSVLSHLLYMDDIKLYAETEHQLDYLATLTELFTNDINMKFGIDKCKTNSIKAGNIYQHQYTLETGEYIKPLDDNETYKYLGYQQARQIQQKDIKTKLKQEFKHRLNSLLKTQLNSRNTVKSINTYAIPILTYSFGIITWSKSDLKALQRTINTTMTKFRKHHPRSCFQRLTLPRKEGGRGLIDIVNLHNSQITNLRHYFFNKMEQSSLHKSIVHNDRKLTPLNLQDKNLQKNEKLTENNTKRAEWSVKPLHGRHYHDLCQPNVDIQASNAWLSRGDLFPETEGFIMAIQDQVIETKNYQKYIMKKLISDSCRKCLSAPETIQHVTGACKTIAQTDYKHRHDQIANIIHQQLATQYKLIGETQPYYKYNPEIVLENLSTKLYYDRAILTDRTIHYNRPDITLVDKINKTGYLIDIAVPNTHNVQSTICEKLTKYTELKEE

SEQ ID NO: 16554 - protein, 1428 aa, Codatractus alcaeus
MEETKRKYNLRPLPGGRRGAPGAGAGCFSLRDTGDVELSRRALVTQTVTADRRGLNRRAHDVEVTAESTSGDDTHSLFSSIPSTRPSYMTRRRASSTLSNTTSLGSVVQEIHFDSEPAPTSGLPCTRKRWNNEMNQFILRTYLQLTALDTDTRTYLEPLHLKFSEKYPEMNASRQRIGDQRRAIIRNKLLPQTTIDLIYNQVREELARLENSTRPRQTQQQHLLESANTTYLIPTPNASSTQDSNTLTRNTNTRMKWTTKHNEAIIRSYFHITQLETNKTVYRKLLHQNFIQIFPELAHLSEQRISDQRRAIINNKYITEERINTIKLEVANELSPSSLAINNNILTNETDNTNNLYSRPLSNNDNDSFLHETETTIEIDSDKNEKIDTTFSQAFKFFTNSNPTTRNYIPKQKPSKKFAKIVDYLNKVTLPSIVDDNTDFETLQTAIYCAAWTAAKINGAKLSLEPIDNSRHNKKDHKPRWQKRLENRIDDLRAKIGRLTQFINGNRSTHLKKHVDNILRYYKTHSVHEEPNTQLSHTLDTLKQKLAVAAGRLSRYKACTIRKQQNNQFINNEKLFYRNLKSNTSNTQQSGNRNDLNNTVDPEHLQQFWANIWEESTTHNSEAQWIHNERHNNITTSSMDFDTIPPDIFQKVLQKQHNWKSPGTDCIHSYWYKKFSSIHNHLHKFLNNFIQEPSILPKYITEGVTYMIPKDYTDFTNPAKYRPITCLQTLYKILTACISEIVYTHLDKYKILAEQQKGCRKASQGCKEQILIDSVILSQVCKTKSDLFTMYIDYQKAYDSVPHSWLIQVLEIYKIHPTIITFLKSTMTNWTTRLRLTTQHKVIDTNAIKINRGIFQGDSLSPLWFCLALNPLSNMLNSTEIGYTLKYADENDDSEVHTSVLSHLLYMDDIKLYAETEHQLDYLATLTELFTNDINMKFGIDKCKTNSIKAGNIYQHQYTLETGEYIKPLDDNETYKYLGYQQARQIQQKDIKTKLKQEFKHRLNSLLKTQLNSRNTVKSINTYAIPILTYSFGIITWSKSDLKALQRTINTTMTKFRKHHPRSCFQRLTLPRKEGGRGLIDIVNLHNSQITNLRNYFFNKMEQSSLHKSIVHNDRKLTPLNLQDKNLQKNEKLTENNTKRAEWSVKPLHGRHYHDLCQPNVDIQASNAWLSRGDLFPETEGFIMAIQDQVIETKNYQKYIMKKLISDSCRKCLSAPETIQHVTGACKTIAQTDYKHRHDQIANIIHQQLATQYKLIGETQPYYKYNPEIVLENLSTKLYYDRAILTDRTIHYNRPDITLVDKINKTGYLIDIAVPNTHNVQSTICEKLTKYTELKEEIARLWHLQKVTIVPIVLSTTGIIPKQLHQSLKTLNLPPTIYYLLQKAAILNTCRIVRKFLQTDTQHSYSTTSAPLTIPVLHTAQTIIPNSE

SEQ ID NO: 16555 - protein, 792 aa, Protesilaus protesilaus
MDFDTIPPDIFQKVLQKQHNWKSPGTDCIHSYWYKKFSSIHNHLHKFLNNFIQEPSILPKYITEGVTYMIPKDYTDFTNPAKYRPITCLQTLYKILTACISEIVYTHLDKYKILAEQQKGCRKASQGCKEQILIDSVILSQVCKTKSDLFTMYIDYQKAYDSVPHSWLIQVLEIYKIHPTIITFLKSTMTNWTTRLRLTTQHKVIDTNAIKINRGIFQGDSLSPLWFCLALNPLSNMLNSTETGYTLKYADENDDSEVHTSVLSHLLYMDDIKLYAETEHQLDYLATLTELFTNDINMKFGIDKCKTNSIKAGNIYQHQYTLETGEYIKPLDDNETYKYLGYQQARQIQQKDIKTKLKQEFKHRLNSLLKTQLNSRNTVKSINTYAIPILTYSFGIITWSKSDLKALQRTINTTMTKFRKHHPRSCFQRLTLPRKEGGRGLIDIVNLHNSQITNLRHYFFNKMEQSSLHKSIVHNDRKLTPLNLQDKNLQKNEKLTENNTKRAEWSVKPLHGRHYHDLCQPNVDIQASNAWLSRGDLFPETEGFIMAIQDQVIETKNYQKYIMKKLISDSCRKCLSAPETIQHVTGACKTIAQTDYKHRHDQIANIIHQQLATQYKLIGETQPYYKYNPEIVLENLSTKLYYDRAILTDRTIHYNRPDITLVDKINKTGYLIDIAVPNTHNVQSTICEKLTKYTELKEEIARLWHLQKVTIVPIVLSTTGIIPKQLHQSLKTLNLPPTIYYLLQKAAILNTCRIVRKFLQTDTQNSYSTTSAPLTIPVLHTAQTIIPNSEPI

SEQ ID NO: 16556 - protein, 1430 aa, Epargyreus clarus
MEETKRKYNLRPLPGGRRGAPGAGAGCFSLRDTGDVELSRRALVTQTVTADRRGLNRRAHDVEVTAESTSGDDTHSLFSSIPSTRPSYMTRRRASSTLSNTTSLGSVVQEIHFDSEPAPTSGLPCTRKRWNNEMNQFILRTYLQLTALDTDTRTYLEPLHLKFSEKYPEMNASRQRIGDQRRAIIRNKLLPQTTIDLIYNQVREELARLENSTRPRQTQQQHLLESANTTYLIPTPNASSTQDSNILTRNTNTRMKWTTKHNEAIIRSYFHITQLETNKTVYRKLLHQNFIQIFPELAHLSEQRISDQRRAIINNKYITEERINTIKLEVANELSPSSLAINNNILTNETDNTNNLYSRPLSNNDNDSFLHETETTIEIDSDKNEKIDTTFSQAFKFFTNSNPTTRNYIPKQKPSKKFAKIVDYLNKVTLPSIVDDNTDFETLQTAIYCAAWTAAKINGAKLSLEPIDNSRHNKKDHKPRWQKRLENRIDDLRAKIGRLTQFINGNRSTHLKKHVDNILRYYKTHSVHEEPNTQLSHTLDTLKQKLAVAAGRLSRYKACTIRKQQNNQFINNEKLFYRNLKSNTSNTQQSGNRNDLNNTVDPEHLQQFWANIWEESTTHNSEAQWIHNERHNNITTSSMDFDTIPPDIFQKVLQKQHNWKSPGTDCIHSYWYKKFSSIHNHLHKFLNNFIQEPSILPKYITEGVTYMIPKDYTDFTNPAKYRPITCLQTLYKILTACISEIVYTHLDKYKILAEQQKGCRKASQGCKEQILIDSVILSQVCKTKSDLFTMYIDYQKAYDSVPHSWLIQVLEIYKIHPTIITFLKSTMTNWTTRLRLTTQHKVIDTNAIKINRGIFQGDSLSPLWFCLALNPLSNMLNSTETGYTLKYAYENEDSEVHTSVLSHLLYMDDIKLYAETEHQLDYLATLTELFTNDINMKFGIDKCKTNSIKAGNIYQHQYTLETGEYIKPLDDNETYKYLGYQQARQIQQKDIKTKLKQEFKHRLNSLLKTQLNSRNTVKSINTYAIPILTYSFGIITWSKSDLKALQRTINTTMTKFRKHHPRSCFQRLTLPRKEGGRGLIDIVNLHNSQITNLRHYFFYKMEQSSLHKSIVHNDRKLTPLNLQDKNLQKNEKLTENNTKRAEWSVKPLHGRHYHDLCQPNVDIQASNAWLSRGDLFPETEGFIMAIQDQVIETKNYQKYIMKKLISDSCRKCLSAPETIQHVTGACKTIAQTDYKHRHDQIANIIHQQLATQYKLIGETQPYYKYNPEIVLENLSTKLYYDRAILTDRTIHYNRPDITLVDKINKTGYLIDIAVPNTHNVQSTICEKLTKYTELKEEIARLWHLQKVIIVPIVLSTTGIIPKQLHQSLKTLNLPPTIYYLLQKAAILNTCRIVRKFLQTDTQNSYSTTSAPLTIPVLHTAQTIIPNSEPI

SEQ ID NO: 16557 - protein, 1431 aa, Theope publius
MEEAKRKYNLRPLPGGRRGAPGAGAGCFSSRDTGDVGLSRRALVTQTVTADRRGLNRRAHDVEVTAESTSGDDTHSLFSSIPSTRPSYMTRRRASSTLSNTTSLGSVVQEIHFDSEPAPTSDLPCTRKRWNNEMNQFILRTYLQLTALDTDTRTYLEPLHLKFSEKYPEMNASRQRIGDQRRAIIRNKLLPQTTIDLIYNQVREELARLENSTRPRQTQQQQHLLESANTTYLIPTPNASSTQDSNTLIRNTNTRMKWTTKHNEAIIRSYFHITQLETNKTVYRKLLHQNFIQIFPELAHLSEQRISDQRRAIINNKYITEERINTIKLEVANELSPSSLAINNNILTNETDNTNNLYSRPLSNNDNDSFLHETETTIEIDSDKNEKIDTTFSQAFKFFTNSNPTTRNYIPKQKPSKKFAKIVDYLNKVTLPSIVDDNTDFENLQTAIYCAAWTAAKINGAKLSLEPIDNSRHNKKDHKPRWQKRLENRIDDLRAKIGRLTQFINGNRSTHLKKHVDNILRYYKTHSVHEEPNTQLSHTLDTLKQKLAVAAGRLSRYKACTIRKQQNNQFINNEKLFYRNLKSNTSNTQQSGNRNDLNNTVDPEHLQQFWANIWEESTTHNSEAQWIHNERHNNITTSSMDFDTIPPDIFQKVLQKQHNWKSPGTDCIHSYWYKKFSSIHNHLHKFLNNFIQEPNILPKYITEGVTYMIPKDYTDFTNPAKYRPITCLQTLYKILTACISEIVYTHLDKYKILAEQQKGCRKASQGCKEQILIDSVILSQVCKTKSDLFTMYIDYQKAYDSVPHSWLIQVLEIYKIHPTIITFLKSTMTNWTTRLRLTTQHKVIDTNAIKINRGIFQGDSLSPLWFCLALNPLSNMLNSTETGYTLKYADENDDSEVHTSVLSHLLYMDDIKLYAETEHQLDYLATLTELFTNDINMKFGIDKCKTNSIKAGNIYQHQYTLETGEYIKPLDDNETYKYLGYQQSRQIQQKDIKTKLKQEFKHRLNSLLKTQLNSRNTVKSINTYAIPILTYSFGIITWSKSDLKALQRTINTTMTKFRKHHPRSCFQRLTLPRKEGGRGLIDIVNLHNSQITNLRHYFFNKMEQSSLHKSIVHNDCKLTPLNLQDKNLQKNEKLTENNTKRAEWSVKPLHGRHYHDLCQPNVDIQASNAWLSRGDLFPETEGFIMAIQDQVIETKNYQKYIMKKLISDSCRKCLSAPETIQHVTGACKTIAQTDYKHRHDQIANIIHQQLATQYKLIGETQPYYKYNPEIVLENLSTKLYYDRAILTDRTIHYNRPDITLVDKINKTGYLIDIAVPNTHNVQSTICEKLTKYTELKEEIARLWHLQKVTIVPIVLSTTGIIPKQLHQSLKTLNLPPTIYYLLQKAAILNTCRIVRKFLQTDTQNSYSTTSAPLTIPVLHTAQTIIPNSEPI

SEQ ID NO: 16558 - protein, 1403 aa, Clostera curtula
MEQNKKVYNLRSLPGGRRGALGAGAECLSMRNTGDGVSSRRARVTQNATADRRELSRRAHDVDATAESLGDETNSLFSSIPSTRPSYMTRRTTTMSTVSTSDSVVHDVNPDNIHVPTSGAQKRKRWTSEMNQFILRTYFQLTDLNKDTKTYLEPLHLKFIEKFPDMQVSRQRVGDQRRAIMRNNLLPQSTIDEIYDEVKNGLQVLRENINIHVHQTNYNNISPQPSQPRQNTINHLPNTNNEPQTRMKWTNEHNESVMRIFFRITNLGTNLTAYRKPMHQQFINTFPELAHLSEQRVADQRRLIETNKYISSDRLHLIKQQISEEISRSNDNGNYINDFTPFTESLNDSQPLTNNQIIITSEPPNSLEPLLRNPNIEETFQKALEFYRNILPTERKYIPKQKPSKKLFSTLQYVNKVILHKTINDDTDFNTFQTVIYCGAWTVAKINGAKITLESKDSHCHTHKETHKPKWQRRLELRVKNLRINIGRLTQFINGNRSNKMKKHIDAILDKYKFHSAHEEPNTQLTQTLDTLKQKLAVTAGRLSRYEACTLRKKQNTQFIQNQRQFYRNIKENSTNTRTHNGNIIDNPDAETFKRFWAGIWEDPEVHNEEADWIGSEKLTSNLNVPPMTFDSIPPEVFDKIISNLHNWKSPGSDFIHSFWYKKFTSIHKYLLKFINEFIQNPSSMPNYITTGITYMIPKDTNDYSDPAKFRPITCLQTLYKIITACISEMIHKHTESNKILAEQQKGCRKFSQGCKEQLIIDSVILKHVQKSKSDLFTMYIDYKKAFDSVPHSWLIKVLEIYKIHPKLIKFLSTAMLQWVTRLRLSTQTQTIETDTIKIQRGIFQGDALSPLWFCLALNPLSNILNASSLGFPLPYNDSTHELKSNVLSHLLYMDDIKLYAENETQLQHLASLTESFTNDIKMEFGINKCKINSIKAGNKHIHQYTLETGEHIDSLTEHETYKYLGYHQSFQIHNKDTKNQLKQQFRHRINMILKTRLNGRNTVKAINTYAIPALTYSFGVINWSKTELKSVQRIINTSMTRFRKHHPRACVQRLTLPRKEGGRGLIDIKNLHNKQISTLRQFFFDKLQTSPLHRSIAQNDNKLTPLNLNDRIAQNNEQVTDNKMKLDEWTRKSLHGRHRQDLCQPNVDKEASNAWLSRGDIFPETEGFMIAIQDQIIETRNYQKYIIKNLTSDICRKCNSAPETIQHITGSCRTIAQTDYKHRHDQVAYIVHQKLAHQYNLIESITPYYKYIPNPVLENTTTKLYFDRAILTDRTIHFNRPDITLIHKDSRTGYLIDIAVPNTHNLQATISEKLTKYIELKDEISRIWHLQKVTIVPIVVSTTGIIPNQLHQSLSSLNLPPKTYYMLQKAAILNTCRLVRKFLQAEQNTVNQPSQRNTLDQT

SEQ ID NO: 16559 - protein, 1494 aa, Hypena proboscidalis
MTPPSRRVRVHRGVLVGIPVPFTIFRHGRVPHNHSALPRGGVVCVNAFPHVKKKKKKKKRRTSTDKNITAERRELSRRAHDVEATADFTDDDTNSLFSSIPSTRPSYMTRSKKASTLSTISTPNSVVQDVFTDSEIAPTSGTSTTRKKWTSDMNEFILRTYLQLTTLDTDMNTYLEPLHLKFIEKFPNMEVSRQRVGDQRRAIIRNKLLPQATIDHIYNEVKEELNVLQRNVTYQANTTLTDTQQLEPTPERTLNTRNTSQTRMRWTIEQNEAIMSAYYRVTQLGTNETAYRKLIHREFITKFPALDHLSEQRIADQRRAIINNRYISKDRLNALKQEIAVELSLTPKHVELDSGTAENYIENIDASIQLPYFNEEVASVEEALNSETHLGRHLQIDETFKQAFQFYQNSEPTCRTYIPKQKPSKKLAKIINYLNETIIPENININTDFAYLQTVIYCAAWTAAKVNGAKVLLQAGESIEQGRKMHKPKWQTRLENKVEDLRSKISRLMQFMNGNRNRNVTNHANRIMAQYQTHTIHEELNTQAIHTLDTLKQKLAVAAGRLQRYKACTLRKHQNSQFTHSEKYFYRDIRQATTNIQAYGTNDDVTNTPTPETLKSFWAQIWEDPIQHNTQAAWIQKEATNIQSTMEYEHIPPEIFQNVLRDLHNWKSPGSDYIHSYWYKKFTAVHTNLYHHINKFIENPNTIPAYLTSGKTYMIPKDRNDLSNPAKYRPITCLQTCYKILTSCLSQLIYQYIDANNILAEQQKGCRKFSQGCKEQLTIDSVILRKVQKTKSNLFSMYIDYRKAYDSVPHSWLVQVLELYKIHPVIVNFLKTITTKWTTVLRLTTPTKVIETDPIQIKRGIFQGDALSPLWFCLALNPLSSILNSTSFGYPLKYTHTDGQTATRDNVLNHLLYMDDIKLYAETEEQLSQLANLTEQFSNDIRMEFGIDKCKINSVRAGQNYQHQYTLGTGEQIDSLEEQNTYKYLGYNQSLQINYKDTKHKLTQQFQHRLNTILKTQLNSKNTVKAINTYVIPLLTYSFGIINWNKTELKNLQRKINITMTLHRKHHPRACLQRLTLPRKEGGRGLIDILNLHNKQITTLRQYFFSKAETSTLHKSIAQNDYRFTPLNLKDLTKQKNEELKDDKMKLLEWTQKSLHGRHRHDLCQQNVDKEASNAWLNRGELFPETEGFMIAIQDQVIETKNYRKYIIKNLPIDTCRKCHSCPETIQHITGACKSLAQTDYKHRHDQVANIIHQKLAHQFKFIESILPYYKYSPETVLENEIAKLYYDRAILTDKTIHFNRPDITLINKITKVGFLIDIAVPNTHNLQATIAGKLSKYIELKDEITRLWHLQKVTIVPIVLSTTGVIPKQLHQSINTLQLSPYTYNLLQKAAILNTCRIVRKFLQCETDDTQPLNNEYTSTITPSVHTPTNATSVHTSTITTSAHTHTITTSAHTYTITTSPHTHTTTTSAHTHTITALEHTTETYRFTDEHLA

SEQ ID NO: 16560 - protein, 988 aa, Mesoligia furuncula
MILPENINNDTDFHTFQTVIYCAAWTVAKVNGAKLTLEPREITRCGTKTEYKPKWQRRLERKLNDIRSNIGRMTQFINGSRSRKLKKHVNKIIKLYRIHTVHEEPNTQAAHTLDTLKQKLSVIAGRLQRYKACTLRKQQNTQFSQNEKLFYRNIRQATTNVQNNNPSDDELNTPNPEALQNFWAEIWEQPVHHNAEADWIQGELSNNTNIQTMAFEHISPQIFHKVLSRLHNWKAPGSDHIHSYWYKKFTALHCYLYNFINSFIKDPNMIPSYITSGTTYMIPKDRNDLSNPAKYRPITCLQTLYKIITSCISEMIYEHIEANNILAEQQKGCRKYSQGCKEQLIIDSVILKRVQKSKTDLFTMYIDYKKAYDSVPHSWLLQVLEIYKINPTIVTFLKTMMTTWCTVLRLTTPTETTETSPIKIQRGIFQGDALSPLWFCLALNPLSKILNATSLGISLNSTATNRQTDPQKDVLNHLLYMDDIKLYAETESQLYELANLTETFTNDIKMEFGIDKCKINSVRAGHNYQHQYTLGTGEQIEPLDELDTYKYLGYNQSRQIHYKDTKQKLKQQFQHRLNTILKTQLYSRNTIKAINTFAIPVLTYSFGIINWTKTDLKNLQRKINTTMTKFRKHHPRSCIQRLTLPRKEGGRGLIDILNLHNRQITALRQYFFAKTESSPLHKLIAQSDQHLTPLNLKVTTEQKNEEVTDDKTKCQEWTQKSLHGRHRQDLCQSNVDKDASNAWLNRGELFPETEGFMLAIQDQVIETKNYRKYIIKNLTTDICRKCNSSPETIQHITGACKSIAQTDYKHRHDQVANVIHQKLAHKSKLIDAIVPYYKYNPETVLENPTTKLYFDRAILTDRTIHFNRPDITLIDKINKTGFLIDIAVPNTHNVQTTIAEKLSKYTELKDEITRLWHLQKVTIVPIVLSTTGVIPKQLHQSLSSLNLPPNTYHLLQKAVILDTCRLVRKFIQYSNCITTILYLYKFNF

SEQ ID NO: 16561 - protein, 1452 aa, Griposia aprilina
MEMSNKRVYNLRSLPGERRGASGADARCHSMRTIGGEELSKRAPTNKIVTAGRSDLNRRAHYVEATADSMGDDTMSLFSSIPSTRPSYMTRRTASLSTTSTLDSVAQDVNLDSELAPTTSAPSTRRRWTPEMNKFILRTYLQLTSLDTDRRTYLEPLHLKFTEKFPNMQVSRQRIGDQRRAIINNKLLPQKTIDEIRNEVKDELDQLHFTLQSQNSGELRQQILAPTQSTQIQPTTPETHSTQNRTQTRMRWTSEHNEAIMRSYYRVTALGTNETTYRKPMYEDFINQFPSLAHLSEQRIADQRRAIINNNYLSDDKLNSLKLEVSEELGTDNTRNYNSETIAVITNINNANIQLTNNIDINSIEEPTPNVQITDNTELNSTDILPNPQVNLERDPIIDDSFQQAFQFYKDTSPTNRVYIPKQKPSKNLARIISYLNKIILPENINNNTDFHTFQTVIYCAAWTVAKVNGAKITLEPREITRGTKKEYKPKWRRRLEQKVYDLRSKIGRMTQFINGNRSRKLKKHVNKIIILYKIHTVHEEPNTQALHTLDTLKQKLSVVTGRLERYKACTLRKQQNTQFTQNEKLFYRNIRQATTNVQNNNPNDDELNTPNPETLQNFWAGIWEQPIHHNAQADWIHAELSSNTDIQTMAFEHISPQIFHKVLSRLHNWKAPGSDHIHSYWYKKFTAVHCYLYNFINSFIQDPKIIPSYITSGTTYMIPKDRNDLCNPAKYRPITCLQTLYKIITSCISEMIYEHIDANNILAEQQKGCRKYSQGCKEQLIIDSVILKRVQKYKTDLFTMYIDYKKAYDSVPHSWLLQVLEIYKIHPTVISFLKTMMTTWCTVLRLTTPTETIDTSPIKIQRGIFQGDALSPLWFCLALNPLSKILNATSLGIPLNYTATNRQTDPQEDVLNHLLYMDDIKLYAETESQLYELANLTETFTKDINMEFGIDKCKINSVRAGQNYQHQYTLGTGERIEPLDELDTYKYLGYNQSRQIHYKDTKQKLKQQFQHRLNTILKTQLHSRNTIKAINTFAIPVLTYSFGVINWTKTDLKNLQRKINTTMTKFRKHHPRSCIQRLTLPRKEGGRGLIDILNLHNRQITALRQYFFAKTESSLLHKLIAHNDQHFTPLNLKDTTKQKNENVIDDKTKCQEWTQKSLHGRHRQDLSQLNVDKDASNAWLDRGELFPETEGFMLAIQDQVIETKNYRKYIIKNLTTDTCRKCNSSPETIQHITSACKSIAQTDYKHRHDQVANVIHQKLAHQYKLVDTVVPYYKYKPETVLENPATKLYFDRAILTDRTIHFNRPDITLINKINRIGFLIDIAVPNTHNLQTTIAEKLSKYTELKDEITRLWHLQKVTIVPIVLSATGVIPKQLHQSLSSLNLPPNIYHLLQKAVILNTCRLVRKFLQCESDNLHQYSHSNIVSSTIQSTSENQAASNISSTLHPTDGHLA

SEQ ID NO: 16562 - protein, 1460 aa, Agrochola circellaris
MEMSNKRYNLRSLPGERRGASGADARCHSMRTIGGEELSKRTPTNKIVTAGRSELNRRAHYVEATADSTGDDTISLFSSIPSTRPSYMTRRTASLSTTSTLDSVAQDVNLDSELAPTTSAPSTRRRWTPEMNTFILRTYLQLTSLDTDRRTYLEPLHLKFTENFPNMQVSRQRIGDQRRAIINNKLLPQKTIDEIRNEVKEELDQLHFTLQSQNSGKLRQQILAPTQSTQILAPTQSTQIQPTTLETHSTQNRTQSRMRWTSEHNEAIMRSYYRVTALGTNETTYRKPMYEDFINQFPSLAHLSEQRIADQRRAIINNNYLSDEKLNSLKLEVSEELGTDNTRNYNSETIAVITNINNTNIQLTDNIDINYIEEPTPNIQTTDNTELNSTYILPNPQVNLERDPKIDDSFQQAFQFYKDTSPTNRVYIPKQKPSKNLARIISYLNKIILPENINNNTDFHTFQTVIYCAAWTVAKVNGAKITLEPREITRGTKKEYKPKWRRRLEQKVNDLRSKIGRMTQFINGNRSRKLKKHVNKIIKLYRIHTVHEEPNTQAVHTLDTLKQKLSVVTGRLERYKACTLRKQQNTQFTQNEKLFYRNIRQTTTNVQNNNPNDDERNTPNPETLQHFWAGIWEQPIHHNAQADWIHAELSSNTDIQTMAFEHISPQIFHKVLSRLHNWKAPGSDHIHSYWYKKFTAVHCYLYNFINSFIQDPKIIPAYITLGTTYMIPKDRNDLCNPAKYRPITCLQTLYKIITSCISEMIYEHIDANNILAEQQKGCRKYSQGCKEQLIIDSVILKKVQKYKTDLFTMYIDYKKAYDSVPHSWLLQVLEIYKIHPTIVSFLKTLMTTWCTVLRLTTPTETINTSPIKIQKGIFQGDALSPLWFCLALNPLSKILNATSLGIPLNYTATNRQTDPQKDVLNHLLYMDDIKLYAETESQLYDLANLTETFTKDIKMEFGIDKCKINSVRAGQNYQHEYTLGTGEIIEPLDELDTYKYLGYNQSRQIHYKDTKQKLKQQFQHRLNTILKTQLHSRNTIKAINTFAIPVLTYSFGIINWTKTDLKNLQRKINTTMTKFRKHHPRSCIQRLTLPRKEGGRGLIDILNLHNRQITALRQYFFAKSESSLLHKLIAHNDQHFTPLNLKDTTEQKNENVIDDKTKCLEWTQKSLHGRHRQDLCQLNVDKEASNAWLNRGELFPETEGFMLAIQDQVIETKNYRKYIIKNLTTDTCRKCNSSPETIQHITGACKSIAQTDYKHRHDQVANVIHQKLAHQYKLVDTVIPYYKYNPETVLESPTTKLYFDRAILTDRTIHFNRPDITLINKINKTGFLIDIAVPNTHNLQTTIAEKLSKYTELKDEITRLWHLQKVTIVPIVLSTTGVIPKQLHQSLSSLNLPPNTYHLLQKAVILNTCRLVRKFLQCEVDNLHQYSRSNIVSTTIQSTSENQAASNITSTLNPTDGHLA

SEQ ID NO: 16563 - protein, 1249 aa, Schrankia costaestrigalis
MDVSRQRVGDQRRAIINSKLLPQTVIDQIYNEVKENLGKHTEETHSSSLQVNDNMSHTPSTQHSTQYSPHTSNTLHSSINRDRRMRWTTEHNEFIMRTYYEVTNLGTNQTAYRKLLHERFISNFPSLSFITEQRIADQRRVIVLNKYLSIDRLDHIKKEVAEKLQVGNNTSLNISTEQPIPNHSETNQIQDTHIDSIRTIENETLNLTTNTETQVQIDETFHQATQFFENSDPTSRSYIPKQKATKKLATIVNYINETVLPKYVTQETSFDSLQTAIYCAAWTAAKINGTKLSLQVDKNQKEKLKHKPRWQIRLEKKLCDLRTKIGRLTQFQNGNRSRNVVKHTNTIIEQYKIHTTHEEPNTQIIHTLDTLKQKLAVVTGRLQRYKACTLRKQQNTQFMHNEKLFYRNVKQETTNIHSNHSNTNEQNVPTSENLHDFWANIWSTPIQHSSEAEWIQTECRNSNTTIQSMTFEHITPEIFLNVIHNIHNWKSPGSDNIHSYWYKKFTTIHSHLLSHINTFVEEPKLIPTYLTIGKTYMIPKDNENLADPSKYRPITCLQTLYKIITSCLSQLVYQHVSSNNILAEQQKGCKKYSQGCKEQLIIDSVILNQVQKSKSDLFSMYIDYKKAYDSVPHSWLIHVLELYKIHPKLIVFLKSLMSKWATVLTLNTPSKTIETNPIKIQRGIFQGDALSPLWFCLALNPLSNILNSTSLGYSFKDIVPDEQNIAQNNVVSHLLYMDDIKLYAKTETELNELARLTEQFTNDIKMEFGIDKCKINSIKAGQNYQHHYVLNTGEHINPLDEYSSYKYLGYNQSLQIQHKNIKQTLTQQFQHRLNTILKTQLNAINTVKAINTFVIPLLTYSFGVIRWTKTELKNLQRKINTTMTKFRKNHPRSSVHRLTLPRSEGGRGIIDISNLHNRQISGLRKYFFAKSQSSALHKYTAHNDHKFTPLNLKNPTLQINEQLIDDKTKIDDWTNKSLHGRHRHDLCQQNVDKEASNAWLSRGELFPETEGFIIAIQDQVIETKNYRKYIIKNLLSDTCRKCSSASETIQHITGACKSIAQTDYKHRHDQVANIIHQKLAQQYNFIDTLTPYYKYNPETVLDNSTTKLYYDRAILTDRTIHFNRPDITLINKVTRTGYLIDIAVPNTHNLQTTIAEKLTKYIELKDEITRLWNLQKVTIVPIVISTTGVIPKQLHQSIKTIELPTNTYNLLQKAVILNTCRIVRKFLQCDSDTTPNAHNITHTTTTVNS

SEQ ID NO: 16564 - protein, 1449 aa, Helicoverpa armigera
MEMNSERRYNLRSLPGERRGASGADAGCHSMRTIGGEALSRRTLTENKATAGRSELSRRAHGVDATADSSGEDTISLFSSIPSTRPSYMTRRTSTLSTSTLASVVQDVNLDSELAPTTSAPTTRRRWTTEMNRFILRTYLQLTALGTDTRTYLEPLHTKFIEKFPNMQVSRQRIGDQRRAIVRNKLITQTEIDQIHEEVKAQLNQLQSDHRHHVEPNIEHSNIESIPTQTTRIQPTTSETRNTQNRTQSRMRWTNEQNEAIMRSYYRVTDLGRNETAYRKTMYIDFINRYPSLAHLSEQRIADQRRLIINNKYITLDRLNSIKKEVAEELRRNTTYNTITEIPDYIENTDLSLTDLQDTILIDISPTSEHTAPTENPNTTAINIESTPTANPQINAERDQFIDETFQLAFNFYKETSPTDRIYIPKQKPSKHLAKIISYMNKITIPENINENTDFNTVQTVIYCAAWTTAKVNGSKIELRPKESNNTVRQEYDPSWQKRLKRKLNDLRSKLGKVTQYINGNRSRKVIKHIDAIFEQYKTHTVHEEPNTQAIHILDTLRQKLSVVTGRLQRYTACTQRKKQNNQFTHNEKLFYRNIRQATSNLRANRSNDDNRNTPDPEILQSFWSNIWEQPIEHNTQAEWIQREQTQNSNTPEMVFEHISPQIFQNVLTRLHNWKAPGSDHIHSYWYKKFTAAHGYLHTFINKFIQNPESIPSYITSGTTFMIPKDPSDPSNPAKYRPITCLQTLYKIMTSCISELIYKHVNSNSLLAEQQKGCRRFSQGCKEQLIIDSVILKKTLKTKSDLYSMYIDYRKAYDSVPHSWLIQVLEIYKIHPTLVNFLKSMMNTWTTVLKLTTTTQTIETNPIKIQRGIFQGDSLSPLWFCLALNPLSNILNSSSFGIPLADQENTEQPLNLNNALSHLLYMDDIKLFAKSENHLYQLANLTEQFTNDIKMEFGIDKCKINSVRAGQNYRHHYTTESGEQIESLDEQETYKYLGYAQSSQILQKDTKNKLTQQFQHRLNTILKTQLYSRNTIKAINTFAIPVLTYSFGIINWTKSDLKNLQRKINTTMTKFRKHHPRSCLQRLTLPRKEGGRGLIDILNLHNKQIKTLRQYFYMKNSSSTLHRLISQNDRRYTPLNLQDTSEQKNERITDDKTKLLEWTQKSLHGRHRQDLCQQNVDKEASNAWLNRGELFPETEGFMMAIQDQVIETRNYRKYIIKNLSNDICRKCNSSAETIQHITGACKSIAQTDYKHRHDQVANVIHQKLAHQYKLINTIVPYYKYVPETVLENPTTKLYFDRAILTDRTIHFNRPDITLIDKTSKTGYLIDIAVPNTHNMQHTIAEKLTKYIELKDEITRLWRLQKVTIIPIVISTTGVIPKQLHQSLQSLSLPPNTYQLLQKAVILNTCRLVRKFLQCETDTHQNTHTHTVITTQTQRGNNQNVINPTGEHLA

SEQ ID NO: 16565 - protein, 1462 aa, Heliothis virescens
MEMSNERRYNLRSLPGERRGASGADAGCHSMRTIGGETLSRRALTENTATAGRSELNRRAHSVDATADSTGEDTISLFSSIPSTRPSYMTRRTSTLSSSTLASVVQDVIPDAELAPTTSAPTTRRRWTDEMNKFILRTYLQLTALESDTKNYLEPLHLKFIERFPDMQVSRQRVGDQRRAIIRNKFLPQTIIDQIHKQVKDEFNQLQSNHIQPTQTNVDQPLIELTPTPTRTPETQRTISETRNTQNRTQTRMRWTNEQNEAIMRSYYRVTQLGTNETAHRKPMYLDFINSCPSLAHLSEQRIADQRRAIINNKYIKNDRLNSIKLEVAEELRQSSQPSFYTISEPPLDDTHCFENIETPFTNIPVDLAATTETLPNTEVNDNTELSTEPTQIIETPQTNTERDQLIDSTFQQVYEFYKESSPVDRTYIPKQKSSKNLAKIIDYLNTITIPENVNAETDFQKLQTIIYCAAWTAAKVNGAKITLQPRVINIGAKREYKPKWQKRLERKVKDLRRKIGRITQFIKGNRSKRVSKHVNKIIKQYKIHTIHEEPNTQVMHTLDTLQQKLSVVTGRLNRYKACTQRKQQNFQFSNNEKLFYRNIRQATSNIQENHQIGSEHSTISPDALQNFWASIWEQPIEHNAEVDWIQTELNNCNTQIQEMVFEHISPQIFHKVLSRLHNWKAPGSDQIHSYWYKKFTSIHSYLHTHINFFIQNPETIPSYITSGTTFMIPKDRNDLSNPAKYRPITCLQTLYKIITSCITELVYQHVDGNNILAEQQKGCRRFSQGCKEQLIIDSVILKKTQKNKSDLFSMYIDYQKAYDSVPHSWLIHILELYKIHPTLIRFLKTTMTTWTTVLKLTSTNETLHTNPIKIQRGIFQGDALSPLWFCLALNPLSNILNSTSVGIPLSNTPTDTQVLTENNVLSHLMYMDDIKLYAKTESELHQLATLTEQFSNDIKMQFGIDKCKINSVRAGQNYQHHHSLESGTQIEPLDEQETYKYLGYAQSRQIHYKDTKHKLKQQFQHRLNTILKTQLNSRNTIKAINTFAIPILTYSFGIINWSKTDLKNLQRKINTTLTKFRKHHPRACLQRLTLPRKEGGRGLIDVLNLHNKQIASLRKYFFSKISSSTLHKLIAHNDKHFTPLNLTDTSTQTNEKVTDDKTKILEWARKSLHGRHRQDLCQNNVDKEASNAWLNRGELFPETEGFIIAIQDQIIETKNYRKYIIRNLTTDTCRKCNSSPETIQHITGACKSLAQTDYKHRHDQVANIIHQKLAHRYNLIDSVVPYYKYTPETVLDSPTAKLYFDRAILTDRTIHFNRPDITLVDKINRTGYLIDIAVPNTHNLQSTIAEKISKYTELKDEITRLWHLQKVTIVPLVLSTTGVIPKQLHQSLNSLNLPPYTYYLLQKAVILNTCRLVRKFLQCESDTTHINTNTQTQPIIASTSQTCNRPNCRIPNNDPTDEHLA

SEQ ID NO: 16566 - protein, 1440 aa, Amphipyra berbera
MRLRNRILPQAGTGANRDGESRPGPSSPGCPSYSGEGTVPHQPVQSRTVAVQNSSTSSLLSFIYSPVLSPIPSPLLSTIPSSRSPSTRRAHNVRATADSSGADTNSLFSSIPSTRPSYMTRRTTSCSTSSTLDSVVQDVNLDSQIAPITSASSSRKRWTPEMNKFILRTYFQLTALNTDTRTYLEPLHLKCIEKYPHMQVSRQRIGDQRRAIIRNKLLTQKTIDEIHNEVKEELNQLQSNIHNQHTQTLTTTQSTPSEARNTQKTTQIRMRWTNELNEAIMRSYYRVTVLGTNETAYRRPMYEDFINKFPSLAHLSEQRIADQRRAIINNKYICNNRLNSLKLEISEELGLNNNNLSNPTSETTNIVNSNNSNNENIDIQLSNNINTEESLPNIPSPSFEINLTEEALPYPQTDLERNPQIDETFQQAFQFYRNTFPTNRVYIPKQKPSKNLARIVNYLNQITLRENVNKDTDFCILQTVIYCAAWTVAKVNGAKITLQLAESLPNAKKEFKPNWQRRLERKLADLRTKIGRLTQFINGNRSRKVIKHVNNIIEQYKIHTIHEEPNTQAAHTLDTLKQKLSVVSGRLQRYKTCTLRKQQNTQFTNNEKLFYRNIRHATTNVQENSANHEGNDSPDPETLQNFWAGIWEDPTEHNAQAEWIQTESTRHSTNIQAMTFEHISPEIFQKVLYRLHNWKAPGSDHIHSYWYKKFTAVHSYLHNYINIFIQDPNSIPCYLTLGTTFMIPKDRNDLSNPAKYRPITCLQTLYKIITACISEIIYQHMDANNILAEQQKGCRKFSQGCKEQLIIDSVILKKVQKTKTDLFSMYIDYKKAYDSVPHSWLVKVLEIYKIHPAIVTFLETTMTTWKTVLRLTTPTKTVETSPIKIQRGIFQGDALSPLWFCLALNPLSNILNSTSVGIPLKATDTEEQTEAQNNTLNHLLYMDDIKLYAKSESQLYELANLTEQFTNDIKMEFGIDKCKINSVRAGQNYQHQYTLETGQQIEPLDEQDTYKYLGYNQSLQIHYKDTKQKLKQQFQHRLNTILKTQLYSRNTIKAINTFAIPVLTYSFGIINWTKTDLKNLQRKINTTMTKFRKHHPRSCSQRLTLPRKEGGRGLIDILNLHNKQITTLRQYFFAKTQSSTLHKLIAQNDQQLTPLNLKDTSEQKNEKLTHDKTKLLEWTQKSLHGRHRQHLCQLNVDKEASNRWLNRGELFPETEGFMIAIQDQVIETKNYRKFIIKNLATDTCRKCNSSPETIQHITGACKSIAQTDYKHRHDQVVNVIHQKLAYQYKLIDSIVPYYKYNPETVLENLSTKLYFDRAILTDRTIHFNRPDITLINKTSKTGYLIDIAVPNTHNLQTTIAEKLSKYTELKDEITRLWHLQKVTIVPIVLSTTGVIPKQLHQSLKSLNLPSNTYHLMQKAVILNTCRLVRKFLQCEPDNPH

SEQ ID NO: 16567 - protein, 938 aa, Xestia c-nigrum
MTQFINGNRSRKIIKHVKRINKQYKIHTVHEEPNTQSEHTLDTLKQKLAVVTGRLQRYKACTQRKRQNTQFTLNEKLFYRNIRQVSTNVQNINPSDDDVQNDLDLQNLQNFWAGIWEHPIEHNTQTDWIQAELSNASTNIQPMTFEHISPQIFHEVLARLHNWKAPGSDQIHSYWYKKFTAIHSFLYNHINNFIQDPKTIPPYLTSGTTYMISKDRNDLSNPAKYRPITCLQTLYKIITSCISSLIYNHIDTNNILAEQQKGCRKFSQGCKEQLVIDSIILKKAQKSKTDLYSMYIDYKKAYDSVPHSWLVQILEIYRIHPTIITFLKTTMTTWSTVLRVNTSTDAADTRPIKILRGIFQGDALSPLWFCLALNPLSNILNSTGTGFPLRDTTHEGQHEVQNNTLNHLLYMDDIKLYAKSESQLNELANLTEQFTNDVKMEFGIGKCKINSVRAGQYYQHPYTLETGEHIDPLDEHDTYKYLGYNQSRQINHKETKQKLKQQFQHRLNTILKTQLYARNTIKALNTFAIPVLTYSFGIINWTKTDLKNLQRKINTTMTKFRKHHPSSCVQRLTLPRKEGGRGLIDIQNLHNKQITTLRQYFFTKAESSTLHKQIANNDIHFTPLNLKDKSEQKNEKVTDNKTKLLEWSQKSLHGRHYQDLSQINVDKEASNAWLKRGELFPETEGFMIAIQDQVIETKNYRKYIIKNLTTDTCRKCNRLPETIQHITGACKSIAQTDYKHRHDQVANVIHQKLAYQYKLLDSIVPYYKYTPETVLENTSIKLYFDRGIFTDRTIHFNRPDITLINKTNKTGYLIDIAVPNTHNIQTTIAEKLSKYTELKEEITRIWHLQKVTIVPIVLSTTGVIPKQLHQSLNSLNLPSNTYHLLQKAVILNTCRLVRKFLQCESEYPPQTLFQAPTQLRNLPITTPLILNPADNHLA

SEQ ID NO: 16568 - protein, 1452 aa, Griposia aprilina
MEMSNKRVYNLRSLPGERRGASGADARCHSMRTIGGEELSKRAPTNKIVTAGRSDLNRRAHYVEATADSMGDDTMSLFSSIPSTRPSYMTRRTASLSTTSTLDSVAQDVNLDSELAPTTSAPSTRRRWTPEMNKFILRTYLQLTSLDTDRRTYLEPLHLKFTEKFPNMQVSRQRIGDQRRAIINNKLLPQKTIDEIRNEVKDELDQLHFTLQSQNSGELRQQILAPTQSTQIQPTTPETHSTQNRTQTRMRWTSEHNEAIMRSYYRVTALGTNETTYRKPMYEDFINQFPSLAHLSEQRIADQRRAIINNNYLSDDKLNSLKLEVSEELGTDNTRNYNSETIAVITNINNANIQLTNNIDINSIEEPTPNVQITDNTELNSTDILPNPQVNLERDPIIDDSFQQAFQFYKDTSPTNRVYIPKQKPSKNLARIISYLNKIILPENINNNTDFHTFQTVIYCAAWTVAKVNGAKITLEPREITRGTKKEYKPKWRRRLEHKVYDLRSKIGRMTQFINGNRSRKLKKHVNKIIILYKIHTVHEEPNTQALHTLDTLKQKLSVVTGRLERYKACTLRKQQNTQFTQNEKLFYRNIRQATTNVQNNNPNDDELNTPNPETLQNFWAGIWEQPIHHNAQADWIHAELSSNTDIQTMAFEHISPQIFHKVLSRLHNWKAPGSDHIHSYWYKKFTAVHCYLYNFINSFIQDPKIIPSYITSGTTYMIPKDRNDLCNPAKYRPITCLQTLYKIITSCISEMIYEHIDANNILAEQQKGCRKYSQGCKEQLIIDSVILKRVQKYKTDLFTMYIDYKKAYDSVPHSWLLQVLEIYKIHPTVISFLKTMMTTWCTVLRLTTPTETIDTSPIKIQRGIFQGDALSPLWFCLALNPLSKILNATSLGIPLNYTATNRQTDPQEDVLNHLLYMDDIKLYAETESQLYELANLTETFTKDINMEFGIDKCKINSVRAGQNYQHQYTLGTGERIEPLDELDTYKYLGYNQSRQIHYKDTKQKLKQQFQHRLNTILKTQLHSRNTIKAINTFAIPVLTYSFGVINWTKTDLKNLQRKINTTMTKFRKHHPRSCIQRLTLPRKEGGRGLIDILNLHNRQITALRQYFFAKTESSLLHKLIAHNDQHFTPLNLKDTTKQKNENVIDDKTKCQEWTQKSLHGRHRQDLSQLNVDKDASNAWLDRGELFPETEGFMLAIQDQVIETKNYRKYIIKNLTTDTCRKCNSSPETIQHITSACKSIAQTDYKHRHDQVTNVIHQKLAHQYKLVDTVVPYYKYKPETVLENPATKLYFDRAILTDRTIHFNRPDITLINKINRIGFLIDIAVPNTHNLQTTIAEKLSKYTELKDEITRLWHLQKVTIVPIVLSATGVIPKQLHQSLSSLNLPPNIYHLLQKAVILNTCRLVRKFLQCESDNLHQYSHSNIVSSTIQSTSENQAASNISSTLHPTDGHLA

SEQ ID NO: 16569 - protein, 1445 aa, Amphipyra berbera
MRLRNRILPQAGTGANHDGESRPGPSSPGCPSYSGEGTVPHQPVQSRTVAAQNSSTSSLLSFIYSPVLSPIPSPLLSTIPSSRSPSTRRAHNVRATADSSGADTNSLFSSIPSTRPSYMTRRTTSCSTSSTLDSVVQDVNLDSQIAPITSASSSRKRWTPEMNKFILRTYFQLTALNTDTRTYLEPLHLKFIEKYPHMQVSRQRIGDQRRAIIRNKLLTQKTIDEIHNEVKEELNQLQSNIHNQHTQTLTTTQSTQIQSTPSEARNTQKTTQIRMRWTNELNEAIMRSYYRVTVLGTNETAYRRPMYEDFINKFPSLAHLSEQRIADQRRAIINNKYICNNRLNSLKLEISEELGLNNNNLSNPTSETTNIVNSNNSNNENIDIQLSNNTNTEESLPNIPSPSFEINLTEEALPYPQTDLERNPQIDETFQQAFQFYRNTFPTNRVYIPKQKPSKNLTRIVNYLNQITLRENVNKDTDFCTLQTVVYCAAWTVAKVNGAKITLQLAESLPNAKKEFKPNWQRRLERKLADLRTKIGRLTQFINGNRSRKVIKHVNNIIEQYKIHTIHEEPNTQAAHTLDTLKQKLSVVSGRLQRYKACTLRKQQNTQFTNNEKLFYRNIRHATTNVQENSANHEGNDSPDPETLQNFWAGIWEDPTEHNAQAEWIQTESTRHSTNIQAMTFEHISPEIFQKVLYRLHNWKAPGSDHIHSYWYKKFTAVHSYLHNYINIFIQDPNSIPCYLTLGTTFMIPKDRNDLSNPAKYRPITCLQTLYKIITACISEIIYQHMDANNILAEQQKGCRKFSQGCKEQLIIDSVILKKVQKTKTDLFSMYIDYKKAYDSVPHSWLVKVLEIYKIHPAIVTFLETTMTTWKTVLRLTTPTKTVETSPIKIQRGIFQGDALSPLWFCLALNPLSNILNSTSVGIPLKATDTEEQTEAQNNTLNHLLYMDDIKLYAKSESQLYELANLTEQFTNDIKMEFGIDKCKINSVRAGQNYQHQYTLETGQQIEPLDEQDTYKYLGYNQSLQIHYKDTKQKLKQQFQHRLNTILKTQLYSRNTIKAINTFAIPVLTYSFGIINWTKTDLKNLQRKINTTMTKFRKHHPRSCSQRLTLPRKEGGRGLIDILNLHNKQITTLRQYFFAKTQSSTLHKLIAQNDQQLTPLNLKDTSEQKNEKLTHDKTKLLEWTQKSLHGRHRQHLCQLNVDKEASNRWLNRGELFPETEGFMIAIQDQVIETKNYRKFIIKNLATDTCRKCNSSPETIQHITGACKSIAQTDYKHRHDQVANVIHQKLAYQYKLIDSIVPYYKYNPETVLENLSTKLYFDRAILTDRTIHFNRPDITLINKTSKTGYLIDIAVPNTHNLQTTIAEKLSKYTELKDEITRLWHLQKVTIVPIVLSTTGVIPKQLHQSLKSLNLPSNTYHLMQKAVILNTCRLVRKFLQCEPDNPH

SEQ ID NO: 16570 - protein, 1171 aa, Amphipyra berbera
MRWTNELNEAIMRSYYRVTVLGTNETAYRRPMYEDFINKFPSLAHLSEQRIADQRRAIINNKYICNNRLNSLKLEISEELGLNNNNLSNPTSETTNIVNSNNSNNENIDIQLSNNINTEESLPNIPSPSFEINLTEEALPYPQTDLERNPQIDETFQQAFQFYRNTFPTNRVYIPKQKPSKNLARIVNYLNQITLRENVNKDTDFCILQTVIYCAAWTVAKVNGAKITLQLAESLPNAKKEFKPNWQRRLERKLADLRTKIGRLTQFINGNRSRKVIKHVNNIIEQYKIHTIHEEPNTQAAHTLDTLKQKLSVVSGRLQRYKACTLRKQQNTQFTNNEKLFYRNIRHATTNVQENSANHEGNDSPDPETLQNFWAGIWEDPTEHNAQAEWIQTESTRHSTNIQAMTFEHISPEIFQKVLYRLHNWKAPGSDHIHSYWYKKFTAVHSYLHNYINIFIQDPNSIPCYLTLGTTFMIPKDRNDLSNPAKYRPITCLQTLYKIITACISEIIYQHMDANNILAEQQKGCRKFSQGCKEQLIIDSVILKKVQKTKTDLFSMYIDYKKAYDSVPHSWLVKVLEIYKIHPAIVTFLETTMTTWKTVLRLTTPTKTVETSPIKIQRGIFQGDALSPLWFCLALNPLSNILNSTSVGIPLKATDTEDQTEAQNNTLNHLLYMDDIKLYAKSESQLYELANLTEQFTNDIKMEFGIDKCKINSVRAGQNYQHQYTLETGQQIEPLDEQDTYKYLGYNQSLQIHYKDTKQKLKQQFQHRLNTILKTQLYSRNTIKAINTFAIPVLTYSFGIINWTKTDLKNLQRKINTTMTKFRKHHPRSCSQRLTLPRKEGGRGLIDILNLHNKQITTLRQYFFAKTQSSTLHKLIAQNDQQLTPLNLKDTSEQKNEKLTHDKTKLLEWTQKSLHGRHRQHLCQLNVDKEASNRWLNRGELFPETEGFMIAIQDQVIETKNYRKFIIKNLATDTCRKCNSSPETIQHITGACKSIAQTDYKHRHDQVVNVIHQKLAYQYKLIDSIVPYYKYNPETVLENLSTKLYFDRAILTDRTIHFNRPDITLINKTSKTGYLIDIAVPNTHNLQTTIAEKLSKYTELKDEITRLWHLQKVTIVPIVLSTTGVIPKQLHQSLKSLNLPSNTYHLMQKAVILNTCRLVRKFLQCEPDNPH

SEQ ID NO: 16571 - protein, 1450 aa, Noctua janthe
MEMSKRIYNLRSLPGERRGASGADAGCHSMQTIGGQELSKRAPTDKIVTAGRSELNRRAHNVEATADSTGDDTTSLFSSIPSTRPSYMTRRTTSLSTTTTLESAVQEVDLDSELAPTTSAPRTRRRWTPEMNKFILRTYLQLTSLDTDRKTYLEPLHLKFIEKYPNMQVSRQRVGDQRRAIINNKLLPQKTIDEIEADVRDELNQLQLSAQTQFPTSHTQSIVTTSQTQATTLETPRVHNKTQTRMRWTNEQNEAIMRSYYRVTTLETNQTVYRKLMHEDFIRKFPSLAHLSEQRIADQRRAIVNNKYINTERLNSLKLEISNELQLENSNHNNIVITVDVNSIDTQSNANNIGLYSIENPIAQTLNNGQADIETDILHNPQTSLDRDLLIDETFQQTHQFYIETSPTNRIYIPKQKPSKNLARIVDYINKIILPENVNKDTDFHTLQTAIYSAAWTAAKVNGAKLTLQPRELNINTNTKKIHMPHWQRRLERKLKDLRSKIGRMTQFINGNRSSKIIKHVKSIAKQYEIHTIHEAPNTQAEHTLDTLKQKLAVVTGRLQRYKACTQRKQQNNQFIQNEKLFYRNLRQTSTNEQNSNTNNADRHNNLDPEDLQSFWAGIWEQPIEHNTQAEWIQTELTNSSTNIQPMLFEQISPQIFHGVLARLHNWKAPGSDHIHSYWYKKFTAVHSFLYNYINNFIQDPKSIPSYLTSGTTYMISKDPNDLSNPAKYRPITCLQTLYKIITSCLSELIYIHTDTNNILAEQQKGCRKFSQGCKEQLIIDSIILKKAQKFKTDLYSMYIDYKKAYDSVPHSWLVKVLEIYRIHPTIITFLKTIMETWSTVLRINTSKETADTYPIKIQRGIFQGDALSPLWFCLALNPLSNILNSTRTGFPLEYIASDGQPEVQNNAINHLLYMDDIKLYAKSESQLNELANLTEQFTNDIRMEFGIDKCKINSVRAGQYYQHQYTLETGEHIEPLDEHDTYKYLGYNQSRQINHKETKQKLKQQFQHRLNTILKTQLYSRNTIKALNTFAIPILTYSFGIIKWTKTDLKNLQRKINTTMTKFRKHHPRSCVQRLTLPRKEGGRGLIDIQNLHNKQVTTLRQYFFTKAESSILHKEIANNDHHLTPLNLKDKSEQKNEKVTDNKTKLLEWSQKSLHGRHYQDLSQINVDKEASNAWLKRGELFPETEGFMLAIQDQIIETKNYRKFIIKNLSTDMCRKCNSSPETIQHITGACKSIAQTDYKHRHDQVANVIHQKLAHQYKLVDSIVPYYKYIPETVLENPSTKLYFDRGIFTDRTIHFNRPDITLINKTNKTGYLIDIAVPNTHNLQTTIAEKLSKYTELKEEITRLWHLQKVTIVPIVLSATGVIPKQLHQSLTSLNLPSNTYHLLQKAVILNTCRLVRKFLQCESDNPHQHIHFNIPSSLIQATTQNRIVPTTTSLTLNPADNHLA

SEQ ID NO: 16572 - protein, 1188 aa, Xestia c-nigrum
MRWTNEQNEAIMRSFYRVTTLETNQTVYRKLMYEDFITKFPSLAHLTEQRIADQRRAIVNNKYISTERLNLLKLEISNELQLDNSNYNNLAIIVNDNTIETQPEGPIVQILNNDQVDVATDGLHNSQTSLEDRDPLIDATFQQTLQFYIATSPTNRMYIPKQKPSKNLARIVDYINKIILPENLNKDTDFQTLQTVIYSAAWTAAKANGAKLTLQPKEINTNTNQKKIYTPHWQRRLERKLIDLRSKIGRMTQFINGNRSRKIIKHVKRINKQYKIHTVHKEPNTQPEHTLDTLKQKLAVVTGRLQRYKACTQRKRQNTQFTLNEKLFYRNIRQVSTNVQNINPSDDDVQNDLDLQNLQNFWAGIWEHPIEHNTQTDWIQAELSNASTNIQPMTFEHISPQIFHEVLARLHNWKAPGSDQIHSYWYKKFTAIHSFLYNHINNFIQDPKTLPPYLTSGTTYMISKDRNDLSNPAKYRPITCLQTLYKIITSCISSLIYNHIDTNNILAEQQKGCRKFSQGCKEQLVIDSIILKKAQKSKTDLYSMYIDYKKAYDSVPHSWLVQILEIYRIHPTIITFLKTTMTTWSTVLRVNTSTDAADTRPIKILRGIFQGDALSPLWFCLALNPLSDILNSSGTGFPLRDTTHEEQHEVQNNTLNHLLYMDDIKLYAKSESQLNELANLTEQFTNDVKMEFGIDKCKINSVRAGQYYQHQYTLETGEHIDPLDEHDTYKYLGYNQSRQINHKETKQKLKQQFQHRLNTILKTQLYARNTIKALNTFAIPVLTYSFGIINWTKTDLKNLQRKINTTMTKFRKHHPRSCVQRLTLPRKEGGRGLIDIQNLHNKQITTLRQYFFTKAESSTLHKQIANNDIHFTPLNLKDKSEQKNEKVTDNKTKLLEWSQKSLHGRHYQDLSQINVDKEASNAWLKRGELFPETEGFIIAIQDQVIETKNYRKYIIKNLTTDTCRKCNRLPETIQHITGACKSIAQTDYKHRHDQVANVIHQKLAYQYKLLDSIVPYYKYTPETVLENTSIKLYFDRGIFTDRTIHFNRPDITLINKTNKTGYLIDIAVPNTHNIQTTIAEKLSKYTELKEEITRIWHLQKVTIVPIVLSTTGVIPKQLHQSLTSLNLPSNTYHLLQKAVILNTCRLVRKFLQCESDNPPQTCFQPPIQIRNLPITTPLILNPADNHLA

SEQ ID NO: 16573 - protein, 1448 aa, Mesoligia furuncula
MEMNNKKVYNLRSLPGERRGASGADARCHSMRTIGGEELSKRAPTEKIATAGRSELNRRAHYVEATADSTGDDTISLFSSIPSTRPSYMTRRTASLSTTSTLDSVVQDVNPDSELAPTTSTPSTRRRWTPEMNKFILRTYLQLTLLDTDRRTYLEPLHLKFTEKFPNMQVSRQRIGDQRRAVINNKLLSQKIIDEIRNEVKDELDQLQLNHFTLHTQNSSRLRKQTPTQSTEIQPTTLETPSTQNRTQTRMRWTSEHNEALMRSYYRVTALGTNETTYRKPMYEDFINQFPSLAHLSEQRIADQRRAIINNQYLSDEKLNSLKLEISEELSTNNTRNYDSETVAVNTNINNTNAEFTNNIDINSIEEPTPSIQTPDNTEINSTEILPNPQINLERDPIIEDYFQQAFQFYKDTSPTNRIYIPKQKPSKNLARIISYLNKMILPENINNDTDFHTFQTVIYCAAWTVAKVNGAKLTLEPRERTRCGTKTEYKPKWQRRLERKLNDLRSKIGRMTQFINGSRSRKLKKHVNKIIKLYRIHTVHEEPNTQAAHTLDTLKQKLSVIAGRLQRYKACTLRKQQNTQFSQNEKLFYRNIRQATTNVQNNNPSDDELNTPNPEALQNFWAEIWEQPVHHNAEADWIQGELSNNTNIQTMAFEHISPQIFHKVLSRLHNWKAPGSDHIHSYWYKKFTALHCYLYNFINSFIKDPNMIPSYITSGTTYMIPKDRNDLSNPAKYRPITCLQTLYKIITSCISEMIYEHIEANNILAEQQKGCRKYSQGCKEQLIIDSVILKRVQKSKTDLFTMYIDYKKAYDSVPHSWLLQVLEIYKINPTIVTFLKTMMTTWCTVLRLTTPTETTDTSPIKIQRGIFQGDALSPLWFCLALNPLSKILNATSLGISLNSTATNRQTDPQKDVLNHLLYMDDIKLYAETESQLYELANLTETFTNDIKMEFGIDKCKINSVRAGHNYQHQYTLGTGEQIEPLDELDTYKYLGYNQSRQIHYKDTKQKLKQQFQHRLNTILKTQLYSRNTIKAINTFAIPVLTYSFGIINWTKTDLKNLQRKINTTMTKFRKHHPRSCIQRLTLPRKEGGRGLIDILNLHNRQITALRQYFFAKTESSPLHKLIAQSDQHLTPLNLKDTTEQKNEEVTDDKTKCQEWTQKSLHGRHRQDLCQSNVDKDASNAWLNRGELFPETEGFMLAIQDQVIETKNYRKYIIKNLTTDICRKCNSSPETIQHITGACKSIAQTDYKHRHDQVANVIHQKLAHKFKLIDAIVPYYKYNPETVLENPTTKLYFDRAILTDRTIHFNRPDITLIDKINKTGFLIDIAVPNTHNVQTTIAEKLSKYTELKDEITRLWHLQKVTIVPIVLSTTGVIPKQLHQSLSSLNLPPNTYHLLQKAVILNTCRLVRKFIQCESDNLHQYSHLNIVSSTTQSTYNITPTLNPTVGHLA

SEQ ID NO: 16574 - protein, 1452 aa, Griposia aprilina
MEMSNKRVYNLRSLPGERRGASGADARCHSMRTIGGEELSKRAPTNKIVTAGRSDLNRRAHYVEATADSMGDDTMSLFSSIPSTRPSYMTRRTASLSTTSTLDSVAQDVNLDSELAPTTSAPSTRRRWTPEMNKFILRTYLQLTSLDTDRRTYLEPLHLKFTEKFPNMQVSRQRIGDQRRAIINNKLLPQKTIDEIRNEVKDELDQLHFTLQSQNSGELRQQILAPTQSTQIQPTTPETHSTQNRTQTRMRWTSEHNEAIMRSYYRVTALGTNETTYRKPMYEDFINQFPSLAHLSEQRIADQRRAIINNNYLSDDKLNSLKLEVSEELGTDNTRNYNSETIAVITNINNANIQLTNNIDINSIEEPTPNVQITDNTELNSTDILPNPQVNLERDPIIDDSFQQAFQFYKDTSPTNRVYIPKQKPSKNLARIISYLNKIILPENINNNTDFHTFQTVIYCAAWTVAKVNGAKITLEPREITRGTKKEYKPKWRRRLEQKVYDLRSKIGRMTQFINGNRSRKLKKHVNKIIILYKIHTVHEEPNTQALHTLDTLKQKLSVVTGRLERYKACTLRKQQNTQFTQNEKLFYRNIRQATTNVQNNNPNDDELNTPNPETLQNFWAGIWEQPIHHNAQADWIHAELSSNTDIQTMAFEHISPQIFHKVLSRLHNWKAPGSDHIHSYWYKKFTAVHCYLYNFINSFIQDPKIIPSYITSGTTYMIPKDRNDLCNPAKYRPITCLQTLYKIITSCISEMIYEHIDANNILAEQQKGCRKYSQGCKEQLIIDSVILKRVQKYNTDLYTMYIDYKKAYDSVPHSWLLQVLEIYKIHPTVISFLKTMMTTWCTVLRLTTPTETIDTSPIKIQRGIFQGDALSPLWFCLALNPLSKILNATSLGIPLNYTATNRQTDPQEDVLNHLLYMDDIKLYAETESQLYELANLTETFTKDINMEFGIDKCKINSVRAGQNYQHQYTLGTGERIEPLDELDTYKYLGYNQSRQIHYKDTKQKLKQQFQHRLNTILKTQLHSRNTIKAINTFAIPVLTYSFGVINWTKTDLKNLQRKINTTMTKFRKHHPRSCIQRLTLPRKEGGRGLIDILNLHNRQITALRQYFFAKTESSLLHKLIAHNDQHFTPLNLKDTTKQKNENVIDDKTKCQEWTQKSLHGRHRQDLSQLNVDKDASNAWLDRGELFPETKGFMLAIQDQVIETKNYRKYIIKNLTTDTCRKCNSSPETIQHITSACKSIAQTDYKHRHDQVANVIHQKLAHQYKLVDTVVPYYKYKPETVLENPATKLYFDRAILTDRTIHFNRPDITLINKINRIGFLIDIAVPNTHNLQTTIAEKLSKYTELKDEITRLWHLQKVTIVPIVLSATGVIPKQLHQSLSSLNLPPNIYHLLQKAVILNTCRLVRKFLQCESDNLHQYSHSNIVSSTIQSTSENQAASNISSTLHPTDGHLA

SEQ ID NO: 16575 - protein, 1452 aa, Griposia aprilina
MEMSNKRVYNLRSLPGERRGASGADARCHSMRTIGGEELSKRAPTNKIVTAGRSDLNRRAHYVEATADSMGDDTMSLFSSIPSTRPSYMTRRTASLSTTSTLDSVAQDVNLDSELAPTTSAPSTRRRWTPEMNKFILRTYLQLTSLDTDRRTYLEPLHLKFTEKFPNMQVSRQRIGDQRRAIINNKLLPQKTIDEIRNEVKDELDQLHFTLQSQNSGELRQQILAPTQSTQIQPTTPETHSTQNRTQTRMRWTSEHNEAIMRSYYRVTALGTNETTYRKPMYEDFINQFPSLAHLSEQRIADQRRAIINNNYLSDDKLNSLKLEVSEELGTDNTRNYNSETIAVITNINNANIQLTNNIDINSIEEPTPNVQITDNTELNSTDILPNPQVNLERDPIIDDSFQQAFQFYKDTSPTNRVYIPKQKPSKNLARIISYLNKIILPENINNNTDFHTFQTVIYCAAWTVAKVNGGKITLEPREITRGTKKEYKPKWRRRLEQKVYDLRSKIGRMTQFINGNRSRKLKKHVNKIIILYKIHTVHEEPNTQALHTLDTLKQKLSVVTGRLERYKACTLRKQQNTQFTQNEKLFYRNIRQATTNVQNNNPNDDELNTPNPETLQNFWAGIWEQPIHHNAQADWIHAELSSNTDIQTMAFEHISPQIFHKVLSRLHNWKAPGSDHIHSYWYKKFTAVHCYLYNFINSFIQDPKIIPSYITSGTTYMIPKDRNDLCNPAKYRPITCLQTLYKIITSCISEMIYEHIDANNILAEQQKGCRKYSQGCKEQLIIDSVILKRVQKYKTDLFTMYIDYKKAYDSVPHSWLLQVLEIYKIHPTVISFLKTMMTTWCTVLRLTTPTETIDTSPIKIQRGIFQGDALSPLWFCLALNPLSKILNATSLGIPLNYTATNRQTDPQEDVLNHLLYMDDIKLYAETESQLYELANLTETFTKDINMEFGIDKCKINSVRAGQNYQHQYTLGTGERIEPLDELDTYKYLGYNQSRQIHYKDTKQKLKQQFQHRLNTILKTQLHSRNTIKAINTFAIPVLTYSFGVINWTKTDLKNLQRKINTTMTKFRKHHPRSCIQRLTLPRKEGGRGLIDILNLHNRQITALRQYFFAKTESSLLHKLIAHNDQHFTPLNLKDTTKQKNENVIDDKTKCQEWTQKSLHGRHRQDLSQLNVDKDASSAWLDRGELFPETEGFMLAIQDQVIETKNYRKYIIKNSTTDTCRKCNSSPETIQHITSACKSIAQTDYKHRHDQVANVIHQKLAHQYKLVDTVVPYYKYKPETVLENPATKLYFDRAILTDRTIHFNRPDITLINKINRIGFLIDIAVPNTHNLQTTIAEKLSKYAELKDEITRLWHLQKVTIVPIVLSATGVIPKQLHQSLSSLNLPPNIYHLLQKAVILNTCRLVRKFLQCESDNLHQYSHSNIVSSTIQSTSENQAASNISSTLHPTDGHLA

SEQ ID NO: 16576 - protein, 1313 aa, Busseola fusca
MNKFILRTYLQLTALDTDRKTYLEPLHIKFIEKYPNMQVSRQRVGDQRRAIVKNKLLPQKTIEDIRNDVREELDRLHFNHTTQQSQNSMNHAVQIHTPTHSPQTQLRTPETNSNKHRTQPRMRWTTKQNEAIMRSYYRVTDLGRNETVYRRRMHEDFIKSFPALAHLNEQRIADQRRAIINNNYVTNDRLNSIKLEVSEELRLDNLNLINSVGETTIINPNQIIHSDTQFINSINSIQESTLNTNDTEINIADDILPNQQVSLDREPLIDETFEQAFQYYKETSPTNRIFIPKQKPSKKLAHIVNYLNKIILPENVNKETDFYTLQTTIYCAAWTVAKVNGAKITLQPRVVTQRSKKEYKPNWETRLERKLNDLRSKIARMTQFINGNRSRKIIKHVTKIIEQYRIHTVHEEPNTHAALTLDTLKQKLSVVTGRLQRYKACTLRKQQNTQFTHNEKLFYRNIRQATSNVQDNNLNDDVNNNPDPEAFQNFWARIWEQPTEHNAQADWIQTELTNSNTNIQTMTFEHISPEIFHKVLSRLHNWKAPGSDNIHSYWYKKFTSVHSFLYNHINTFIQDPKTIPSYITSGTTFMIPKDRNDLSNPAKYRPITCLQTLYKIITSCISELIYQHIDTNNILAEQQKGCRKFSQGCKEQLIIDSVILKKVQKTKTDLFSMYIDYKKAYDSVPHSWLIKILQIYKIHPTIITFLKVMMTTWTTVLRLTAPNKIVDTSPIKIQRGIFQGDALSPLWFCLALNPLSNILNATTLGIPLNYTTSERHTEVQKIELNHLLYMDDIKLYAKSENQLYELANLTEKFSNDIKMEFGIDKCKINSMRAGQNYPHQYILGTGEQIEPLEEQDTYKYLGYTQSRQIHYKETKQKLTLQFQHRLNTILKTQLYSRNTIKAINTFAVPVLTYSFGIINWTKTDLKNLQRKINTSMTKFRKHHPRSCLQRLTLPRKEGGRGLIDILNLHNRQIKALREFFFSKTATSILHKIITHNDQNMTPLNLKDTSEQRNEKVIDDKIKLLEWTQKSLHGRHRQDLCHTNVDKEASNAWLNRGELFPETEGFMLAIQDQVIETKNYRKFIIKNLNNDICRKCNSSPETIQHITGACKSIAQTDYKHRHDQIANIIHQKLAHQYQLIDSVTPYYKYNPETVLENPSTKLYFDRAILTDRTIHFNRPDITLINKLEKTGYLIDIAIPNTHNLQTTIAEKLSKYTELKDEVARLWHLQKVIIIPIVLSTTGVIPKQLHQSLISLNLPANTYHLLQKAAILNTCRLVRKFLQYDSENPHENTNMLPSSVQFSARDRYPTDNHLA

SEQ ID NO: 16577 - protein, 791 aa, Parapoynx stratiotata
MNNSTPDMSFEHIPIDIFNKVVTNLHNWKAPGSDFIHSYWYKKFTYIHGHLLKYLNQFIEDPNTIPTYITLGTTYMIPKDRNDPKNPAKYRPITCLQTLYKILTSCLSELIYKHIDENNILTEQQKGCRKFSQGCKEQLIIDSVILNQVKKNKSDLFTMYIDYKKAYDSVPHSWLVKVLEIYKIHPKIVAFLKTVMLNWTTRLKLSTPSATIETEPIKIQKGIFQGDALSPLWFCLAINPLSNILNRTNVGYHLQKNYLDRTTDTTNVINHLLYMDDIKLYAETEDNLNRILANRTEQFTCDIKMEFGIDKCKINSVKSGKTFQHYYNLGTGEQIESLDEQDTYKYLGYNQSRQIQQKETKYKLTLQYRHRLNTILKTQLSSRNTIKAINTFAIPLLTYSFGTINWTKSDLKNLQRNINTTMTKYRKHHPRTCLQRLTLPRKEGGRGLIDIVNLHNKQISNLRQYFFDKSKSSNLHKAIVENDKKLTPLNLYDSAKQNNEILIDNKTKHAEWAKKSLHGRHHHDLSQSNVDKEASNAWLSSGELFPETEGFMLAIQDQIIETKNYQKHITKTLNSDTCRKCNSCPETIQHITSACKAIAQTDYKHRHDQVANIIHQKLAYREKLINSMQPYYKYNPETVLENVSAKLYFDRAILTDRTVHCNRPDITLINKTNKTGFLIDIAVPNTHNLQSTIAEKLSKYTELKDEITRIWHLQKVIIVPIVLSATGVIPKQLHQSLNSLDLPAHSYKLLQKAVILNTCRIVRKFLKNEQDLTPVQNTQTHTNPEPDVHLA

SEQ ID NO: 16578 - protein, 1439 aa, Telicota sp.
MMEHSKGRYNLRSLPEGRRGAPGAGAGCYSMRDTGGEALSRRAFVTQSTTAGRRELSRRACDVKATADSSGDDTSHFSSIPSTRPSYMTRSAKQHQPMSTISSLESVVQVVNIDAESAPTSSIPRTRRRWTFEMNKFILRTYLQLTALDTDTKTYLEPLHLKFMEKFPDMQVSRQRVGDQRRAIIRNKLLAQNVIDQIYSEVKQNLNNLQDKIRNNNLISQSQLSPNTETQQNSQIQVTPQHTAQTYPRIRWTTEHNEAIMRAYYRITHLEMNKTAYRKQLHEDFIQKFPKLAYLSEQRIADQRRAIVNNKYIKDDRLHTLKLEITEELTQNNTNPYNNCINTQKFNHHSTNNIDLNFLNSLNFDFPEEIHSSTLTNNFERQTQIDETFEQALQYYKDINPTNRNYIPKQKTSKKLAKIVHYLNTINIPENINNNTDFITLQTIIYSAAWTAAKLNGSKLKLEPLKDRPNQKEYKPNWQKRLERRIEDLRVKIGRLTQFINGNRSKKLKRHVKIILAQYKIHSVHEETNTHLTHTLDTLKQKLSVLAGRLDRYQKCTLRKQQNNQFINNEKQFYRNTRQLSSNTQENNTVHNASSPDPKDLQNFWKGIWEQPVQHNSQADWIIKEITNNNTNTQPMKFDVIPRETFEKVINKLHNWKAPGSDYIHSYWYKKFTSIYCYLHKYINEFIQCPDTIPSYITIGTTYMIPKDQNDRTNPAKYRPITCLQTLYKIITSCISELVYKHLDENNILAEQQKGCRKLSQGCKEQLIVDSVILKQAQKTRSDLHTMYIDYKKAYDSVPHSWLLQVLDIYKIHPQIITFLKTTMKHWKTRLKLITPTEIIETNPIKIQRGIFQGDALSPLLFCLALNPLSNLLNSSSLGFSLTYSETDEQTDTQKINSSHLLYMDDIKLYSNNEEELNNLANLTEQFTNDIKMEFGIDKCKINSTKAGQTYRHYYTLETGDQIDALEEQETYKYLGFNQSRQIQSKESKQKLKLQFRHRLNTILKTQLNSKNTIKAINTFAIPILTYSFGIINWSKSDLKNLQRTINTTMTKSRKHHPRSCLQRLTLPRKEGGRGIIDIINLHNRQITTLRQYFFKKAETSTLHKAIVQNDTKLTPLNLRDRSIQNNEKLTDDKTKIAEWAQKSLHGRHHHDLSQLNVDKDASNAWLNNGELFPETEGFIMAIQDQVIETRNYQKYIIKNLTHDTCRKCNSASETIQHITGACKSIAQTDYKHRHDQVANIIHQKLAHQHDLIDSIQPYYKYTPNSVLENTTTKLYYDRAILTDRTVHYNRPDITLINKTSRTGYLIDIAVPNTHNLQTTIAEKLSKYIELKDEITRIWRLQKVIIVPIVISTTGIIPKQLHLSLKTLDLPPKTYYLMQKAVILNTCRLVRKFLQTENENNHLYIPNLSTLPAPSQSQAELNIAQTVQPSSNTPDVHLA

SEQ ID NO: 16579 - protein, 1383 aa, Griposia aprilina
MGDDTMSLFSSIPSTRPSYMTRRTASLSTTSTLDSVAQDVNLDSELAPTTSAPSTRRRWTPEMNKFILRTYLQLTSLDTDRRTYLEPLHLKFTAKFPNMQVSRQRIGDQRRAIINNKLLPQKTIDEIRNEVKDELDQLHFTLQSQNSGELRQQILAPTQSTQIQPTTLETHSTQNRTQTRMRWTSEHNEAIMRSYYRVTALGTNETTYRKPMYEDFINQFPSLAHLSEQRIADQRRAIINNNYLSDDKLNSLKLEVSEELGTDNTRNYNSETIAVITNINNANIQLTNNIDINSIEEPTPNVLITDNTELNSTDILPNPQVNLERDPIIDDSFQQAFQFYKDTSPTNRVYIPKQKPSKNLARIISYLNKIILPENINNNTDFHTFQTVIYCAAWTVAKVNGAKITLEPREITRGTKKEYKPKWRRRLEQKVYDLRSKIGRMTQFINGNRSRKLKKHVNKIIILYKIHTVHEEPNTQALHTLDTLKQKLSVVTGRLERYKACTLRKQQNTQFTQNEKLFYRNIRQATTNVQNNNPNDDELNTPNPETLQNFWAGIWEQPIHHNAQADWIHAELSSNTDIQTMAFEHISPQIFHKVLSRLHNWKAPGSDHIHSYWYKKFTAVHCYLYNFINSFIQDPKIIPSYITSGTTYMIPKDRNDLCNPAKYRPITCLQTLYKIITSCISEMIYEHIDANNILAEQQKGCRKYSQGCKEQLIIDSVILKRVQKYKTDLFTMYIDYKKAYDSVPHSWLLQVLEIYKIHPTVISFLKTMMTTWCTVLRLTTPTETIDTSPIKIQRGIFQGDALSPLWFCLALNPLSKILNATSLGIPLNYTATNRQTDPQEDVLNHLLYMDDIKLYAETESQLYELANLTETFTKDINMEFGIDKCKINSVRAGQNYQHQYTLGTGERIEPLDELDTYKYLGYNQSRQIHYKDTKQKLKQQFQHRLNTILKTQLHSRNTIKAINTFAIPVLTYSFGVINWTKTDLKNLQRKINTTMTKFRKHHPRSCIQRLTLPRKEGGRGLIDILNLHNRQITALRQYFFAKTESSLLHKLIAHNDQHFTPLNLKDTTKQKNENVIDDKTKCQEWTQKSLHGRHRQDLSQLNVDKDASNAWLDRGELFPETEGFMLAIQDQVIETKNYRKYIIKNLTTDTCRKCNSSPETIQHITSACKSIAQTDYKHRHDQVANVIHQKLAHQYKLVDTVVPYYKYKPETVLENPATKLYFDRAILTDRTIHFNRPDITLINKINRIGFLIDIAVPNTHNLQTTIAEKLSKYTELKDEITRLWHLQKVTIVPIVLSATGVIPKQLHQSLSSLNLPPNIYHLLQKAVILNTCRLVRKFLQCESDNLHQYSHSNIVSSTIQSTSENQAASNISSTLHPTDGHLA

SEQ ID NO: 16580 - protein, 1464 aa, Hypena proboscidalis
MSRNRYNLRSLPGGRRGASGADAGCLSMRTIGGRELSRRTSTDKYITAERRELSRRAHDVEATADFRDDDTVSLFSSIPSTRPSYMTRRTATLSTTSTSKSVVQEVNSDLDLAPTSGLSATRKRWTQEMNKFILRTYLQLTALDIDTKTYLEPLHIKFLEKFPNMEVSRQRVGDQRRAIVRSKLLPQETIDEIYNEVKEELQQLQHNSNINLTRTSFRESHLTPTRTQTFTNTTQTRMRWTTEQNEAIMRAYYRITHLGTNETAYRKLMHEDFISKFPTLAHLSEQRIADQRRAIINNQYISKDRLNLLKQEIAAELETNVINTTTLDSNAFNNNNGEISEDNIQVTIADESQLLAELPLNAEINTGRQFKIDEFFQQAFQFYENTEPTNRTYIPRQKPSKNLAKIVNYLNEIIIPENIDGNTDFSHLQTVVYCAAWTAAKANGAKLKLQTEENLQREHRNRKPNWQRRLENKLEDLRSKISRLTQFMNGNRSQNVLKHAHRILEQYRTHTIHEEPNSQIIHTLDTLKQKLSVVNGRLHRYKACTLRKNQNSQFTNNEKHFYRNLRQATANIQENITNDDASNIPSREELQNFWARIWENPIQHNNQAAWIQTEGTKIRSEMEYHHIPPEIFQNVLRNVHNWKAPGSDYIHSYWYKKFTAIHTNLYHHLNTFIEDPNTIPSYLASGKTFMIPKDRNDPSNPAKYRPITCLQTLYKIMTSCISELIYQYIDANNILAEQQKGCRKFSQGCKEQLTIDSVILKQVQRTRSNLFSMYIDYKKAYDSVPHSWLVHVLELYKIHPIIIAFLRTIMTKWTTVMRLTTATKIVETSSIQIQRGIFQGDALSPLWFCLALNPLSNILNSTKLGYPLQYSEQSGQQNLRQNVLNHLLYMDDIKLYANTENQLYELANLTEQFSYDIHMEFGIDKCKVNSVKTGQNYQHQYTLGTGERIESLEEQDTYKYLGYHQSLQIKYKDTKLKLTQQFQHRLNAILKTQLNSKNTVKAINTYVIPLLTYSFGIIFWSKTELKNLQRRINTTMTKHRKHHPRACLQRLTLPRKDGGRGLIDILNLHNKQITTLRNYFFAKSETSILHTSIAQNDNKLTPLNLKDSTKQKNEVVIDDKSKLADWTQKALHGRHRQDLCQQNVDKEASNAWLNRGELFPETEGFMIAIQDQVIETKNYRKYIIKTLRTDTCRKCNSCPETIQHITGACKSIAQTDYKHRHDQVANIIHQKLAHQYKFVDSIVPYYKYNPQTVLENASTKLYFDRAILTDRTVHFNRPDITLINKITKTGFLIDIAVPNTHNLQTTIAEKLTKYLELKDEITRLWHLQNVTIVPIVLSTTGIIPKQLHHSLNTLQLSPYTYNLMQKAVILNTCRLVRKFLQCEPDNTQPVTNEQTPTIITSAHTLTGTTLAHTFTTTTPAHTSTTTHTSTTAHTLTITNLAHTSTITDSVHNNNSNRSTEGHLA

SEQ ID NO: 16581 - protein, 1452 aa, Griposia aprilina
MEMSNKRVYNLRSLPGERRGASGADARCHSMRTIGGEELSKRAPTNKIVTAGRSDLNRRAHYVEATADSMGDDTMSLFSSIPSTRPSYMTRRTASLSTTSTLDSVAQDVNLDSELAPTTSAPSTRRRWTPEMNKFILRTYLQLTSLDTDRRTYLEPLHLKFTEKFPNMQVSRQRIGDQRRAIINNKLLPQKTIDEIRNEVKDELDQLHFTLQSQNSGELRQQILAPTQSTQIQPTTPETHSTQNRTQTRMRWTSEHNEAIMRSYYRVTALGTNETTFRKPMYEDFINQFPSLAHLSEQRIADQRRAIINNNYLSDDKLNSLKLEVSEELGTDNTRNYNSETIAVITNINNANIQLTNNIDINSIEEPTPNVQITDNTELNSTDILPNPQVNLERDPIIDDSFQQAFQFYKDTSPTNRVYIPKQKPSKNLARIISYLNKIILPENINNNTDFHTSQTVIYCAAWTVAKVNGAKITLEPREITRGTKKEYKPKWRRRLEQKVYDLRSKIGRMTQFINGNRSRKLKKHVNKIIILYKIHTVHEEPNTQALHTLDTLKQKLSVVTGRLERYKACTLRKQQNTQFTQNEKLFYRNIRQATTNVQNNNPNDDELNTPNPETLQNFWAGIWEQPIHHNAQADWIHAELSSNTDIQTMAFEHISPQIFHKVLSRLHNWKAPGSDHIHSYWYKKFTAVHCYLYNFINSFIQDPKIIPSYITSGTTYMIPKDRNDLCNPAKYRPITCLQTLYKIITSCISEMIYEHIDANNILAEQQKGCRKYSQGCKEQLIIDSVILKRVQKYKTDLFTMYIDYKKAYDSVPHSWLLQVLEIYKIHPTVISFLKTMMTTWCTVLRLTTPTETIDTSPIKIQRGIFQGDALSPLWFCLALNPLSKILNATSLGIPLNYTATNRQTDPQEDVLNHLLYMDDIKLYAETESQLYELANLTETFTKDINMEFGIDKCKINSVRAGQNYQHQYTLGTGERIEPLDELDTYKYLGYNQSRQIHYKDTKQKLKQQFQHRLNTILKTQLHSRNTIKAINTFAIPVLTYSFGVINWTKTDLKNLQRKINTTMTKFRKHHPRSCIQRLTLPRKEGGRGLIDILNLHNRQITALRQYFFAKTESSLLHKLIAHNDQHFTPLNLKDTTKQKNENVIDDKTKCQEWTQKSLHGRHRQDLSQLNVDKDASNAWLDRGELFPETEGFMLAIQDQVIETKNYRKYIIKNLTTDTCRKCNSSPETIQHITSACKSIAQTDYKHRHDQVANVIHQKLAHQYKLVDTVVPYYKYKPETVLENPATKLYFDRAILTDRTIHFNRPDITLINKINRIGFLIDIAVPNTHNLQTTIAEKLSKYTELKDEITRLWHLQKVTIVPIVLSATGVIPKQLHQSLSSLNLPPNIYHLLQKAVILNTCRLVRKFLQCESDNLHQYSHSNIVSSTIQSTSENQAASNISSTLHPTDGHLA

SEQ ID NO: 16582 - protein, 1450 aa, Noctua janthe
MEMNKRIYNLRSLPGERRGASGADAGCHSMRTIGGQELSKRAPTDKIVTAGRSELNRRAHNVEATADSTGDDTTSLFSSIPSTRPSYMTRRTTSLSTTTTLESAVQEVDLDSELAPTTSAPRTRRRWTPEMNKFILRTYLQLTSLDTDRKTYLEPLHLKFIEKYPNMQVSRQRVGDQRRAIINNKLLPQKTIDEIEAEVRDELNQLQLSAQTQFPTSHTQSIVTTSQTQATTLETPRVHNKTQTRMRWTNEQNEAIMRSYYRVTTLETNQTVYRKLMHEDFIRKFPSLAHLSEQRIADQRRAIVNNKYINTERLNSLKLEISNELQLENSNHNNIVITVDVNSIDTQSNANNIGLYSIENPIAQTLNNGQADIETDILHNPQTSLDRDLLIDETFQQTHQFYIETSPTNRIYIPKQKPSKNLARIVDYINKIILPENVNKDTDFHTLQTAIYSAAWTAAKVNGAKLTLQPREMNINTNTKKIHMPHWQRRLERKLKDLRSKIGRMTQFINGNRSSKIIKHAKSIAKQYEIHTIHEAPNTQAEHTLDTLKQKLAVVTGRLQRYKACTQRKQQNNQFIQNEKLFYRNLRQTSTNVQNNNTNNADSHNNLDPEDLQSFWAGIWEQPIEHNTQAEWIQTELTNSSTNIQPMLFEQISPQIFHGVLARLHNWKAPGSDHIHSYWYKKFTAVHSFLYNYINNFIQDPKSIPSYLTSGTTYMISKDPNDLSNPAKYRPITCLQTLYKIITSCLSELIYIHTDTNNILAEQQKGCRKFSQGCKEQLIIDSIILKKAQKFKTDLYSMYIDYKKAYDSVPHSWLVKVLEIYRIHPTIITFLKTIMETWSTVLRINTSKETADTYPIKIQRGIFQGDALSPLWFCLALNPLSNILNSTRTGFPLEYIASDGQPEVQNNAINHLLYMDDIKLYAKSESQLNELANLTEQFTNDIRMEFGIDKCKINSVRAGQYYQHQYTLETGEHIEPLDEHDTYKYLGYNQSRQINHKETKQKLKQQFQHRLNTILKTQLYSRNTIKALNTFAIPILTYSFGIIKWTKTDLKNLQRKINTTMTKFRKHHPRSCVQRLTLPRKEGGRGLIDIQNLHNKQVTTLRQYFFTKAESSILHKEIANNDHHFTPLNLKDKSEQKNEKVTDNKTKLLEWSQKSLHGRHYQDLSQINVDKEASNAWLKRGELFPETEGFMLAIQDQIIETKNYRKFIIKNLSTDMCRKCNSSPETIQHITGACKSIAQTDYKHRHDQVANVIHQKLAHQYKLVDSIVPYYKYIPETVLENPSTKLYFDRGIFTDRTIHFNRPDITLINKTNKTGYLIDIAVPNTHNLQTTIAEKLSKYTELKEEITRLWHLQKVTIVPIVLSATGVIPKQLHQSLTSLNLPSNTYHLLQKAVILNTCRLVRKFLQCESDNPHQHIHFNIPSSLIQATTQNRIVPTTTSLTINPADNHLA

SEQ ID NO: 16583 - protein, 978 aa, Noctua janthe
MNINTNTKKIHMPHWQRRLERKLKDLRSKIGRMTQFINGNRSSKIIKHVKSIAKQYEIHTIHEAPNTQAEHTLDTLKQKLAVVTGRLQRYKACTQRKQQNNQFIQNEKLFYRNLRQTSTNVQNSNTNNADSHNNLDPEDLQSFWAGIWEQPIEHNTQAEWIQTELTNSSTNIQPMLFEQISPQIFHEVLARLHNWKAPGSDHIHSYWYKKFTAVHSFLYNYINNFIQDPKSIPSYLTSGTTYMISKDPNDLSNPAKYRPITCLQTLYKIITSCLSELIYIHTDTNNILAEQQKGCRKFSQGCKEQLIIDSIILKKAQKIKTDLYSMYIDYKKAYDSVPHSWLVKVLEIYRIHPTIITFLKTIMETWSTVLRINTSKETADTYPIKIQRGIFQGDALSPLWFCLALNPLSNILNSTRTGFPLEYIASDGQPEVQNNAINHLLYMDDIKLYAKSESQLNELANLTEQFTNDIRMEFGIDKCKINSVRAGQYYQHQYTLETGEHIEPLDEHDTYKYLGYNQSRQINHKETKQKLKQQFQHRLNTILKTQLYSRNTIKALNTFAIPILTYSFGIIKWTKTDLKNLQRKINTTMTKFRKHHPRSCVQRLTLPRKEGGRGLIDIQNLHNKQVTTLRQYFFTKAESSILHKEIANNDHHLTPLNLKDKSEQKNEKVTDNKTKLLEWSQKSLHGRHYQDLSQINVDKEASNAWLKRGELFPETEGFMLAIQDQIIETKNYRKFIIKNLSTDMCRKCNSSPETIQHITGACKSIAQTDYKHRHDQVANVIHQKLAHQYKLVDSIVPYYKYIPETVLENPSTKLYFDRGIFTDRTIHFNRPDITLINKTNKTGYLIDIAVPNTHNLQTTIAEKLSKYTELKEEITRLWHLQKVTIVPIVLSATGVIPKQLHQSLTSLNLPSNTYHLLQKAVILNTCRLVRKFLQCESDNPHQHIHFNIPSCLIQATTQNRIVPTTTSLTLNPADNHLA

SEQ ID NO: 16584 - protein, 1373 aa, Agrochola circellaris
MTRRTASLSTTSTLDSVAQDVNLDSELAPTTSAPSTRRRWTPEMNTFILRTYLQLTSLDTDRRTYLEPLHLKFTENFPNMQVSRQRIGDQRRAIRNNKLLPQKTIDEIRNEVKEELDQLHFTLQSQNSGKLRQQILAPTQSTQILAPTQSTQIQPTTLETHSTQNRTQSRMRWTSEHNEAIMRSYYRVTALGTNETTYRKPMYEDFINQFPSLAHLSEQRIADQRRAIINNNYLSDEKLNSLKLEVSEELGTDNTRNYNSETIAVITNINNTNIQLTDNIDINYIEEPTPNIQTTDNTELNSTYILPNPQVNLERDPKIDDSFQQAFQFYKDTIPTNRVYIPKQKPSKNLARIISYLNKIILPENINNNTDFHTFQTVIYCAAWTVAKVNGAKITLEPREITRGTKKEYKPKWRRRLEQKVNDLRSKIGRMTQFINGNRSRKLKKHVNKIIKLYRIHTVHEEPNTQAVHTLDTLKQKLSVVTGRLERYKACTLRKQQNTQFTQNEKLFYRNIRQTTTNVQNNNPNDDERNTPNPETLQHFWAGIWEQPIHHNAQADWIHAELSSNTDIQTMAFEHISPQIFHKVLSRLHNWKAPGSDHIHSYWYKKFTAVHCYLYNFINSFIQDPKIIPAYITLGTTYMIPKDRNDLCNPAKYRPITCLQTLYKIITSCISEMIYEHIDANNILAEQQKGCRKYSQGCKEQLIIDSVILKKVQKYKTDLFTMYIDYKKAYDSVPHSWLLQVLEIYKIHPTIVSFLKTLMTTWCTVLRLTTPTETINTSPIKIQKGIFQGDALSPLWFCLALNPLSKILNATSLGIPLNYTATNRQTDPQKDVLNHLLYMDDIKLYAETESQLYDLANLTETFTKDIKMEFGIDKCKINSVRAGQNYQHEYTLGTGEIIEPLDELDTYKYLGYNQSRQIHYKDTKQKLKQQFQHRLNTILKTQLHSRNTIKAINTFAIPVLTYSFGIINWTKTDLKNLQRKINTTMTKFRKHHPRSCIQRLTLPRKEGGRGLIDILNLHNRQITALRQYFFAKSESSLLHKLIAHNDQHFTPLNLKDTTEQKNENVIDDKTKCLEWTQKSLHGRHRQDLCQLNVDKEASNAWLNRGELFPETEGFMLAIQDQVIETKNYRKYIIKNLTTDTCRKCNSSPETIQHITGACKSIAQTDYKHRHDQVANVIHQKLAHQYKLVDTVIPYYKYSPETVLENPTTKLYFDRAILTDRTIHFNRPDITLINKINKTGFLIDIAVPNTHNLQTTIAEKLSKYTELKDEITRLWNLQKVTIVPIVLSTTGVIPKQLHQSLSSLNLPPSTYHLLQKAVILNTCRLVRKFLQCEVDNLHQYSRSNIVSTTIQSTSENQAASNITSTLNPTDGHLA

SEQ ID NO: 16585 - protein, 1450 aa, Hydraecia micacea
MEMNNKKVYNLRSLPGERRGASGADARCHSMRTIGGEELSKRAPTEKIATAGRSGLNRRAHYVEATADSTGDDTISLFSSIPSTRPSYMTRRTASLSTTSTLDSVVQDVNPDSELAPTTSTPNTRRRWTPEMNKFILRTYLQLTLLDTDRRTYLEPLHLKFTEKFPNMQVSRQRIGDQRRAIINNKLLSQKIIDEIRNEVKDELDQLQLNHVTLHTQNSSKFRKQIFTSTQATQIQPTTLETHSTQNRTLTRMKWTSEHNEAIMRSYYRVTALGTNETTYRKPMYEDFINQFPSLAHLSEQRIADQRRAIINNQYLSSEKLNLLKLEISEELSTDNTRNYNSEMVAVNTNINNTNVEFTNNIDINSIEEPIPTIQTPDNTEINSTEILPNPQINLERDPIIEDYFQQAFQFYKDTSPTNRIYIPKQKPSKNLARIISYLNKNILPENINNDTDFHTFQTVIYCAAWTVAKVNGAKIKLEPREITRHGTKTEYKPKWQRRLERKLNDLRSKIGRMTQFINGSRSRKLKKHVNKIIKLYRIHTVHEEPNTQAAHTLDTLKQKLSVVTGRLQRYKACNLRKQQNTQFNQNEKLFYRNIRQATTNVQQINPSDDELNTPNPEALQNFWAEIWEQPVHHNAQAEWIKAELSNNTNIQTMAFEHISPQIFHKVLSRLHNWKAPGSDQIHSYWYKKFTALHSYLYNFINSFIKDPIMIPSYITSGTTYMIPKDRNDLSNPAKYRPITCLQTLYKIITSCISEMIYEHIEANNILAEQQKGCRKYSQGCKEQLIIDSVILKRVQKSKIDLFTMYIDYKKAYDSVPHSWLLQVLEIYKINPTIVTFLKTMMTTWCTVLRLTTPTETTDTSPIKIQRGIFQGDALSPLWFCLALNPLSKILNATSLGTPLNSSATNRQTDPQKDVLNHLMYMDDIKLYAETESQLYELANLTETFTKDIKMEFGIDKCKINSVRAGQNYQHQYTLGTGEQIEPLDELETYKYLGYNQSRQIQYKDTKQKLKQQFQHRLNTILKTQLYSRNTIKAINTFAIPVLTYSFGTVNWTKTELKNLQRKINTTMTKFRKHHPRSCIQRLTLPRKEGGRGLIDILNLHNRQITALRQYFFAKTESSPLHKQIAHNDQHLTPLNLKDTTEQKNEKVTDERTKCQEWTQKSLHGRHRQDLCQLNVDKDASNAWLSRGELFPETEGFMLAIQDQVIETKNYRKYIIKNLTTDICRKCNSSPETIQHITGACKSIAQTDYKHRHDQVANVIHQKLAHKYKLIDTIVPYYKYNPETVLENSTTKLYFDRAILTDRTIHFNRPDITLIDKINKTGFLIDIAVPNTHNVQTTIAEKLSKYTELKDEITRIWHLQKVTIVPIVLSTTGVIPKQLHQSLSSLNLPPNTYHLMQKAVILNTCRLVRKFLQCESDNLHQYSHSNIVSSTTQSTYNITPTLNPTVGHLA

SEQ ID NO: 16586 - protein, 1452 aa, Griposia aprilina
MEMSNKRVYNLRSLPGERRGASGADARCHSMRTIGGEELSKRAPTNKIVTAGRSDLNRRAHYVEATADSMGDDTMSLFSSIPSTRPSYMTRRTASLSTTSTLDSVAQDVNLDSELAPTTSAPSTRRRWTPEMNKFILRTYLQLTSLDTDRRTYLEPLHLKFTEKFPNMQVSRQRIGDQRRAIINNKLLPQKTIDEIRNEVKDELDQLHFTLQSQNSGELRQQILAPTQSTQIQPTTPETHSTQNRTQTRMRWTSEHNEAIMRSYYRVTALGTNETTYRKPMYEDFINQFPSLAHLSEQRIADQRRAIINNNYLSDDKLNSLKLEVSEELGTDNTRNYNSETIAVITNINNANIQLTNNIDINSIEEPTPNVQITDNTELNSTDILPNPQVNLERDPIIDDSFQQAFQFYKDTSPTNRVYIPKQKPSKNLARIISYLNKIILPENINNNTDFHTFQTVIYCAAWTVAKVNGAKITLEPREITRGTKKEYKPKWRRRLEQKVYDLRSKIGRMTQFINGNRSRKLKKHVNKIIILYKIHTVHEEPNTQALHTLDTLKQKLSVVTGRLERYKACTLRKQQNTQFTQNEKLFYRNIRQATTNVQNNNPNDDELNTPNPETLQNFWAGIWEQPIHHKAQADWIHAELSSNTDIQTMAFEHISPQIFHKVLSRLHNWKAPGSDHIHSYWYKKFTAVHCYLYNFINSFIQDPKIIPSYITSGTTYMIPKDRNDLCNPAKYRPITCLQTLYKIITSCISEMIYEHIDANNILAEQQKGCRKYSQGCKEQLIIDSVILKRVQKYKTDLFTMYIDYKKAYDSVPHSWLLQVLEIYKIHPTVISFLKTMMTTWCTVLRLTTPTETIDTSPIKIQRGIFQGDALSPLWFCLALNPLSKILNATSLGVPLNYTATNRQTDPQEDVLNHLLYMDDIKLYAETESQLYELANLTETFTKDINMEFGIDKCKINSVRAGQNYQHQYTLGTGNRIEPLDELDTYKYLGYNQSRQIHYKDTKQKLKQQFQHRLNTILKTQLHSRNTIKAINTFAIPKLTYSFGVINWTKTDLKNLQRKINTTMTKFRKHHPRSCIQRLTLPRKEGGRGLIDILNLHNRQITALRQYFFAKTESSLLHKLIAHNDQHFTPLNLKDTTKQKNENVIDDKTKCQEWTQKSLHGRHRQDLSQLNVDKDASNAWLDRGELFPETEGFMLAIQDQVIETKNYRKYIIKNLTTDTCRKCNSSPETIQHITSACKSIAQTDYKHRHDQVANVIHQKLAHQYKLVDTVVPYYKYKPETVLENPATKLYFDRAILTDRTIHFNRPDITLINKINRIGFLIDIAVPNTHNLQTTIAEKLSKYTELKDEITRLWHLQKVTIVPIVLSATGVIPKQLHQSLSSLNLPPNIYHLLQKAVILNTCRLVRKFLQCESDNLHQYSHSNIVSSTIQSTSENQAASNISSTLHPTDGHLA

SEQ ID NO: 16587 - protein, 1453 aa, Noctua janthe
MEMSKRIYNLRSLPGERRGASGADAGCHSMRTIGGQELSKRAPTDKIVTAGRSELNRRAHNVEATADSTGDDTTSLFSSIPSTRPSYMTRRTTSLSTTTTLESAVQEVDLDSELAPTTSAPRTRRRWTPEMNKFILRTYLQLTSLDTDRKTYLEPLHLKFIEKYPNMQVSRQRVGDQRRAIINNKLLPQKTIDEIEAEVRDELNQLQLSAQTQFPTSHTQSIVTTSQTQATTLETPRVHNKTQTRMRWTNEQNEAIMRSYYRVTTLETNQTVYRKLMHEDFIRKFPSLAHLSEQRIADQRRAIVNNKYINTERLNSLKLEISNELQLENSNHNNIVITVDVNSIDTQSNANNIGLYSIENPIAQTLNNGQADIETDILHNPQISLDRDLLIDETFQQTHQFYIETSPTNRIYIPKQKPSKNFARIVDYINKIILPENVNKDTDFHTLQTAIYSAAWTAAKVNGAKLTLQPREMNINTNTKKIHMPHWQRRLERKLKDLRSKIGRMTQFINGNRSSKIIKHAKSIAKQYEIHTIHEAPNTQAEHTLDTLKQKLAVVTGRLQRYKACTQRKQQNNQFIQNEKLFYRNLRQTSTNVQNNNTNNADSHNNLDPEDLQSFWAGIWEQPIEHNTQATSTQWIQTELTNSSTNIQPMLFEQISPQIFHGVLARLHNWKAPGSDHIHSYWYKKFTAVHSFLYNYINNFIQDPKSIPSYLTSGTTYMISKDPNDLSNPAKYRPITCLQTLYKIITSCLSELIYIHTDTNNILAEQQKGCRKFSQGCKEQLIIDSIILKKAQKFKTDLYSMYIDYKKAYDSVPHSWLVKVLEIYRIHPTIITFLKTIMETWSTVLRINTSKETADTYPIKIQRGIFQGDALSPLWFCLALNPLSNILNSTRTGFPLEYIASDGQPEVQNNAINHLLYMDDIKLYAKSESQLNELANLTEQFTNDIRMEFGIDKCKINSVRAGQYYQHQYTLETGEHIEPLDEHDTYKYLGYNQSRQINHKETKQKLKQQFQHRLNTILKTQLYSRNTIKALNTFAIPILTYSFGIIKWTKTDLKNLQRKINTTMTKFRKHHPRSCVQRLTLPRKEGGRGLIDIQNLHNKQVTTLRQYFFTKAESSILHKEIANNDHHFTPLNLKDKSEQKNEKVTDNKTKLLEWSQKSLHGRHYQDLSQINVDKEASNAWLKRGELFPETEGFMLAIQDQIIETKNYRKFIIKNLSTDMCRKCNSSPETIQHITGACKSIAQTDYKHRHDQVANVIHQKLAHQYKLVDSIVPYYKYIPETVLENPSTKLYFDRGIFTDRTIHFNRPDITLINKTNKTGYLIDIAVPNTHNLQTTIAEKLSKYTELKEEITRLWHLQKVTIVPIVLSATGVIPKQLHQSLTSLNLPSNTYHLLQKAVILNTCRLVRKFLQCESDNPHQHIHFNIPSSLIQATTQNRIVPTTTSLTINPADNHLA

SEQ ID NO: 16588 - protein, 1419 aa, Noctua janthe
MEMSKRIYNLRSLPGERRGASGADAGCHSMRTIGGQELSKRAPTDKIVTAGRSELNRRAHNVEATADSTGDDTTSLFSSIPSTRPSYMTRRTTSLSTTTTLESAVQEVDLDSELAPTTSAPRTRRRWTPEMNKFILRTYLQLTSLDTDRKTYLEPLHLKFIEKYPNMQVSRQRVGDQRRAIINNKLLPQKTIDEIEAEVRDELNQLQLSAQTQFPTSHTQSIVTTSQTQATTLETPRVHNKTQTRMRWTNEQNEAIMRSYYRVTTLETNQTVYRKLMHEDFIRKFPSLAHLSEQRIADQRRAIVNNKYINTERLNSLKLEISNELQLENSNHNNIVITVDVNSIDTQSNANNIGLYSIENPIAQTLNNGQADIETDILHNPQTSLDRDLLIDETFQQTHQFYIETSPTNRIYIPKQKPSKNLARIVDYINKIILPENVNKDTDFHTLQTAIYSAAWTAAKVNGAKLTLQPREMNINTNTKKIHMPHWQRRLERKLKDLRSKIGRMTQFINGNRSSKIIKHVKSIAKQYEIHTIHEAPNTQAEHTLDTLKQKLAVVTGRLQRYKACTQRKQQNNQFIQNEKLFYRNLRQTSTNVQNSNTNNADSHNNLDPEDLQSFWAGIWEHPIEHNTQAEWIQTELTNSSTNIQPMLFEQISPQIFHGVLARLHNWKAPGSDHIHSYWYKKFTAVHSFLYNYINNFIQDPKSIPSYLTSGTTYMISKDPNDLSNPAKYRPITCLQTLYKIITSCLSELIYIHTDTNNILAEQQKGCRKFSQGCKEQLIIDSIILKKAQKFKTDLYSMYIDYKKAYDSVPHSWLVKVLEIYRIHPTIITFLKTIMETWSTVLRINTSKETADTYPIKIQRGIFQGDALSPLWFCLALNPLSNILNSTRTGFPLEYIASDGQPEVQNNAINHLLYMDDIKLYAKSESQLNELANLTEQFTNDIRMEFGIDKCKINSVRAGQYYQHQYTLETGEHIEPLDEHDTYKYLGYNQSRQINHKETKQKLKQQFQHRLNTILKTQLYSRNTIKALNTFAIPILTYSFGIIKWTKTDLKNLQRKINTTMTKFRKHHPRSCVQRLTLPRKEGGRGLIDIQNLHNKQVTTLRQYFFTKAESSILHKEIANNDHHLTPLNLKDKSEQKNEKVTDNKTKLLEWSQKSLHGRHYQDLSQINVDKEASNAWLKRGELFPETEGFMLAIQDQIIETKNYRKFIIKNLSTDMCRKCNSSPETIQHITGACKSIAQTDYKHRHDQVANVIHQKLAHQYKLVDSIVPYYKYIPETVLENPSTKLYFDRGIFTDRTIHFNRPDITLINKTNKTGYLIDIAVPNTHNLQTTIAEKLSKYTELKEEITRLWHLQKVTIVPIVLSATGVIPKQLHQSLTSLNLPSNTYHLLQKAVILNTCRLVRKFLQCESDNPHQHNYPL

SEQ ID NO: 16589 - protein, 978 aa, Noctua pronuba
MNTNTNTKKIYTPHWQRRLERKLKDLRSKIGRMTQFINGNRSRKIIKHVKRINKQYNIHTIHEEPNTQPEHTLDTLKQKLAVVTGRLQRYKACTQRKRQNTQFTLNEKLFYRNIRQVSTNVQNNNPSDDIGHTNLDLETFQNFWAGIWEHPIEHNTQADWIKTEVSNANTNIQPMTFEQISPQVFHEVLARLHNWKAPGSDQIHSYWYKKFTAVHSFLYNHINNFIQDPKTIPPYLTSGTTYMIPKDHNDLSNPAKYRPITCLQTLYKIITSCVSSLIYQHTDTNNILAEQQKGCRKFSQGCKEQLIIDSIILKKAQKSKTDLYSMYIDYKKAYDSVPHSWLVQILEIYKIHPTIITFLKTTMTTWSTVLRFNTPTDAADTRPIKILRGIFQGDALSPLWFCLALNPLSNILNSTCAGFPLENTARDGQREVQNNTLNHLLYMDDIKIYAKSESQLNELANLTEQFTNDVKMEFGIDKCKINSVRAGKYYQHQYTLETGEQIDPLEEHDTYKYLGYNQSRQINHKETKQKLKQQFQHRLNTILKTQLYSRNTIKALNTFAIPVLTYSFGIINWSKTDLKNLQRKINTTMTKFRKHHPRSCVQRLTLPRKEGGRGLIDIQNLHNKQITTLRQYFFTKAESSTLHKQIADNDNHFTPLNLKDKSEQNNEKVTDNKTKLLEWSQKSLHGRHYQDLSQINVDKEASNAWLKRGELFPETEGFMLAIQDQVIETKNYRKYIIKNLSNDTCRKCNSSPETIQHITGACKSIAQSDYKHRHDQVAKVIHQKIAHQFKLVDSIVPYYKYTPETVLENPSTKLYFDRGIFTDRTIHFNRPDITLINKTNKTGYLIDIAVPNTHNLQTTIAEKLSKYIELKEEITRLWHLQKVTIVPIVLSTTGVIPKQLHQSLTSLNLPSNTYHLLQKAVILNTCRLVRKFLQCESDNPHQHIHLNIPSSLFQATTQNRNVPITTSLTLNPADNHLA

SEQ ID NO: 16590 - protein, 1320 aa, Mesoligia furuncula
MNKFILRTYFQLTLLDTDKRTYLEPLHLKFIEKYPNMQVSRQRIGDQRRAIQNNKLLPQKTIDQIQKEVLEELDQLQLYHFTLQSQNSIDHTQQTPTLTQMEPTTLETHITQTRTQTRMRWTSEQNEGIMRSYYRVTDLGRNETVYRRRMYVDFINSFPSLAHLSEQRIADQRRAIINNNYITNDKLNSLKSEVSEELGLDNLNSHYNRETIPDITNINNTNTITQITNTVEEPTHNIQTSNNTELNSITEIQCNPEINPDREPFIDDTFQQALQFFKETSPINRMYIPKQKPSKNLARIIDYLNKIVLPENVNEYTEFNTLQTIIYCSAWTAAKVNGARITLELREIIRGKTEYKPKWQRRLEKKVKDLRRKIGRLTQFMNGSSSRKLKKHVKKIIKLYKIHTVHEEPNTQAAHTLDTLKQKLSVVTGRLERYKACTLRKQQNTQFTHNEKVFYRNIRQATANIQHNNPCDNENNTLDPESLQHFWARLWEQPICHNSQADWIQSELLNNDTNIQPMVFEHISPEIFHKVLTRLHNWKAPGSDHIHSYWYKKFTAIHCYLYNFINSFIQDPKSIPSYIMSGTTFMIPKDRKDLSNPAKYRPITCLQTLYKIITSCISELIYEHIDANNILAEQQKGCRKYSQGCKEQLIIDSVVLKNVQKSKSDLFTMYIDYKKAYDSVPHSWLVQVLEIYKIHPSVVTFLKTVMKTWTTVLRLTTPTETIDTSPIKIQRGIFQGDALSPLWFCLALNPLSKILNATSLGISLNSTATDGQDESQGAILNHLLYMDDIKLYAKTESQLNELANLTEKFTNDIKMEFGIDKCKINSVRAGQNYKHQYILETGEQIEPLDEQDTYKYLGYIQSSQIHYKETKQKLKQQFQHRLNTILKTQLYSRNTIKAINTFAIPVLTYSFGIINWTKTDLKNLQRKINTTMTKFRKHHPRSCLQRLTLPRKEGGRGLVDILNLHNRQITTLRKYFFDKTASSTLHRLIAQNDQHLTPLNLKDTTEQQNERVTDDKTKCLEWTQKSLHGRHRQDLCQLNVDKDASNAWLNRGELFPETEGFMLAIQDQVIETKNYRKYIIKNLTNDTCRKCNSSPETIQHITGACKSIAQTDYKHRHDQVANVIHQKLAHKYKFIDTIAPYYKYNPETVLENPTTKLYFDRAILTDRTIHFNRPDITLINKVNKTGFLIDIAVPNTHNLQTTIAEKLSKYTELKDEITRLWHLQKVTIVPIVLSTTGVIPKQLHQSLSSLNLPSNIYHLLQKAAILNTCRLVRKFLQCESDNLHHYSHLNIVSANIQPTADNHAVSNITPTLNPTDEHLA

SEQ ID NO: 16591 - protein, 1439 aa, Hydraecia micacea
MEMSNKRVYNLRSLPGERRGASGADARCHSMRTIGGEELSKRAPTDKIVTAGRSELNRRAHYVEATADSTGDDTISLFSSIPSTRPSYMTRRTASLSTTSTLDSVVQEVNLDSELAPTTSAPSTRRRWTPEMNKFILRTYLQLTALDTDRKTYLEPLHLKFIEKYPSMQVSRQRIGDQRRAIINNKLLPQKTIEEIRNNVKEELDRLQFNHSTQQSENTIDHVQQILTPTQSTQMQPKTPETNSTKNRIQTRMRWTNEQNEAIMRSYYRVTDLGRNETVYRRRMHEDFINSFPALAHLNEQRIADQRRAIINNKYVTSDRLNSIKLEVSEELRLNNLNFSNFTSETTIVDPNHISHSDSQFINSIDINSTQESTLTLNHTEINIAEEILPNQQVNLDRDALIDETFQQAFQYYKETSPTNRIFIPKQKPSKKLAGIVDYLNKTILPENVNKETDFYTLQTTIYCAAWTAAKVNGAKITLQPRVVTQRAKNEYKPKWERRLERKLNDLRSKIARMTQFINGNRSRKIIKHVNKIIEQYSIHTVHEEPNTQATHTLDTLKQKLSVVTGRLQRYKACTQRKLQNTQFTHNEKLFYRNIRQATSNVQDNNPNDDDHNNPDPETLQNFWARIWEQPIEHNGQADWIQTELTNSDTNIQAMTFEHISPEIFHKVLSRLHNWKAPGSDNIHSYWYKKFTSIHSFLYNHINTFIQDPKTIPSYVTSGTTFMIPKDLNDLSNPAKYRPITCLQTLYKIITSCISELIYQHIDTNNILAEQQKGCRKFSQGCKEQLIIDSVILKKVQKTKTDLFSMYIDYKKAYDSVPHSWLVKILEIYKIHPTIITFLKVMMTTWTTVLRLTSPTKTVDTSPIKIQRGIFQGDALSPLWFCLALNPLSNILNATTLGVPLKNTTAERHNEVQKIELNHLLYMDDIKLYAKSETQLYELANLTENFSNDIKMEFGIDKCKINSIRAGQNYQHQYILGTGEQIEPLGEQDSYKYLGYTQSRQIHYKETKQKLTLQFQHRLNTILKTQLHSRNTIKAINTFAIPVLTYSFGIINWTKTDLKNLQRKINTTMTKFRKHHPRSCLQRLTLPRKEGGRGLIDILNLHNRQIKALREFFFSKTETSILHKIITHNDQNFTPLNLKDTSEQRNEKVIEDKIKLLEWTQKSLHGRHRQDLCHINVDKEASNAWLNRGELFPETEGFMLAIQDQVIETKNYRKFIIKNLNNDTCRKCNSSPETIQHITGACKSIAQTDYKHRHDQVANIIHQKLAHQFKLIDSITPYYKYNPETVLENPSTKLYFDRGILTDRTIHFNRPDITLINKINKTGYLIDIAIPNTHNLQTTIAEKLSKYTELKDEVARLWHLQKVIIVPIVLSTTGVIPKQLHQSLKSLNLPPYTYHLLQKAAILNTCRLVRKFLQCEPENLHQNTNMLPSSVQSSARDCT

SEQ ID NO: 16592 - protein, 978 aa, Xestia xanthographa
MNTNTNTKKIHTPHWQRRLERKLKDLRSKIGRMTQFINGNRSRKIIKHVKRIAKQYEIHTIHEALNTQAEHTLDTLKQKLAVVSGRLQRYKACTQRKQQNNQFIHNEKLFYRNLRQTTTNVHDNNTTNAESHTNLDPEALQSFWAGIWEKPIEHNTQAEWIQTELTNSSTNIQPMSFEQISPQIFHGVLARLHNWKAPGSDHIHSYWYKKFTAVHCFLYNYINNFIQDPKSIPSYLTLGTTYMISKDPNDLSNPAKYRPITCLQTLYKIITSCLSELIYTHTDTNNILAEQQKGCRKFSQGCKEQLIIDSIILQKAQKSKTDLYSMYIDYKKAYDSVPHSWLVQILEIYRIHPTIITFMKTIMETWSTVLRINSSKETADTRPIKIQQGIFQGDALSPLWFCLALNPLSNILNSTCTGFPLEYTASDGQREVQNNASNHLLYMDDIKLYAKSESQLNELANLTEQFTNDIKMEFGIDKCKINSVRAGQYHQHQYTLETGEHIEPLDEHDTYKYLGYNQSRQINHKETKQKLKQQFQHRLNTILKTQLYSRNTIKAVNTYAIPVLTYSFGIINWTKTDLKNLQRKINTTMTKFRKHHPRSCVQRLTLPRKEGGRGLIDIQNLHNNQITTLRQYFFTKAESSALHKQIADNDHHFTPLNLKDKSEQKNEKVTDNKTKLLEWSQKSLHGRHYQDLSQINVDKEASNAWLKRGELFPETEGFMLAIQDQVIETKNYRKHIIKNLSTDMCRKCNSSPETIQHITGACKSIAQTDYKHRHDQVANVIHQKLAHQYKLVDSIVPYYKYIPEPVLENPSTKLYFDRGIFTDRTIHFNRPDITLINKTNKTGYLIDIAVPNTHTLQTTIAEKLSKYIELKDEITRLWHLQKVTIVPIVLSTTGVIPKQLHQSLTSLNLPSNTYHLLQKAVILNTCRLVRKFLQCESDNTHQHSHLNIPSSLSQATTQNRNVPTTTSITVNPADNHLA

SEQ ID NO: 16593 - protein, 1434 aa, Xestia c-nigrum
MEMSHKKVYNLRSLPGERRGAFGADAECHSMRTIGGDELSKRALTEKLVTAGRSKLNRRAHYVDATADSTGDDTISLFSSIPSTRPSYMTRRTTSLSTTTTLDSVVQEVNLDSELAPATSAPKTRRRWTPEMNKFILRTYLQLTSLDTDRKTYLEPLHLKFIEKYPNMQVSRQRVGDQRRAIINNKLLTQKTIDEIEAEVREELNQLQLSSETQFPTNHTQSLGTTTQTQSTTLESPRTQNKTQTRMRWTNEQNEAIMRSFYRVTTLETNQTVYRKLMYEDFITKFPSLAHLTEQRIADQRRAIVNNKYISTERLNLLKLEISNELQLDNSNYNNLAIIVNDNTIETQPEGPIVQILNNDQVDVATDGLHNSQTSLEDRDPLIDATFQQTLQFYIATSPTNRMYIPKQKPSKNLARIVDYINKIILPENVNKDTDFQTLQTVIYSAAWTAAKANGAKLTLQPKEINTNTDQKNIYTPHWQRRLERKLIDLRSKIGRMTQFINGNRSRKIIKHVKRINKQYKIHTVHEEPNTQPEHTLDTLKQKLAVVTGRLQRYKACTQRKRQNTQFTLNEKLVYRNIRQVSTNVQNINPSDDDVQNDLDLQNLQNFWAGIWEHPIEHNTQTDWIQAELSNASTNIQPMTFEHISPQIFHEVLARLHNWKAPGSDQIHSYWYKKFTAIHSFLYNHINNFIQDPKTLPPYLTSGTTYMISKDRNDLSNPAKYRPITCLQTLYKIITSCISSLIYNHIDTNNILAEQQKGCRKFSQGCKEQLVIDSIILKKAQKSKTDLYSMYIDYKKAYDSVPHSWLVQILEIYRIHPTIITFLKTTMTTWSTVLRVNTSTDAADTRPIKILRGIFQGDALSPLWFCLALNPLSNILNSTGTGFPLRDTTHEEQHEVQNNTLNHLLYMDDIKLYAKSESQLNELANLTEQFTNDVKMEFGIDKCKINSVRAGQYYQHQYTLETGEHIDPLDEHDTYKYLGYNQSRQINHKETKQKLKQQFQHRLNTILKTQLYARNTIKALNTFAIPVLTYSFGIINWTKTDLKNLQRKINTTMTKFRKHHPRSCVQRLTLPRKEGGRGLIDIQNLHNKQITTLRQYFFTKAESSTLHKQIANNDIHFTPLNLKDKSEQKNEKVTDNKTKLLEWSQKSLHGRHYQDLSQINVDKEASNAWLKRGELFPETEGFIIAIQDQVIETKNYRKYIIKNLTTDTCRKCNRLPETIQHITGACKSIAQTDYKHRHDQVANVIHQKLAYQYKLLDSIVPYYKYTPETVLENTSIKLYFDRGIFTDRTIHFNRPDITLINKTNKTGYLIDIAVPNTHNIQTTIAEKLSKYTELKEEITRIWHLQKVTIVPIVLSTTGVIPKQLHQALTSLNLPSNTYHLLQKAVILNTCRLVRKFLQCESDNPPQTCFQPPIQIRNLPITTPLILNPADNHLA

SEQ ID NO: 16594 - protein, 1452 aa, Griposia aprilina
MEMSNKRVYNLRSLPGERRGASGADARCHSMRTIGGEELSKRAPTNKIVTAGRSDLNRRAHYVEATADSMGDDTMSLFSSIPSTRPSYMTRRTASLSTTSTLDSVAQDVNLDSELAPTTSAPSTRRRWTPEMNKFILRTYLQLTSLDTDRRTYLEPLHLKFTEKFPNMQVSRQRIGDQRRAIINNKLLPQKTIDEIRNEVKDELDQLHFTLQSQNSGELRQQILAPTQSTQIQPTTPETHSTQNRTQTRMRWTSEHNEAIMRSYYRVTALGTNETTYRKPMYEDFINQFPSLAHLSEQRIADQRRAIINNNYLSDDKLNSLKLEVSEELGTDNTRNYNSETIAVITNINNANIQLTNNIDINSIEEPTPNVQITDNTELNSTDILPNPQVNLERDPIIDDSFQQAFQFYKDTSPTNRVYIPKQKPSKNLARIISYLNKIILPENINNNTDFHTFQTVIYCAAWTVAKVNGAKITLEPREITRGTKKEYKPKWRRRLEQKVYDLRSKIGRMTQFINGNRSRKLKKHVNKIIILYKIHTVHEEPNTQALHTLDTLKQKLSVVTGRLERYKACTLRKQQNTQFTQNEKLFYRNIRQATTNVQNNNPNDDELNTPNPETLQNFWAGIWEQPIHHNAQADWIHAELSSNTDIQTMAFEHISPQIFHKVLSRLHNWKAPGSDHIHSYWYKKFTAVHCYLYNFINSFIQDPKIIPSYITSGTTYMIPKDRNDLCNPAKYRPITCLQTLYKIITSCISEMIYEHIDANNILAEQQKGCRKYSQGCKEQLIIDSVILKRVQKYKTDLFTMYIDYKKAYDSVPHSWLLQVLEIYKIHPTVISFLKTMMTTWCTVLRLTTPTETIDTSPIKIQRGIFQGDALSPLWFCLALNPLSKILNATSLGIPLNYTATNRQTDPQEDVLNHLLYMDDIKLYAETESQLYELANLTETFTKDINMEFGIDKCKINSVRAGQNYQHQYTLGTGERIEPLDELDTYKYLGYNQSRQIHYKDTKQKLKQQFQHRLNTILKTQLHSRNTIKAINTFAIPVLTYSFGVINWTKTDLKNLQRKINTTMTKFRKHHPRSCIQRLTLPRKEGGRGLIDILNLHNRQITALRQYFFAKTESSLLHKLIAHNDQHFTPLNLKDTTKQKNENVIDDKTKCQEWNQKSLHGRHRQDLSQLNVDKDASNAWLDRGELFPETEGFMLAIQDQVIETKNYRKYIIKNLTTDTCRKCNSSPETIQHITSACKSIAQTDYKHRHDQVANVIHQKLAHQYKLVDTVVPYYKYKPETVLENPASKLYFDRAILTDRTIHFNRPDITLINKINRIGFLIDIAVPNTHNLQTTIAEKLSKYTELKDEITRLWHLQKVTIVPIVLSATGVIPKQLHQSLSSLNLPPNIYHLLQKAVILNTCRLVRKFLQCESDNLHQYSHSNIVSSTIQSTSENQAASNMSSTLHPTDGHLA

SEQ ID NO: 16595 - protein, 1454 aa, Griposia aprilina
MEMSNKRVYNLRSLPGERRGASGADARCHSMRTIGGEELSKRAPTNKIVTAGRSDLNRRAHYVEATADSMGDDTMSLFSSIPSTRPSYMTRRTASLSTTSTLDSVAQDVNLDSELAPTTSAPSTRRRWTPEMNKFILRTYLQLTSLDTDRRTYLEPLHLKFTEKFPNMQVSRQRIGDQRRAIINNKLLPQKTIDEIRNEVKDELDQLHFTLQSQNSGELRQQILAPTQSTQIQPTTPETHSTQNRTQTRMRWTSEHNEAIMRSYYRVTALGTNETTYRKPMYEDFINQFPSLAHLSEQRIADQRRAIINNNYLSNDKLNSLKLEVSEELGTDNTRNYNSETIAVITNINNANIQLTNNIDINSIEEPTPNVQITDNTELNTSSTDILPNPQVNLERDPIIDDSFQQAFQFYKDTSPTNRVYIPKQKPSKNLARIISYLNKIILPENINNNTDFHTFQTVIYCAAWTVAKVNGAKITLEPREITRGTKKEYKPKWRRRLEQKVYDLRSKIGRMTQFINGNRSRKLKKHVNKIIILYKIHTVHEEPNTQALHTLDTLKQKLSVVTGRLERYKACTLRKQQNTQFTQNEKLFYRNIRQATTNVQNNNPNDDELNTPNPETLQNFWAGIWEQPIHHNAQADWIHAELSSNTDIQTMAFEHISPQIFHKVLSRLHNWKAPGSDHIHSYWYKKFTAVHCYLYNFINSFIQDPKIIPSYITSGTTYMIPKDRNDLCNPAKYRPITCLQTLYKIITSCISEMIYEHIDANNILAEQQKGCRKYSQGCKEQLIIDSVILKRVQKYKTDLFTMYIDYKKAYDSVPHSWLLQVLEIYKIHPTVISFLKTMMTTWCTVLRLTTPTETIDTSPIKIQRGIFQGDALSPLWFCLALNPLSKILNATSLGIPLNYTATNRQTDPQEDVLNHLLYMDDIKLYAETESQLYELANLTETFTKDINMEFGIDKCKINSVRAGQNYQHQYTLGTGERIEPLDELDTYKYLGYNQSRQIHYKDTKQKLKQQFQHRLNTILKTQLHSRNTIKAINTFAIPVLTYSFGVINWTKTDLKNLQRKINTTMTKFRKHHPRSCIQRLTLPRKEGGRGLIDILNLHNRQITALRQYFFAKTESSLLHKLIAHNDQHFTPLNLKDTTKQKNENVIDDKTKCQEWTQKSLHGRHRQDLSQLNVDKDASNAWLDRGELFPETEGFMLAIQDQVIETKNYRKYIIKNLTTDTCRKCNSSPETIQHITSACKSIAQTDYKHRHDQVANVIHQKLAHQYKLVDTVVPYYKYKPETVLENPATKLYFDRAILTDRTIHFNRPDITFINKINRIGFLIDIAVPNTHNLQTTIAEKLSKYTELKDEITRLWHLQKVTIVPIVLSATGVIPKQLHQSLSSLNLPPNIYHLLQKAVILNTCRLVRKFLQCESDNLHQYSHSNIVSSTIQSTSENQAASNISSTLHPTDGHLA

SEQ ID NO: 16596 - protein, 1450 aa, Hydraecia micacea
MEMNNKKVYNLRSLPGERRGASGADARCHSMRTIGGEELSKRAPTDKIATAGRSGLNRRAHYVEATADSTGDDTISLFSSIPSTRPSYMTRRTASLSTTSTLDSVVQDVNPDSELAPTTSTPNTRRRWTPEMNKFILRTYLQLTLLDTDRRTYLEPLHLKFTEKFPNMQVSRQRIGDQRRAIINNKLLSQKIIDEIRNEVKDELDQLQLNHVTLHTQNSSKSRKQIFTSTQATQIQPTTLETHSTQNRTQTRMKWTSEHNEAIMRSYYRVTALGTNETTYRKPMYEDFINQFPSLAHLSEQRIADQRRAIINNQYLSSEKLNSLKLEISEELSIDNTRNYNSETVAVNTNINNTNVEFTNNIDINSIEEPIPTIQTPDNTEINSTEILPNPQINLERDPIIEDYFQQAFQFYKDTSPTNRIYIPKQKPSKNLARIISYLNKNILPENINNDTDFHTFQTVIYCAAWTAAKVNGAKIKLEPREITRHGTKTEYKPKWQRRLERKLNDLRSKIGRMTQFINGSRSRKLKKHVNKIIKLYRIHTVHEEPNTQAAHTLDTLKQKLSVVTGRLQRYKACNLRKQQNTQFNQNEKLFYRNIRQATTNVQQINPSDDELNTPNPEALQNFWAEIWEQPVHHNAQAEWIQAELSNNTNIQTMAFEHISPQIFHKVLSRLHNWKAPGSDQIHSYWYKKFTALHCYLYNFINSFIKDPIMIPSYITSGTTYMIPKDRNDLSNPAKYRPITCLQTLYKIITSCISEMIYEHIEANNILAEQQKGCRKYSQGCKEQLIIDSVILKRVQKSKIDLFTMYIDYKKAYDSVPHSWLLQVLEIYKINPTIVTFLKTMMTTWCTVLRLTTPTETTDTSPIKIQRGIFQGDALSPLWFCLALNPLSKILNATSLGTPLNSSATNRQTDPQKDVLNHLMYMDDIKLYAETESQLYELANLTETFTKDIKMEFGIDKCKINSVRAGQNYQHQYTLGTGEQIEPLDEIETYKYLGYNQSRQIQYKDTKQKLKQQFQHRLNTILKTQLYSRNTIKAINTFAIPVLTYSFGIVNWTKTELKNLQRKINTTMTKFRKHHPRSCIQRLTLPRKEGGRGLIDILNLHNRQITALRQYFFAKTESSPLHKQIAHNDQHLTPLNLKDTTEQKNEKVTDERTKCQEWTQKSLHGRHRQDLCQLNVDKDASNAWLSRGELFPETEGFMLAIQDQVIETKNYRKYIIKNLTTDICRKCNSSPETIQHITGACKSIAQTDYKHRHDQVANVIHQKLAHKYKLIDTIVPYYKYNPETVLENSTTKLYFDRAILTDRTIHFNRPDITLIDKINKTGFLIDIAVPNTHNVQTTIAEKLSKYTELKDEITRIWHLQKVTIVPIVLSTTGVIPKQLHQSLSSLNLPPNTYHLMQKAVILNTCRLVRKFLQCESDNLHQYSHSNIVSSTTQSTYNITPTLNPTVGHLA

SEQ ID NO: 16597 - protein, 1434 aa, Xestia c-nigrum
MEMSHKKVYNLRSLPGERRGAFGADAECHSMRTIGGDELSKRALTEKLVTAGRSKLNRRAHYVDATADSTGDDTISLFSSIPSTRPSYMTRRTTSLSTTTTLDSVVQEVNLDSELAPATSAPKTRRRWTPEMNKFILRTYLQLTSLDTDRKTYLEPLHLKFIEKYPNMQVSRQRVGDQRRAIINNKLLTQKTIDEIEAEVREELNQLQLSSETQFPINHTQSLGTTTQTQSTTLESPRTQNKTQTRMRWTNEQNEAIMRSFYRVTTLETNQTVYRKLMYEDFITKFPSLAHLTEQRIADQRRAIVNNKYISTERLNLLKLEISNELQLDNSNYNNLAIIVNDNTIETQPEGPIVQILNNDQVDVATDGLHNSQTSLEDRDPLIDATFQQTLQFYIATSPTNRMYIPKQKPSKNLARIVDYINKIILPENVNKDTDFQTLQTVIYSAAWTAAKANGAKLTLQPKEINTNTNQKKIYTPHWQRRLERKLIDLRSKIGRMTQFINGNRSRKIIKHVKRINKQYKIHTVHEEPNTQPEHTLDTLKQKLAVVTGRLQRYKACTQRKRQNTQFTLNEKLFYRNIRQVSTNVQNINPSDDDVQNDLDLQNLQNFWAGIWEHPIEHNTQTDWIQAELSNASTNIQPMTFEHISPQIFHEVLARLHNWKAPGSDQIHSYWYKKFTAIHSFLYNHINNFIQDPKTLPPYLTSGTTYMIPKDRNDLSNPAKYRPITCLQTLYKIITSCISSLIYNHIDTNNILAEQQKGCRKFSQGCKEQLVIDSIILKKAQKSKTDLYSMYIDYKKAYDSVPHSWLVQILEIYRIHPTIITFLKTTMTTWSTVLRVNTSTDAADTRPIKILRGIFQGDALSPLWFCLALNPLSNILNSTGTGFPLRDTTHEEQHEVQNNTLNHLLYMDDIKLYAKSESQLNELANLTEQFTNDVKMEFGIDKCKINSVRAGQYYQHQYTLETGEHIDPLDEHDTYKYLGYNQSRQINHKETKQKLKQQFQHRLNTILKTQLYARNTIKALNTFAIPVLTYSFGIINWTKTDLKNLQRKINTTMTKFRKHHPRSCVQRLTLPRKEGGRGLIDIQNLHNKQITTLRQYFFTKAESSTLHKQIANNDIHFTPLNLKDKSEQKNEKVTDNKTKLLEWSQKSLHGRHYQDLSQINVDKEASNAWLKRGELFPETEGFIIAIQDQVIETKNYRKYIIKNLTTDTCRKCNRLPETIQHITGACKSIAQTDYKHRHDQVANVIHQKLAYQYKLLDSIVPYYKYTPETVLENTSIKLYFDRGIFTDRTIHFNRPDITLINKTNKTGYLIDIAVPNTHNIQTTIAEKLSKYTELKEEITRIWHLQKVTIVPIVLSTTGVIPKQLHQSLTSLNLPSNTYHLLQKAVILNTCRLVRKFLQCESDNPPQTCFQPPIQIRNLPITTPLILNPADNHLA

SEQ ID NO: 16598 - protein, 1445 aa, Amphipyra berbera
MRLRNRILPQAGTGANRDGESRPGPSSPGCPSYSGEGTVPHQPVQSRTVAVQNSSTSSLLSFIYSPVLSPIPSPLLSTIPSSRSPSTRRAHNVRATADSSGADTNSLFSSIPSTRPSYMTRRTTSCSTSSTLDSVVQDVNLDSQIAPITSASSSRKRWTPEMNKFILRTYFQLTALNTDTRTYLEPLHLKFIEKYPHMQVSRQRIGDQRRAIIRNKLLTQKTIDEIHNEVKEELNQLQSNIHNQHTQTLTTTQSTQIQSTPSEARNTQKTTQIRMRWTNELNEAIMRSYYRVTVLGTNETAYRRPMYEDFINKFPSLAHLSEQRIADQRRAIINNKYICNNRLNSLKLEISEELGLNNNNLSNPTSETTNIVNSNNSNNENTDIQLSNNINTEESLPNIPSPSFEINLTEEVLPYPQTDLERNPQIDETFQQAFQFYRNTFPTSRVYIPKQKPSKNLARVVNYLNQITLRENVNKDTDFCTLQTVIYCAAWTVAKVNGAKIALQLVESLPNAKKEFKPNWQRRLERKLADLRTKIGRLTQFINGNRSRKVIKHVNNIIEQYKIHTIHEEPNTQAAHTLDTLKQKLSVVSGRLQRYKACTLRKQQNTQFTNNEKLFYRNIRHATTNVQENSANHEGNDSPDPETLQNFWAGIWEDKTEHNAQAEWIQTESTRHSTNIQAMTFEHISPEIFQKVLYRLHNWKAPGSDHIHSYWYKKFTAVHSYLHNYINIFIQDPNSIPCYLTLGTTFMIPKDRNDLSNPAKYRPITCLQTLYKIITACISEIIYQHMEANNILAEQQKGCRKFSQGCKEQLIIDSVILKKVQKTKTDLFSMYIDYKKAYDSVPHSWLVKVLEIYKIHPAIVTFLETTMTTWKTVLRLTTPTKTVETSPIKIQRGIFQGDALSPLWFCLALNPLSNILNSTSVGIPLKATDTEEQTEAQNNTLNHLLYMDDIKLYAKSESQLYELANLTEQFTNDIKMEFGIDKCKINSVRAGQNYQHQYTLETGQQIEPLDEQDTYKYLGYNQSLQIHYKDTKQKLKQQFQHRLNTILKTQLYSRNTIKAINTFAIPVLTYSFGIINWTKTDLKNLQRKINTTMTKFRKHHPRSCSQRLTLPRKEGGRGLIDILNLHNKQITTLRQYFFAKTQSSTLHKLIAQNDQQLTPLNLKDTSEQKNEKLTHDKTKLLEWTQKSLHGRHRQHLCQLNVDKEASNRWLNRGELFPETEGFMIAIQDQVIETKNYRKFIIKNLGTDTCRKCNSSPETIQHITGACKSIAQTDYKHRHDQVANVIHQKLAYQYKLIDSIVPYYKYNPETVLENLSTKLYFDRAILTDRTIHFNRPDITLINKTSKTGYLIDIAVPNTHNLQTTIAEKLSKYTELKDEITRLWHLQKVTIVPIVLSTTGVIPKQLHQSLKSLNLPSNTYHLMQKAVILNTCRLVRKFLQCEPDNPH

SEQ ID NO: 16599 - protein, 1464 aa, Hypena proboscidalis
MSRNRYNLRSLPGGRRGASGADAGCLSMRTIGGRELSRRTSTDKNITAERRELSRRAHDVEATADFRDDETVSLFSSIPSTRPSYMTRRTATLSTTSTSKSVVQEVNSDLDLAPTSGLSATRKRWTQEMNKFILRTYLQLTALDIDTKTYLEPLHIKFLEKFPNMEVSRQRVGDQRRAIVRSKLLPQETIDEIYNEVKEELQQLQHNSNINLTRTSFRESQLTPTRTQTFTNTTQTRMRWTTEQNEAIMRAYYRITHLGTNETAYRKLMHEDFISKFPTLAHLSEQRIADQRRAIINNQYISKDRLNLLKQEIAAELETNVINTTTLDSNALNNNNGEISEDNIQVTIADESQLLAELPLNAEINTGRQFKIDEIFQQAFQFYENTEPTNRTYIPRQKPSKNLAKIVNYLNEIIIPENIDGNTDFSHLQTVVYCAAWTAAKANGAKLKLQTEENLQREHRNRKPNWQRRLENKLEDLRSKISRLTQFMNGNRSQNVLKHAHRILEQYRTHTIHEEPNSQIIHTLDTLKQKLSVVNGRLHRYKACTLRKNQNSQFTNNEKHFYRNLRQATANIQENITNDDASNIPSREELQNFWARIWENPIQHNNQAAWIQTEGTKIRSEMEYHHIPPEIFQNVLRNVHNWKAPGSDYIHSYWYKKFTAIHTNLYHHLNTFIEDPNTIPSYLASGKTFMIPKDRNDPSNPAKYRPITCLQTLYKIMTSCISELIYQYIDANNILAEQQKGCRKFSQGCKEQLTIDSVILKQVQRTRSNLFSMYIDYKKAYDSVPHSWLVHVLELYKIHPIIIAFLRTIMTKWTTVLRLTTATKIVETSSIQIQRGIFQGDALSPLWFCLALNPLSNILNSTKLGYPLQYSEQSGQQNLRQNVLNHLLYMDDIKLYANTENQLYELANLTEQFSYDIHMEFGIDKCKVNSVKTGQNYQHQYTLGTGERIESLEEQDTYKYLGYHQSLQIKYKDTKLKLTQQFQHRLNAILKTQLNSKNTVKAINTYVIPLLTYSFGIIFWSKTELKNLQRRINTAMTKHRKHHPRACLQRLTLPRKDGGRGLIDILNLHNKQITTLRNYFFAKSETSILHTSIAQNDNKLTPLNLKDSTKQKNEVVIDDKSKLADWTQKALHGRHRQDLCQQNVDKEASNAWLNRGELFPETEGFMIAIQDQVIETKNYRKYIIKTLRTDTCRKCNSCPETIQHITRACKSIAQTDYKHRHDQVANIIHQKLAHQYKFVDSIVPYYKYNPQTVLENASTKLYFDRAILTDRTVHFNRPDITLINKITKTGFLIDIAVPNTHNLQTTIAEKLTKYLELKDEITRLWHLQNVTIVPIVLSTTGIIPKQLHHSLNTLQLSPYTYNLMQKAVILNTCRLVRKFLQCEPDNTQPVTNEQTPTIITSAHTLTGTTLAHTFTTTTPAHTSTTTHTSTTAHTLTITNLAHTSTITDSVHNNNSNRSTEGHLA

SEQ ID NO: 16600 - protein, 1441 aa, Hydraecia micacea
MEMSNKRVYNLRSLPGERRGASGADARCHSMRTIGGEELSKRAPTDKIVTAGRSELNRRAHDVEATADSTGDDTISLFSSIPSTRPSYMTRRTASLSTTSTLDSVVQEVNLDSELAPTTSAPSTRRRWTPEMNKFILRTYLQLTALDTDRKTYLEPLHLKFIEKYPSMQVSRQRIGDQRRAIINNKLLPQKTIEEIRNNVKEELDRLQFNHSTQQSENSIDHVQQILTPTPTQSTQMQPKTPETNSTKNRIQTRMRWTNEQNEAIMRSYYRVTDLGRNETVYRRRMHEDFINSFPALAHLNEQRIADQRRAIINNKYVTSDRLNSIKLEVSEELRLNNLNFSNFTSETTIVDPNHISHSDSQFINSIDINSTQESTLTLNHTEINIAEEILPNQQVNLDRDALIDETFQQAFQYYKETSPTNRIFIPKQKPSKKLAGIVDYLNKTILPENVNKETDFYTLQTTIYCAAWTAAKVNGAKITLQPRIVTQRAKKEYKPKWERRLERKLNDLRSKIARMTQFINGNRSRKIIKHVNKIIEHYSIHTVHEEPNTQATHTLDTLKQKLSVVTGRLQRYKACTQRKLQNTQFTHNEKLFYRNIRQATSNVQDNNPNDDDHNNPDPETLQNFWARIWEQPIEHNGQADWIQTELTNSDTNIQAMTFEHISPEIFHKVLSRLHNWKAPASDNIHSYWYKKFTSIHSFLYNHINTFIQDPKTIPSYVTSGTTFMIPKDLNDLSNPAKYRPITCLQTLYKIITSCISELIYQHIDTNNILAEQQKGCRKFSQGCKEQLIIDSVILKKVQKTKTDLFSMYIDYKKAYDSVPHSWLVKILEIYKIHPTIITFLKVMMTTWTTVLRLTSPTKTVDTSPIKIQRGIFQGDALSPLWFCLALNPLSNILNATTLGVPLKNTTTETHNEVQKIELNHLLYMDDIKLYAKSETQLYELANLTENFSNDIKMEFGIDKCKINSIRAGQNYQHQYILETGEQIEPLGEQDSYKYLGYTQSRQIHYKETKQKLTLQFQHRLNTILKTQLHSRNTIKAINTFAIPVLTYSFGIINWTKTDLKNLQRKINTTMTKFRKHHPRSCLQRLTLPRKEGGRGLIDILNLHNRQIKALREFFFSKTETSILHKIITHNDQNFTPLNLKDTSEQRNEKVIEDKIKLLEWTQKSLHGRHRQDLCHINVDKEASNAWLNRGELFPETEGFMLAIQDQVIETKNYRKFIIKNLNNDTCRKCNSSPETIQHITGACKSIAQTDYKHRHDQVANIIHQKLAHQYKLIDSITPYYKYNPETVLENPSTKLYFDRGILTDRTIHFNRPDITLINKINKTGYLIDIAIPNTHNLQTTIAEKLSKYTELKDEVARLWHLQKVIIVPIVLSTTGVIPKQLHQSLNSLNLPPYTYHLLQKAAILNTCRLVRKFLQCEPENLHQNTNMLPSFVQSSARDCT

SEQ ID NO: 16601 - protein, 967 aa, Noctua pronuba
MPHWQRRLERKLKDLRSKIGRMTQFINGNRSRKIIKHVKRINKQYNIHTIHEEPNTQPEHTLDTLKQKLAVVTGRLQRYKACTQRKRQNTQFTLNEKLFYRNIRQVSTNIQNNNPSDDIGHTNLDLETLQNFWAGIWEHPIEHNTQADWIKTEVSNANTNIQPMTFEQISPQVFHEVLARLHNWKAPGSDQIHSYWYKKFTAVHSFLYNHINNFIQDPKTIPPYLTSGTTYMIPKDHNDLSNPAKYRPITCLQTLYKIITSCVSSLIYQHTDTNNILAEQQKGCRKFSQGCKEQLIIDSIILKKAQKSKTDLYSMYIDYKKAYDSVPHSWLVQILEIYKIHPTIITFLKTTMTTWSTVLRFNTPTDAADTRPIKILRGIFQGDALSPLWFCLALNPLSNILNSTCAGFPLENTARDGQREVQNNTLNHLLYMDDIKIYAKSESQLNELANLTEQFTNDVKMEFGIDKCKINSVRAGKYYQHQYTLETGEQIDPLEEHDTYKYLGYNQSRQINHKETKQKLKQQFQHRLNTILKTQLYSRNTIKALNTFAIPVLTYSFGIINWSKTDLKNLQRKINTTMTKFRKHHPRSCVQRLTLPRKEGGRGLIDIQNLHNKQITTLRQYFFTKAESSTLHKQIADNDNHFTPLNLKDKSEQNNEKVTDNKTTLLEWSQKSLHGRHYQDLSQINVDKEASNAWLKRGELFPETEGFMLAIQDQVIETKNYRKYIIKNLSNDTCRKCNSSPETIQHITGACKSIAQSDYKHRHDQVAKVIHQKIAHQFKLVDSIVPYYKYTPETVLENPSTKLYFDRGIFTDRTIHFNRPDITLINKTKKTGYLIDIAVPNTHNLQTTIAEKLSKYIELKEEITRLWHLQKVTIVPIVLSTTGVIPKQLHQSLTSLNLPSNTYHLLQKAVILNTCRLVRKFLQCESDNPHQHIHLNIPSSLFQATTQNRNVPITTSLTLNPADNHLA

SEQ ID NO: 16602 - protein, 1181 aa, Hypena proboscidalis
MRWTTRQNEEIMRSYYRVTSLEANQTAYRKLMFEDFITKFPDLSHVSEQRIADQRRAIINNKYLSNDRLDVLRQEISIELATNSSDNVENHSESIHERSQFQNVEDTETSIFEVLQFAEESVLDRQPPIDETFQQAFEYYKDTEPTSRTFIPKQRPSKKLAKIVNYLNEVIFPEVIKEDTDFHKLQTAIYCAAWTAAKINGAKITLQGNTSHQPDKRDYKPNWQRRLERKLTNLRTKISHLTQYIKGNRSRNVVKYAKSIIEQYKTHTIHENPNTQPIHTLDTLKQKLAVVTGRIKRYKACTQRKQQNSQFSNNEKVFYRNIKQSTMNTQQNNSNSTSTPTSEELHDFWARIWSDPVQHNTEAEWIQKECTTNTSSIQTMEFEYISVEIFQRVLRHLHNWKSPGSDFVQSYWYKKFTYVHSHLHKFINIFIQDPNTIPTYLTLGKTFMIPKDHNDLTNPAKYRPITCLQTLYKIITSCISELIYQHADANNILAEQQKGCRKFSQGCKEQLVIDSVILTQVQKTHSDLFSMYIDYKKAYDSVPHSWLLKVLEIYKVHPTIVSFLKTTMTRWSTKLAISTVTHTVETNSIQINRGLFQGDALSPLWFCLALNPLSNILNATPIGYDFKISPTNGQTDIQDFKINHLLYMDDIKLYANTENEINDLASLTEQFTNDIHMEFGIDKCKINSIRAGQNYQHQYVLGTGEQIKALGEQDTYKYLGYRQSLQINHKDTKQKLTQEFQHRLNTILKTQLNSRNTVKAINTFVIPVLTYSFGIINWTKTDLTNLRRKINTTLTKFRKHHPRSCLQRLTLSRKEGGRGIVDIINLHNKQIRSLRQYFFKKAESCKLHKTIVQNDKNFTPLNLKDNREQKNEKVIDDTVKIGNWTQKALHGRHRLDLCQQNVDKDASNAWLNRGELFPETEGFMIAIQDQVIETRNYRKYIIKNLPFDTCRKCNSSPETIQHITGACKSIAQTDYKHRHDQVANIVHQKLAYHFKFVDSIHPYYKYNPQTVLENSTTKLYYDRAILTDKTIHYNRPDITLINKINKTGYLIDIAIPNTHNLQTTIAQKLTKYIELKDEITRLWHLEKVTIVPIVISSTGVIPKQLHQSLNSLQLSPNTYQLMQKAVILNTCRLVRKFLQCEPDTTHSITHDSEQSNTYSSTLAPPTHITIQTSNPTDEHLA

SEQ ID NO: 16603 - protein, 1424 aa, Pheosia tremula
MEQNNRKYNLRPLPGGRRGAPGAGAGCLSSRDTGDEELSRRALVTQHATAGRRELSRRARGVEATAESSSGDDTRSLFSSIPSTRPSYMTRRTSTLSSATTLDGVVQEVNLDSEPAPTSGISRSRRRWTNEMNQFILRTYLQLTILDTDTKTYLEPLHLKFIEKYPHMTVSRQRVGDQRRAIVRNRLLSQPIIDSIYDQVRQEITNLHTSHQTQHTHPHSQTQLATTAGTTNLTPQVLRIKSKPHNTHTRMRWTNEHNEAIIRLYFRITHIETNRTAYRKLLHQHFIQQFPTLAHLSEQRIADQRRAIINNKYITDHRLNEIKREVSDELLLNINQLNNNSNDTSNTYASNTANTDIQDLNHIQFSPSADLVSAQPETERNPQIDIAFQQTFQYYKDTSPIARIYIPKQKPSRKFSKIVDYLNKVTLPETVNCDSDFNTLQTVVYCAAWTAAKINGARISIEPIENPSNNKKEHKPNWQRRLEKRLDDLRAKIGRLTQFINGNRSRYLTKHVNDIITKYKIHSVHEDPNTQLTHTLDTLKQKLSVVSGRLHRYKACTLRKQQNSHFANNEKLFYRNLRQNTTNIQENRNTNNINITPDPEDLQKFWAGIWEDNTTHNTQAEWINTEITNNTSVQTMNFENIPIDTFKKVLKNLHNWKAPGSDNIHSYWYKKFTSIHNYLHKFINNFIQEPATLPTYITSGITYMIPKDRNDTTNPAKYRPITCLQTLYKIITSCISELIYQHTSNHNILAEQQKGCKKFSQGCKEQLLIDSVILNQVQKAKSNLFTMYIDYQKAYDSVPHSWLRQVLDIYKIHPKISTFLKTAMTNWTTRLRLYTPTTTIETNSVKIQRGIFQGDALSPLWFCLALNPLSNMLNSTTIGYPLKYTDSDEQTPTQTNLLNHLLYMDDIKLYAKDENDLYQLANLTELFTTDINMKFGIDKCKINSIRNGQNYQHHYTLGTGEQIDPLDTHETYKYLGYHQSRQIHHKDIKCKLKQEFQHRLNSLLKTQLNSRNIVKSINTYAIPVLTYSFGIINWTKSDLKTLQRTIHTTLTKSRKHHPRSCLQRLTLPRKEGGRGLIDLCNLHNSQITNLRQYFFNKMEASTLHKSIVQNDRHRTPLNLQDKTLQKNEKLTDNNTKIAEWTAKALHGRHRHDLSQPNVDSQASNAWLCRGELFPETEGFMLAIQDQVIETRNYRKYIIKNLTSDICRKCSSAPETIQHITGACKAIVQTDYKHRHDQVANIIHQQLAYQHKLVTNLQPYYKYSPETVLEDPTTKLYFDRAILTDRTIHYNRPDITLINKTNKTGYLIDIAVPNTHNLQTTIAEKLSKYTELKDEITRLWHLQKVTIVPIVLSTTGVIPKQLHQSINTLSLPPNIYFLLQKAAILNTCRTVRKFLQTEQDNIHTTTQQSTSTHSHTSPDVLPIPI

SEQ ID NO: 16604 - protein, 1452 aa, Griposia aprilina
MEMSNKRVYNLRSLPGERRGASGADARCHSMRTIGGEELSKRAPTNKIVTAGRSDLNRRAHYVEATADSMGDDTMSLFSSIPSTRPSYMTRRTASLSTTSTLDSVAQDVNLDSELAPTTSAPSTRRRWTPEMNKFILRTYLQLTSLDTDRRTYLEPLHLKFTEKFPNMQVSRQRIGDQRRAIINNKLLPQKTIDEIRNKVKDELDQLHFTLQSQNSGELRQQILAPTQSTQIQPTTPETHSTQNRTQTRMRWTSEHNEAIMRSYYRVTALGTNETTYRKPMYEDFINQFPSLAHLSEQRIADQRRAIINNNYLSDDKLNSLKLEVSEELGTDNTRNYNSETIAVITNINNANIQLTNNIDINSIEEPTPNVQITDNTELNSTDILPNPQVNLERDPIIDDSFQQAFQFYKDTSPTNRVYIPKQKPSKNLARIISYLNKIILPENINNNTDFHTFQTVIYCAAWTVAKVNGAKITLEPREITRGTKKEYKPKWRRRLEQKVYDLRSKIGRMTQFINGNRSRKLKKHVNKIIILYKIHTVHEEPNTQALHTLDTLKQKLSVVTGRLERYKACTLRKQQNTQFTQNEKLFYRNIRQATTNVQNNNPNDDELNTPNPETLQNFWAGIWEQPIHHNAQADWIHAELSSNTDIQTMAFEHISPQIFHKVLSRLHNWKAPGSDHIHSYWYKKFTAVHCYLYNFINSFIQDPKIIPSYITSGTTYMIPKDRNDLCNPAKYRPITCLQTLYKIITSCISEMIYEHIDANNILAEQQKGCRKYSQGCKEQLIIDSVILKRVQKYKTDLFTMYIDYKKAYDSVPHSWLLQVLEIYKIHPTVISFLKTMMTTWCTVLRLTTPTETIDTSPIKIQRGIFQGDALSPLWFCLALNPLSKILNATSLGIPLNYTATNRQTDPQEDVLNHLLYMDDIKLYAETESQLYELANLTETFTKDINMEFGIDKCKINSVRAGQNYQHQYTLGTGERIEPLDELDTYKYLGYNQSRQIHYKDTKKKLKQQFQHRLNTILKTQLHSRNTIKAINTFAIPVLTYSFGVINWTKTDLKNLQRKINTTMTKFRKHHPRSCIQRLTLPRKEGGRGLIDILNLHNRQITALRQYFFAKTESSLLHKLIAHNDQHFTPLNLKDTTKQKNENVIDDKTKCQEWTQKSLHGRHRQDLSQLNVDKDASNAWLDRGELFPETEGFMLAIQDQVIETKNYRKYIIKNLTTDTCRKCNSSPETIQHITSACKSIAQTDYKHRHDQVANVIHQKLAHQYKLVDTVVPYYKYKPETVLENPATKLYFDRAILTDRTIHFNRPDITLINKINRIGFLIDIAVPNTHNLQTTIAEKLSKYTELKDEITRLWHLQKVTIVPIVLSATGVIPKQLHQSLSSLNLPPNIYHLLQKAVILNTCRLVRKFLQCESDNLHQYSHSNIVSSTIQSTSENQAASNISSTLHPTDGHLA

SEQ ID NO: 16605 - protein, 1434 aa, Xestia c-nigrum
MEMSHKKVYNLRSLPGERRGAFGADAECHSMRTIGGDELSKRALTEKLVTAGRSKLNRRAHYVDATADSTGDDTISLFSSIPSTRPSYMARRTTSLSTTTTLDSVVQEVNLDSELAPATSAPKTRRRWTPEMNKFILRTYLQLTSLDTDRKTYLEPLHLKFIEKYPNMQVSRQRVGDQRRAIINNKLLTQKTIDEIEAEVREELNQLQLSSETQFPTNHTQSLGTTTQTQSTTLESPRTQNKTQTRMRWTNEQNEAIMRSFYRVTTLETNQTVYRKLMYEDFITKFPSLAHLTEQRIADQRRAIVNNKYISTERLNLLKLEISNELQLDNSNYNNLAIIVNDNTIETQPEGPIVQILNNDQVDVATDGLHNSQTSLEDRDPLIDATFQQTLQFYIATSPTNRMYIPKQKPSKNLARIVDYINKIILPENVNKDTDFQTLQTVIYSAAWTAAKANGAKLTLQPKEINTNTNQKKIYTPHWQRRLERKLIDLRSKIGRMTQFINGNRSRKIIKHVKRINKQYKIHTVHEEPNTQPEHTLDTLKQKLAVVTGRLQRYKACTQRKRQNTQFTLNEKLFYRNIRQVSTNVQNINPSDDDVQNDLDLQNLQNFWAGIWEHPIEHNTQTNWIQAELSNASTNIQPMTFEHISPQIFHEVLARLHNWKAPGSDQIHSYWYKKFTAIHSFLYNHINNFIQDPKTLPPYLTSGTTYMISKDRNDLSNPAKYRPITCLQTLYKIITSCISSLIYNHIDTNNILAEQQKGCRKFSQGCKEQLVIDSIILKKAQKSKTDLYSMYIDYKKAYDSVPHSWLVQILEIYRIHPTIITFLKTTMTTWSTVLRFNTSTDAADTRPIKILRGIFQGDALSPLWFCLALNPLSNILNSTGTGFPLRDTTHEEQHEVQNNTLNHLLYMDDIKLYAKSESQLNELANLTEQFTNDVKMEFGIDKCKINSVRAGQYYQHQYTLETGEHIDPLDEHDTYKYLGYNQSRQINHKETKQKLKQQFQHRLNTILKTQLYARNTIKALNTFAIPVLTYSFGIINWTKTDLKNLQRKINTTMTKFRKHHPRSCVQRLTLPRKEGGRGLIDIQNLHNKQITTLRQYFFTKAESSTLHKQIANNDIHFTPLNLKDKSEQKNEKVTDNKTKLLEWSQKSLHGRHYQDLSQINVDKEASNAWLKRGELFPETEGFIIAIQDQVIETKNYRKYIIKNLTTDTCRKCNRLPETILHITGACKSIAQTDYKHRHDQVANVIHQKLAYQYKLLDSIVPYYKYTPETVLENTSIKLYFDRGIFTDRTIHFNRPDITLINKTNKTGYLIDIAVPNTHNIQTTIAEKLSKYTELKEEITRIWHLQKVTIVPIVLSTTGVIPKQLHQSLTSLNLPSNTYHLLQKAVILNTCRLVRKFLQCESDNPPQTCFQPPIQIRNLPITTPLILNPADNHLA

SEQ ID NO: 16606 - protein, 1452 aa, Griposia aprilina
MEMSNKRVYNLRSLPGERRGASGADARCHSMRTIGGEELSKRAPTNKIVTAGRSDLNRRAHYVEATADSMGDDTMSLFSSIPSTRPPYMTRRTASLSTTSTLDSVAQDVNLDSELAPTTSAPSTRRRWTPEMNKFILRTYLQLTSLDTDRRTYLEPLHLKFTEKFPNMQVSRQRIGDQRRAIINNKLLPQKTIDEIRNEVKDELDQLHFTLQSQNSGELRQQILAPTQSTQIQPTTPETHSTQNRTQTRMRWTSEHNEAIMRSYYRVTALGTNETTYRKPMYEDFINQFPSLAHLSEQRIADQRRAIINNNYLSDDKLNSLKLEVSEELGTDNTRNYNSETIAVITNINNANIQLTNNIDINSIEEPTPNVQITDNTELNSTDILPNPQVNLERDPIIDDSFQQAFQFYKDTSPTNRVYIPKQKPSKNLARIISYLNKIILPENINNNTDFHTFQTVIYCAAWTVAKVNGAKITLEPREITRGTKKEYKPKWRRRLEQKVYDLRSKIGRMTQFINGNRSRKLKKHVNKIIILYKIHTVHEEPNTQALHTLDTLKQKLSVVTGRLERYKACTLRKQQNTQFTQNEKLFYRNIRQATTNVQNNNPNDDELNTPNPETLQNFWAGIWEQPIHHNAQADWIHAELSSNTDIQTMAFEHISPQIFHKVLSRLHNWKAPGSDHIHSYWYKKFTAVHCYLYNFINSFIQDPKIIPSYITSGTTYMIPKDRNDLCNPAKYRPITCLQTLYKIITSCISEMIYEHIDANNILAEQQKGCGKYSQGCKEQLIIDSVILKRVQKFKTDLFTMYIDYKKAYDSVPHSWLLQVLEIYKIHPTVISFLKTMMTTWCTVLRLTTPTETIDTSPIKIQRGIFQGDALSPLWFCLALNPLSKILNATSLGIPLNYTATNRQTDPQEDVLNHLLYMDDIKLYAETESQLYELANLTETFTKDINMEFGIDKCKINSVRAGQNYQHQYTLGTGERIEPLDELDTYKYLGYNQSRQIHYKDTKQKLKQQFQHRLNTILKTKLHSRNTIKAINTFAIPVLTYSFGVINWTKTDLKNLQRKINTTMTKFRKHHPRSCIQRLTLPRKEGGRGLIDILNLHNRQITALRQYFFAKTESSLLHKLIAHNDQHFTPLNLKDTTKQKNENVIDDKTKCQEWTQKSLHGRHRQDLSQLNVDKDASNAWLDRGELFPETEGFMLAIQDQVIETKNYRKYIIKNLTTDTCRKCNSSPETIQHITSACKSIAQTDYKHRHDQVANVIHQKLAHQYKLVDTVVPYYKYKPETVLENPATKLYFDRAILTDRTIHFNRPDITLINKINRIGFLIDIAVPNTHNLQTTIAEKLSKYTELKDEITRLWHLQKVTIVPIVLSATGVIPKQLHQSLSSLNLPPNIYHLLQKAVILNTCRLVRKFLQCESDNLHQYSHSNIVSSTIQSTSENQAASNISSTLHPTDGHLA

SEQ ID NO: 16607 - protein, 1453 aa, Cupitha purreea
MSNERRYNLRSLPGERRGASGADAGCHSMRTIGGEALSRRALTENTTTAGRSELNRRAHSVEATADSSGEDTISLFSSIPSTRPSYMTRRTSTLSSSTLTSVVQDVNPDAELAPTTSASTTRRRWTVEMNSFILRTYLLLTALDSDTNTYLEPLHLKFIEKFPDMQVSRQRVGGQRRAILRNKLLPQNIIDQIHTEVKEELNQMQINHTQHTQTSIGHPLELTPAQTLETQRTAPERHTRQIRTQTRMRWTSEQNEAVMRSYFRVTNLGTNETAHRKPMYLDFINSCPSLAHLSEQRIADQRRAIINNKYINSDRLNAIKLEVAEELTRSSQNPLTGITEVNLHSFHSSDDIDTLPANPIINIYNTIEASPNTETFSNIEVDTESIEIIPIPQPNFERDQLIDNTFQEAFEFYKTTSPVDRIYIPKQKPSKNLAKIINYLNTITIPETVNAETEFDKLQTVIYCAAWTAAKVNGAKITLQPKVVNPGTKQIYKPKWQKRLERKLNDFRIKIGRMTQFIKGNRSRKVIKHANKIIKQYKIHTIHEEPNTQAVHTLDTLQQKLSVANGRLKRYKACTQRKQQNTQFTNNEKLFYRNIRQATSNLQENNQIGDDSSTLDSETLHNFWARIWEQPIEHNADTDWIQNEVNNNNTNIQPMVFEHISPQIFHKVLSKSHNWKAPGSDHIHSYWYKKFTSIHGYLHTHINTFIQHPESIPSYITAGTTFMIPKDRNDLANPAKYRPITCLQTLYKIITSCIAELVYQHIDGNNILAEQQKGCRRLSQGCKEQLIIDSVILKKTQKTKSDLFSMYIDYQKAYDSVPHSWLVQILEIYKIHPTLIRFLRTMMTTWTTVLNLTTASETLHTNPIKIQRGIFQGDALSPLWFCLALNPLSNILNSTSLGICLNNIATDGQILTQNNVLSHLMYMDDIKLYANTESELHHLANLTEQFSNDIRMQFGIDKCKINSVRAGQNYQHHYSLGNGAQIEPLNEQETYKYLGYAQSRQIHFKDTKNKLKQQFQHRLNTILKTQLNSRNTIKAINTFAIPVLTYSFGIINWTKTDLKNLQRKINTTLTKFRKHHPRACIQRLTLPRKEGGRGLIDILNLHNRQIATLRQYFFSKTTSSTLHKLITQNDKHFTPLNLTDINSQKNEKIIDDKTKLLEWSQKSLHGRHRQDLCQINVDKEASNAWLNRGELFPETEGFMTAIQDQIIETKNYRKHIIKNLTNDTCRKCNSAPETIQHITGACKSIAQTDYKHRHDQVANVIHQKLAHQYKLIDSVVPYYKYNPETVLESPTAKLYFDRAILTDRTIHFNRPDITLIDKVHRIGFLIDIAVPNTHNLQSTIAAKLSKYTELKDEISRLWHLQKVAIVPIVLSTTGVIPKQLHQSLNSLNLPPNTYHLLQKAAILNTCRLVRMFLKCELDTNSNTNTQTQFVTLSNRLNRNEPNSSINPTDEHLA

SEQ ID NO: 16608 - protein, 1388 aa, Xestia xanthographa
MLQPNPRAMIPIHYSHPSLQLAPSYMTRRTTTLSTTTTLDSVVQEVNLDCELAPATSAPRTRRRWTPEMNKFILRTYLQLTSLDTDRKSYLEPLHLKFIEKYPNMQVSRQRVGDQRRAIINNKLLTQKTIDEIEVEVREELNQLQISSQTQFPTNHTQSTATISQTQSTTLDTLRAQNKTQTRMRWTNEQNEAIMRSYYRVTTLETNQTVYRKLMHEDVIKKIPSLAHLSEQRIADQRRAIVNNKYISNERLNSLKLEICNELQLENSNHNNVAVTTEVNSIDTHSNANSIELYFTENPIVQTLNNDQLDIATDILHNPQTSLDRDLLIDETFQQTHQFYIATSPTNRMYIPKQKPSKNLARIVDYINKITLPENVNKDTNFHTLQTAIYSAAWTAAKVNGAKLTLQPREMNTNTNTKKIHTPHWQRRLERKLKDLRSKIGRMTQFINGNRSRKIIKHVKRIAKQYEIHTIHEAPNTQAEHTLDTLKQKLAVVSGRLQRYKACTQRKQQNNQFIHNEKLFYRNLRQTTTNVHDNNTTNAESHTNLDPEALQSFWAGIWEKPIEHNTQAEWIQTELTNSNTNIQPMSFEQISPQIFHGVLARLHNWKAPGSDHIHSYWYKKFTAVHCFLYNYINNFIQDPKSIPSYLTLGTTYMISKDPNDLSNPAKYRPITCLQTLYKIITSCLSELIYTHTDTNNILAEQQKGCRKFSQGCKEQLIIDSIILKKAQKSKTDLYSMYIDYKKAYDSVPHSWLVQILEIYRIHPTIITFMKTIMESWSTVLRINSSKETADTRPIKIQRGIFQGDTLSPLWFCLALNPLSNILNSTCTGFPLEYTASDGQHEVQNNALNHLLYMDDIKLYAKSESQLNELANLTEQFTNDIKMEFGIDKCKINSVRAGQYYQHQYTLETGEHIEPLDEHDTYKYLGYNQSRQINHKETKQKLKQQFQHRLNTILKTQLYSRNTIKAVNTYAIPVLTYSFGIINWTKTDLKNLQRKINTTMTKFRKHHPRSCVQRLTLPRKEGGRGLIDIQNLHNNQITTLRQYFFTKAESSALHKQIADNDHHFTPLNLKDKSEQKNEKLTDNKTKLLEWSQKSLHGRHYQDLSQINVDKEASNAWLKRGELFPETEGFMLAIQDQVIETKNYRKNIIKNLSNDMCRKCNSSPETIQHITGACKSIAQTDYKHRHDQVANVIHQKLAHQYKLVDSIMPYYKYIPEPVLENPSTKLYFDRGIFTDRTIHFNRPDITLINKTNKTGYLIDIAVPNTHNLQTTIAEKLSKYIELKDEITRLWHLQKVTIVPIVLSTTGVIPKQLHQSLTSLNLPSNTYHLLQKAVILNTCRLVRKFLQCESDNPHQHSHLNIPSSLSQATTQNRNVPTNTSITVNPADNHLA

SEQ ID NO: 16609 - protein, 1450 aa, Noctua janthe
MEMSKRVYNLRSLPGERRGASGADAGCHSMRTIGGEELSKRAPTEKIVTAGRSELNRRAHNVGATADSTGDDTTSLFSSIPSTRPSYMTRRRTSLSTTTTLDSVVQEVNLDSELAPTTSAPKTRRRWTPEMNKFILRTYLQLTSLDTDRKTYLEPLHLKFIEKYPNMQVSRQRVGDQRRAIINNKLLTQTTIDEIKAEVREKLNQLQLSAQTQFSTNHTHSTATTTQTQSTTPETPRTQNKTQTRMRWTNAQNEAIMRSYYRVTTLETNQTVYRKLMHEDFIRKFPSLAHLSEQRIADQRRAIVNNKYISTERLNSLKLEISNELQLDNNNYNNLAITVNDNATETLSNANNINLYSTEDPLVQISNNDQVDMATDGLHNSQTSLEERDLLIDATFQQTLQFYIATSPTNRMYIPKQKPSKNLARIVDYINKITLPENVNKDTDFHKLQTAIYSAAWTAAKVNGAKLTLLPREMNTNTNTKTIYTPHWQRRLERKLKDLRSKIGRMTQFINGNRSRKILKHVKRINKQYKIHTIHEEPNTQPEHTLDTLKQKLAVVTGRLQRYKACTQRKRQNTQFIFNEKLFYRNIRQVSTNIQNNNPSDDVVHNLDLETLQNFWAGIWEYPIEHNTQADWIQTEVANANTNIQPMAFEHISPQIFHEVLARLHNWKAPGSDKIHSYWYKKFTAVHSFLYNHINNFIQDPKTIPPYLTSGSTYMIPKDRNDLSNPAKYRPITCLQTLYKIITSCVSSLIYQHTDTNNILAEQQKGCRKFSQGCKEQLIIDSIILKKAQKSKSDFYSMYIDYKKAYDSVPHSWLVQILEIYKIHPTIITFLKTTMTTWSTVLRFNTSTEAADSRPIKILRGIFQGDALSPLWFCLALNPLSNILNSTFAGFPLEDTTLDGQREVQNNTLNHLLYMDDIKLYSKTESQLNELANLTEQFTNDVKMEFGIDKCKINSVRAGQYYQHQYTLETGEHIDPLEEHDTYKYLGYTQSRQINHKETKQKLKQQFQHRLNTILKTQLYSRNTIKALNTFAIPVLTYSFGIINWTKTDLKNLQRKINTTMTKFRKHHPRSCVQRLTLPRKQGGRGLIDIQNLHNKQITTLRQYFFTKAESSTLHKQIANNDNHFTPLNLKDKSEQNNEKITDNKTKLLEWSQKSLHGRHYQDLSQINVDKEASNAWLKRGELFPETEGFMLAIQDQVIETKNYRKYIIKNLSTDTCRKCNSSPETIQHITGACKSIAQTDYKHRHDQVANVIHQKLAHQYKLVDSIVPYYKYTPETVLENPSTKLYFDRGIFTDRTIHFNRPDITLINKTNKTGYLIDIAVPNTHNLQTTIAEKLSKYTELKEEITRLWHLQKVTVVPIVLSTTGVIPKQLHQSLTSLNLSSNTYHLLQKAAILNTCRLVRKFLQCESDNPHQHIHLNIPSPLFQATTQNRNVPITTSVTLHPADKHLA

SEQ ID NO: 16610 - protein, 1437 aa, Agrochola circellaris
MSNKRVYNLRSLPGERRGASGADARCHSMRTIGGEELSKRAPTNKIVTAGRNELNRRAHYVEATADSTGDDTISLFSSIPSTRPSYMTRRTASLSTTSTLDSVVQEVNLDSELAPTTSAPSTRRRWTPEMNKFILRTYLQLTALDTDRKTYLEPLHLKFIEKFPNMQVSRQRIGDQRRAIINNKLLPQTTIEEIRNDVKEELDRLHFNHSIQQSQNSIDHVQQILTPTQSTQMQPRTTEAHNTKNRTQARMRWTNEQNEAIMRSYYRVTDLGRNETVYRRRMYEDFINTFPDLAHLSEQRIADQRRAIINNNYITSDRLNSIKLEISEELQLDNLNFSNFTGETTIVNPNHNNNSETQFLYSIDINSTQESSVTLNHTEINIAEEMVPNQEINLDRDPLIDETFQQAFQYYKEINPTNRIFIPKQKPSKKLARIVSYLNKIILPENINKETDFYTLQTAIYCAAWTAAKVNGAKLTLQPRVVTQMAKKQYKPKWETRLERKLNDLRSKIAKMTQFINGIRSSKIIKHVNKIIEEYRIHTVHEEPNTQAVHTLDTLKQKLSVVTGRLQRYKACNQRKLQNTQFTHNEKLFYRNIRQTTSNVQDNNPNDDDHNNPDSETLQNFWAEIWEQPIEHNAQADWIQTELTNSNTNIQAMSFEHISPEIFHKVLSRLHNWKAPGSDNIHSYWYKKFTSIHSFLYNHINTFIQDPKTIPSYVTSGTTFMIPKDRNDLSNPAKYRPITCLQTLYKIITSCISELIYQHIDTNNILAEQQKGCRKFSQGCKEQLIIDSVILKKVQKSKTDLFSMYIDYKKAYDSVPHSWLIKILEIYKIHPTIVTFLKAMMTTWTTVLRLTSSTKTVDTSPIKIQRGIFQGDALSPLWFCLALNPLSNILNATTLGIPLKNITTQGHTEVQKIELNHLLYMDDIKLYAKSETQLYELANLTEQFSNDIKMEFGIDKCKINSIRAGQNYQHQYTLGTGEHIEPLEEQDSYKYLGYTQSRQIHYKETKQRLTLQFQHRLNTILKTQLYSRNTIKAINTFAIPVLTYSFGIINWTKTDLKNLQRKINTTMTKFRKHHPRSCLQRLTLPRKEGGRGLIDILNLHNRQIKALRQFFFSKTETSILHKIITHNDQQLTPLNLKDTSEQRNEKLIDDKIKLLDWTQKSLHGRHRQDLCHINVDKEASNAWLNRGELFPETEGFMLAIQDQVIETKNYRKFIIKNLNNDTCRKCNSSPETIQHITGACKSIAQTDYKHRHDQVANIIHQKLAQQYKLIDSVTPYYKYNPETVLENPSTKLYFDRAILTDRTIHFNRPDITLINKINKTGYLIDIAIPNTHNLQTTIAEKLSKYTELKDEVARLWHLQKVTIVPIVLSTTGVIPKQLHQSLISLNLPPNTFHLLQKAAILNTCRLVRKFLQCESENPHQNINTLPSSVQFPARDHT

SEQ ID NO: 16611 - protein, 1451 aa, Noctua pronuba
MEMIKRVYSLRSLPGERRGASGADAGCHSMRTIGGAELSKRARTDKIVTAGRSELNRRAHNVEATADSTGDDTTSLFSSIPSTRPSYMTRRTTSLSTTTTLDSVVQEVNLDSELAPATSAPRTRRRWTPEMNKFILRTYLQLTSLDTDRKTYLEPLHLKFIEKYPNMQVSRQRVGDQRRAIINNKLLTQTTIDEIEAEVREELNQLQLSAQMQFPTNHTHSTATITQTQSTTLEIPTAQSKTKTRMRWTNEQNEAIMRSYYRVTTLETNQTVYRKLMHEDFIRKFPSLVHLSEQRIADQRRAIVNNKYISTERLNLLKLEISNELQLDNSNYNNLAITVNDNTTETQFNANNIDINSTEDPIVQILNNDQVDVGTDGLHTSQTSSEERDLLIDATFQQTLQFYIETSPTNRMYIPKQKPSRNLARIVDYINKITLPEIVNKDTDFHTLQTAIYSAAWTAAKVNGAKLTLLPREMNTNTNTKKIYTPHWQRRLERKLKDLRSKIGRMTQFINGNRSRKIIKHVKRINKQYNIHTIHEEPNTQPEHTLDTLKQKLAVVTGRLQRYKACTQRKRQNTQFTHNEKLFYRNIRQVSTNAQNNNPSDDIGHTNLDLETLQHFWAGIWEHPIEHNTQADWIKAEVSNANTNIQPMTFEQISPQVFHEVLARLHNWKAPGSDQIHSYWYKKFTAVHSFLYNHINNFIQDPKTIPPYLTSGTTYMIPKDHNDLSNPAKYRPITCLQTLYKIITSCVSSLIYQHTDTNNILAEQQKGCRKFSQGCKEQLIIDSIILKKAQKSKTDLYSMYIDYKKAYDSVPHSWLLQILEIYKIHPTIITFLKTTMKTWSTVLRFNTSTDAADTRPIKILRGIFQGDALSPLWFCLALNPLSNILNSTCAGFPLENTARDGQREVQNNTLNHLLYMDDIKIYAKSESQLNELANLTEQFTNDVKMEFGIDKCKINSVRAGKYYQHQYTLETGEQIDPLEEHDTYKYLGYNQSRQINHKETKQKLKQQFQHRLNTILKTQLYSRNTIKALNTFAIPVLTYSFGIINWSKTDLKNLQRKINTTMTKFRKHHPRSCVQRLTLPRKEGGRGLIDIQNLHNKQITTLRQYFFTKAETSTLHEQIADNDNHFTPLNLKDKSEQNNEKVTDNKTKLLEWSQKSLHGRHYQDLSQINVDKEASNAWLKCGELFPETEGFILAIQDQVIETKNYRKYIIKNLSNDTCRKCNSSPETIQHITGACKSIAQSDYKHRHDQVAKVIHQKLAHQFKLVDSIVPYYKYTPETVLENPSTKLYFDRGIFTDRTIHFNRPDITLINKTNKTGYLIDIAVPNTHNLQTTIAEKLTKYIELKEEITRLWHLQKVTIVPIVLSTTGVIPKQLHQSLTSLNLPSNTYHLLQKAVILNTCRLVRKFLQCESDNPHQHIHLNIPSSLFQATTQNRNVPITTSLALNPADNHLA

SEQ ID NO: 16612 - protein, 1380 aa, Schrankia costaestrigalis
MENFRKKYNLRPKPGTRRQITQSTTEPIEITSDSSSSDTRSLFSSVASTCPSYLTRRASSLSSSTSNSVVQEVITDLELVPTSDLPTKRRRWTAEMNQFILRTYLQLTALETDTKTYVEPLHIKFIEKYPNMDVSRQRVGDQRRAIINSKLLPQTVIDQIYNEVKENLGKHTEETHSSSLQVNDNMSHTPPTQHSTQYSPHTSNTLHSSINRDRRMRWTTEHNEFIMRTYYEVTNLGTNQTAYRKLLHERFISNFPSLSFITEQRIADQRRVIVLNKYLSIDRLDHIKKEVAEKLQVGNNTSLNISTEQPIPNHSETNQIQDTHIDSIRTIENETLNLTTNTETQVQIDETFHQATQFFENSDPTSRSYIPKQKATKKLATIVNYINETVLPKYVTQETSFDSLQTAIYCAAWTAAKINGTKLSLQVDKNQKEKLKHKPRWQIRLEKKLCDLRTKIGRLTQFQNGNRSRNVVKHTNTIIEQYKIHTTHEEPNTQIIHTLDTLKQKLAVVTGRLQRYKACTLRKQQNTQFMHNEKLFYRNVKQETTNIHSNHSNTNEQNVPTSENLHDFWANIWSTPIQHSSEAEWIQTECRNSNTTIQSMTFEHITPEIFLNVIHNIHNWKSPGSDNIHSYWYKKFTTIHSHLLSHINTFVEEPKLIPTYLTIGKTYMIPKDNENLADPSKYRPITCLQTLYKIITSCLSQLVYQHVSSNNILAEQQKGCKKYSQGCKEQLIIDSVILNQVQKSKSDLFSMYIDYKKAYDSVPHSWLIHVLELYKIHPKLIVFLKSLMSKWATVLTLNTPSKTIETNPIKIQRGIFQGDALSPLWFCLALNPLSNILNSTSLGYSFKDIVPDEQNIAQNNVVSHLLYMDDIKLYAKTETELNELARLTEQFTNDIKMEFGIDKCKINSIKAGQNYQHHYVLNTGEHINPLDEYSSYKYLGYNQSLQIQHKNIKQTLTQQFQHRLNTILKTQLNAINTVKAINTFVIPLLTYSFGVIRWTKTELKNLQRKINTTMTKFRKNHPRSSVHRLTLPRSEGGRGIIDISNLHNRQISGLRKYFFAKSQSSALHKYTAHNDHKFTPLNLKNPTLQINEQLIDDKTKIDDWTNKSLHGRHRHDLCQQNVDKEASNAWLSRGELFPETEGFIIAIQDQVIETKNYRKYIIKNLLSDTCRKCSSASETIQHITGACKSIAQTDYKHRHDQVANIIHQKLAQQYNFIDTLTPYYKYNPETVLDNSTTKLYYDRAILTDRTIHFNRPDITLINKVTRTGYLIDIAVPNTHNLQTTIAEKLTKYIELKDEITRLWNLQKVTIVPIVISTTGVIPKQLHQSIKTIELPTNTYNLLQKAVILNTCRIVRKFLQCDSDTTPNAHNITHTTTTVNS

SEQ ID NO: 16613 - protein, 850 aa, Hypena proboscidalis
MNGNRSQNVLKHAHRILEQYRTHTIHEEPNSQIIHTLDTLKQKLSVVNGRLHRYKACTLRKNQNSQFTNNEKHFYRNLRQATANIQENITNDDASNIPSREELQNFWARIWENPIQHNNQAAWIQTEGTKIRSEMEYHHIPPEIFQNVLRNVHNWKAPGSDYIHSYWYKKFTAIHTNLYHHLNTFIEDQNTIPSYLASGKTFMIPKDRNDPSNPAKYRPITCLQTLYKIMTSCISELIYQYIDANNILAEQQKGCRKFSQGCKEQLTIDSVILKQVQRTRSNLFSMYIDYKKAYDSVPHSWLVHVLELYKIHPIIIAFLRTIMTKWTTVMRLTTATKIVETSSIQIQRGIFQGDALSPLWFCLALNPLSNILNSTKLGYPLQYSEQSGQQNLRQNVLNHLLYMDDIKLYANTENQLYELANLTEQFSYDIHMEFGIDKCKVNSVKTGQNYQHQYTLGTGERIESLEEQDTYKYLGYHQSLQIKYKDTKLKLTQQFQHRLNAILKTQLNSKNTVKAINTYVIPLLTYSFGIIFWSKTELKNLQRRINTTMTKHRKHHPRACLQRLTLPRKDGGRGLIDILNLHNKQITTLRNYFFAKSETSILHTSIAQNDNKLTPLNLKDSTKQKNEVVIDDKSKLADWTQKALHGRHRQDLCQQNVDKEASNAWLNRGELFPETEGFMIAIQDQVIETKNYRKYIIKTLRTDTCRKCNSCPETIQHITGACKSIAQTDYKHRHDQVANIIHQKLAHQYKFVDSIVPYYKYNPQTVLENASTKLYFDRAILTDRTVHFNRPDITLINKITKTGFLIDIAVPNTHNLQTTIAEKLTKYLELKDEITRLWHVGIFPTIIITN

SEQ ID NO: 16614 - protein, 1449 aa, Noctua janthe
MEMSKRIYNLRSLPGERRGASGADAGCHSMRTIGGQELSKRAPTDKIVTAGRSELNRRAHNVEATADSTGDDTTSLFSSIPSTRPSYMTRRTTSLSTTTTLESAVQEVDLDSELAPTTSAPRTRRRWTPEMNKFILRTYLQLTSLDTDRKTYLEPLHLKFIEKYPNMQVSRQRVGDQRRAIINNKLLPQKTIDEIEAEVRDELNQLQLSAQTQFPTSHTQSIVTTSQTQATTLETPRVHNKTQTRMRWTNEQNEAIMRSYYRVTTLETNQTVYRKLMHEDFIRKFPSLAHLSEQRIADQRRAIVNNKYINTERLNSLKLEISNELQLENSNHNNIVITVDVNSIDTQSNANNIGLYSIENPIAQTLNNGQADIETDILHNPQTSLDRDLLIDETFQQTHQFYIESPTNRIYIPKQKPSKNLARIVDYINKIILPENVNKDTDFHTLQTAIYSAAWTAAKVNGAKLTLQPREMNINTNTKKIHMPHWQRRLERKLKDLRSKIGRMTQFINGNRSSKIIKHVKSIAKQYEIHTIHEAPNTQAEHTLDTLKQKLAVVTGRLQRYKACTQRKQQNNQFIQNEKLFYRNLRQTSTNVQNSNTNNADSHNNLDPEDLQSFWAGIWEQPIEHNTQAEWIQTELTNSSTNIQPMLFEQISPQIFHEVLARLHNWKAPGSDHIHSYWYKKFTAVHSFLYNYINNFIQDPKSIPSYLTSGTTYMMSKDPNDLSNPAKYRPITCLQTLYKIITSCLSELIYIHTDTNNILAEQQKGCRKFSQGCKEQLIIDSIILKKAQKIKTDLYSMYIDYKKAYDSVPHSWLVKVLEIYRIHPTIITFLKTIMETWSTVLRINTSKETADTYPIKIQRGIFQGDALSPLWFCLALNPLSNILNSTRTGFPLEYIASDGQPEVQNNAINHLLYMDDIKLYAKSESQLNELANLTEQFTNDIRMEFGIDKCKINSVRAGQYYQHQYTLETGEHIEPLDEHDTYKYLGYNQSRQINHKETKQKLKQQFQHRLNTILKTQLYSRNTIKALNTFAIPILTYSFGIIKWTKTDLKNLQRKINTTMTKFRKHHPRSCVQRLTLPRKEGGRGLIDIQNLHNKQVTTLRQYFFTKAESSILHKEIANNDHHLTPLNLKDKSEQKNEKVTDNKTKLLEWSQKSLHGRHYQDLSQINVDKEASNAWLKRGELFPETEGFMLAIQDQIIETKNYRKFIIKNLSTDMCRKCNSSPETIQHITGACKSIAQTDYKHRHDQVANVIHQKLAHQYKLVDSIVPYYKYIPETVLENPSTKLYFDRGIFTDRTIHFNRPDITLINKTNKTGYLIDIAVPNTHNLQTTIAEKLSKYTELKEEITRLWHLQKVTIVPIVLSATGVIPKQLHQSLTSLNLPSNTYHLLQKAVILNTCRLVRKFLQCESDNPHQHIHFNIPSCLIQATTQNRIVPTTTSLTLNPADNHLA

SEQ ID NO: 16615 - protein, 803 aa, Hydraecia micacea
MVFEHISPEIFHKVLTRLHNWKAPGSDHIHSYWYKKFTAIHCYLYNFINSFIQDPKSIPSYIMSGTTFMIPKDRKDLSNPAKYRPITCLQTFYKIITSCISELIYEHIDANNILAEQQKGCRKYSQGCKEQLIIDSVVLKKVQKSKSDLFTMYIDYKKAYDSVPHSWLVQVLEIYKIHPSVVTFLKTVMKTWTTVLRLTTPTETIDTSPIKIQRGIFQGDALSPLWFCLALNPLSKILNATSLGISLNSTATDGQDETQDGILNHLLYMDDIKLYAKTESQLNELANLTEKFTNDIKMEFGIDKCKINSVRAGQNYQHQYILETGEQIEPLDEQDSYKYLGYIQSSQIHYKETKHKLKQQFQHRLNTILKTQLYSRNTIKAINTFAIPVLTYSFGIINWTKTDLKNLQRKINTTMTKFRKHHPRSCLQRLTLPRKEGGRGLIDILNLHNRQITTLRKYFFDKTASSTLHKLIAQNDQHLTPLNLKDTTEQQNERVTDDKAKCLEWTQKSLHGRHRQDLCQLNVDKDASNAWLNRGELFPETEGFMLAIQDQVIETKNYRKYIIKNLTNDTCRKCNSSPETIQHITGACKSIAQTDYKHRHDQVANVIHQKLAHKYKFIDSIAPYYKYNPETVLENPTTKLYFDRAILTDRTIHFNRPDITLINKVDKTGFLIDIAVPNTHNLQTTIAEKLSKYTELKDEITRLWHLQKVTIVPIVLSTTGVIPKQLHQSLSSLNLPSNTYHLLQKAVILNTCRLVRKFLQCESDNMHYYSHSNIVSANIQPTADNHAVSNITPTLNPADEHLA

SEQ ID NO: 16616 - protein, 1406 aa, Vanessa cardui
MEQSNNNRYNLRSLLGGRRGAPGAGAGCYSSRDTGGAALSRRALATQHATAGRRELNKRAHDEDATAESSGDDTRSLFSSIPSTRPSYMTRRASTLSSATTVDGVVRDVNLDSELAPTSAATRTRRRWTPEMNMFILRTYLQLTALETDTKNYLEPLHLKFIEKYPDMQISRQRVGDQRRAIVRNRLLPQNIIDRIHDEVKEDLKHLQTQTNPPVSLTQETHYSQTRMRWTNEQNEGLIRSYYRITHLETNRTNYRQQLHENFIATFPSLSHLSEQRIADQRRAIIVNKYICDNRLNEIKQQVAAELSINTKDNNTNTNEQRTEQITYSTQNTNLDSSDLSFLNNIELDFSKDFIPDRHQLDRDSLIDETFLQAFRFFKDTDPTNRSYIPKQKPSKKLAKIVHYLNEIVLPEKVNVDTDFNTLQTVIYCGAWTAAKVNGAKISLEPYQRSRSAQNDHKPYWQRRLERRLENLRTKIARITHFINGNRNRHLERQVKNIVEQYKIHSVHEEPNTQLTQTLDTLKQKLAVIAGRLRRYKDCSLRKQQNSLFFNNEKQFYRNLKQTTTNNHDNNSNLDDTPDPQDLHKFWAEIWEQPVCHNHEADWIESEIRKNNAATSEMVFEHIPIETYKKVLQNLHNWKAPGSDFIHSYWYKKFTNIHGYLHNHLNKFIEDPSTIPSYITLGTTYMIPKDRTNLSNPAKYRPITCLQTLYKILTSCLSELIYKHINENNILAEQQKGCRKYSQGCKEQLIIDSVILQRVQKSKSDLFTMYIDYKKAYDSVPHSWLLQILEIYKIHPKIINILKASMTNWATQLKLTTATTTIETNTIQIQRGLFQGDALSPLWFCLALNPLSNILNDSAIGYNLTCTEDTNGRTDNAENINHLLYMDDIKLYANSEHRLNELANITEQFSDDIKMDFGIDKCRINSFKSGHYYPHLYSLKSGEQIQPLDEGETYKYLGYNQSRQILHTDTKVKLKQQFRHRLNAILKTQLYSRNTVKAINTFAIPILTYSFGIINWTLSDLKALQRTINTTMTKFRKHHPRSCLQRLTLPRTEGGRGLIDITNLHNKQITSLRQYFFNKAESSPLHKAIVKNDRKFTPLNLIDNTSQKNEKLTDDKTKHAEWAGKSLHGRHYHDLNQPNVDKKASNAWLSRGDLFPETEGFIIAIQDQVIETKNYQKHITKTLHSDTCRKCNSCPETIQHITGACKTIAQTDYKHRHDQIANIIHQKLAHQQNLIASIQPYYKYIPESVLENSTSKLYFDRAILTDRTIHYNRPDITLINKNNKTGYLIDIAVPNTHNLQTSIAEKLTKYTELKDEITRLWHLQKVIIVPIVISTTGVIPKQLHKSIKTLNLPPNTYTLLQKAAILNTCRIVRKFLQTENENPIESTSQPTPQTTALTSNPVVHLA

SEQ ID NO: 16617 - protein, 851 aa, Schrankia costaestrigalis
MHNEKLFYRNVKQETTNIHSNHSNTNEQNVPTSENLHDFWANIWSTPIQHSSEAEWIQTECRNSNTTIQSMTFEHITPEIFLNVIHNIHNWKSPGSDNIHSYWYKKFTTIHSHLLSHINTFVEEPKLIPTYLTIGKTYMIPKDNENLADPSKYRPITCLQTLYKIITSCLSQLVYQHVSSNNILAEQQKGCKKYSQGCKEQLIIDSVILNQVQKSKSDLFSMYIDYKKAYDSVPHSWLIHVLELYKIHPKLIVFLKSLMSKWATVLTLNTPSKTIETNPIKIQRGIFQGDALSPLWFCLALNPLSNILNSTSLGYSFKDIVPDEQNIAQNNVVSHLLYMDDIKLYAKTETELNELARLTEQFTNDIKMEFGIDKCKINSIKAGQNYQHHYVLNTGEHINPLDEYSSYKYLGYNQSLQIQHKNIKQTLTQQFQHRLNTILKTQLNAINTVKAINTFVIPLLTYSFGVIRWTKTELKNLQRKINTTMTKFRKNHPRSSVHRLTLPRSEGGRGIIDISNLHNRQISGLRKYFFAKSQSSALHKYTAHNDHKFTPLNLKNPTLQINEQLIDDKTKIDDWTNKSLHGRHRHDLCQQNVDKEASNAWLSRGELFPETEGFIIAIQDQVIETKNYRKYIIKNLLSDTCRKCSSASETIQHITGACKSIAQTDYKHRHDQVANIIHQKLAQQYNFIDTLTPYYKYNPETVLDNSTTKLYYDRAILTDRTIHFNRPDITLINKVTRTGYLIDIAVPNTHNLQTTIAEKLTKYIELKDEITRLWNLQKVTIVPIVISTTGVIPKQLHQSIKTIELPTNTYNLLQKAVILNTCRIVRKFLQCDSDTTPNAHNITHTTTTVNS

SEQ ID NO: 16618 - protein, 1336 aa, Hypena proboscidalis
MNKFILRTYLQLTALDIDTKTYLEPLHIKFLEKFPNMEVSRQRVGDQRRAIVRSKLLPQETIDEIYNEVKEELQQLQHNSNINLTRTSFRESQLTPTRTQTFTNTTQTRMRWTTEQNEAIMRAYYRITHLGTNETAYRKLMHEDFISKFPTLAHLSEQRIADQRRAIINNQYISKDRLNLLKQEIAAELETNVINTTTLDSNALNNNNGEISEDNIQVTIADESQLLAELPLNAEINTGRQFKIDEFFQQAFQFYENTEPTNRTYIPRQKPSKNLAKIVNYLNEIIIPENIDGNTDFSHLQTVVYCAAWTAAKANGAKLKLQTEENLQREHRNRKPNWQRRLENKLEDLRSKISRLTQFMNGNRSQNVLKHAHRILEQYRTHTIHEEPNSQIIHTLDTLKQKLSVVNGRLHRYKACTLRKNQNSQFTNNEKHFYRNLRQATANIQENITNDDASNIPSREELQNFWARIWENPIQHNNQAAWIQTEGTKIRSEMEYHHIPPEIFQNVLRNVHNWKAPGSDYIHSYWYKKFTAIHTNLYHHLNTFIEDPNTIPSYLASGKTFMIPKDRNDPSNPAKYRPITCLQTLYKIMTSCISELIYQYIDANNILAEQQKGCRKFSQGCKEQLTIDSVILKQVQRTRSNLFSMYIDYKKAYDSVPHSWLVHVLELYKIHPIIIAFLRTIMTKWTTVLRLTTATKIVETSSIQIQRGIFQGDALSPLWFCLALNPLSNILNSTKLGYPLQYSEQSGQQNLRQNVLNHLLYMDDIKLYANTENQLYELANLTEQFSYDIHMEFGIDKCKVNSVKTGQNYQHQYTLGTGERIESLEEQDTYKYLGYHQSLQIKYKDTKLKLTQQFQHRLNAILKTQLNSKNTVKAINTYVIPLLTYSFGIIFWSKTELKNLQRRINTTMTKHRKHHPRACLQRLTLPRKDGGRGLIDILNLHNKQITTLRNYFFAKSETSILHTSIAQNDNKLTPLNLKDSTKQKNEVVIDDKSKLADWTQKALHGRHRQDLCQQNVDKEASNAWLNRGELFPETEGFMIAIQDQVIETKNYRKFIIKTLRTDTCRKCNSCPETIQHITGACKSIAQTDYKHRHDQVANIIHQKLAHQYKFVDSIVPYYKYNPQTVLENASTKLYFDRAILTDRTVHFNRPDITLINKITKTGFLIDIAVPNTHNLQTTIAEKLTKYLELKDEITRLWHLQNVTIVPIVLSTTGIIPKQLHHSLNTLQLSPYTYNLMQKAVILNTCRLVRKFLQCEPDNTQPVTNEQTPTIITSAHTLTGTTLAHTFTTTTPAHTSTTTHTSTTAHTLTITNLAHTSTITDSVHNNNSNRSTEGHLA

SEQ ID NO: 16619 - protein, 1452 aa, Griposia aprilina
MEMSNKRVYNLRSLPGERRGASGADARCHSMRTIGGEELSKRAPTNKIVTAGRSDLNRRAHYVEATADSMGDDTMSLFSSIPSTRPSYMTRRTASLSTTSTLDSVAQDVNLDSELAPTTSAPSTRRRWTPEMNKFILRTYLQLTSLDTDRRTYLEPLHLKFTEKFPNMQVSRQRIGDQRRAIINNKLLPQKTIDEIRNEVKDELDQLHFTLQSQNSGELRQQILAPTQSTQIQPTTPETHSTQNRTQTRMRWTSEHNEAIMRSYYRVTALGTNETTYRKPMYEDFINQFPSLAHLSEQRIADQRRAIINNNYLSDDKLNSLKLEVSEELGTDNTRNYNSETIAVITNINNANIQLTNNIDINSIEEPTPNVQITDNTELNSTDILPNPQVNLEKDPIIDDSFQQAFQFYKDTSPTNRVYIPKQKPSKNLARIISYLNKIILPENINNNTDFHTFQTVIYCAAWTVAKVNGAKITLEPREITRGTKKEYKPKWRRRLEQKVYDLRSKIGRMTQFINGNRSRKLKKHVNKIIILYKIHTVHEEPNTQALHTLDTLKQKLSVVTGRLERYKACTLRKQQNTQFTQNEKLFYRNIRQATTNVQNNNPNDDELNTPNPETLQNFWAGIWEQPIHHNAKADWIHAELSSNTDIQTMAFEHISPQIFHKVLSRLHNWKAPGSDHIHSYWYKKFTAVHCYLYNFINSFIQDPKIIPSYITSGTTYMIPKDRNDLCKPAKYRPITCLQTLYKIITSCISEMIYEHIDANNILAEQQKGCRKYSQGCKEQLIIDSVILKRVQKYKTDLFTMYIDYKKAYDSVPHSWLLQVLEIYKIHPTVISFLKTMMTTWCTVLRLTTPTETIDTSPIKIQRGIFQGDALSPLWFCLALNPLSKILNATSLGISLNYTATNRQTDPQEDVLNHLLYMDDIKLYAETESQLYELANLTETFTKDINMEFGIDKCKINSVRAGQNYQHQYTLGTGERIEPLDELDTYKYLGYNQSRQIHYKDTKQKLKQQFQHRLNTILKTQLHSRNTIKAINTFAIPVLTYSFGVINWTKTDLKNLQRKINTTMTKFRKHHPRSCIQRLTLPRKEGGRGLIDILNLHNRQITALRQYFFAKTESSLLHKLIAHNDQHFTPLNLKDTTKQKNENVIDDKTKCQEWTQKSLHGRHRQDLSQLNVDKDASNAWLDRGELFPETEGFMLAIQDQVIETKNYRKYIIKNLTTDTCRKCNSSPETIQHITSACKSIAQTDYKHRHDQVANVIHQKLAHQYKLVDTVVPYYKYKPETVLENPATKLYFDRAILTDRTIHFNRPDITLINKINRIGFLIDIAVPNTHNLQTTIAEKLSKYTELKDEITRLWHLQKVTIVPIVLSATGVIPKQLHQSLSSLNLPPNIYHLLQKAVILNTCRLVRKFLQCESDNLHQYSHSNIVSSTIQSTSENQAASNISSTLHPTDGHLA

SEQ ID NO: 16620 - protein, 1451 aa, Noctua pronuba
MEMSKRVYSLRSLPGERRGASGADAGCHSMRTVGGAELSKRARTDKIVTAGRSELNRRAHNVEATADSTGDDTTSLFSSIPSTRPSYMTRRTTSLSTTTTLDSVVQEVNLDSELAPATSAPRTRRRWTPEMNKFILRTYLQLTSLDTDRKTYLEPLHLKFIEKYPNMQVSRQRVGDQRRAIINNKLLTQTTIDEIEAEVREEINQLQLSAQTQFPTNHTHSTATITQTQSTTLEIPTAQNKTKTRMRWTNEQNEAIMRSYYRVTTLETNQTVYRKLMHEDFIRKFPSLVHLSEQRIADQRRAIVNNKYISTERLNLLKLEISNELQLDNSNYNNLPITVSDNTTETQFNANNIDLNSTEDPIVQILNNDQVDVATDGLHNSQTSSEERDLLIDSTFQQTLQFYIETSPTNRMYIPKQKPSRNLARIVDYINKITLPEKINKDTDFHTLQTAIYSAAWTAAKVNGAKLTLLPREMNTNTNTKKIYMPHWQRRLERKLKDLRSKIGRMTQFINGNRSRKIIKHVKRINKQYNIHTIHEEPNTQPEHTLDTLKQKLAVVTGRLQRYKACTQRKRQNTQFTLNEKLFYRNIRQVSTNIQNNNPSDDIGHTNLDLETLQNFWAGIWEHPIEHNTQADWIKTEVSNANTNIQPMTFEQISPQVFHEVLARLHNWKAPGSDQIHSYWYKKFTAVHSFLYNHINNFIQDPKTIPPYLTSGTTYMIPKDHNDLSNPAKYRPITCLQTLYKIITSCVSSLIYQHTDTNNILAEQQKGCRKFSQGCKEQLIIDSIILKKAQKSKTDLYSMYIDYKKAYDSVPHSWLVQILEIYKIHPTIITFLKTTMTTWSTVLRFNTPTDAADTRPIKILRGIFQGDALSPLWFCLALNPLSNILNSTCAGFPLENTARDGQREVQNNTLNHLLYMDDIKIYAKSESQLNELANLTEQFTNDVKMEFGIDKCKINSVRAGKYYQHQYTLETGEQIDPLEEHDTYKYLGYNQSRQINHKETKQKLKQQFQHRLNTILKTQLYSRNTIKALNTFAIPVLTYSFGIINWSKTDLKNLQRKINTTMTKFRKHHPRSCVQRLTLPRKEGGRGLIDIQNLHNKQITTLRQYFFTKAESSTLHKQIADNDNHFTPLNLKDKSEQNNEKVTDNKTKLLEWSQKSLHGRHYQDLSQINVDKEASNAWLKRGELFPETEGFMLAIQDQVIETKNYRKYIIKNLSNDTCRKCNSSPETIQHITGACKSIAQSDYKHRHDQVAKVIHQKIAHQFKLVDSIVPYYKYTPETVLENPSTKLYFDRGIFTDRTIHFNRPDITLINKTNKTGYLIDIAVPNTHNLQTTIAEKLSKYIELKEEITRLWHLQKVTIVPIVLSTTGVIPKQLHQSLTSLNLPSNTYHLLQKAVILNTCRLVRKFLQCESDNPHQHIHLNIPSSLFQATTQNRNVPITTSLTLNPADNHLA

SEQ ID NO: 16621 - protein, 943 aa, Agrochola circellaris
MTQFINGNRSRKLKKHVNKIIKLYRIHTVHEEPNTQAVHTLDTLKQKLSVVTGRLERYKACTLRKQQNTQFTQNEKLFYRNIRQTTTNVQNNNPNDEERNTPNPETLQHFWAGIWEQPIHHNAQADWIHAELSSNTDIQTMAFEHISPQIFHKVLSRLHNWKAPGSDHIHSYWYKKFTAVHCYLYNFINSFIQDPKIIPAYITLGTTYMIPKDRNDLCNPAKYRPITCLQTLYKIITSCISEMIYEHIDANNILAEQQKGCRKYSQGCKEQLIIDSVILKKVQKYKTDLFTMYIDYKKAYDSVPHSWLLQVLEIYKIHPTIVSFLKTLMTTWCTVLRLTTPTETINSSPIKIQKGIFQGDALSPLWFCLALNPLSKILNATSLGIPLNYTATNRQTDPQKDVLNHLLYMDDIKLYAETESQLYDLANLTETFTKDIKMEFGIDKCKINSVRAGQNYQHEYTLGTGEIIEPLDELDTYKYLGYNQSRQIHYKDTKQKLKQQFQHRLNTILKTQLHSRNTIKAINTFAIPVLTYSFGIINWTKTDLKNLQRKINTTMTKFRKHHPRSCIQRLTLPRKEGGRGLIDILNLHNRQITALRQYFFAKSESSLLHKLIAHNDQHFTPLNLKDTTEQKNENVIDDKTKCQEWTQKSLHGRHRQDLCQLNVDKEASNAWLNRGELFPETEGFMLAIQDQVIETKNYRKYIIKNLTTDTCRKCNSSPETIQHITGACKSIAQTDYKHRHDQVANVIHQKLAHQYKLVDTVIPYYKYNPETVLENPTTKLYFDRAILTDRTIHFNRPDITLINKINKTGFLIDIAVPNTHNLQTTIAEKLSKYTELKDEITRLWHLQKVTIVPIVLSTTGVIPKQLHQSLSSLNLPPNTYHLLQKAVILNTCRLVRKFLQCEMDNLHQYFRSNIVSTTIQSTSENQAASNITSTLNPTDGHLA

SEQ ID NO: 16622 - protein, 1450 aa, Mesoligia furuncula
MEMNNKKVYNLRSLPGERRGASGADARCHSMRTIGGEELSKRAPTEKIATAGRSELNRRAHYVEATADSTGDDTISLFSSIPSTRPSYMTRRTASLSTTSTLDSVVQDVNPDSELAPTTSTPSTRRRWTPEMNKFILRTYLQLTLLDTDRRTYLEPLHLKFTEKFPNMQVSRQRIGDQRRAVINNKLLSQKIIDEIRNEVKDELDQLQLNHFTLHTQNSSKLRKQIFTPTQSTEIQPTILETPSTQNRTQTRMRWTSEHNEALMRSYYRVTALGTNETTYRKPMYEDFINQFPSLAHLSEQRIADQRRAIINNQYLSDEKLNSLKLEISEELSIDNTRNYDSETVAVNTNINNTNAEFTNNIDINSIEEPTPSIQTPDNTEINSTEILPNPQINLERDPIIEDYFQQAFQFYKDTSPTNRIYIPKQKPSKNLARIISYLNKMILPENINNDTDFHTFQTVIYCAAWTVAKVNGAKLTLEPREITRCGTKTEYKPKWQRRLERKLNDLRSKIGRMTQFINGSRSRKLKKHVNKIIKLYRIHTVHEEPNTQAAHTLDTLKQKLSVIAGRLQRYKACTLRKQQNTQFSQNEKLFYRNIRQATTNVQNNNPSDNELNTPNPEALQNFWAEIWEQPVHHNAEADWIQGELSNNTNIQTMAFEHISPQIFHKVLSRLHNWKAPGSDHIHSYWYKKFTALHCYLYNFINSFIKDPNMIPSYITSGTTYMIPKDRNDLSNPAKYRPITCLQTLYKIITSCISEMIYEHIEANNILAEQQKGCRKYSQGCKEQLIIDSVILKRVQKSKTDLFTMYIDYKKAYDSVPHSWLLQVLEIYKINPTIVTFLKTMMTTWCTVLRLTTPTETTDTSPIKIQRGIFQGDALSPLWFCLALNPLSKILNATSLGISLNSTATNRQTDPQKDVLNHLLYMDDIKLYAETESQLYELASLTETFTNDIKMEFGIDKCKINSVRAGHNYQHQYTLGTGEQIEPLDELDTYKYLGYNQSRQIHYKDTKQKLKQQFQHRLNTILKTQLYSRNTIKAINTFAIPVLTYSFGIINWTKTDLKNLQRKINTTMTKFRKHHPRSCIQRLTLPRKEGGRGLIDILNLHNRQITALRQYFFAKTESSPLHKLIAQSDQHLTPLNLKDTTEQKNEEVTDDKTKCQEWTQKSLHGRHRQDLCQSNVDKDASNAWLNRGELFPETEGFMLAIQDQVIETKNYRKYIIKNLTTDICRKCNSSPETIQHITGACKSIAQTDYKHRHDQVANVIHQKLAHKFKLIDAIVPYYKYNPETVLENPTTKLYFDRAILTDRTIHFNRPDITLIDKINKTGFLIDIAVPNTHNVQTTIAEKLSKYTELKDEITRLWHLQKVTIVPIVLSTTGVIPKQLHQSLSSLNLPPNTYHLLQKAVILNTCRLVRKFIQCESDNLHQYSHLNIVSSTTQSTYNITPTLNPTVGHLA

SEQ ID NO: 16623 - protein, 1435 aa, Xestia c-nigrum
MEMSHKKVYNLRSLPGERRGAFGADAECHSMRTIGGDELSKRALTEKLVTAGRSKLNRRAHYVDATADSTGDDTISLFSSIPSTRPSYMTRRTTSLSTTTTLDSVVQEVNLDSELAPATSAPKTRRRWTPEMNKFILRTYLQLTSLDTDRKTYLEPLHLKFIEKYPNMHVSRQRVGDQRRAIINNKLLTQKTIDEIEAEVREELNQLQLSSETQFPTNHTQSLATTTQTQSTTLESPRTQNKTQTRMRWTNEQNEAIMRSFYRVTTLETNQTVYRKLMYEDFITKFPSLAHLTEQRIADQRRAIVNNKYISTERLNLLKLEISNELQLDNSNYNNLAVIVNDNTIETQPEDPIVQILNNDQVDVATDGLHNSQTSLKDRDPLIDATFQQTLQFYIATSPTNRMYIPKQKPSKNLARIVDYINKIILPENVNKDTDFQTLQTVIYSAAWTAAKANGAKLTLQPKEINTNTNQKKIYTPHWQRRLERKLIDLRSKIGRMTQFINGNRSRKIVKHVKCINKQYKIHTVHEEPNTQPEHTLDTLKQKLAVVTGRLQRYKACTQRKRQNTQFTLNEKLFYRNIRQVSTNVQNINPSDDDVQNNVDLQNLQNFWAGIWEHPIEHNTQTDWIQAELSNASTNIQPMTFEHNISPQIFHEVLARLHNWKAPGSDQIHSYWYKKFTAIHSFLYNYINNFIQDPKTIPPYLTSGTTYMISKDRNDLSNPAKYRPITCLQTLYKIITSCISSLIYNHIDTNNILAEQQKGCRKFSQGCKEQLIIDSIILKKAQKSKTDLYSMYIDYKKAYDSVPHSWLVQILEIYRIHPTIITFLKTTMTTWSTVLRVNTSTDAADTRPIKILRGIFQGDALSPLWFCLALNPLSNILNSTGTGFPLRDTTHEGQHEVQNNTLNHLLYMDDIKLYAKSESQLNELANLTEQFTNDVKMEFGIDKCKINSVRAGQYYQHQYTLETGEHIDPLDEHDTYKYLGYNQSRQINHKETKQKLKQQFQHRLNTILKTQLYARNTIKALNTFAIPVLTYSFGIINWTKTDLKNLQRKINTTMTKFRKHHPRSCVQRLTLPRKEGGRGLIDIQNLHNKQITTLRQYFFTKAESSTLHKQIANNDIQFTPLNLKDKSEQENDKVTDNKTKLLEWSQKSLHGRHYQDLSQINVDKEASNAWLKRGELFPETEGFMIAIQDQVIETKNYRKYIIKNLTTDTCRKCNRLPETIQHITGACKSIAQTDYKHRHDQVANVIHQKLAYQYKLLDSIVPYYKYTPETVLENTSIKLYFDRGIFTDRTIHFNRPDITLINKTNKTGYLIDIAVPNTHNIQTTIAEKLSKYTELKEEITRIWHLQKVTIVPIVLSTTGVIPKQLHQSLTSLNLPSNTYHLLQKAVILNTCRLVRKFLQCESENPPQTFFQAPTQRRNLPITTPLILNPADNHLA

SEQ ID NO: 16624 - protein, 1452 aa, Griposia aprilina
MEMSNKRVYNLRSLPGERRGASGADARCHSMRTIGGEELSKRAPTNKIVTAGRSDLNRRAHYVEATADSMGDDTMSLFSSIPSTRPPYMTRRTASLSTTSTLDSVAQDVNLDSELAPTTSAPSTRRRWTPEMNKFILRTYLQLTSLDTDRRTYLEPLHLKFTEKFPNMQVSRQRIGDQRRAIINNKLLPQKTIDEIRNEVKDELDQLHFTLQSQNSGELRQQILAPTQSTQIQPTTPETHSTQNRTQTRMRWTSEHNEAIMRSYYRVTALGTNETTYRKPMYEDFINQFPSLAHLSEQRIADQRRAIINNNYLSDDKLNSLKLEVSEELGTDNTRNYNSETIAVITNINNANIQLTNNIDINSIEEPTPNVQITDNTELNSTDILPNPQVNLERDPIIDDSFQQAFQFYKDTSPTNRVYIPKQKPSKNLARIISYLNKIILPENINNNTDFHTFQTVIYCAAWTVAKVNGAKITLEPREITRGTKKEYKPKWRRRLEQKVYDLRSKIGRMTQFINGNRSRKLKKHVNKIIILYKIHTVHEEPNTQALHTLDTLKQKLSVVTGRLERYKACTLRKQQNTQFTQNEKLFYRNIRQATTNVQNNNPNDDELNTPNPETLQNFWAGIWEQPIHHNAQADWIHAELSSNTDIQTMAFEHISPQIFHKVLSRLHNWKAPGSDHIHSYWYKKFTAVHCYLYNFINSFIQDPKIIPSYITSGTTYMIPKDRNDLCNPAKYRPITCLQTLYKIITSCISEMIYEHIDANNILAEQQKGCRKYSQGCKEQLIIDSVILKRVQKYKTDLFTMYIDYKKAYDSVPHSWLLQVLEIYKIHPTVISFLKTMMTTWCTVLRLTTPTETIDTSPIKIQRGIFQGDALSPLWFCLALNPLSKILNATSLGIPLNYTATNRQTDPQEDVLNHLLYMDGIKLYAETESQLYELANLTETFTKDINMEFGIDKCKINSVRAGQNYQHQYTLGTGERIEPLDELDTYKYLGYNQSRQIHYKDTKQKLKQQFQHRLNTILKTQLHSRNTIKAINTFAIPVLTYSFGVINWTKTDLKNLQRKINTTMTKFRKHHPRSCIQRLTLPRKEGGRGLIDILNLHNRQITALRQYFFAKTESSLLHKLIAHNDQHFTPLNLKDTTKQKNENVIDDKTKCQEWTQKSLHGRHRQDLSQLNVDKDASNAWLDHGELFPETEGFMLAIQDQVIETKNYRKYIIKNLTTDTCRKCNSSPETIQHITSACKSIAQTDYKHRHDQVANVIHQKLAHQYKLVDTVVPYYKYKPETVLENPATKLYFDRAILTDRTIHFNRPDITLINKINRIGFLIDIAVPNTHNLQTTIAEKLSKYTELKDEITRLWHLQKVTIVPIVLSATGVIPKQLHQSLSSLNLPPNIYHLLQKAVILNTCRLVRKFLQCESDNLHQYSHSNIVSSTIQSTSVNQAASNISSTLHPTDGHLA

SEQ ID NO: 16625 - protein, 1322 aa, Noctua janthe
MNKFILRTYLQLTSLDTDRKTYLEPLHLKFIEKYPNMQVSRQRVGDQRRAIINNKLLTQTTIDEIEAEVREQLNQLQLSAQTRFSTNHTHSTATTTQTQSTTPETPRTQNKTQTRMRWTNAQNEAIMRSYYRVTTLETNQTVYRKLMHEDFIRKFPSLAHLSEQRIADQRRAIVNNKYISTERLNSLKLEISNELQLDNNNYNNLAITVNDNATETLSNANNINLYSTEDPLVQISNNDQVDMATDGLHNSQTSLEERDLLIDATFQQTLQFYIETSPTNRMYIPKQKPSKNLARIVDYINKITLPENVNKDTDFHKLQTAIYSAAWTAAKVNGAKLTLLPREINTNTNTNTKTIYTPHWQRRLERKLKDLRSKIGRMTQFINGNRSRKILKHVKRINKQYKIHTIHEEPNTQPEHTLDTLKQKLAVVTGRLQRYKACTQRKRQNTQFIFNEKLFYRNIRQVSTNIQNNNPSDDVVHNLDLETLQNFWAGIWEYPIEHNTQADWIQTEVANANTNIQPMAFEHISPQIFHEVLARLHNWKAPGSDKIHSYWYKKFTAVHSFLYNHINNFIQDPKTIPPYLTSGTTYMIPKDRNDLSNPAKYRPITCLQTLYKIITSCVSSLIYQHTDTNNILAEQQKGCRKFSQGCKEQLIIDSIILKKAQKSKKDLYSMYIDYKKAYDSVPHSWLVQILEIYKIHPTIITFLKTTMTTWSTVLRFNTSTEAADSRPIKILRGIFQGDALSPLWFCLALNPLSNILNSTFAGFPLEDTTLDGQREVQNNTLNHLLYMDDIKLYSKTESQLNELANLTEQFTNDVKMEFGIDKCKINSVRAGQYYQHQYTLETGEHIDPLEEHDTYKYLGYTQSRQINHKETKQKLKQQFQHRLNTILKTQLYSRNTIKALNTFAIPVLTYSFGIINWTKTDLKNLQRKINTTMTKFRKHHPRSCVQRLTLPRKQGGRGLIDIQNLHNKQITTLRQYFFTKAESSTLHKQIANNDNHFTPLNLKDKSEQNNEKITDNKTKLLEWSQKSLHGRHYQDLSQINVDKEASNAWLKRGELFPETEGFMLAIQDQVIETKNYRKYIIKNLSTDTCRKCNSSPETIQHITGACKSIAQTDYKHRHDQVANVIHQKLAHQYKLVDSIVPYYKYTPETVLENPSTKLYFDRGIFTDRTIHFNRPDITLINKTNKTGYLIDIAVPNTHNLQTTIAEKLSKYTELKEEITRLWHLQKVTIVPIVLSTTGVIPKQLHQSLTSLNLSSNTYHLLQKAVILNTCRLVRKFLQCESDNPHQHIHLNIPSPLFQATTLNRNVPITTSVTLYPADNHLA

SEQ ID NO: 16626 - protein, 837 aa, Ptilodon capucinus
MSNNTSTQSMNFENIPIETFNKVLRNLHNWKAPGSDNIHSYWYKKLTSIHNCLRIHLNNFILEPNTMPVYITAGITYMIAKDRNDPTNPAKYRPITCLQTIYKILTSCISELMYEHISSNNILAEQQKGCRKFSQGCKEQLIIDSVILNHVQKTKSNLFSMYIDYKKAYDSVPHSWLTQVLEIYKINPTIINFLKTAMTNWTTRLKLSTSTETIETNPIKIQRGIFQGDALSPLWFCLALNPLSNMINSTAVRYPLQYADADDQTNTQTHLVNHLLYMDDIKLYAENENHLYQLANLTELFTNDINMEFGIDKCKINSIMAGQNYQHYYTLTSGEQIDPLDAQETYKYLGYNQSRQIHHKDIKYKLKQVFQHRLNSLLKTHLNSRNTIKSINTFAIPVLTYSFGIINWTKSDLKSLQRTINTTMTKLRKHHPRSCMQRLTLPRKEGGRGLIDIGNLHNSQITNLRKYFFTKTDSSTLHKSIAQNDRKRTPLNLQDKTSQNNEKITDDKTKIADWTAKALHGRHRHDLCQPNVDKEASNAWLCRGELFPETEGFMLAIQDQVIETRNYQKYIIKKLASDICRKCSSSPETIQHITGACRAIVQTDYKHRHDQVANIIHQQLAHQHKLVTDKQPYYKYNPETVLENATTKLYFDRAILTDRTIHYNRPDITIINKTNKTGYLIDIAVPNTHNLQTTIAEKLSKYTELKDEITRLWHLQKVTIVPIVLSTTGVIPKQLHQSLSTLNLPPNLYLLLQKAAILNTCRIVRKFLQTEQDNIHSNTQQSTSAPITLSTITQQPTTAPITLPTNTQQSTSAPITLYYSHSSEESTTQPLSLTPTT

SEQ ID NO: 16627 - protein, 1346 aa, Griposia aprilina
MEMSNKRVYNLRSLPGERRGASGADARCHSMRTIGGEELSKRAPTNKIVTAGRSDLNRRAHYVEATADSMGDDTMSLFSSIPSTRPSYMTRRTASLSTTSTLDSVAQDVNLDSELAPTTSAPSTRRRWTPEMNKFILRTYLQLTSLDTDRRTYLEPLHLKFTEKFPNMQVSRQRIGDQRRAIINNKLLPQKTIDEIRNEVKDELDQLHFTLQSQNSGELRQQILAPTQSTQIQPTTPETHSTQNRTQTRMRWTSEHNEAIMRSYYRVTALGTNETTYRKPMYEDFINQFPSLAHLSEQRIADQRRAIINNNYLSDDKLNSLKLEVSEELGTDNTRNYNSETIAVITNINNANIQLTNNIDINSIEEPTPNVQITDNTELNSTDILPNPQVNLERDPIIDDSFQQAFQFYKDTSPTNRVYIPKQKPSKNLARIISYLNKIILPENINNNTDFHTFQTVIYCAAWTVAKVNGAKITLEPREITRGTQKEYKPKWRRRLEQKVYDLRSKIGRMTQFINGNRSRKLKKHVNKIIILYKIHTVHEEPNTQALHTLDTLKQKLSVVTGRLERYKACTLRKQQNTQFTQNEKLFYRNIRQATTNVQNNNPNDDELNTPNPETLQNFWAGIWEQPIHHNAQADWIHAELSSNTDIQTMAFEHISPQIFHKVLSRLHNWKAPGSDHIHSYWYKKFTAVHCYLYNFINSFIQDPKIIPSYITSGTTYMIPKDRNDLCNPAKYRPITCLQTLYKIITSCISEMIYEHIDANNILAEQQKGCRKYSQGCKEQLIIDSVILKRVQKYKTDLFTMYIDYKKAYDSVPHSWLLQVLEIYKIHPTVISFLKTMMTTWCTVLRLTTPTETIDTSPIKIQRGIFQGDALSPLWFCLALNPLSKILNATSLGIPLNYTATNRQTDPQEDVLNHLLYMDDIKLYAETESQLYELANLTETFTKDINMEFGIDKCKINSVRAGQNYQHQYTLGTGERIEPLDELDTYKYLGYNQSRQIHYKDTKQKLKQQFQHRLNTILKTQLHSRNTIKAINTVAIPVLTYSFGVINWTKTDLKNLQRKINTTMTKFRKHHPRSCIQRLTLPRKEGGRGLIDILNLHNRQITALRQYFFAKTESSLLHKLIAHNDQHFTPLNLKDTTKQKNENVIDDKTKCQEWTQKSLHGRHRQDLSQLNVDKDASNAWLDRGELFPETEGFMLAIQDQVIETKNYRKYIIKNSTTDTCRKCNSSPETIQHITSACKSIAQTDYKHRHDQVANVIHQKLAHQYKLVDTVVPYYKYKPETVLENPATKLYFDRAILTDRTIHFNRPDITLINKINRIGFLIDIAVPNTHNLQTTLESNESGSLKEC

SEQ ID NO: 16628 - protein, 1205 aa, Agrochola circellaris
MRWTSEHNEAIMRSYYRVTALGTNETTYRKPMYEDFINQFPSLAHLSEQRIADQRRAIINNNYLSDEKLNSLKLEVSEELGTDNTRNYNSETIAVITNINNTNIQLTDNIDINYIEEPTPNIQRTDNTELNSTYILPNLQVNLERDPKIDDSFQQAFQFYKDTSPTNRVYIPKQKPSKNLARIISYLNKIILPENINNNTDFHTFQTVIYCAAWTVAKVNGAKITLEPREITRGTKKEKEYKPKWRRRLEQKVNDLRSKIGRMTQFINGNRSRKLKKHVNKIIKLYRIHTVHEEPNTQAVHTLDTLKQKLSVVTGRLERYKACTLRKQQNTQFTQNEKLFYRNIRQTTTNVQNNNPNDDERNTPNPETLQHFWAGIWEQPIHHNAQADWIHAELSSNTDIQTMAFEHISPQIFHKVLSRLHNWKAPGSDHIHSYWYKKFTAVHCYLYNFINSFIQDPKIIPAYITLGTTYMIPKDRNDLCNPAKHRPITCLQTLYKIITSCISEMIYEHIDANNILAEQQKGCRKYSQGCKEQLIIDSVILKKVQKYKTDLFTMYIDYKKAYDSVPHSWLLQVLEIYKIHPTIVSFLKTLMTTWCTVLRLTTPTETINTSPIKIQKGIFQGDALSPLWFCLALNPLSKILNSTSLGIPLNYTATNRQTDPQKDVLNHLLYMDDIKLYAETESQLYDLANLTETFTKDIKMEFGIDKCKINSVRAGQNYQHEYTLGTGEIIEPLDELDTYKYLGYNQSRQIHYKDTKQKLKQQFQHRLNTILKTQLHSRNTIKAINTFAIPVLTYSFGIINWTKTELKNLQRKINTTMTKFRKHHPRSCIQRLTLPRKEGGRGLIDILNLHNRQITALRQYFFAKSESSLLHKLIAHNDQHFTPLNLKDTTEQKNENVIDDKTKCQEWTQKSLHGRHRQDLCQLNVDKEASNAWLNRGELFPETEGFMLAIQDQVIETKNYRKYIIKNLTTDTCRKCNSSPETIQHITGACKSIAQTDYKHRHDQVANVIHQKLAHQYKLVDTVIPYYKYNPETVLENPTTKLYFDRAILTDRTIHFNRPDITLINKINKTGFLIDIAVPNTHNLQTTIAEKLSKYTELKDEITRLWHLQKVTIVPIVLSTTGVIPKQLHQSLSSLNLPPNTYHLLQKAVILNTCRLVRKFLQCEVDNLHQYFRSNIVSTTIQSTSENQAASNITSTLNPTDGHLA

SEQ ID NO: 16629 - protein, 943 aa, Agrochola circellaris
MTQFINGNRSRKLKKHVNKIIKLYRIHTVHEEPNTQAVHTLDTLKQKLSVVTGRLERYKACTLRKQQNTQFTQNEKLFYRNIRQTTTNVQNNNPNDDERNTPNPETLQYFWAGIWEQPIHHNAQADWIHAELSSNTDIQTMAFEHISPQIFHKVLSRLHNWKAPGSDHIHSYWYKKFTAVHCYLYNFINSFIQDPKIIPAYITLGTTYMIPKDRNDLCNPAKYRPITCLQTLYKIITSCISEMIYEHIDANNILAEQQKGCRKYSQGCKEQLIIDSVILKKVQKYKTDLFTMYIDYKKAYDSVPHSWLLQVLEIYKIHPTIVSFLKTLMTTWCTVLRLTTPTETINTSPIKIQKGIFQGDALSPLWFCLALNPLSKILNATSLGIPLNYTATNRQTDPQKDILNHLLYMDDIKLYAETESQLYDLANLTETFTKDIKMEFGIDKCKINSVRAGQNYQHEYTLGTGEIIEPLDELDTYKYLGYNQSRQIHYKDTKQKLKQQFQHRLNTILKTQLHSRNTIKAINTFAIPVLTYSFGIINWTKTDLKNLQRKINTTMTKFRKHHPRSCIQRLTLPRKEGGRGLIDILNLHNRQITALRQYFFAKSESSLLHKLIAHNDQHFTPLNLKDTTEQKNENVIDDKTKCQEWTQKSLHGRHRQDLCQLNVDKEASNAWLNRGELFPETEGFMLAIQDQVIETKNYRKYIIKNLTTDTCRKCNSSPETIQHITGACKSIAQTDYKHRHDQVANVIHQKLAHQYKLVDTVIPYYKYNPETVLENPTTKLYFDRAILTDRTIHFNRPDITLINKINKTGFLIDIAVPNTHNLQTTIAEKLSKYTELKDEITRLWHLQKVTIVPIVLSTTGVIPKQLHQSLSSLNLPPNTYHLLQKAVILNTCRLVRKFLQCEVDNLHQNFRSNIVSTTIQSTSENQAASNITSTLNPTDGHLA

SEQ ID NO: 16630 - protein, 1412 aa, Spialia ferax
MEPSKSKYNLRSLLGGRRGASGAGAGCYSSRDTGGEALSRRAPVTQHATAGRRELSRRTRGVDATADSSGEDTTSLFSSIPSTRSSYMTRGRSTLSSSSTVDGVVPDVNLDSELAPTSATSTTRRRWTPEMNMFILRTYLLLTALDTDTKTYLEPLHLKFIEKYPDMQVSRQRVGDQRRAIVRNKLLAQDIIDRIYNEVKEELNLLQTSIISTTQTQMHHPETHIPHSRMRWTTEQNETIIRLYYRITHLDTNRTAYRQPLHEAFISAFPSLAHLSEQRIADQRRAIISNQYISSTRLNEIKMEVAEELRVNLDSRTQETNRMTDNTDNNNIDFNNADTNFLNRIEFDLPEESIPDHQQLTRDPVIDEQFQEAFEYFKNTDPTSRTYIPKQKPSRRLAKIVHYLNKITLHEHINLDTEFNTLQTIIYSAAWTAAKVNGSKLSLEPCNRHRTLQTDKKPNWQRRLERRLDDLRTKIARLTQYINGNRSRKLEQHINNIKKQYKIHSIHEEPNTHLSHTLDTLKQKLAVISGRLRRYKECTLRKQQNNLFTNNEKQFYRNMRQTTSNVQGNATNIDASPDQENLQNFWGRIWEQPVRHNEQADWIQTEIEENSTKTPDMPFTHIPIDTFKKVIQNLHNWKAPGSDFIHSYWYKKFTSTHLYLHNYLNLFLEKPNTIPHYLTLGTTYMLLKDSNDRTNPAKYRPITCLQTLYKIMTSCISELIHKHIDNNNILAEQQKGCRKFSQGCKEQLVIDSVILKQVQKKKSNIFSMYIDYQKAYDSVPHSWLIQVLEIYKIHPTIITFLKTSMTNWTTRLKLTTAKNSIETEPIKIQRGLFQGDALSPLWFCLALNPLSKILNATSKGYNLKHTDTDGQTDVTENIINHLLYMDDIKLYAENEDYLNELANITEKFSNDIKMDFGIDKCKINSIKAGQNYQHHYTLETGAQIESLDEHETYKYLGYNQSRQIQYKDTKLKLKQQFRHRLNAILRTKLNSRNTIKAINTFAIPILTYSFGIINWSKSDLKALQRIINTTMSKFRKHHPRSCWQRLTLPRKDGGRGLIDITNLHNRQISTLRQYFFSKSETSSLHKLIVKTDRKLTPLNLQDSSQQNNEKLTDDKTKCVEWAGKSLHGRHYHDLSQSNVDKKASNAWLNRGELFPETEGFIMAIQDQVIETRNYQKYITKTLTVDTCRKCNSCPETIQHITGACKSIAQTEYKHRHDQIANIIHQKLAYQQNLITNIQPYYKYSPESVLENSTCKLYFDRAILTDRTIHYNRPDITLINKSNKSAYLIDIAVPNTHNLQSTIAEKLTKYTELKDEIIRLWHLQKVTIIPIVLSTTGVIPNQLHQSIQSLNLPPETYILLQKAAILNTCRIVRKFLQTEHEGPLRSTMSPNTQLAIQPTMQTPTHTTTAHITT

SEQ ID NO: 16631 - protein, 1436 aa, Agrochola circellaris
MEMSNKRVYNLRSLPGERRGASGADARCHSMRTIGGEELSKRAPTDKIVTAGRNELNRRAHYVEATADSTGDDTISLFSSIPSTRPSYMTRRTASLSTTSTLDSVVQEVNLDSELAPTTSAPSTRRRWTPEMNKFILRTYLQLTALDTDRKTYLEPLHLKFIEKFPNMQVSRQRIGDQRRAIINNKLLPQKTIEEIRNDVKEELDHLHFNHSIQQSQNCIDHVQQPTQSTQMQPRTTEAHNTKNRTQARMRWTNEQNEAIMRSYYRVTDLGRNETVYRKRMYEDFINTFPDLAHLSEQRIADQRRAIINNNYITSDRLNSIKLEISEELQLDNLNFSNFTGETTIVNPNHNNNSETQFLYSIDINSTQESSVTLNHTEINIAEEMVPNQEINRDRDPLIDETFQQAFQYYKEINPTNRIFIPKQKPSKRLARIVSYLNKIILPENINKETDFYTLQTAIYCAAWTAAKVNGAKLTLQPRVVTQMAKKQYKPKWETRLERKLNDLRSKIAKMTQFINGIRSSKIIKHVNKIIEEYRIHTVHEEPNTQAVHTLDTLKQKLSVVTGRLQRYKACNQRKLQNTQFTHNEKLFYRNIRQATSNVQDNNSNDDDHNNPDSETLQHFWAGIWEQPIEHNAQADWIQTELTNSNTNIQAMSFEHISPEIFHKVLSRLHNWKAPGSDNIHSYWYKKFTSIHSFLYNHINTFIQDPKTIPSYVTSGTTFMIPKDRNDLSNPAKYRPITCLQTLYKIITSCISELIYQHIDTNNILAEQQKGCRKFSQGCKEQLIIDSVILKKVRKTKTDLFSMYIDYKKAYDSVPHSWLIKILEIYKIHPTIVTFLKAMMTTWTTVLRLTSSTKTVDTSPIKVLRGIFQGDALSPLWFCLALNPLSNILNATTLGIPLKNITTQGHTEVQKIELNHLLYMDDIKLYAKSETQLYELANLTEQFSNDIKMELGIDKCKINSIRAGQNYQHQYTLGTGEHIEPLEEQDSYKYLGYTQSRQIHYKETKQRLTLQFQHRLNTILKTQLYSRNTIKAINTFAIPVLTYSFGIINWTKTDLKNLQRKINTSMTKFRKHHPRSCLQRLTLPRKEGGRGLIDILNLHNRQIKALRQFFFSKTETSILHKIITHNDQQLTPLNLKDTSEQRNEKLIDDKIKLLDWTQKSLHGRHRQDLCHINVDKEASNAWLNRGELFPETEGFMLAIQDQVIETKNYRKFIIKNLNNDTCRKCNSSPETIQHITGACKSIAQTDYKHRHDQVANIIHQKLAQQYKLIDSVTPYYKYNPETVLENPSTKLYFDRAILTDRTIHFNRPDITRINKINKTGYLIDIAIPNTHNLQTTIAEKLSKYTELKDEVARLWHLQKVTIVPIVLSTTGVIPKQLHQSLISLNLPPNTLHLLQKAAILNTCRLVRKFLQCESENPHQNINTLPSSVPFPARDRT

SEQ ID NO: 16632 - protein, 1395 aa, Boloria selene
MEMSKRIYNLRPLPGGRRGTPGAGAGCHSIRTIGDVELSRRASIDKSTTADRRELSRRAYGVEVTADSLGLDTDSLYSSIPSTRPSYMTRRTSTLSTSTSNSVVQEVNIDSDLVPTAVTPCMRRRWTPEMNKFILRTYLQLKSLDTDTKTYLEPLYLKFIEKYPNMEVSRQRIGDQRRAIVRNKLLPQKTMELIYNEVKEELNHTHHHPTPYTTPHTTQNTQTPSQSRMRWTNEQNEALIKSYYRVTNLGTDETAYRKPLHTDFTNRFPSLAYLSEQRIADQRRAIINNKYINLDRLQVLKEEIAVELKFNKNHPTSAAAAPIAPNKLMNTNELQHDKIETDIPNISDINSLQELPFNSEAILERQPQIDETFQHAFHFYKDTEPTNRTYIPIQKPSKKFSNIVNYINKIILVENTNKHIDFFTLQTIIYCAAWTAAKTNGAKVELKTRQYQQQAKKEYSPHWQKRIERKIEDLRAKIGRLTQFINGNRSRNILKHVNKIIEQYKIHTVHEETNTQVTHTLDTLKQKLAVATGRLKRYKACTLRKQQNTQFTYNEKQFYRNIKKATTNIQDNSMINHSNDNLTPESLQSFWEEVWSKPVQHNTQAEWIKTETTNNMTNTQNMKFEPISLEALQKTIKNLHNWKSPGSDYIHSFWYKKFTTVHSHIHKYINSFIQDPNSMPSYLTSGKTYMILKDRNDVFNPAKYRPITCLQTLYKIMTSIISELIYQHVNTNNILTEQQKGCRKFSHGCKEQLIIDSVILKQVQRRKSDLFSMYIDYKKAYDSVPHSWLVKVLEIYKIHPIIVTFLKTIMTKWTTILTLNTSTVILETNPIKIQRGLFQGDSLSPLWFCIALNPLSNLLNSTQIGYPLNETKISEQIYLQNYMLNHLLYMDDIKLYAENESQLNRLAFLTERFSMDIQMEFGIDKCRINSIKAGQNYQHNYTLESGEQIIPLDEEDTYKYLGYNQSLQIHYKQTKQKLTQQFQHRLNMILKTQLNSKNTIKAINTFVIPLLTYSFGVINWTKTELKNLQRKINTSMTKFRKHHPRSCLQRLTLPRAEGGRGLIDIVNLHNRQVTNLRQYFFHKIESSTLHKLIVQNDKKLTPLNLKDTIEQVNYKLIDDKHKIMEWAQKSLHGRHRQDLCQPNVDKQASNAWLTGGVLFPETEGFIIAIQDQVVETRNYRKYIIKNLTVDTCRKCNSAPETIQHITGACKSIAQTDYKHRHDQVANIIHQKLAHQYKLIDTFTPYYKYSPQSVLENTSSKLYFDRAILTDRTIHYNRPDITLINKITKTGYLIDIAVPNTHNLQNTIAEKLSKYADLKDEITRIWHLQKVSIVPIVISTTGVIPKQLHQSLNSLSLPPKTYYLLQKAIILNTCRVVRKFLQTDNDNLEVFNTTET

SEQ ID NO: 16633 - protein, 1032 aa, Xestia c-nigrum
MYIPKQKPSKNLARIVDYINKIILPENVNKDTDFQTLQTVIYSAAWTAAKANGAKLTLQPKEINTNTNQKKIYTPHWQRRLERKLIDLRSKIGRMTQFINGNRSRKIIKHVKCINKQYKIHTVHEEPNTRPEHTLDTLTQKLAVVTGRLQRYKACTQRKRQNTQFTLNEKLFYRNIRQVSTNVQNINPSDDDVQNNVDLQNLQNFWAGIWEHPIEHNTQTDWIQAELSNASTNIQPMTFEHISPQIFHEVLARLHNWKAPGSDQIHSYWYKKFTAIHSFLYNYINNFIQDPKTIPPYLTSGTTYMISKDRNDLFNPAKYRPITCLQTLYKIITSCISSSIYNHIDTNNILAEQQKGCRKFSQGCKEQLIIDSIILKKAQKSKTDLYSMYIDYKKAYDSVPHSWLVQILEIYRIHPTIITFLKTTMTTWSTVLRVNTSTDAADTRPIKILRGIFQGDALSPLWFCLALNPLSNILNSTGTGFPLRDTTHEGQLEVQNNTLNHLLYMDDIKLYAKSESQLNELANLTEQFTNDVKMEFGIDKCKINSVRAGQYYQHQYTLETGEHIDPLDEHDTYKYLGYNQSRQINHKETKQKLKQQFQHRLNTILKTQLYARNTIKALNTFAIPVLTYSFGIINWTKTDLKNLQRKINTTMTKFRKHHPRSCVQRLTLPRKEGGRGLIDIQNLHNKQITTLRQYFFTKAESSTLHKQIANNDIHFTPLNLKDKSEQKNEKVTDNKTKLLEWSQKSLHGRHFQDLSQINVDKEASNAWLKRGELFPETEGFMIAIQDQVIETKNYRKYIIKNLTTDTCRKCNRLPETIQHITGACKSIAQTDYKHRHDQVANVIHQKLAYQYKLLDSIVPYYKYTPETVLENTSIKLYFDRGIFTDRTIHFNRPDITLINKTNKTGYLIDIAVPNTHNIQTTIAEKLSKYTELKEEITRIWHLQKVTIVPIVLSTTGVIPKQLHQSLTSLNLPSNTYHLLQKAVILNTCRLVRKFLQCESENPPQTFFQAPTQIRNLPITTPLILNPADNHLA

SEQ ID NO: 16634 - protein, 1450 aa, Noctua janthe
MEMSKRIYNLRSLPGERRGASGADAGCHSMRTIGGQELSKRAPTDKIVTAGRSELNRRAHNVEATADSTGDDTTSLFSSIPSTRPSYMTRRTTSLSTTTTLESAVQEVDLDSELAPTTSAPRTRRRWTPEMNKFILRTYLQLTSLDTDRKTYLEPLHLKFIEKYPNMQVSRQRVGDQRRAIINNKLLPQKTIDEIEAEVRDELNQLQLSAQTQFPTSHTQSTVTTSQTQATTLETPRVHNKTQTRMRWTNEQNEAIMRSYYRVTTLETNQTVYRKLMHEDFIRKFPSLAHLSEQRIADQRRAIVNNKYINTERLNSLKLEISNELQLENSNHNNIVITVDVNSIDTQSNANNIGLYSIENPIAQTLNNGQADIETDILHNPQISLDRDLLIDETFQQTHQFYIETSPTNRIYIPKEKPSKNFARIVDYINKIILPENVNKDTDFHTLQTAIYSAAWTAAKVNGAKLTLQPREMNINTNTKKIHMPHWQRRLERKLKDLRSKIGRMTQFINGNRSSKIIKHAKSIAKQYEIHTIHEAPNTQAEHTLDTLKQKLAVVTGRLQRYKACTQRKQQNNQFIQNEKLFYRNLRQTSTNVQNNNTNNADSHNNLDPEDLQSFWAGIWEQPIEHNTQAEWIQTELTNSSTNIQPMLFEQISPQIFHGVLARLHNWKAPGSDHIHSYWYKKFTAVHSFLYNYINNFIQDPKSIPSYLTSGTTYMISKDPNDLSNPAKYRPITCLQTLYKIITSCLSELIYIHTDTNNILAEQQKGCRKFSQGCKEQLIIDSIILKKAQKFKTDLYSMYIDYKKAYDSVPHSWLVKVLEIYRIHPTIITFLKTIMETWSTVLRINTSKETADTYPIKIQRGIFQGDALSPLWFCLALNPLSNILNSTRTGFPLEYIASDGQPEVQNNAINHLLYMDDIKLYAKSESQLNELANLTEQFTNDIRMEFGIDKCKINSVRAGQYYQHQYTLETGEHIEPLDEHDTYKYLGYNQSRQINHKETKQKLKQQFQHRLNTILKTQLYSRNTIKALNTFAIPILTYSFGIIKWTKTDLKNLQRKINTTMTKFRKHHPRSCVQRLTLPRKEGGRGLIDIQNLHNKQVTTLRQYFFTKAESSILHKEIANNDHHFTPLNLKDKSEQKNEKVTDNKTKLLEWSQKSLHGRHYQDLSQINVDKEASNAWLKRGELFPETEGFMLAIQDQIIETKNYRKFIIKNLSTDMCRKCNSSPETIQHITGACKSIAQTDYKHRHDQVANVIHQKLAHQYKLVDSIVPYYKYIPETVLENPSTKLYFDRGIFTDRTIHFNRPDITLINKTNKTGYLIDIAVPNTHNLQTTIAEKLSKYTELKEEITRLWHLQKVTIVPIVLSATGVIPKQLHQSLTSLNLPSNTYHLLQKAVILNTCRLVRKFLQCESDNPHQHIHFNIPSSLIQATTQNRIVPTTTSLTLNPADNHLA

SEQ ID NO: 16635 - protein, 1450 aa, Hydraecia micacea
MEMNNKKVYNLRSLPGERRGASGADARCHSMRTIGGEELSKRAPTEKIATAGRSDLNRRAHYVEATADSTGDDTISLFSSIPSTRPSYMTRRTASLSTTSTLDSVVQDVNPDSELAPTTSTTNTRRRWTPEMNKFILRTYLQLTLLDTDRRTYLEPLHLKFIEKFPNMQVSRQRIGDQRRAIVNNKLLSQKIIDEIRNEVKDELDQLQLNHFTLHTQNSSKLRKQIFTPTQATQIQPTTLKTHSTQNRTQTRMKWTSEHNEAIMRSYYRVTALGTNETTYRKPMYEDFINQFPSLAHLSEQRIADQRRAIINNQYLSDEKLNSLKLEISEELSIDNTRNYNSETVAVNTNINNTNAEFTNNIDINSIEEPIPTIQTPDNTEIDSTEILPNSQINLERDPIIEDCFQQAFQFYKDTSPTNRIYIPKQKPSKNLARIISYINKNILPENINNDTDFHTFQTVIYCAAWTVAKVNGAKITLEPREITRHGTKTEYKPKWQRRLERKLNDLRSKIGRMTQFINGSRSRKLKKHVNKIIKLYRIHTVHEEPNTQAAHTLDTLKQKLSVVTGRLQRYKACNLRKQQNTQFNQNEKLFYRNIRQATTNVQQINPSDDELNTPNPEALQNFWAEIWEQPVHHNAQAEWIQAELSNNTNIQTMAFEHISPQIFHKVLSRLHNWKAPGSDQIHSYWYKKFTALHCYLYNFINSFIKDPIMIPSYITSGTTYMIPKDRNDLSNPAKYRPITCLQTLYKIITSCISEMIYEHIEANNILAEQQKGCRKYSQGCKEQLIIDSVILKRVQKSKTDLFTMYIDYKKAYDSVPHSWLLQVLEIYKINPTIVTFLKTMMSTWCTVLRLTTPTETTDTSPIKIQRGIFQGDALSPLWFCLALNPLSKILNATSLGTPLNSSATNRQTDPQKDVLNHLMYMDDIKLYAETESQLYELANLTETFTNDIKMEFGIDKCKINSVRAGQNYQHQYTLGTGEQIEPLDELETYKYLGYNQSRQIHYKDTKQKLKQQFQHRLNTILKTQLYSRNTIKAINTFAIPVLTYSFGIINWTKTELKNLQRKINTSMTKFRKHHPRSCIQRLTLPRKEGGRGLIDILNLHNRQITTLRQYFFAKTESSPLHKQIAHNDQHLTPLNLKDTTEQKNEKVTDERTKCQEWTQKSLHGRHRQDLCQLNVDKYASNAWLSRGELFPETEGFMFAIQDQVIETKNYRKYIIKNLTTDICRKCNSSPETIQHITGACKSIAQTDYKHRHDQVANVIHQKLAHKYKLIDTIVPYYKYNPETVLENSTTKLYFDRAILTDRTIHFNRPDITLIDKINKTGFLIDIAVPNTHNVQTTIAEKLSKYTELKDEITRIWHLQKVTIVPIVLSTTGVIPKQLHQSLSSLNLPPNTYHLMQKAVILNTCRLVRKFLQCESDNLHQYSHSNIVSSTTQSTYNITPTLNPTVGHLA

SEQ ID NO: 16636 - protein, 1380 aa, Schrankia costaestrigalis
MENFRKKYNLRPKPGTRRQITQSTTEPIEITSDSSSSDTRSLFSSVASTCPSYLTRRASSLSSSTSNSVVQEVITDLELVPTSDLPTKRRRWTAEMNQFILRTYLQLTALETDTKTYVEPLHIKFIEKYPNMDVSRQRVGDQRRAIINSKLLPQTVIDQIYNEVKENLGKHTEETHSSSLQVNDNMSHTPPTQHSTQYSPHTSNTLHSSINRDRRMRWTTEHNEFIMRTYYEVTNLGTNQTAYRKLLHERFISNFPSLSFITEQRIADQRRVIVLNKYLSIDRLDHIKKEVAEKLQVGNNTSLNISTEQPIPNHSETNQIQDTHIDSIRTIENETLNLTTNTETQVQIDETFHQATQFFENSDPTSRSYIPKQKATKKLATIVNYINETVLPKYVTQETSFDSLQTAIYCAAWTAAKINGTKLSLQVDKNQKEKLKHKPRWQIRLEKKLCDLRTKIGRLTQFQNGNRSRNVVKHTNTIIEQYKIHTTHEEPNTQIIYTLDTLKQKLAVVTGRLQRYKACTLRKQQNTQFMHNEKLFYRNVKQETTNIHSNHSNTNEQNVPTSENLHDFWANIWSTPIQHSSEAEWIQTECRNSNTTIQSMTFEHITPEIFFNVIHNIHNWKSPGSDNIHSYWYKKFTTIHSHLLSHINTFVEEPKLIPTYLTIGKTYMIPKDNENLADPSKYRPITCLQTLYKIITSCLSQLVYQHVSSNNILAEQQKGCKKYSQGCKEQLIIDSVILNQVQKSKSDLFSMYIDYKKAYDSVPHSWLIHVLELYKIHPKLIVFLKSLMSKWATVLTLNTPSKTIETNPIKIQRGIFQGDALSPLWFCLALNPLSNILNSTSLGYSFKDIVPDEQNIAQNNVVSHLLYMDDIKLYAKTETELNELARLTEQFTNDIKMEFGIDKCKINSIKAGQNYQHHYVLNTGEHINPLDEYSSYKYLGYNQSLQIQHKNIKQTLTQQFQHTLNTILKTQLNAINTVKAINTFVIPLLTYSFGVIRWTKTELKNLQRKINTTMTKFRKNHPRSSVHRLTLPRSEGGRGIIDISNLHNRQISGLRKYFFAKSQSSALHKYTAHNDHKFTPLNLKNPTLQINEQLIDDKTKIDDWTNKSLHGRHRHDLCQQNVDKEASNAWLSRGELFPETEGFIIAIQDQVIETKNYRKYIIKNLLSDTCRKCSSASETIQHITGACKSIAQTDYKHRHDQVANIIHQKLAQQYNFIDTLTPYYKYNPETVLDNSTTKLYYDRAILTDRTIHFNRPDITLINKVTRTGYLIDIAVPNTHNLQTTIAEKLTKYIELKDEITRLWNLQKVTIVPIVISTTGVIPKQLHQSIKTIELPTNTYNLLQKAVLLNTCRIVRKFLQCDSDTTPNAHNITHTTTTVNS

SEQ ID NO: 16637 - protein, 937 aa, Mesoligia furuncula
MTQFINGSRSRKLKKHVNKIIKLYRIHTIHEEPNTQAAHTLDTLKQKLSVITGRLQRYKACTLRKQQNTQFSQNEKLFYRNIRQATTNVQNKNPSDEELNTPNPEALQNFWAEIWEQPVHHNAEADWIQGELSNNTNIQTMVFEHISPQIFHKVLSRLHNWKAPGSDHIHSYWYKKFTALHCYLYNFINSFIKDPNMIPSYITSGTTYMIPKDRNDLSNPAKYRPITCLQTLYKIITSCISEMIYEHIEANNILAEQQKGCRKYSQGCKEQLIIDSVILKRVQKSKTDLFTMYIDYKKAYDSVPHSWLLQVLEIYKINPTIVTFLKTMMTTWCTVLRLTTPTETTDTSPIKIQRGIFQGDALSPLWFCLALNPLSKILNATSLGISLNSTATNRQTDLQKDVLNHLLYMDDIKLYAETESQLYELANLTETFTNDIKMEFGIDKCKINSVRAGQNYQHQYTLGTGEQIEPLDELDTYKYLGYNQSRQIHYKDTKQKLKHQFQHRLNTILKTQLYSRNTIKAINTFAIPVLTYSFGIINWTKTDLKNLQRKINTTMTKFRKHHPRSCIQRLTLPRKEGGRGLIDILNLHNRQITALRQYFFAKTESSPLHKLIAQSDQHLTPLNLKDTTEQKNEKVTDDKTKCQEWTQKSLHGRHRQDLCQSNVDKDASNAWLNRGELFPETEGFMLAIQDQVIETKNYRKYIIKNLTTDICRKCNSSPETIQHITGACKSIAQTDYKHRHDQVANVIHQKLAHKYKLIDAIVPYYKYNPETVLENPTTKLYFDRAILTDRTIHFNRPDITLIDKINKTGFLIDIAVPNTHNVQTTIAEKLSKYTELKDEITRLWHLQKVTIVPIVLSTTGVIPKQLHESLSSLNLPPNTYHLLQKAVILNTCRLVRKFIQCESDNLHQYSHLNIVSSTTQSTYNITPTLNPTVGHLA

SEQ ID NO: 16638 - protein, 1449 aa, Helicoverpa armigera
MEMNSERRYNLRSLPGERRGASGADAGCHSMRTIGGEALSRRTLTENKATAGRSELSRRAHGVDTTAESSGEDTISLFSSIPSTRPSYMTRRTSTLSTSTLASVVEDVNLDSELAPTTSAPTTRRRWTTEMNRFILRTYLQLTALGTDTRTYLEPLHTKFIEKFPNMQVSRQRIGDQRRAIVRNKLITQAEIDQIHEEVKEQLNQLQSDHRHHVESNIEHSNIESMSSQTTRIQPTTSETRNTPNRTQSRMRWTNEQNEAIMRSYYRVTDLGRNETAYRKTMYVDFINRYPSLAHLSEQRIADQRRLIINNKYITLDRLNSIKKEVAEELRQNTTYNTITEIPDYIVNTDSPLTDLQDTILIDINPTSEHTAPTENHDTTAINTESTTTTNPQINTERDQFIDETFQLAFNFYKETSPTDRIYIPKQKPSKHLAKIISYINKITIPEKINENTDFNTVQTVIYCAAWTAAKVNGAKIELQPKNCYSTVRPEYIPSWQKRLKRKLNDLRSKIGKVTQYINGNRSRKVLRHINTIFEQYKTHTVHEEPNTQAIHILDTLRQKLSVVTGRLQRYSACTQRKKQNNQFTQNEKLFYRNIRQATSNLQANPLNADERNAPDPEILQSFWSNIWEQPVEHNTEAEWIRTEQTQNSNTPEMVFEHISPQIFQNVLSRLHNWKAPGSDHIHSYWYKKFTAVHGYLHTFINKFIQNPESIPSYITSGTTFMLPKDPSDPSNPAKYRPITCLQTLYKIMTSCISELIYKHIDSNSLLAEQQKGCRRFSQGCKEQLIIDSVILKKTLKTKTDLFSMYIDYRKAYDSVPHSWLIQILKIYKIHPTLVNFLKTMMSTWTTVLKLTTTTQTIETNTIKIQRGIFQGDSLSPLWFCLALNPLSNILNSSPFGIPLADHENTEQPQNQNNALSHLLYMDDIKLFAKSEDHLYQLANLTEQFTNDIKMEFGIDKCKINSVRAGQNYRHHYTTESGEQIESLEQQETYKYLGYAQSSQILQKDTKNKLTQQFQHRLNTILKTQLYSRNTIKAINTFAIPVLTYSFGIINWTKSDLKNLQRKINKTMTKFRKHHPRSCLQRLTLPRKEGGRGLIDILNLHNKQIKTLRQYFYMKKSSSTLHRSIAQNDRRFTPLNLQDTSEQKNERITDDKTKLQEWTQKSLHGRHRQDLCQQNVDKEASNAWLNRGELFPETEGFMMAIQDQVIETRNYRKYIIKNLNNDICRKCNSAAETIQHITGACKSIAQTDYKHRHDQVANVIHQKLAHQYKLINSIVPYYKYIPETVLESPTTKLYFDRAILTDRTVHFNRPDITLIDKTNKTGYLIDIAVPNTHNMQHTIAEKLSKYIELKDEITRLWRLQKVTIIPIVLSTTGVIPKQLHQSLQSLSLPPNTYQLLQKAVILNTCRLVRKFLQCETETHQNTQSPNVTTTQIQRGNNQNIINPTGEHLA

SEQ ID NO: 16639 - protein, 804 aa, Noctua janthe
MLFEQISPQIFHGVLARLHNWKAPGSDHIHSYWYKKFTAVHSFLYNYINNFIQDPKSIPSYLTSGTTYMISKDPNDLSNPAKYRPITCLQTLYKIITSCLSELIYIHTDTNNILAEQQKGCRKFSQGCKEQLIIDSIILKKAQKFKTDLYSMYIDYKKAYDSVPHSWLVKVLEIYRIHPTIITFLKTIMETWSTVLRINTSKETVDTCPIKIQRGIFQGDALSPLWFCLALNPLSNILNSTRTGFPLEYIASDGQPEVQNNALNHLLYMDDIKLYAKSESQLNELANLTEQFTNDIRMEFGIDKCKINSVRAGQYYQHQYTLETGEHIEPLDEHDTYKYLGYNQSRQINHKETKQKLKQQFQHRLNTILKTQLYSRNTIKALNTFAIPILTYSFGIIKWTKTDLKNLQRKINTTMTKFRKHHPRSCVQRLTLPRKEGGRGLIDIQNLHNKQVTTLRQYFFTKAESSILHKEIANNDHHFTPLNLKDKSEQKNEKVTDNKTKLLEWSQKSLHGRHYQDLSQINVDKEASNAWLKRGELFPETEGFMLAIQDQIIETKNYRKFIIKNLSTDMCRKCNSSPETIQHITGACKSIAQTDYKHRHDQVANVIHQKLAHQYKLVDSIVPYYKYIPETVLENPSTKLYFDRGIFTDRTIHFNRPDITLINKTNKTGYLIDIAVPNTHNLQTTIAEKLSKYTELKEEITRLWHLQKVTIVPIVLSATGVIPKQLHQSLTSLNLPSNTYHLLQKAVILNTCRLVRKFLQCESDNPHQHIHFNIPSSLIQATTQNRIVPTTTSLTLNPADNHLA

SEQ ID NO: 16640 - protein, 977 aa, Noctua janthe
MNTNTNTKTIYTPYWQRRLERKLKDLRSKIGRMTQFINGNRSRKILKHVKRINKQYKIHTIHEEPNTQPEHTLDTLKQKLAVVTGRLQRYKACTQRKRQNTQFIFNEKLFYRNIRQVSTNIQNNNPSDDVVHNLDLETLQNFWAGIWEYPIEHNTQADWIQNEVANANTNIQPMAFEHISPQIFHEVLARLHHWKAPGSDKIHSYWHKKFTAVHSFLYNHINNFIQDPKTIPPYLTSGTTYMIPKDRNDLSNPAKYRPITCLQTLYKIITSCVSSLIYQHTDTNNILAEQQKGCRKFSQGCKEQLIIDSIILKKAQKSKSDLYSMYIDYKKAYDSVPHSWLVQILEIYKIHPTIITFLKTTMTTWSTVLRFNTSTEAADSRPIKILRGIFQGDALSPLWFCLALNPLSNILNSTFAGFPLEDTTLDGQREVQNNTLNHLLYMDDIKLYSKTESQLNELANLTEQFTNDVKMEFGIDKCKINSVRAGQYYQHQYTLETGEHIDPLEEHDTYKYLGYTQSRQINHKETKQKLKQQFQHRLNTILKTQLYSRNTIKALNTFAIPVLTYSFGIINWTKTDLKNLQRKINTTMTKFRKHHPRSCVQRLTLPRKQGGRGLIDIQNLHNKQITTLRQYFFTKAESSTLHKQIANNDNHFTPLNLKDKSEQNNEKITDNKTKLLEWSQKSLHGRHYQDLSQINVDKEASNAWLKRGELFPETEGFMLAIQDQVIETKNYRKYIIKNLSTDTCRKCNSSPETIQHITGACKSIAQTDYKHRHDQVANVIHQKLAHQYKLVDSIVPYYKYTPETVLENPSTKLYFDRGIFTDRTIHFNRPDITLINKTNKTGYLIDIAVPNTHNLQTTIAEKLSKYTELKEEITRLWHLQKVTIVPIVLSTTGVIPKQLHQSLTSLNLSSNTYHLLQKAVILNTCRLVRKFLQCESDNPHQHIHLNIPSSLFQATTLNRNVPITTSVTLYPADNHLA

SEQ ID NO: 16641 - protein, 977 aa, Hypena proboscidalis
MNGNRSQNVLKHAHRILEQYRTHTIHEEPNSQIIHTLDTLKQKLSVVNGRLHRYKACTLRKNQNSQFTNNEKHFYRNLRQATANIQENITNDDASNIPSREELQNFWARIWENPIQHNNQAAWIQTEGTKIRSEMEYHHIPPEIFQNVLRNVHNWKAPGSDYIHSYWYKKFTAIHTNLYHHLNTFIEDPNTIPSYLASGKTFMIPKDRNDPSNPAKYRPITCLQTLYKIMTSCISELIYQYIDANNILAEQQKGCRKFSQGCKEQLTIDSVILKQVQRTRSNLFSMYIDYKKAYDSVPHSWLVHVLELYKIHPIIIAFLRTIMTKWTTVLRLTTATKIVETSSIQIQRGIFQGDALSPLWFCLALNPLSNILNSTKLGYPLQYSEQSGQQNLRQNVLNHLLYMDDIKLYANTENQLYKLANLTEQFSYDIHMEFGIDKCKVNSVKTGQNYQHQYTLGTGERIESLEEQDTYKYLGYHQSLQIKYKDTKLKLTQQFQHRLNAILKTQLNSKNTVKAINTYVIPLLTYSFGIIFWSKTELKNLQRRINTTMTKHRKHHPRACLQRLTLPRKDGGRGLIDILNLHNKQITTLRNYFFAKSETSILHTSIAQNDNKLTPLNLKDSTKQKNEVVIDDKSKLADWTQKALHGRHRQDLCQQNVDKEASNAWLNRGELFPETEGFMIAIQDQVIETKNYRKYIIKTLRTDTCRKCNSCPETIQHITGACKSIAQTDYKHRHDQVANIIHQKLAHQYKFVDSIVPYYKYNPQTVLENASTKLYFDRAILTDRTVHFNRPDITLINKITKTGFLIDIAVPNTHNLQTTIAEKLTKYLELKDEITRLWHLQNVTIVPIVLSTTGIIPKQLHHSLNTLQLSPYTYNLMQKAVILNTCRLVRKFLQCEPDNTQPVTNEQTPTIITSAHTLTGTTLAHTFTTTTPAHTSTTTHTSTTAHTLTITNLAHTSTITDSVHNNNSNRSTEGHLA

SEQ ID NO: 16642 - protein, 1420 aa, Hydraecia micacea
MRTIGGEELSKRAPTEKIATAGRSGLNRRAHYVEATADSTGDDTISLFSSIPSTRPSYMTRRTASLSTTSTLDSVVQDVNPDSELAPTISTPNTRRRWTPEMNKFILRTYLQLTLLDTDRRTYLEPLHLKFTEKFPNMQVSRQRIGDQRRAIINNKLLSQKIIDEIRNEVKDELDQLQLNHVTLHTQNSSKFTKQIFTSTQATQIQPTTLETHSTQNRTQTRMKWTSEHNEAIMRSYYRVTALGTNETTYRKPMYEDFINQFPSLAHLSEQRIADQRRAIINNQYLSSEKLNSLKLEISEELSIDNTRNYNSETVAVNTNINNTNVEFTNNIDINSIEEPIPTIQTPDNTEINSTEILPNPQINLERDPIIEDYFQQAFQFYKDTSPTNRIYIPKQKPSKNLARIISYLNKNILPENINNDTDFHTFQTVIYCAAWTVAKVNGAKIKLEPREITRHGTKTEYKPKWQRRLERKLNDLRSKIGRMTQFINGSRSRKLKKHVNKIIKLYRIHTVHEEPNTQAAHTLDTLKQKLSVVTGRLQRYKACNLRKQQNTQFNQNEKLFYRNIRQATTNVQQINPSDDELNTPNPEALQNFWAEIWEQPVHHNAQAEWIQAELSNNTNIQTMTFEHISPQIFHKVLSRLHNWKAPGSDQIHSYWYKKFTALHCYLYNFINSFIKDPIMIPSYITSGTTYMIPKDRNDLSNPAKYRPITCLQTLYKIITSCISEMIYEHIEANNILAEQQKGCRKYSQGCKEQLIIDSVILKRVQKSKIDLFTMYIDYKKAYDSVPHSWLLQVLEIYKINPTIVTFLKTMMTTWCTVLRLTTPTETTDTSPIKIQRGIFQGDALSPLWFCLALNPLSKILNATSLGTPLNSSATNRQTDPQKDVLNHLMYMDDIKLYAETESQLYELANLTETFTKDIKMEFGIDKCKINSVRAGQNYQHQYTLGTGEQIEPLDELETYKYLGYNQSRQIQYKDTKQKLKQQFQHRLNTILKTQLYSRNTIKAINTFAIPVLTYSFGIVNWTKTELKNLQRKINTTMTKFRKHHPRSCIQRLTLPRKEGGRGLIDILNLHNRQITALRQYFFAKTESSPLHKQIAHNDQHLTPLNLKDTTEQKNEKVTDERTKCQEWTQKSLHGRHRQDLCQLNVDKDASNAWLSRGELFPETEGFMLAIQDQVIETKNYRKYIIKNLTTDICRKCNSSPETIQHITGACKSIAQTDYKHRHDQVANVIHQKLAHKYKLIDTIVPYYKYNPETVLENSTTKLYFDRAILTDRTIHFNRPDITLVDKINKIGFLIDIAVPNTHNVQTTIAEKLSKYTELKDEITRIWHLQKVTIVPIVLSTTGVIPKQLHQSLSSLNLPPNTYHLMQKAVILNTCRLVRKFLQCESDNLHQYSHSNIVSSTTQSTYNITPTLNPTVGHLA

SEQ ID NO: 16643 - protein, 1395 aa, Boloria selene
MEMSKRIYNLRPLPGGRRGTPGAGAGCHSIRTIGDVELSRRASIDKSTTADRRELSRRAYGVEVTADSLGLDTDSLYSSIPSTRPSYMTRRTSTLSTSTSNSVVQEVNIDSDLVPTAVTPCMRRRWTPEMNKFILRTYLQLTSLDTDTKTYLEPLYLKFIEKYPNMEVSRQRIGDQRRAIVRNKLLPQKTMELIYNEVKEELNHTHHHPTPYTTPHTTQNTQTPSQSRMRWTNEQNEALIKSYYRVTNLGTNETAYRKPLHTDFTNRFPSLAYLSEQRIADQRRAIINNKYINLDRLQVLKEEIAVELKFNKNHPTSAAAAPIAPNKLINTNELHHDKIETDIPNISDINSLQELPFNSEAILERQPQIDETFQHAFLFYKDTEPTNRTYIPIQKPSKKFANIVNYINKIILVENTNKDIDFFTLQTIIYCAAWTAAKTNGAKVELKTRQYQQQAKKEYSPHWQKRIERKIEDLRAKIGRLTQFINGNRSRNILKHVNKIIEQYKIHTVHEETNTQVTHTLDTLKQKLAVATGRLKRYKACTLRKQQNTQFTYNEKQFYRNIKKATTNIQDSSMINHSNDNLTPESLQSFWEEVWSKPVQHNTQAEWIKTETTNNMTNTQNMKFEPISLEALQKTIKNLHNWKSPGSDYIHSFWYKKFTTVHSHIHKYINSFIQDPNSMPSYLTSGKTYMILKDRNDVFNPAKYRPITCLQTLYKIMTSIISELIYQHVNTNNILTEQQKGCRKFSHGCKEQLIIDSVILKQVQRRKSDLFSMYIDYKKAYDSVPHSWLVKVLEIYKIHPIIVTFLKTIMTKWTTILTLNTSTVILETNPIKIQRGLFQGDSLSPLWFCIALNPLSNLLNSTQIGYPLNETKISEQIYLQNYMLNHLLYMDDIKLYAENESQLNRLAFLTERFSMDIQMEFGIDKCRINSIKAGQNYQHNYTLESGEQIIPLDEEDTYKYLGYNQSLQIHYKQTKQKLTQQFQHRLNMILKTQLNSKNTIKAINTFVIPLLTYSFGVINWTKTELKNLQRKINTSMTKFRKHHPRSCLQRLTLPRAEGGRGLIDIVNLHNRQVINLRQYFFHKIESSTLHKLIVQNDKKLTPLNLKDTIEQVNYKLIDDKHKIMEWAQKSLHGRHRQDLCQPNVDKQASNAWLTGGVLFPETEGFIIAIQDQVVETRNYRKYIIKNLTVDTCRKCNSAPETIQHITGACKSIAQTDYKHRHDQVANIIHQKLAHQYKLIDTFTPYYKYSPQSVLENTSSKLYFDRAILTDRTIHYNRPDITLINKVTKTGYLIDIAVPNTHNLQNTIAEKLSKYTDLKDEITRIWHLQKVSIVPIVISTTGVIPKQLHQSLNTLSLPPKTYYLLQKAIILNTCRVVRKFLQTDNDNLQVFNTTET

SEQ ID NO: 16644 - protein, 1452 aa, Griposia aprilina
MEMSNKRVYNLRSLPGERRGASGADARCHSMRTIGGEELSKRAPTNKIVTAGRSDLNRRAHYVEATADSMGDDTMSLFSSIPSTRPSYMTRRTASLSTTSTLDSVAQDVNLDSELASTTSAPSTRRRWTPEMNKFILRTYLQLTSLDTDRRTYLEPLHLKFTEKFPNMQVSRQRIGDQRRAIINNKLLPQKTIDEIRNEVKDELDQLHFTLQSQNSGELRQQILAPTQSTQIQPTTPETHSTQNRTQTRMRWTSEHNEAIMRSYYRVTALGTNETTYRKPMYEDFINQFPSLAHLSEQRIADQRRAIINNNYLSDDKLNSLKLEVSEELGTDNTRNYNSETIAVITNINNANIQLTNNIDINSIEEPTPNVQITDNTELNSTDILPNPQVNLERDPIIDDSFQQAFQFYKDTSPTNRVYIPKQKPSKNLARIISYLNKIILPENINNNTDFHTFQTVIYCAAWTVAKVNGAKITLEPREITRGTKKEYKPKWRRRLEQKVYDLRSKIGRMTQFINGNRSRKLKKHVNKIIILYKIHTVHEEPNTQALHTLDTLKQKLSVVTGRLERYKACTLRKQQNTQFTQNEKLFYRNIRQATTNVQNNNPNDDELNTPNPETLQNFWAGIWEQPIHHNAQADWIHAELSSNTDIQTMAFEHISPQIFHKVLSRLHNWKAPGSDHIHSYWYKKFTAVHCYLYNFINSFIQDPKIIPSYITSGTTYMIPKDRNDLCNPAKYRPITCLQTLYKIITSCISEMIYEHIDANNILAEQQKGCRKYSQGCKEQLIIDSVILKRVQKYKTDLFTMYIDYKKAYDSVPHSWLLQVLEIYKIHPTVISFLKTMMTTWCTVLRLTTPTETIDTSPIKIQRGIFQGDALSPLWFCLALNPLSKILNATSLGIPLNYTATNRQTDPQEDVLNHLLYMDDIKLYAETESQLYELANLTETFTKDINMEFGIDKCKINSVRAGQNYQHQYTLGTGERIEPLDELDTYKYLGYNQSRQIHYKDTKQKLKQQFQHRLNTILKTQLHSRNTIKAINTFAIPVLTYSFGVINWTKTDLKNLQRKINTTMTKFRKHHPRSCIQRLTLPRKEGGRGLIDILNLHNRQITALRQYFFAKTESSLLHKLIAHNDQHFTPLNLKDTTKQKNENVIDDKTKCQEWTQKSLHGRHRQDLSQLNVDKDASNAWLDRGELFPETEGFMLAIQDQVIETKNYRKYIIKNLTTDTCRKCNSSPETIQHITSACKSIAQTDYKHRHDQVANVIHQKLAHQYKLVDTVVPYYKYKPETVLENPATKLYFDRAILTDRTIHFNRPDITLINKINRIGFLIDIAVPNTHNLQTTIAEKLSKYTELKDEITRLWHLQKVTIVPIVLSATGVIPKQLHQSLSSLNLPPNIYHLLQKAVILNTCRLVRKFLQCESDNLHQYSHSNIVSSTIQSTSENQAASNISSTLHPTDGHLA

SEQ ID NO: 16645 - protein, 1205 aa, Noctua janthe
MRWTNEQNEAIMRSYYRVTTLETNQTVYRKLMHEDFIRKFPSLAHLSEQRIADQRRAIVNNKYINTERLNSLKLEISNELQLENSNHNNIVITVDVNSIDTQSNANNIGLYSIENPIAQTLNNGQADIETDILHNPQTSLDRDLLIDETFQQTHQFYIETSPTNRIYIPKQKPSKNLARIVDYINKIILPENVNKDTDFHTLQTAIYSAAWTAAKVNGAKLTLQPREMNINTNTKKIHMPHWQRRLERKLKDLRSKIGRMTQFINGNRSSKIIKHVKSIAKQYEIHTIHEAPNTQAEHTLDTLKQKLAVVTGRLQRYKACTQRKQQNNQFIQNEKLFFRNLRQTSTNVQNSNTNNADSHNNLDPEDLQSFWAGIWEQPIEHNTQAEWIQTELTNSSTNIQPMLFEQISPQIFHGVLARLHNWKAPGSDHIHSYWYKKFTAVHSFLYNYINNFIQDPKSIPFYLTSGTTYMISKDPNDLSNPAKYRPITCLQTLYKIITSCLSELIYIHTDTNNILAEQQKGCRKFSQGCKEQLIIDSIILKKAQKFKTDLYSMYIDYKKAYDSVPHSWLVKVLEIYRIHPTIITFLKTIMETWSTVLRINTSKETADTYPIKIQRGIFQGDALSPLWFCLALNPLSNILNSTRTGFPLEYIASDGQPEVQNNAINHLLYMDDIKLYAKSESQLNELANLTEQFTNDIRMEFGIDKCKINSVRAGQYYQHQYTLETGEHIEPLDEHDTYKYLGYNQSRQINHKETKQKLKQQFQHRLNTILKTQLYSRNTIKALNTFAIPILTYSFGIIKWTKTDLKNLQRKINTTMTKFRKHHPRSCVQRLTLPRKEGGRGLIDIQNLHNKQVTTLRQYFFTKAESSILHKEIANNDHHLTPLNLKDKSEQKNEKVTDNKTKLLEWSQKSLHGRHYQDLSQINVDKEASNAWLKRGELFPETEGFMLAIQDQIIETKNYRKFIIKNLSTDMCRKCNSSPETIQHITGACKSIAQTDYKHRHDQVANVIHQKLAHQYKLVDSIVPYYKYIPETVLENPSTKLYFDRGIFTDRTIHFNRPDITLINKTNKTGYLIDIAVPNTHNLQTTIAEKLSKYTELKEEITRLWHLQKVTIVPIVLSATGVIPKQIHQSLTSLNLPSNTYHLLQKAVILNTCRLVRKFLQCESDNPHQHIHFNIPSSLIQATTQNRIVPTTTSLTLNPADNHLA

SEQ ID NO: 16646 - protein, 944 aa, Ochropleura plecta
MKQFINGNRSRKIKKHVKRIAKQYKIHTIHEPPNTQAEHTLDTLKQKLAVVTGRLQRYKACTQRKQQNSQFNLNEKLFYRKLKQTSTNVQNNNTNNADSQNKLDPEILQNFWAGIWEQPVQHNTQAEWIQTERTNGNTIIQPMSFEYISPEIFHGVLARLHNWKAPGSDHIHSYWYKKFTAVHSFLYNYINNFILDPKSIPSYLTSGTTYMISKDRNDFSNPAKYRPITCLQTLYKIITSCLAELIYKHTDTNNILAEQQKGCRKFSQGCKEQLIIDSVVLKKAQKTKSDLYSMYIDYKKAYDSVPHTWLVQVLEIYRIHPTIITFLKTMMSTWSTVLRLNTSKETTDTRPIKIQRGIFQGDALSPMWFCLALNPLSNILNSIGTGFPLEVTARDGQRQAPNNGLNHLLYMDDIKLYAQSESELNELTNLTEQFTNDIKMEFGIDKCKINSVKAGQYYQHQYTLDTGEHIESLDEHDTYKYLGYNQSRQINHKETKQKLKQEFQHRLNTILKTQLNARNTIKTLNTFAIPVLTYSFGIINWTKTDLKNLQRKVNTTMTKFRKHHPRSCVQRLTLPRKEGGRGFIDILNLHNKQIASLRQYFFTKAETSTLHKLITNSDHHSTPLNLKDKFGQKNEQVTENKTKLLEWSQKSLHGRHYQDLSQNNVDKEASNAWLERGELFPETEGFMLAIQDQVIETKNYRKFIIKNLSSDTCRKCNSSPETIQHITGACKSIAQTDYKHRQDQVANIIHQKLAHQYKFIDSIVPYYKYIPETVLEKPSTKLYFDRGIFTDRTVHFNRPDITLINKTNKTGYLIDIAVPNTHNLQTTIAEKLSKYTELKEEITRLWHLQKVTIVPIVLSTTGVIPKQLHQSLTSLNLPSNTYHLLQKAVILNTCRLVRKFLQCESENSNQHIHLNRASSHFQATAQNSVITTSLTLNPTVNHLA

SEQ ID NO: 16647 - protein, 1174 aa, Xestia c-nigrum
MQVSRQRVGDQRRAIIHNKLLTQKTIDEIEAEVREELNQLQLISETQFPTNHTQSLATTTQTQSTTLESPRTQNKTQTRMRWTNEQNEAIMRSFYRVTTLETNQTVYRKLMYEDFITKFPSLAHLTEQRIADQRRAIVNNKYISTERLNLLKLEISDELQLDNSNYNNLAIIVNDNTIETQPEGPIVQILNNDQVDVATDGLHNSQTSLEDRDPLIDATFQQTLQFYIATSPTNRIYIPKQKRSKNLARIVDYINKIILPENVNKDTDFQTLQTVIYSAAWTAAKANGAKLTLQPKEINTNTNQKKIYTPHWQRRLERKLIDLRSKIGRMTQFINGNRSRKIIKHVKCINKQYKIHTVHEEPNTQPEHTLDTLKQKLAVVTGRLQRYKACTQRKRQNTQFTLNEKLFYRNIRQVSTNVQNINPSDDDVQNNVDLQNLQNFWAGIWEHPIEHNTQTDWIQAELSNASTNIQPMTFEHISPQIFHEVLARLHNWKAPGSDQIHSYWYKKFTAIHSFLYNYINNFIQDPKTIPPYLTSGTTYMISKDRNDLSNPAKYRPITCLQTLYKIITSCMSSLIYNHIDTNNILAEQQKGCRKFSQGCKEQLIIDSIILKKAQKSKTDLYSMYVDYKKAYDSVPHSWLVQILEIYRIHPTIITFLKTTMTTWSTVLRVNTSTDAADTRPIKILRGIFQGDALSPLWFCLALNPLSNILNSTGTGFPLRDTTHEGQHEVQNNTLNHLLYMDDIKLYAKSESQLNELANLTEQFTNDVKMEFGIDKCKINSVRAGQYYQHQYTLETGEHIDPLDEHDTYKYLGYNQSRQINHKETKQKLKQQFQHRLNTILKTQLYARNTIKALNTFAIPVLTYSFGIINWTKTDLKNLQRKINTTMTKFRKHHPRSCVQRLTLPRKEGGRGLIDIQNLHNKQITTLRQYFFTKTESSTLHKQIANNDIHFTPLNLKDKSEQKNEKVTDNKTKLLEWSQKSLHGRHYQDLSQINVDKEASNAWLKRGELFSETEGFMIAIQDQVIETKNYRKYIIKNLTTDTCRKCNRLPETIQHITGACKSIAQTDYKHRHDQVANVIHQKLAYQYKLLDSIVPYYKYTPETVLENTSIKLYFDRGIFTDRTIHFNRPDITLINKTNKTGYLIDIAVPNTHNIQTTIAEKLSKYTELKEEITRI

SEQ ID NO: 16648 - protein, 1032 aa, Xestia c-nigrum
MYIPKQKPSKNLARIVDYINKIILPENVNKDTDFQTLQTVIYSAAWTAAKANGAKLTLQPKEINTNTNQKKIYTPHWQRRLERKLIDLRSKIGRMTQFINGNRSRKIIKHVKRINKQYKIHTVHEEPNTQPEHTLDTLKQKLAVVTGRLQRYKACTQRKRQNTQFTLNEKLFYRNIRQVSTNVQNINPSDDDVQNDLDLQNLQNFWAGIWEHPIEHNTQTDWIQAELSNASTNIQPMTFEHISPQIFHEVLARLHNWKAPGSDQIHSYWYKKFTAIHSFLYNHINNFIQDPKTLPPYLTSGTTYMISKDRNDLSNPAKYRPITCLQTLYKIITSCISSLIYNHIDTNNILAEQQKGCRKFSQGCKEQLVIDSIILKKAQKSKTDLYSMYIDYKKAYDSVPHSWLVQILEIYRIHPTIITFLKTTMTTWSTVLRVNTSTDAADTRPIKILRGIFQGDALSPLWFCLALNPLSNILNSTGTGFPLRDTTHEEQHEVQNNTLNHLLYMDDIKLYAKSESQLNELANLTEQFTNDVKMEFGIDKCKINSVRAGQYYQHQYTLETGEHIDPLDEHDTYKYLGYNQSRQINHKETKQKLKQQFQHRLNTILKTQLYARNTIKALNTFAIPVLTYSFGIINWTKTDLKNLQRKINTTMTKFRKHHPRSCVQRLTLPRKEGGRGLIDIQNLHNKQITTLRQYFFTKAESSTLHKQIANNDIHFTPLNLKDKSEQKNEKVTDNKTKLLEWSQKSLHGRHYQDLSQINVDKEASNAWLKRGELFPETEGFIIAIQDQVIETKNYRKYIIKNLTTDTCRKCNRLPETIQHITGACKSIAQTDYKHRHDQVANVIHQKLAYQYKLLDSIVPYYKYTPETVLENTSIKLYFDRGIFTDRTIHFNRPDITLINKTNKTGYLIDIAVPNTHNIQTTIAEKLSKYTELKEEITRIWHLQKVTIVPIVLSTTGVIPKQLHQSLTSLNLPSNTYHLLQKAVILNTCRLVRKFLQCESDNPPQTCFQPPIQIRNLPITTPLILNPADNHLA

SEQ ID NO: 16649 - protein, 1434 aa, Xestia c-nigrum
MEMSHKKVYNLRSLPGERRGAFGADAECHSMRTIGGDELSKRALTEKLVTAGRSKLNRRAHYVDATADSTGDDTISLFSSIPSTRPSYMTRRTTSLSTTTTLDSVVQEVNLDSELAPATSAPKTRRRWTPEMNKFILRTYLQLTSLDTDRKTYLEPFHLKFIEKYPNMQVSRQRVGDQRRAIINNKLLTQKTIDEIEAEVREELNQLLLSSETQFPTNHTRSLATTTQTQSTTLESPRTQNKTQTRMRWTNEQNEAIMRSFYRVTTLETNQTVYRKLMYEDFITKFPSLAHLTEQRIADQRRAIVNNKYISTERLNLLKLEISNELQLDNSNYNNLAIIVNDNTIKTQPEDPIVQILNNDQVDVATDGLHNSQTSLEDRDPLIDATFQQTLQFYIATSPTNRMYIPKQKPSKNLARIVDYINKIILPENVNKDTDFQTLQTVIYSAAWTAAKANGAKLTLQPKEINTNTNQKKIYTPHWQRRLERKLIDLRSKIGRMTQFINGNRSRKIIKHVKCINKQYKIHTVHEEPNTQPEHTLDTLKQKLAVVTGRLQRYKACTQRKRQNTQFTLNEKLFYRNIRQVSTNVQNINPSDDDVQNNVDLQNLQNFWAGIWEHPIEHNTQTDWIQAELSNASTNIQPMTFEHISPQIFHEVLARLHNWKAPGSDQIHSYWYKKFTAIHSFLYNYINNFIQDPKTIPPYLTSGTTYMISKDRNDLSNPAKYRPITCLQTLYKIITSCISSLIYNHIDTNNILAEQQKGCRKFSQGCKEQLIIDSIILKKAQKSKTDLYSMYIDYKKAYDSVPQSWLVQILELYRIHPTIITFLKTTMTTWSTVLRVNTSTDAADTRPIKILRGIFQGDALSPLWFCLALNPLSNILNSTGTGFPLRDTTHEGQHEVQNNTLNHLLYMDDIKLYAKSESQLNELANLTEQFTNDVKMEFGIDKCKINSVRAGQYYQHQYTLETGEHIDPLDEHDTYKYLGYNQSRQINHKETKQKLKQQFQHRLNTILKTQLYARNTIKALNTFAIPVLTYSFGIINWTKTDLKNLQRKINTTMTKFRKHHPRSCVQRLTLPRKEGGRGLIDIQNLHNKQITTLRQYFFTKAESSTLHKQIANNDIQFTPLNLKDKSEQENEKVTDNKTKLLEWSQKSLHGRHYQDLSQINVDKEASNAWLKRGELFPETEGFMIAIQDQVIETKNYRKYIIKNLTTDTCRKCNRLPETIQHITGACKSIAQTDYKHRHDQVANVIHQKLAYQYKLLDSIVPYYKYTPETVLENTSIKLYFDRGIFTDRTIHFNRPDITLINKTNKTGYLIDIAVPNTHNIQTTIAEKLSKYTELKEEITRIWHLQKVTIVPIVLSTTGVIPKQLHQSLTSLNLPSNTYHLLQKAVILNTCRLVRKFLQCESENPPQIFFQAPTQRRNLPITTPLILNPADNHLA

SEQ ID NO: 16650 - protein, 1452 aa, Griposia aprilina
MEMSNKRVYNLRSLPGERRGASGADARCHSMRTIGGEELSKRAPTNKIVTAGRSDLNRRAHYVEATADSMGDDTMSLFSSIPSTRPSYMTRRTASLSTTSTLDSVAQDVNLDSELAPTTSAPSTRRRWTPEMNKFILRTYLQLTSLDTDRRTYLEPLHLKFTEKFPNMQVSRQRIGDQRRAIINNKLLPQKTIDEIRNEVKDELDQLHFTLQSQNSGELRQQILAPTQSTQIQPTTPETHSTQNRTQTRMRWTSEHNEAIMRSYYRVTALGTNETTYRKPMYEDFINQFPSLAHLSEQRIADQRRAIINNNYLSDDKLNSLKLEVSEELGTDNTRNYNSETIAVITNINNANIQLTNNIDINSIEEPTPNVQITDNTELNSTDILPNPQVNLERDPIIDDSFQQAFQFYKDTSPTNRVYIPKQKPSKNLARIISYLNKIILPENINNNTDFHTFQTVIYCAAWTVAKVNGAKITLEPREITRDTKKEYKPKWRRRLEQKVYDLRSKIGRMTQFINGNRSRKLKKHVNKIIILYKIHTVHEEPNTQALHTLDTLKQKLSVVTGRLERYKACTLRKQQNTQFTQNEKLFYRNIRQATTNVQNNNPNDDELNTPNPETIQNFWAGIWEQPIHHNAQADWIHAELSSNTDIQTMAFEHISPQIFHKVLSRLHNWKAPGSDHIHSYWYKKFTAVHCYLYNFINSFIQDPKIIPSYITSGTTYMIPKDRNDLCNPAKYRPITCLQTLYKIITSCISEMIYEHIDANNILAEQQKGCRKYSQGCKEQLIIDSVILKRVQKYKTDLFTMYIDYKKAYDSVPHSWLLQVLEIYKIHPTVISFLKTMMTTWCTVLRLTTPTETIDTSPIKIQRGIFQGDALSPLWFCLALNPLSKILNATSLGIPLNYTATNRQTDPQEDVLNHLLYMDDIKLYAETESQLYELANLTETFTKDINMEFGIDKCKINSVRAGQNYQHQYTLGTGERIEPLDELDTYKYLGYNQSRQIHYKDTKQKLKQQFQHRLNTILKTQLHSRNTIKAINTFAIPVLTYSFGVINWTKTDLKNLQRKINTTMTKFRKHHPRSCIQRLTLPRKEGGRGLIDILNLHNRQITALRQYFFAKTESSLLHKLIAHNDQHFTPLNLKDTTKQKNENVIDDKTKCQEWTQKSLHGRHRQDLSQLNVDKDASNAWLDRGELFPETEGFMLAIQDQVIETKNYRKYIIKNLTTDTCRKCNSSPETIQHITSACKSIAQTDYKHRHDQVANVIHQKLAHQYKLVDTVVPYYKYKPETVLENPATKLYFDRAILTDRTIHFNRPDITLINKINRIGFLIDIAVPNTHNLQTTIAEKLSKYTELKDEITRLWHLQKVTIVPIVLSATGVIPKQLHQSLSSLNLPPNIYHLLQKAVILNTCRLVRKFLQCESDNLHQYSHSNIVSSTIQSTSENQAASNISSTLHPTDGHLA

SEQ ID NO: 16651 - protein, 1447 aa, Epargyreus clarus
MEMSKRVYNLRSLPGGRRGASGADAGCHSMRSIGGEELSKRAPTEKNVTAGRSELNRRVHNVEATADSTGDDTTSLFSSIPSTRPSYMTRRTTSLSTITTLDSVVQEVNLDSELAPTTSAPRTRRRWTPEMNKFILRTYLKLTLLDTDRKTYLEPLHLKFIEKYPNMQVSRQRVGDQRRAIINNKLLTQKTIDEIEAEVREELNQLKLSAQTQFPTNHTQSIATITQTQSTTLETPRAQNKTLSRMRWTNEQNEAIMRSYYRVTTLETNQTVYRKLMHEDFIRKFPSLAHLSEQRIADQRRAIVNNKYISTERLNSLKLEISNELQINNSTNNNFAITVNDNTTEIQSNANNIDIYSTDDPIIQILNNDQVDVATDGQHNSQTSLEERDLLIDATFQQTLQFYIATSPTNRMCIPKQKPSKNLARIVHYINKITLPENVNKDTDFQTLQTAIYSAAWTAAKVNGAKLTLQPREKNTNTNTKKLDTPHWQRRLERKLKDLRSKIGRMTQFINGNKSRKIIKHVKRINKQYKIHTVHEEPNTQPEHTLDTLKQKLAVVTGRLQRYKACTQRKKQNTQFILNEKFFYRNIRQISTNVQNNNSSDDDGQNNLDLETLQNFWAGIWEHPIEHNTQADWIQAELYNASTNIQPMTFEHISPQIFHEVLARLHNWKAPGSDQIHSYWYKKFTAVHSFLYNYINKFIQDPKTMPPYLTSGTTYMISKDCNDLSNPAKYRPITCLQTLYKIITSCISSLIYKHTDTNKILAEQQKGCRKFSQGCKEQLVIDSIILKKAQKSKTDLYSMYIDYKKAYDSVPHSWLVQILEIYKIHPTIITFLKTTMTTWSTVLRFNTSTDTEDIRPINILRGIFQGDALSPLWFCLALNPLSNILNSTCAGSPLEDTARDGQREVQNNTLNHLLYMDDIKLYAKSESQLNELANLTEQFTNDVKMEFGIDKCKINSVRAGQYYQHQYTLETGEHIDPLDEHDTYKYLGYNQSRQINHKETKQKLKQQFQHRLNTILKTQLYSRNTIKALNTFAIPVLTYSFGIINWTKTDLKNLQRKINTSMTKFRKHHPRSCVQRLTLPRKEGGRGLIDIQNLHNKQITTLRQYFFSKAESSTLHKQIANNDNQFTPLNLKDKSEQKNEKVTDNKTKLLEWSQKSLHGRHYQDLSQINVDKEASNAWLKRGELFPETEGFMLAIQDQVIETKNYRKFIIKNLSTDTCRKCNSSPETIQHITGACKSIVQTDYKHRHDQVANVIHQKLAHQYKLVDTIVPYYKYIPETVLENPSTKLYFDRGIFTDRTIHFNRPDITLINKTNKTGYLIDIAIPNTHNLQTTIAEKLSKYTELKEEITRLWHLQKVTIVPIVLSTTGVIPKQLHRSLISLNLPSNTYHLLQKAVILNMCRLVRKFLQCEADNPHQHINLNIPSSLFQATTQNHSLSLTSNPADSHLA

SEQ ID NO: 16652 - protein, 921 aa, Heliothis virescens
MKQYKIHTIHEEPNTQAIHTLDTLQQKLSVATGRLKRYKACTQRKQQNTQFTNNEKLFYRNIRQATSNIQENHQIGNNHNTLDPETVHNFWARIWEEPVAHNADADWINNELNNNNTNIQPMVFEHIPPQIFHKVLSKLHNWKAPGSDHIHSYWYKKFTSVHGYLHTHINTFIHHPETIPAYITAGTTFMIPKDHNDLSNPAKYRPITCLQTLYKIITSCITELVYQHIDGNNILAEQQKGCRRFSQGCKEQLIIDSVILKKTQKTKSDLFSMYIDYQKAYDSVPHSWLVQILEIYKIHPTLVRFLKTTMTSWTTALKLTIAGETHHTDPIKIQRGIFQGDALSPLWFCLALNPLSNILNSTLLGIPLSNTATHEHTPTQNNALSHLMYMDDIKLYAKTESELHQLANLTEQFSNDIRMQFGIDKCKINSVRAGQNYQHNYSLENGAQIEPLNEQDTYKYLGYAQSRQIHFKDTKTKLKQQFQHRLNTILKTQLHSRNTIKAINTFAIPVLTYSFGIINWTKTDLKNLQRKINTTLTKFRKHHPRACLQRLTLPRKEGGRGLIDILNLHNRQITTLRQYFFSKTTSSTLHKLITQNDKHFTPLNLSDTNSQKNEKLIDDRTKLLEWSQKSLHGRHRQDLCQTNVDKEASNAWLNRGELFPETEGFIIAIQDQIIETKNYRKHIIRNLTNDTCRKCNSAPETIQHITGACKSIAQTDYKHRHDQVANVIHQKLAHQYKLIDSVVPYYKYHPETVLENPTTKLYFDRAILTDRTIHFNRPDITLIDKVNRTGFLIDIAVPNTHNLQSTIAEKLSKYTELKDEISRLWHLQKVAIVPIVISTTGVIPKQLHQSLNSLNLPPHTYHILQKAVILNTCRLVRKFLQCEADTPNIHTNTHTQPVTQSTRLNRNNPSSSNNPTDDHLA

SEQ ID NO: 16653 - protein, 1437 aa, Amphipyra berbera
MRLRNRILPQAGTGANRDGESRPGPSSPGCPSYSGEGTVPHQPVQSRTVAVQNSSTSSLLSFIYSPVLSPIPSPRSPSTRRAHNVRATADSSGADTNSLFSSIPSTRPSYMTRRTTSCSTSSTLDSVVQDVNLDSQIAPITSASSSRKRWTPEMNKFILRTYFQLTALNTDTRTYLEPLHLKFIEKYPHMQVSRQRIGDQRRAIIRNKLLTQKTIDEIHNEVKEELNQLQSNIHNQHTQTLTTTQSTQIQSTPSEARNTQKTTQIRMRWTNELNEAIMRSYYRVTVLGTNETAYRRPMYQDFINKFPSLAHLSEQRIADQRRAIINNKYICNNRLNSLKLEISEELGLNNNNLSNPTSETTNIVNSNNSNNENTDIQLSNNINTEESLPNIPSPSFEINLTEEVLPYPQTDLERNPQIDETFQQAFQFYRNTFPTSRVYIPKQKPSKNLARVVNYLNQITLRENVNKDTDFCTLQTVIYCAAWTVAKVNGAKIALQLVESLPNAKKEFKPNWQRRLERKLADLRTKIGRLTQFINGNRSRKVIKHVNNIIEQYKIHTIHEEPNTQAAHTLDTLKQKLSVVSGRLQRYKACTLRKQQNTQFTNNEKLFYRNIRHATTNVQENSANHEGNDSPDPETLQNFWAGIWEDKTEHNAQAEWIQTESTRHSTNIQAMTFEHISPEIFQKVLYRLHNWKAPGSDHIHSYWYKKFTAVHSYLHNYINIFIQDPNSIPCYLTLGTTFMIPKDRNDLSNPAKYRPITCLQTLYKIITACISEIIYQHMDANNILAEQQKGCRKFSQGCKEQLIIDSVILKKVQKTKTDLFSMYIDYKKAYDSVPHSWLVKVLEIYKIHPAIVTFLETTMTTWKTVLRLTTPTKTVETSPIKIQRGIFQGDALSPLWFCLALNPLSNILNSTSVGIPLKATDTEEQTEAQNNTLNHLLYMDDIKLYAKSESQLYELANLTEQFTNDIKMEFGIDKCKINSVRAGQNYQHQYTLETGQQIEPLDEQDTYKYLGYNQSLQIHYKDTKQKLKQQFQHRLNTILKTQLYSRNTIKAINTFAIPVLTYSFGIINWTKTDLKNLQRKINTTMTKFRKHHPRSCSQRLTLPRKEGGRGLIDILNLHNKQITTLRQYFFAKTQSSTLHKLIAQNDQQLTPLNLKDTSEQKNEKLTHDKTKLLEWTQKSLHGRHRQHLCQLNVDKEASNRWLNRGELFPETEGFMIAIQDQVIETKNYRKFIIKNLGTDTCRKCNSSPETIQHITGACKSIAQTDYKHRHDQVANVIHQKLAYQYKLIDSIVPYYKYNPETVLENLSTKLYFDRAILTDRTIHFNRPDITLINKTSKTGYLIDIAVPNTHNLQTTIAEKLSKYTELKDEITRLWHLQKVTIVPIVLSTTGVIPKQLHQSLKSLNLPSNTYHLMQKAVILNTCRLVRKFLQCEPDNPH

SEQ ID NO: 16654 - protein, 1462 aa, Junonia zonalis
MMKLFPTNDPNPFFYGEMSNRVYNLRPLPGGRRGASGAGAGCHSMRTIGDKELNRRASIDKNTTAERRELTRRVHDADATAASSGDDTESLFPSIPSTRPSYMTRRTPTLSTISTLDSVVQDDQFGSELAPTTRSSNTRRRWTNEMNTFILRTYFQLTALNSDTRSYLEPLHLKFLEKFPNMEVSRQRIGDQRRAIVGNKLLPQTTIDKIYNEVKEEINKLHTNIHTQTPVNPTQDTLSLTNAPQLGCTEINTQNPLTSTQSRMRWTNEHNEAIMRSYYRITSLGTNQTAYRKYLHKEFINQFPTLAHLSEQRIADQRRAIVNNKYISDKRLHILKTEVSKQLNDSNTFVTNNNEGSTNNNIRNFDDNGITPHSNNININTSTEHILTSQLSTVNNISLEQDFQATTMNIERLPEIDETFQKAFQFYKNTNPVNRTYIPKQKPSKKLAKIINYLNNLTLPENVDKDTDFCTLQTIVYSAAWTAAKINGSKVALQLSNSDRFNKSERKPNWQRRLENKLKDLRCKIGRLTQFINGNRRRKVIIHANNIIEQYKTHTVHEEQNTQAIHTLDTLKQKLSVVSGRLQRYIACTLRKQQNTQFSHNEKLFYRKVRQTTNNRSTQNDTLNEHPSNTADPNILKNFWTQIWEDPVKHNDEADWIKRETANNNINLQIMPFEHIPFHTFQKVVSNLHNWKSPGSDNIHSYWYKKFTSIHSHLHNYINIFIQDPNSMPLYITSGKTFMIPKDLNDLSNPAKYRPITCLQTFYKIITSCISELIYEHINTNNILTEQQKGCRKYSQGCKEQLIIDSIILKKVQKTKSDLFSMYIDYKKAYDSVPHSWLVKVLEIYKIHPTLINFLSSTMVNWTTVLKLTNSNSTITETDKIKIQRGIFQGDALSPLWFCLALNPLSNLLNSTAIGYPLQDSKTDSQSDTEKYILNHLLYMDDIKLYASTKIQLNELANITEQFTNDIKMEFGIDKCKINAVRAGQNLQHQYTLRTGELIESLNVEDAYKYLGYSQSLEIHHKDTKEKLKQQFQHRLNAILKTQLYSRNTIKAINTFAIPVLTYSFGIIKWTISDIKNLQRKVNTTLTKFRKHHPRSCLQRLTLPRKEGGRGLIDILNLHNKQISTLRQYFYSKTESSALHRVISQIDQQFTPLNLKDNTEQKNERLKDNKTKIAEWTQKSLHGRHRQDLCQPNVDKEASNAWLNQGMLFPETEGFMIAIQDQVIETKNYRKYIIKNLTDTDTCRKCNSTSETIQHITGACKSIAQTDYKHRHDQVASIIHQKLAFTYKFIDTILPYYKYTPETVLENSTTKLYFDRAILTDRTIHFNRPDITLVDKVGKIGYLIDIAVPNTHNLQTTIAEKLSKYIELKDEITRLWHLQKVTIVPIVLSTTGVIPTQLHQSLRTLNLPTNTYQLLQKAVILNTCRLVRKFLQCEVDHIHSNIQTNTLTPITHASLQPQPSYR

SEQ ID NO: 16655 - protein, 1417 aa, Hypolimnas misippus
MSNPVYNLRPLPGGRRGASGAGAGCHSMRTIGDEGLNRRAPIDKYIVTAGRRELIRRAHDVNVTAVSPSDDTKSLFSSIPSTRPSYMTKKTPSLTTTSTLDSVVQEDNLDSELAPTTKSSNTRRRWTHDMNTFILRTYLQLTALNSDTRSYLEPLHLKFIEKYPNMEVSRQRVGDQRRAIVRNKLLSQTTIDQIYQEVKDEIDQLHTTIHTHHTPIKQTQETVSLQLQAHSTIAKPPKILSSTQSRMKWTNEHNEAIMRSYYRITSLGTNNTAYRKYLHNDFISQFPTLTHLSEQRIADQRRAIVNNKYISDNRLNTLKAEVSEELRIVNSYNHNENCTTTTGNDIITPHTDNINFNTTTEYVAEIPIASQLFTNNDTRLSQELPTTSLNIERIPEIEETFQKAFQFYKDTDPTKRTYIPKQKPSKKLAKIVNYLNKIILPETVNKDTDFSTLQTSIYSAAWTAARVNGAKISLRPSDNSHFSKSEYKPNWQKRLEGKLKDLRGKIGRLTQFINGNRSRKVIKHASNIIEQYKTHTVHEEQNTQATHTLDTLKQKLSVISGRLQRYIACTLRKQQNSQFTQNERLFYRNIRQNTNNINNFSPSAYTNNTLDPNTLKNFWARIWEDPVKHNDQADWIKTETTNNINIETMPFTQIPPHTFEKVLRNLHNWKSPGSDYIHSYWYKQFTSIHSYLHNYINTFIQDPATIPSYLTSGTTFMIPKDINELSNPAKYRPITCLQTFYKITTSCISELIYEHIDANKILTEQQKGCRRFSQGCKEQLIIDSVVLKKVQKTKTDLFSMYIDYRKAYDSVPHSWLLKVLEIYKIHPTLVNFLTATMLNWTTVLKLSKSNNTIIETDKIKIQRGIFQGDALSPLWFCLALNPLSNLLNSTTIGLPLQESETDRLTGTEKYILNHLLYMDDIKLYASSETQLNELANLTEQFTNDIKMEFGIDKCKINSVREGQNFKHQYTLKTGEPIESLNDEDAYKYLGYNQSLEIHHKDTKIKLKQQFQHRLNTILKTQLYSRNTIKAINTFAIPVLTYSFGIIKWTKSDIKNLQRKINTTLTKFRKHHPRSCSQRLTLPRKEGGRGLIDILNLHNKQISTLRQYFFAKTEYSTLHRLIAQIDQQFTPLNLKDKSDQKTEKLIDNKTKIAEWSQKSLHGRHRQDLCQSNVDKEASNAWLNQGALFPETEGFMIAIQDQVIETKNYRKYIIKNLPTTDTCRKCNSASETIQHITGGCKSIAQTDYKHRHDQVASIIHQKLAYEYKFINTILPYYKYIPETVLENSTTKLYFDRAILTDRTIHFNRPDITLIDKVNKNGYLIDIAVPNTHNLQTTIAEKLSKYTELKDEIIRLWHLQKVTIVPIVLSTTGVIPNQLHLSLRTLNLPSYTFQLLQKAVVLNTCRLVRKFLQFEPDHSH

SEQ ID NO: 16656 - protein, 1281 aa, Junonia genoveva
MEVSRQRIGDQRRAIVGNKLLPQTTIDKIYNEVKEEINKLHTNIHTQTPVNPTQDTLSLTNAPQLGCTEINTQNPLTSTQSRMRWTNEHNEAIMRSYYRITSLGTNQTAYRKYLHKEFINQFPTLAHLSEQRIADQRRAIVNNKYISDKRLHILKTEVSKQLNDSNTFVTNNNEGSTNNNIRNFDDNGITPHSNNININTSTEHILTSQLSTVNNISLEQDFQATTMNIERLPEIDETFQKAFQFYKNTNPVNRTYIPKQKPSKKLAKIINYLNNLTLPENVDKDTDFCTLQTIVYSAAWTAAKINGSKVALQLSNSDRFNKSERKPNWQRRLENKLKDLRCKIGRLTQFINGNRRRKVIIHANNIIEQYKTHTVHEEQNTQAIHTLDTLKQKLSVVSGRLQRYIACTLRKQQNTQFSHNEKLFYRKVRQTTNNRSTQNDTLNEHPSNTADPNILKNFWTQIWEDPVKHNDEADWIKRETANNNINLQIMPFEHIPFHTFQKVVSNLHNWKSPGSDNIHSYWYKKFTSIHSHLHNYINIFIQDPNSMPLYITSGKTFMIPKDLNDLSNPAKYRPITCLQTFYKIITSCISELIYEHINTNNILTEQQKGCRKYSQGCKEQLIIDSIILKKVQKTKSDLFSMYIDYKKAYDSVPHSWLVKVLEIYKIHPTLINFLSSTMVNWTTVLKLTNSNSTITETDKIKIQRGIFQGDALSPLWFCLALNPLSNLLNSTAIGYPLQDSKTDSQSDTEKYILNHLLYMDDIKLYASTKIQLNELANITEQFTNDIKMEFGIDKCKINAVRAGQNLQHQYTLRTGELIESLNVEDAYKYLGYSQSLEIHHKDTKEKLKQQFQHRLNAILKTQLYSRNTIKAINTFAIPVLTYSFGIIKWTISDIKNLQRKVNTTLTKFRKHHPRSCLQRLTLPRKEGGRGLIDILNLHNKQISTLRQYFYSKTESSALHRVISQIDQQFTPLNLKDNTEQKNERLKDNKTKIAEWTQKSLHGRHRQDLCQPNVDKEASNAWLNQGMLFPETEGFMIAIQDQVIETKNYRKYIIKNLTDTDTCRKCNSTSETIQHITGACKSIAQTDYKHRHDQVASIIHQKLAFTYKFIDTILPYYKYTPETVLENSTTKLYFDRAILTDRTIHFNRPDITLVDKVGKIGYLIDIAVPNTHNLQTTIAEKLSKYIELKDEITRLWHLQKVTIVPIVLSTTGVIPTQLHQSLRTLNLPTNTYQLLQKAVILNTCRLVRKFLQCEVDHIHSNIQTNTLTPITHASLQPQPSYR

SEQ ID NO: 16657 - protein, 1417 aa, Hypolimnas misippus
MSNPVYNLRPLPGGRRGASGAGAGCHSMRTIGDEGLNRRAPIDKYIVTAGRRELIRRAHDVNVTAVSPSDDTKSLFSSIPSTRPSYMTRKTPSLTTTSTLDSVVQEDNLDSELAPTTKSSNTRRRWTHDMNTFILRTYLQLTALNSDTRSYLEPLHLKFIEKYPNMEVSRQRVGDQRRAIVRNKLLSQTTIDQIYQEVKDEIDQLHTTIHTHHTPIKLTQETVSLQLQAHSTIAKPPKILSSTQSRMKWTNEHNEAIMRSYYRITSLGTNNTAYRKYLHNDFISQFPTLTHLSEQRIADQRRAIVNNKYISDNRLNTLKAEVSEELRIVNSYNHNENSTTTTGNDIITPHTDNINFNTTTEYVAEIPIASQLFTNNDTRLSQELPTTSLNIERIPEIEETFQKAFQFYKDTDPTKRTYIPKQKPSKKLAKIVNYLNKIILPETVNKDTDFSTLQTSIYSAAWTAARVNGAKISLRPSDNSHFSKSEYKPNWQKRLEGKLKDLRGKIGRLTQFINGNRSRKVIKHASNIIEQYKTHTVHEEQNTQATHTLDTLKQKLSVISGRLQRYIACTLRKQQNSQFTQNERLFYRNIRQNTNNINNFSPCAYTNNTLDPNTLKNFWARIWEDPVKHNDQADWIKTETTNNINIETMPFTQIPPHTFEKVLRNLHNWKSPGSDYIHSYWYKQFTSIHSYLHNYINTFIQDPATIPSYLTSGTTFMIPKDINELSNPAKYRPITCLQTFYKITTSCISELIYEHIDANKILTEQQKGCRRFSQGCKEQLIIDSVVLKKVQKTKTDLFSMYIDYRKAYDSVPHSWLLKVLEIYKIHPTLVNFLTATMLNWTTVLKLSKSNNTIIETDKIKIQRGIFQGDALSPLWFCLALNPLSNLLNSTTIGLPLQESETDRLTGTEKYILNHLLYMDDIKLYASSETQLNELANLTEQFTNDIKMEFGIDKCKINSVREGQNFKHQYTLKTGEPIESLNDEDAYKYLGYNQSLEIHHKDTKIKLKQQFQHRLNTILKTQLYSRNTIKAINTFAIPVLTYSFGIIKWTKSDIKNLQRKINTTLTKFRKHHPRSCSQRLTLPRKEGGRGLIDILNLHNKQISTLRQYFFAKTEYSTLHRLIAQIDQQFTPLNLKDKSDQKTEKLIDNKTKIAEWSQKSLHGRHRQDLCQSNVDKEASNAWLNQGALFPETEGFMIAIQDQVIETKNYRKYIIKNLPTTDTCRKCNSASETIQHITGGCKSIAQTDYKHRHDQVASIIHQKLAYEYKFINTILPYYKYIPETVLENSTTKLYFDRAILTDRTIHFNRPDITLIDKVNKNGYLIDIAVPNTHNLQTTIAEKLSKYTELKDEIIRLWHLQKVTIVPIVLSTTGVIPNQLHLSLRTLNLPSYTFQLLQKAVVLNTCRLVRKFLQFEPDHTH

SEQ ID NO: 16658 - protein, 1360 aa, Junonia vestina
MTRRTPTLSTISTLDSVVQDDQFGSELAPTTRSSNTRRRWTNEMNTFILRTYFQLTALNSDTRSYLEPLHLKFLEKFPNMEVSRQRIGDQRRAIVGNKLLPQTTIDKIYNEVKEEINKLHTNIHTQTPVNPSQDTLSLTNAPQLGCTEINTQNPLTSTQSRMRWTNEHNEAIMRSYYRITSLGTNQTAYRKYLHKEFINQFPTLAHLSEQRIADQRRAIVNNKYISDKRLDILKTEVSKQLNDSNTFVTNNNEGRPNNNIRNFDDNGITPHSNNININTSTEHILTSQLSTVNNISLEQDFQATTMNTERLPEIDEAFQKAFQFYKNTNPVNRTYIPKQKPSKKLAKIINYLNNLTLPENVDKDTDFCTLQTIVYSAAWTAAKINGSKVALQLSNSDRFNKSEHKPNWQRRLENKLKDLRCKIGRHTQFINGNGRRKVIIHANNIIEQYKTHTVHEEQNTQAIHTLDTLKQKLSVVSGRLQRYIACTLRKQQNTQFSHNEKQFYRKVRQTTNNRSTQNDTLNEHPSNTADPNILKNFWTQIWEDPVRHNDDADWIKRETANNNINLQIMPFEHIPFHTFQKVVSNLHNWKSPGSDNIHSYWYKKFTSIHSHLHNYINIFIQDPNSMPLYITSGKTFMIPKDLNDLSNPAKYRPITCLQTFYKIITSCISELIYEHINNNNILTEQQKGCRKYSQGCKEQLIIDSIILKKVQKTKSDLFSMYIDYKKAYDSVPHSWLVKVLEIYKIHPTLINFLSSTMVNWTTVLKLTNSNSTITETDKIKIQRGIFQGDALSPLWFCLALNPLSNLLNSTAIGYPLQDSKTDSQSDTEKYILNHLLYMDDIKLYASTKIQLNELANITEQFTNDIKMEFGIDKCKINAVRAGQNLQHQYTLRTGELIESLNVEDAYKYLGYSQSLEIHHKDTKEKLKQQFQHRLNAILKTQLYSRNTIKAINTFAIPVLTYSFGIIKWTISDIKNLQRKVNTTLTKFRKHHPRSCLQRLTLPRKEGGRGLIDILNLHNKQISTLRQYFYSKTESSALHRVISQIDQQFTPLNLKDNTEQKNERLKDNKTKIAEWTQKSLHGRHRQDLCQPNVDKEASNAWLNQGMLFPETEGFMIAIQDQVIETKNYRKYIIKNLTDTDTCRKCNSTSETIQHITGACKSIAQTDYKHRHDQVASIIHQKLAFTYKFIDTILPYYKYTPETVLENSTTKLYFDRAILTDRTIHFNRPDITLVDKVGKIGYLIDIAVPNTHNLQTTIAEKLSKYIELKDEITRLWHLQKVTIVPIVLSTTGVIPTQLHQSLRTLNLPTNTYQLLQKAVILNTCRLVRKFLQCEVDHIHSNIQTNTLTPITHASLQPQPSYR

SEQ ID NO: 16659 - protein, 1462 aa, Junonia evarete
MMKLFPTNDPNPFFYGEMSNRVYNLRPLPGGRRGASGAGAGCHSMRTIGDKELNRRASIDKNTTAERRELTRRVHDADATAASSGDDTESLFPSIPSTRPSYMTRRTPTLSTISTLDSVVQDDQFGSELAPTTRSSNTRRRWTNEMNTFILRTYFQLTALNSDTRSYLEPLHLKFLEKFPNMEVSRQRIGDQRRAIVGNKLLPQTTIDKIYNEVKEEINKLHTNIHTQTPVNPTQDTLSLTNAPQLGCTEINTQNPLTSTQSRMRWTNEHNEAIMRSYYRITSLGTNQTAYRKYLHKEFINQFPTLAHLSEQRIADQRRAIVNNKYISDKRLHILKTEVSKQLNDSNTFVTNNNEGSTNNNIRNFDDNGITPHSNNININTSTEHILTSQLSTVNNISLEQDFQATTMNIERLPEIDETFQKAFQFYKNTNPVNRTYIPKQKPSKKLAKIINYLNNLTLPENVDKDTDFCTLQTIVYSAAWTAAKINGSKVALQLSNSDRFNKSERKPNWQRRLENKLKDLRCKIGRLTQFINGNRRRKVIIHANNIIEQYKTHTVHEEQNTQAIHTLDTLKQKLSVVSGRLQRYIACTLRKQQNTQFSHNEKLFYRKVRQTTNNRSTQNDTLNEHPSNTADPNILKNFWTQIWEDPVKHNDEADWIKRETANNNINLQIMPFEHIPFHTFQKVVSNLHNWKSPGSDNIHSYWYKKFTSIHSHLHNYINIFIQDPNSMPLYITSGKTFMIPKDLNDLSNPAKYRPITCLQTFYKIITSCISELIYEHINNNNILTEQQKGCRKYSQGCKEQLIIDSIILKKVQKTKSDLFSMYIDYKKAYDSVPHSWLVKVLEIYKIHPTLINFLSSTMVNWTTVLKLTNSNSTITETDKIKIQRGIFQGDALSPLWFCLALNPLSNLLNSTAIGYPLQDSKTDSQSDTEKYILNHLLYMDDIKLYASTKIQLNELANITEQFTNDIKMEFGIDKCKINAVRAGQNLQHQYTLRTGELIESLNVEDAYKYLGYSQSLEIHHKDTKEKLKQQFQHRLNAILKTQLYSRNTIKAINTFAIPVLTYSFGIIKWTISDIKNLQRKVNTTLTKFRKHHPRSCLQRLTLPRKEGGRGLIDILNLHNKQISTLRQYFYSKTESSALHRVISQIDQQFTPLNLKDNTEQKNERLKDNKTKIAEWTQKSLHGRHRQDLCQPNVDKEASNAWLNQGMLFPETEGFMIAIQDQVIETKNYRKYIIKNLTDTDTCRKCNSTSETIQHITGACKSIAQTDYKHRHDQVASIIHQKLAFTYKFIDTILPYYKYTPETVLENSTTKLYFDRAILTDRTIHFNRPDITLVDKVGKIGYLIDIAVPNTHNLQTTIAEKLSKYIELKDEITRLWHLQKVTIVPIVLSTTGVIPTQLHQSLRTLNLPTNTYQLLQKAVILNTCRLVRKFLQCEVDHIHSNIQTNTLTPITHASLQPQPSYR

SEQ ID NO: 16660 - protein, 1462 aa, Junonia coenia
MMKLFPTNDPNPFFYGEMSNRVYNLRPLPGGRRGASGAGAGCHSMRTIGDKELNRRASIDKNTTAERRELTRRVHDADATAASSGDDTESLFPSIPSTRPSYMTRRTPTLSTISTLDSVVQDDQFGSELAPTTRSSNTRRRWTNEMNTFILRTYFQLTALNSDTRSYLEPLHLKFLEKFPNMEVSRQRIGDQRRAIVRKKLLPQTTIDKIYNEVKEEINKLHTNIHTQTPVNPTQDTLSLTNAPQLGRTEINTQNPLTSTQSRMRWTNELNEAIMRSYYRITSLGTNQTAYRKYLHKEFINQFPTLAHLSEQRIADQRRAIVNNKYISDKRLHTLKTEVSKQLNDINIFVTNNNEGSTNNNIRNFDDNGITPHSNNININTSTEYILTSQLSTVNNINLEQDFQATTMNTERLPEIDEAFQKAFQFYKNTNPVNRTYIPKQKPSKKLAKIINYLNNVTLPENVDKDTDFCTLQTIVYSAAWTAAKINGSKIALQLSNSDRFNKSEHKPNWQRRLENKLKDLRCKIGRLTQFINGNRRRKVIIHANNIIEQYKTHTVHEEQNTQAIHTLDTLKQKLSVVSGRLQRYTACTLRKQQNTQFSHNEKLFYRNVRQTTNNRSTQNDTLNEHPSNTADPNILKNFWTQIWEDPVKHNDEADWIKRETANNNINLQIMPFEHIPFHTFQKVVSNLHNWKSPGSDNIHSYWYKKFTSIHSHLHNYINIFIQDPNSMPLYITSGKTFMIPKDLNDLSNPAKYRPITCLQTFYKIITSCISELIYEHINTNNILTEQQKGCRKYSQGCKEQLIIDSIILKKVQKTKSDLFSMYIDYKKAYDSVPHSWLVKVLEIYKIHPTLINFLSSTMVNWTTVLKLTNSNNTITETDKIKIQRGMFQGDALSPLWFCLALNPLSNLLNSTAIGYPLQASKTDSQSDTEKYTLNHLLYMDDIKLYASTKIQLNELADITEQFTNDIKMEFGIDKCKINAVRAGQNLQHQYTLRTGELIESLNVEDAYKYLGYSQSLEIHHKDTKEKLKQQFQHRLNAILKTQLYSRNTIKAINTFAIPVLTYSFGIIKWTISDIKNLQRKVNTTLTKFRKHHPRSCLQRLTLPRKEGGRGLIDILNLHNKQISTLRQYFYSKTESSALHRVISQIDQQFTPLNLKDNTEQKNERLKDNKTKIAEWTQKSLHGRHRQDLCQPNVDKEASNAWLNQGILFPETEGFMIAIQDQVIETKNYRKYIIKNLTDTDTCRKCNSTSETIQHITGACKSIAQTDYKHRHDQVASIIHQKLALTYKFIDTILPYYKYTPETVLENSTTKLYFDRAILTDRTIHFNRPDITLVDKVGKIGYLIDIAVPNTHNLQTTIAEKLSKYSELKDEITRLWHLQKVTIVPIVLSTTGVIPTQLHQSLRTLNLPTNTYQLLQKAVILNTCRLVRKFLQCEVDHIHSNIQTNTWTPITHASLQPQPSYR

SEQ ID NO: 16661 - protein, 1462 aa, Junonia neildi
MMKLFPTNDPNPFFYGEMSNRVYNLRPLPGGRRGASGAGAGCHSMRTIGDKELNRRASIDKNTTAERRELTRRVHDADATAASSGDDTESLFPSIPSTRPSYMTRRTPTLSTISTLDSVVQDDQFGSELAPTTRSSNTRRRWTNEMNTFILRTYFQLTALNSDTRSYLEPLHLKFLEKFPNMEVSRQRIGDQRRAIVGKKLLPQTTIDKIYNEVKEEINKLHTNIHTQTPVNPTQDTLSLTNAPQLGCTEINTQNPLTSTQSRMRWTNEHNEAIMRSYYRITSLGTNQTAYRKYLHKEFINQFPTLAHLSEQRIADQRRAIVNNKYISDKRLHTLKTEVSKQLNDSNTFVTNNNEGSTNNNIRNFDDNGITPHSNNININTSTEYILTSQLSTVNNINLEQDFQATTMNTERLPEIDEAFQKAFQFYKNTNPVNRTYIPKQKPSKKLAKIINYLNNVTLPENVDKDTDFCTLQTIVYSAAWTAAKINGSKIALQLSNSDRFNKSEHKPNWQRRLENKLKDLRCKIGRLTQFINGNRRRKVIIHANNIIEQYKTHTVHEEQNTQAIHTLDTLKQKLSVVSGRLQRYTACTLRKQQNTQFSHNEKLFYRNVRQTTNNRSTQNDTLNEHPSNTADPNILKNFWTQIWEDPVKHNDEADWIKRETANNNINLQIMPFEHIPFHTFQKVVSNLHNWKSPGSDNIHSYWYKKFTSIHSHLHNYINIFIQDPNSMPLYITSGKTFMIPKDLNDLSNPAKYRPITCLQTFYKIITSCISELIYEHINTNNILTEQQKGCRKYSQGCKEQLIIDSIILKKVQKTKSDLFSMYIDYKKAYDSVPHSWLVKVLEIYKIHPTLINFLSSTMVNWTTVLKLTNSNNTITETDKIKIQRGMFQGDALSPLWFCLALNPLSNLLNSTAIGYPLQASKTDSQSDTEKYTLNHLLYMDDIKLYASTKIQLNELANITEQFTNDIKMEFGIDKCKINAVRAGQNLQHQYTLRTGELIESLNVEDAYKYLGYSQSLEIHHKDTKEKLKQQFQHRLNAILKTQLYSRNTIKAINTFAIPVLTYSFGIIKWTISDIKNLQRKVNTTLTKFRKHHPRSCLQRLTLPRKEGGRGLIDILNLHNKQISTLRQYFYSKTESSALHRVISQIDQQFTPLNLKDNTEQKNERLKDNKTKIAEWTQKSLHGRHRQDLCQPNVDKEASNAWLNQGILFPETEGFMIAIQDQVIETKNYRKYIIKNLTDTDTCRKCNSTSETIQHITGACKSIAQTDYKHRHDQVASIIHQKLALTYKFIDTILPYYKYTPETVLENSTTKLYFDRAILTDRTIHFNRPDITLVDKVGKIGYLIDIAVPNTHNLQTTIAEKLSKYSELKDEITRLWHLQKVTIVPIVLSTTGVIPTQLHQSLRTLNLPTNTYQLLQKAVILNTCRLVRKFLQCEVDHIHSNIQTNTWTPITHASLQPQPSYR

SEQ ID NO: 16662 - protein, 1462 aa, Junonia grisea
MMKLFPTNDPNPFFYGEMSNRVYNLRPLPGGRRGASGAGAGCHSMRTIGDKELNRRASIDKNTTAERRELTRRVHDADATAASSGDDTESLFPSIPSTRPSYMTRRTPTLSTISTLDSVVQDDQFGSELAPTTRSSNTRRRWTNEMNTFILRTYFQLTALNSDTRSYLEPLHLKFLEKFPNMEVSRQRIGDQRRAIVGKKLLPQTTIDKIYNEVKEEINKLHTNIHTQTPVNPTQDTLSLTNAPQLGRTEINTQNPLTSTQSRMRWTNELNEAIMRSYYRITSLGTNQTAYRKYLHKEFINQFPTLAHLSEQRIADQRRAIVNNKYINDKRLHTLKTEVSKQLNDSNTLVTNNNEGNTNNNIRNFDDNDITPHSNNININTSTEYILTSQLSTVNNINLEQDFQATTMNTERLPEIDEAFQKAFQFYKNTNPVNRTYIPKQKPSKKLAKIINYLNNVTLPENVDKDTDFCTLQTIVYSAAWTAAKINGSKIALQLSNSDRLNKSEHKPNWQRRLENKLKDLRCKIGRLTQFINGNRRRKVIIHANNIIEQYKTHTVHEEQNTQAIHTLDTLKQKLSVVSGRLQRYTACTLRKQQNTQFSHNEKLFYRNVRQTTNNRSTQNDTLNEHPSNTADPNILKNFWTQIWEDPVKHNDEADWIKRETANNNINLQIMPFEHIPFHTFQKVVSNLHNWKSPGSDNIHSYWYKKFTSIHSHLHNYINIFIQDPNSMPLYITSGKTFMIPKDLNDLSNPAKYRPITCLQTFYKIITSCISELIYEHINTNNILTEQQKGCRKYSQGCKEQLIIDSIILKKVQKTKSDLYSMYIDYKKAYDSVPHSWLVKVLEIYKIHPTLINFLSSTMVNWTTVLKLTNSNNTITETDKIKIQRGMFQGDALSPLWFCLALNPLSNLLNSTAIGYPLQASKTDSQSDTEKYTLNHLLYMDDIKLYASTKIQLNELANITEQFTNDIKMEFGIDKCKINAVRAGQNLQHQYTLRTGELIESLNVEDAYKYLGYSQSLEIHHKDTKEKLKQQFQHRLNAILKTQLYSRNTIKAINTFAIPVLTYSFGIIKWTISDIKNLQRKVNTTLTKFRKHHPRSCLQRLTLPRKEGGRGLIDILNLHNKQISTLRQYFYSKTESSALHRVISQIDQQFTPLNLKDNTEQKNERLKDNKTKIAEWTQKSLHGRHRQDLCQPNVDKEASNAWLNQGILFPETEGFMIAIQDQVIETKNYRKYIIKNLTDTDTCRKCNSTSETIQHITGACKSIAQTDYKHRHDQVASIIHQKLALTYKFIDTILPYYKYTPETVLENSTTKLYFDRAILTDRTIHFNRPDITLVDKVGKIGYLIDIAVPNTHNLQTTIAEKLSKYSELKDEITRLWHLQKVTIVPIVLSTTGVIPTQLHQSLRTLNLPTNTYQLLQKAVILNTCRLVRKFLQCEVDHIHSNIQTNTWTPITHASLQPQPSYR

SEQ ID NO: 16663 - protein, 1437 aa, Amphipyra tragopoginis
MRLRNRILPQAGTGNKRDGESRPGPSSPGCPTYSGEGTVPHQPAQSHTAAVQHSPTSSLFSSIPSSPSPSMRRARNIRATADSSGDDTKSLFSSIPSTRPSYMTRRTASCSTTSTLDSVVQDVNLDSQLAPITSAFKSRKRWTPEMNKFILRTYLHLTTLDTDTSTYLEPLHLKFIEKYPHMQVSRQRIGDQRRAIVRNKLLQQETINEIHNQVKEELNQLQSNIHNQHTHTPINHIQQNLITTQSTQIQTICSEARNTQKTTQTRMRWTNEHNEAIMRSYYRVTALGTNETAYRKPMHEDFINKFPSLAHLSEQRIADQRRAIINNKYIDTNRLNSLKFEISEELGLLVNNENLNSANSETTNIVNFNNSHNENIDIQPTNNININCTEESPPNTPSHSFEINIAGEILPNQQTDLERNPQIDETFQEALQFYRNTSPTNRVYIPKQKPSKNLARIVSYLNKITLRENANIDTDFSTLQTIIYCAAWTAAKANGAKITLQQAESLRSAKKEFKPNWQRRLERKLGDLRTKIGRLTQFINGNRSRKVIKHANNIIEQYKIHTIHEEPNTQAAHTLDTLKQKLSVVSGRLQRYKACTLRKQQNTQFTNNEKLFYRNIRQATTNVQENSANHDGNNSPDPETLQNFWAGIWEDPIEHNAQANWIKTESTNCSTNIQAMTFEHISPEIFQKVLCRLHNWKAPGSDHIHSYWYKKFTTVHSYLHNYINIFIQDPNTIPCYLTSGTTFMIPKDRNDLSNPAKYRPITCLQTLYKVITACISEIIYQHIDTNNILAEQQKGCRKFSQGCKEQLIIDSVILKKVQKTKNDLFSMYIDYKKAYDSVPHSWLVEVLEIYKIHPTIVTFLKTTMTTWKTVLRLTTPTETIETSPIKILRGIFQGDALSPLWFCLALNPLSNILNSTSLGIPLKATDTDEQTMLNHLLYMDDIKLYAKNEIQLNELANLTEQFTNDIKMEFGIDKCKINSVRAGQNYQHQYTLETGELIEPLDEQDTYKYLGYNQSLQIHYKDTKQKLKQQFQHRLNTILKTQLYSRNTIKAINTFAIPVLTYSFGIINWTKTDLKTLQRKINTTMTKFRKNHPRSCLQRLTLPRKEGGRGLIDILNLHNKQITTLRQYFFAKTQSSTLHKLVAQNDQQLTPLNLKDTSEQKNEKLIDDKSKLLEWTQKSLHGRHRQDLCQINVDKEASNTWLNRGELFPETEGFMIAIQDQVIETKNYRKYIIKNLATDNCRKCNSSPETIQHITSACKSIAQTDYKHRHDQVANVIHQKLAYKYKLIDSIVPYYKYNPETVLENLSTKLYFDRAILTDRTIHFNRPDITLINKISKTGYLIDIAVPNTHNLQTTIAEKLSKYTELKDEITRLWHLQKVIIVPIVLSATGVIPKQLHQSLISLSLPSNTYHLMQKAVILNTCRLVRKFLQCDPDNTH

SEQ ID NO: 16664 - protein, 1435 aa, Amphipyra tragopoginis
MRLRNRILPQAGTGTKRDGESRPGPSSSGCPTYSGEGTIPHQPAQSQTAAVQHSPTSSLFSSIPSSPSSPMRRARNIRATADSSGDDIKSLFSSIPSTRPSYMTRRTASCSTTSTLDSVVQDVNLDSQLAPITSASRSRKRWTPEMNKFILRTYLHLTTLDTDTSTYLEPLHLKFIEKYPHMQVSRQRIGDQRRAIVRNKLLPEETINEIHNQVKEELNQLQSNIHNQHTQTPINHTQQTLTTTQSTQIQSICSEARNTQKTTQTRMRWTNEHNEAIMRSYYRVTVLGTNETAYRKPMHEDFISKFPSLAHLSEQRIADQRRAIINNKYIDTNRLHSLKLEISEELGMNNENLNSANSETTNIVNFDNNHNENIHIQPTNNININCTEESPPNIPSHSFETNLAGETLPNQQTDLERNPQIDETFQEALQFYRNTSPTNRVYIPKQKPSKNLARIVSYLNKITLRENVNTDTDFSTLQTIIYCAAWTIAKVNGAKITLQQAESLRSAKKEFKPNWQRRLERKLGDLRTKIGRLTQFINGNRSRKVIKHANNIIEQYKIHTTHEEPNTQAAHTLDTLKQKLSVVSGRLQRYKACTLRKQQNTQFTNNEKLFYRNIRQVTTNVQENSANHDGNNSPDPETLQNFWAGIWEDPIEHNAQANWIKTESTNCSTNIQAMTFEHISPEIFQKVLCRLHNWKAPGSDHIHSYWYKKFTTVHSYLHNYINIFIQDPNTIPCYLTSGTTFMIPKDRNDLSNPAKYRPITCLQTLYKVITACISEIIYQHIDTNNILAEQQKGCRKFSQGCKEQLIIDSVILKKVQKTKNDLFSMYIDYKKAYDSVPHSWLVEVLEIYKIHPTIVTFLKTTMTTWKTVLRLTTPTETIETSPIKILRGIFQGDALSPLWFCLALNPLSNILNSTSVGIPLKATDTDEQTMLNHLLYMDDIKLYAKTEIQLNELANLTEQFTNDIKMEFGIDKCKINSVRAGQNYQHQYTLETGELIEPLDEQDTYKYLGYNQSLQIHYKDTKQKLKQQFQHRLNTILKTQLYSRNTIKAINTFAIPVLTYSFGIINWTKTDLKTLQRKINTTMTKFRKNHPRSCLQRLTLPRKEGGRGLIVILNLHNKQITTLRQYFFAKTQSSTLHKLVAQNDQQLTPLNLKDTSEQKNEKLIDDKSKLLEWTQKSLHGRHRQDLCQINVDKEASNTWLNRGELFPETEGFMIAIQDQVIETKNYRKYIIKNLATDNCRKCNSSPETIQHITSACKSIAQTDYKHRHDQVANVIHQKLAYKYKLIDSIVPYYKYNPEIVLENLSTKLYFDRAILTDRTIHFNRPDITLINKISKTGYLIDIAVPNTHNLQTTIAEKLSKYTELKDEITRLWHLQKVIIVPIVLSATGVIPKQLHQSLISLNLPSNTYHLMQKAVILNTCRLVRKFLQCDPDNTQ

SEQ ID NO: 16665 - protein, 1435 aa, Amphipyra tragopoginis
MRLRNRILPQAGTGTKRDGESRPGLSSSGCPTYSGEGTVPHQPAQSQTAAVQNSPTSSPFSSIPSSPSSSMRRARNIRATADSSGDDTKSLFSSIPSTRPSYMTRRTASCSTTSTLDSVVQDVNLDSQLVPITSASRSRKRWTPEMNKFILRTYLHLTTLDTDTSTYLEPLHLKFIEKYPDMQVSRQRIGDQRRAIVRNKLLPQETINEIHNQVKEELNQLQSNIHNQHTQTPINHIQQTLTTTQSSQIQSICSEARNTQKTAQTRMRWTNEHNEVIMRSYYRVTALGTNETAYRKPMHEDFINKFPSLAHLSEQRIADQRRAIINNKYIDTNRLNSLKLEISEELGLNNENLNSANSETTNIVNFNNNHNENIDIQPTNNININCTEESPPNIPSHSFEINLAGEISPNQQTDLERNPQIDETFQEALQFYKNTSPTNRVYIPKQKPSKNLARIVSYLNKITLRENVNIDTDFNTLQTIIYCAAWTVAKVNGAKITLQQAESLRSAKKEFKPNWQRRLERKLGDLRTKIGRLTQFINGNRSRKVIKHANNIIEQYKIHTIHEEPNTQAAHTLDTLKQKLSVVSGRLQRYKACTLRKQQNTQFTNNEKLFYRNIRQATTNVQENSANHDGNNSPDPETLQNFWAGIWEDPIEHNAQANWIKTESTNCSTNIQAMTFEHISPEIFQKVLCRLHNWKAPGSDHIHSYWYKKFTTVHSYLHNYINIFIQDPNTIPSYLTSGTTFMIPKDRNDLSNPAKYRPITCLQTLYKVITACISEIIYRHIDTNNILAEQQKGCRKFSQGCKEQLIIDAVILKKVQKTKNDLFSMYIDYKKAYDSVPHSWLVEVLEIYKIHPTIVTFLKTTMTTWKTVLRLTTPTETIETSPIKILRGIFQGDALSPLWFCLALNPLSNILNSTSVGIPLKATDTDEQTMLNHLLYMDDIKLYAKSEIQLNELANLTEQFTNDIKMEFGIDKCKINSVRAGQNYQHQYTLETGELIEPLDEQDTYKYLGYSQSLQIHYKDTKQKLKQQFQHRLNTILKTQLYSRNTIKAINTFAIPVLTYSFGIINWTKTDLKTLQRKINTTMTKFRKNHPRSCLQRLTLPRKEGGRGLIDILNLHNKQITTLRQYFFAKTQSSTLHKLVAQNDQQLTPLNLKDTSEQKNEKLVDDKTKLLEWTQKSLHGRHRQDLCQINVDKEASNTWLNRGELFPETEGFMIAIQDQVIETKNYRKYIIKNLATDNCRKCNSSPETIQHITSACKSIAQTDYKHRHDQVANVIHQKLAYKYKLIDSIVPYYKYNPEIVLENLSTKLYFDRAILTDRTIHFNRPDITLINKISKTGYLIDIAVPNTHNLQTTIAEKLSKYTELKDEITRLWHLQKVIIVPIVLSATGVIPKQLHQSLISLNLPSNTYHLMQKAVILNTCRLVRKFLQCDPDNTQ

SEQ ID NO: 16666 - protein, 1434 aa, Amphipyra tragopoginis
MRLRNRILPQAGTGTKRDGESRPGPSSSGCPTYSGEGTVPHQPAQFQTAAVQHSPTSSFSSIPSSPSSSMRRARNIRATADSSGDDTKSLFSSIPSTRPSYMTRRTASCSTTSTLDSVVQDVNLDSQLAPITSASRSRKRWTPEMNKFILRTYLHLTTLDTDTSTYLEPLHLKFIEKYPHMQVSRQRIGDQRRAIVRNKLLPEETINEIHNQVKEELNQLKSNIHNQHTQTPINHTQQTLTTTQSTQIQSICSEARNTQKTTQTRMRWTNEHNEAIMRSYYRVTALGTNETAYRKPMHEDFINKFPSLAHLSEQRIADQRRAIINNKYIDTNRLNSLKLEISEELGLNNENLNSANSETTNIVNFNNNHNENIHIQPTNNININCTEESPPNIPSHSFEINLAGETLPNQQTDLERNPQIDETFQEALQFYRNTSPTNRAYIPKQKPSKNLARIVSYLNKITLRENVNTDTDFSTLQTIIYCAAWTVAKVNGAKITLQQAESLRSAKKEFKPNWQRRLERKLGDLRTKIGRLTQFINGNRSRKVIKHANNIIEQYKIHTIHEEPNTQAAHTLDTLKQKLSVVSGRLQRYKACTLRKQQNTQFTNNEKLFYRNIRQATTNVQENSANHDGNNSPDPETLQNFWAGIWEDPIEHNAQANWIKAESTNCSTNIQAMTFEHISPEIFQKVLCRLHNWKAPGSDHIHSYWYKKFTTVHSYLHNYINIFIQDPNTIPCYLTSGTTFMIPKDRNDLSNPAKYRPITCLQTLYKVITACISEIIYQHIDTNNILAEQQKGCRKFSQGCKEQLIIDSVILKKVQKTKNDLFSMYIDYKKAYDSVPHSWLVEVLEIYKIHPTIVTFLKTTMTTWKTVLRLTTPTETIETSPIKILRGIFQGDALSPLWFCLALNPLSNILNSTSVGIPLKATDTDEQTMLNHLLYMDDIKLYAKTEIQLNELANLTEQFTNDIKMEFGIDKCKINSVGAGQNYQHQYTLETGELIEPLDEQDTYKYLGYNQSLQIHYKDTKQKLKQQFQHRLNTILKTQLYSRNTIKAINTFAIPVLTYSFGIINWTKTDLKTLQRKINTTMTKFRKNHPRSCLQRLTLPRKEGGRGLIDILNLHNKQITTLRQYFFAKTQSSTLHKLVAQNDQQLTPLNLKDTSEQNNEKIIDDKTKLLEWTQKSLHGRHRQDLCQINVDKEASNTWLNRGELFPETEGFMIAIQDQVIETKNYRKYIIKNLASDSCRKCNSSPETIQHITSACKSIAQTDYKHRHDQVANVIHQKLAYKYKLIDSIVPYYKYNPEIVLENLSTKLYFDRAILTDRTIHFNRPDITLINKISKTGYLIDIAVPNTHNLQTTIAEKLSKYTELKDEITRLWHLQKVIIVPIVLSATGVIPKQLHQSLISLNLPSNTYHLMQKAVILNTCRLVRKFLQCDPDNTQ

SEQ ID NO: 16667 - protein, 1435 aa, Amphipyra tragopoginis
MRLRNRILPQAGTGTKRDGESRPGPSSSGCPTYSGEGTVPHQPAQSQTAAVQHSPTSSLFSSIPSSPSSSMRRARNIRATADSSGDDTKSLFSSIPSTRPSYMTRRTASCSTTSTLDSVVQDVNLDSQLAPITSASRSRKRWTPEMNKFILRTYLHLTTLDTDTSTYLEPLHLKFIEKYPHMQVSRQRIGDQRRAIVRNKLLPEETINEIHNQVKEELNQLQSNIHNQHTQTPINHTQQTLTTTQSTQIQSICSEVRNTQKTTQTRMRWTNEHNEAIMRSYYRVTVLGTNETAYRKPMHEDFISKFPSLAHLSEQRIADQRRAIINNKYIDTNRLHSLKLEISEELGINNENLNSANSETTNIVNFNNNHNENIHIQPTNNININCTEESPPNIPSHSFETNLAGETLPNQQTDLERNPQIDETFQEALQFYRNTSPTNRVYIPKQKPSKNLARIVSYLNKITLRENVNTDTDFITLQTIIYCAAWTVAKVNGAKITLQQAESLRSAKKEFKPNWQRRLERKLGDLRTKIGRLTQFINGNRSRKVIKHANNIIEQYKIHTIHEEPNTQAAHTLDTLKQKLSVVSGRLQRYKACTLRKQQNTQFTNNEKLFYRNIRQATTNVQENSANHDGNNSPDPETLQNFWAGIWEDPIEHNAQANWIKTESTNCSINIQAMTFEHISPEIFQKVLCRLHNWKAPGSDHIHSYWYKKFTTVHSYLHNYINIFIQDPNTIPCYLTSGTTFMIPKDRNDLSNPAKYRPITCLQTLYKVITACISEIIYKHIDTNNILAEQQKGCRKFSQGCKEQLIIDSVILKKVQKTKNDLFSMYIDYKKAYDSVPHSWLVEVLEIYKIHPTIVTFLKTTMTTWKTVLRLTTPTETIETSPIKILRGIFQGDALSPLWFCLALNPLSNILNSTSVGIPLKATDTDEQTMLNHLLYMDDIKLYAKTEIQLNELANLTEQFTNDIKMEFGIDKCKINSVRAGQNYQHQYTLETGELIEPLDEQDTYKYLGYNQSLQIHYKDTKQKLKQQFQHRLNTILKTQLYSRNTIKAINTFAIPVLTYSFGIINWTKTDLKTLQRKINTTMTKFRKNHPRSCLQRLTLPRKEGGRGLIDILNLHNKQITTLRQYFFAKTQSSTLHKLVAQNDQQLTPLNLKDTSEQKNEKLIDDKTKPLEWTQKSLHGRHRQDLCQINVDKEASNTWLNRGELFPETEGFMIAIQDQVIETKNYRKYIIKNLATDNCRKCNSSPETIQHITSACKSIAQTDYKHRHDQVANVIHQKLAYKYKLIDSIVPYYKYNPEIVLENLSTKLYFDRAILTDRTIHFNRPDITLINKISKTGYLIDIAVPNTHNLQTTIAEKLSKYTELKDEITRLWHLQKVIIVPIVLSATGVIPKQLHQSLISLNLPSNTYHLMQKAVILNTCRLVRKFLQCDPDNTQ

SEQ ID NO: 16668 - protein, 1435 aa, Amphipyra tragopoginis
MRLRNRILPQAGTGTKRDGESRPGPSSPGCPTYSGEGTVPHQPAQSQTAAVQHSPTSSLFSSIPSSPSPSMRRARNIRATADSSGDDTKSLFSSIPSTRPSYMTRRTASCSTTSTLDSVVQDVNLDFQLAPITSASRSRKRWTPEMNKFILRTYLHLTTLDTDTSTYLEPLHLKFIEKYPHMQVSRQRIGDQRRAIVRNKLLPQETINEIHNQVKEELNQLQSNIHNQHTQTPINHIQQTLTTTQSTQIRSICSEARNTQKTTQTRMRWTNEHNEAIMRSFYRVTALGTNETAYRKPMHEDFINKFPSLAHLSEQRIADQRRAIINNKYIDTNRLNSLKLEISEELGLNNENLNSANSETTNIVNFNNSYNENIDIQPTNNININCTEESPPNTPSHSFEINLAGEIFPNQQTDLERNPQIDETFQEALQFYRNTSPTNRVYIPKQKPSKNLARIVSYLNKITLRENVNIDTEFSILQTIIYCAAWTAAKVNGAKITLQQAESLRSAKKEFKPNWQRRLERKLGNLRTKIGRLTQFINGNRSRKVIKHANNIIEQYKIHTIHEEPNTQAVHTLDTLKQKLSVVSGRLQRYKACTLRKQQNTQFTNNEKLFYRNIRQATTNVQENSANHDGNNSPDPETLQNFWAGIWEDPIKHNAQANWIKTESTNCSTNIQAMTFEHISPEIFQKVLCRLHNWKAPGSDHIHSYWYKKFTTVHSYLHNYINIFIQDPNTTPCYLTSGTTFMIPKDRNDLSNPAKYRPITCLQTLYKVITACISEIIYQHIDTNNILAEQQKGCRKFSQGCKEQLIIDSVILKKVQKTKNDLFSMYIDYKKAYDSVPHSWLVEVLEIYKIHPTIVTFLKTTMTTWKTVLRLTTPTETIETSRIKILRGIFQGDALSPLWFCLALNPLSNILNSTSVGIPLKATDTDEQTMLNHLLYMDDIKLYAKSEIQLNELANLTEQFTNDIKMEFGIDKCKINSVRAGQKYQHQYTLETGELIEPLDEQDTYKYLGYNQSLQIHYKDTKQKLKQQFQHRLNTILKTQLYSRNTIKAINTFAIPVLTYSFGIINWTKTDLKTLQRKINTTMTKFRKNHPRSCLQRLTLPRKEGGRGLIDILNLHNKQITTLRQYFFAKTQSSTLHKLVAQNDQQLTPLNLKDTSEQKNEKLIDDKTKLLEWTQKSLHGRHRQDLCQINVDKEASNTWLNRGELFPETEGFMIAIQDQVIETKNYRKYIIKNLATDNCRKCNSSPETIQHITSACKSIAQTDYKHRHDQVANVIHQKLAYKYKLIDSIVPYYKYNPETVLENLSTKLYFDRAILTDRTIHFNRPDITLINKISKTGYLIDIAVPNTHNLQTTIAEKLSKYTELKDEITRLWHLQKVIIVPIVLSATGVIPKQLHQSLISLNLPSNTYHLMQKAVILNTCRLVRKFLQCDPDNTH

SEQ ID NO: 16669 - protein, 1435 aa, Amphipyra tragopoginis
MRLRNRILPQAGTGTKRDGESRPGPSSSGCPTYSGEGTVPHQPAQSQTAAVQHSPTSSLFSSIPSSPSSSMRRARNIRATADSSGDDTKSLFSSIPSTRPSYMTRRTASCSTTSTLDSVVQDVNLDSQLAPITSASRSRKRWTPEMNKFILRTYLHLTTLDTDTSTYLEPLHLKFIEKYPHMQVSRQRIGDQRRAIVRNKLLPEETINEIHNQVKEELNQLQSNIHNQHTQTPINHTQQTLTTTQSTQIQSICSEARDTQKTTQTRMRWTNEHNEAIMRSYYRVTALGTNETAYRKPMHEDFINKFPSLAHLSEQRIADQRRAIINNKYIDTNRLNSLKLEISEELGLNNENLNSANSETTNIVNFNNNHNENIHIQPTNNININCTEESPPNIPSHSFEINLAGETLPNQQTDLERNPQIDETFQEALQFYRNTSPTNRVYIPKQKPSKNLARIVSYLNKITLRENVNTDTDFSTLQTIIYCAAWTVAKVNGAKITLQQAESLRSAKKEFKPNWQRRLERKLGDLRTKIGRLTQFINGNRSRKVIKHANDIIEQYKIHTIHEEPNTQAAHTLDTLKQKLSVVSGRLQRYKACTLRKQQNTQFTNNEKLFYRNIRQATTNVQENSANHDGNNSPDPETLQNFWAGIWEDPIEHNAQANWIKTESTNCSTNIQAMTFEHISPEIFQKVLCRLHNWKAPGSDHIHSYWYKKFTTVHSYLHNYINIFIQDPNTIPCYLTSGTTFMIPKDRNDLSNPAKYRPITCLQTLYKVITACISEIIYQHIDTNNILAEQQKGCRKFSQGCKEQLIIDSVILKKVQKTKNDLFSMYIDYKKAYDSVPHSWLVEVLEIYKIHPTIVTFLKTTMTTWKTVLRLTTPTETIETSPIKILRGIFQGDALSPLWFCLALNPLSNILNSTSVGIPLKATDTDEQTMLNHLLYMDDIKLYAKTEIQLNELANLTEQFTNDIKMEFGIDKCKINSVRAGQNYQHQYTLETGELIEPLDEQDTYKYLGYNQSLQIHYKDTKQKLKQQFQHRLNTILKTQLYSRNTIKAINTFAIPVLTYSFGIINWTKTDLKTLQRKINTTMTKFRKNHPRSCLQRLTLPRKEGGRGLIDILNLHNKQITTLRQYFFAKTQSSTLHKLVAQNDQQLTPLNLKDTSEQNNEKIIDDKSKLLEWTQKSLHGRHRQDLCQINVDKEASNTWLNRGELFPETEGFMIAIQDQVIETKNYRKYIIKNLATDNCRKCNSSPETIQHITSACKSIAQTDYKHRHDQVANVIHQKLAYKYRLIDSIVPYYKYNPEIVLENLSTKLYFDRAILTDRTIHFNRPDITLINKISKTGYLIDIAVPNTHNLQTTIAEKLSKYTELKDEITRLWHLQKVIIVPIVLSATGVIPKQLHQSLISLNLPSNTYHLMQKAVILNTCRLVRKFLQCDPDNTQ

SEQ ID NO: 16670 - protein, 1466 aa, Tuta absoluta
MEHSNRKYNLRPLPGGRRGASGAGAGCYSLRDTGGEELSRRTPVTQYVTAGRRELSRRAHGEDATAEYSGDDTISLFSSIPSTRRSYMTRRTSTLSSSSTLADVVQQVNTDFELAPTSSAPTMRRRWTPEMNKFILRTYLQLTALDTDTKTYLEPLHLKFMERYPDMNASRQRVGDQRRAIVRNKLLSQNTINEIYNEVKEELRILEHNLSSQYPHSNTPTVPFTIPRTPLSDTQNTTRDTQNLQSSTRMRWTTEHNETIMRIYYRLTELETNRTTYRQPLHEAFISAFPSLAHFSEQRIADQRRAIINNKYFDDARLNTIKHQVAEELSINIPQCVNNTNNIQCDNTTPHTNAEDTYIQFLNCFEVESPAEYLPEQRNPTSNPQIDETFDQTLNHFLDTDPTTRPYIPKQKTSKKFAAIVEYINQVTLPKTVNLDTDFSTLQTVIYCAAWTAAKVNGAKISFEIVNRSRSTQRENKPNWQRRLERRIEHFRRNIGRITQFINGNSNTQLKQQVESIVDQYKIHSVHEEPNTQLTHTLDTLKQKLAVITGRLRRYQACTLRKKQNNQFRNNEKLFYRNLNQNTTNSQNNRDHNDVNDAPNPEVLQAFWAGIWEQPIEHNSQAEWIKTEVKNNTTTPQMNFEHIPIDTFQKVLLKLHNWKAPGSDNIHSYWYKKFTSIQGFLHNHLNYFIEEPSTIPSYITIGTTYMILKDRNDPSNPAKYRPITCLQTLYKILTACISELIYTHVDDNGILAEQQKGCRKFSQGCKEQLVIDSVILKQVQKLKSDLFSMYIDYRKAYDSVPHSWLMQILEVYKIHPKIITFLKTTMENWTTKLILTTNNQTLETEAIRIQRGIFQGDALSPLWFCLALNPLSNILNSSTLGYKLNYTNNDRQTDERQNINHLLYMDDIKLYADTESHLHQLATLTERFTNDIKMEFGIDKCKINSIKAGNSYKHHYTLQAGEQIEPLDEQETYKYLGYNQSLQIKFKETKDKLKQIFRHRLNSILKTQLDARNTFKAINSYAIPILTYSFGIINWSKSDLKALQRTINTTLTKYRKHHPRSCVQRLTLPRKEGGRGLIDITNLHNRQITTLRQYFFKKSESSLLHKSIAQNDKKATPLNLHDKTTQINEKLTDDKMKLAEWTQKSLHGRHRHDLCQSNVDKDASNAWLIRGELFPETEGFIMAIQDQVMETKNYRKHITKTLSTDTCRKCNSCPETIQHITGACKSIAQTDYKHRHDQVANVIHQKLAYQQKCITNIQPYYKYSPQTVLENSTTKLYFDRAILTDRTIHYNRPDITMINKTNKTGYLIDIAVPNTHNLQTTIAEKLTKYVELKEEITRLWHLQKVVIVPIVLSSTGVIPKQLHQSLKTLNLPPNTYHILQKAVILNTCRIVRKFLQNDQDQVLSRQATQPTQRTSSVIAQPNPDLHHTTESNTTQTFQNIRTTTQPNYTYSTTQPNTQLEIDIHLA

SEQ ID NO: 16671 - protein, 1466 aa, Tuta absoluta
MEHSNRKYNLRPLPGGRRGASGAGAGCYSLRDTGDEELSRRTPVTQYVTAGRRELSRRAHGEDATAEYSGDDTISLFSSIPSTRRSYMTRRTSTLSSSSTLADVVQQVNTDFELAPTSSAPTMRRRWTPEMNKFILRTYLQLTALDTDTKTYLEPLHLKFMERYPDMNASRQRVGDQRRAIVRNKLLSQNTINEIYNEVKEELRNLEHNLSSQYPHSNTPTVPFTIPRTPLSDTQNTTRDTQNLQSSTRMRWTTEHNETIMRIYYRITELETNRTTYRQPLHEAFISAFPSLAHLSEQRIADQRRAIIYNKYFDDARLNTIKHQVAEELSINIPQCVNNTNNIQCDNTTPHTNAEDTYIQFLNCFEVESPAESLPEQRNPTSNPQIDETFDQTLNHFLDTDPTTRPYIPKQKTSKKFAAIVDYINQVTLPKTVNLDTDFSTLQTVIYCAAWTAAKVNGAKISFEIVNRSRSTQRENKPHWQRRLERRIEHFRRNIGRITQFINGNSNTQLKQQVESIVDQYKIHSVHEEPNTQLTHTLDTLKQKLAVITGRLRRYQACTLRKKQNNQFRNNEKLFYRNLKQNTTNSQNNRDHNDVNDAPNPEVLQAFWAGIWEQPIEHNSQAEWIKTEVKNNTTTPQMNFEHIPIDTFQKVLLKLHNWKAPGSDNIHSYWYKKFTSIQGFLHNHLNYFIEDPSTIPSYITIGTTYMILKDRNDPSNPAKYRPITCLQTLYKILTACISELIYTHVDDNGILAEQQKGCRKFSQGCKEQLVIDSVILKQVQKLKSDLFSMYIDYRKAYDSVPHSWLMQILEVYKIHPKIITFLKTTMENWTTKLILTTNNQTLETEAIRIQRGIFQGDALSPLWFCLALNPLSNILNSSTLGYKLNYTNNDRQTDERQNINHLLYMDDIKLYADTESHLHQLATLTERFTNDIKMEFGIDKCKINSIKAGNSYKHHYTLQAGEQIEPLDEQETYKYLGYNQSLQIKFKETKDKLKQIFRHRLNTILKTQLDARNTFKAINSYAIPILTYSFGIINWSKSDLKALQRTINTTLTKYRKHHPRSCVQRLTLPRKEGGRGLIDITNLHNRQITTLRQYFFKKSESSLLHKSIAQNDKKATPLNLHDKTTQINEKLTDDKMKLAEWTQKSLHGRHRHDLCQSNVDKDASNAWLSRGELFPETEGFIMAIQDQVMETKNYRKHITKTLATDTCRKCNSCPETIQHITGACKSIAQTDYKHRHDQVANVIHQKLAYQQKFITNIQPYYKYSPQTVLENSTTKLYFDRAILTDRTIHYNRPDITMINKTNKTGYLIDIAVPNTHNLQTTIAEKLTKYVELKEEITRLWHLQKVVIVPIVLSSTGVIPKQLHQSLKTLNLPPNTYHILQKAVILNTCRIVRKFLQNDQDQVLSRQATQPTQRTSIVIAQPNPNIHHTTESNTTQTFQNIRTTTQPNYTYSTTQPNTQLEIDMHLA

SEQ ID NO: 16672 - protein, 1217 aa, Tuta absoluta
MRWTTEHNETIMRIYYRITELETNRTTYRQPLHEAFISAFPSLAHFSEQRIADQRRAIINNKYFDDARLNTIKHQVAEELSINIPQCVNNTNNIQCDNTTPHTNAEDTYIQFLNCFEVESPAESLPEQRNPTSNPQIDETFDQTLNHFLDTDPTTRPYIPKQKTSKKFAAIVDYINQVTLPKTVNLDTDFSTLQTVIYCAAWTAAKVNGAKISFEIVNRSRSTQRENKPNWQRRLERRIEHFRRNIGRITQFINGNSNTQLKQQVESIVDQYKIHSVHEEPNTQLTHTLDTLKQKLAVITGRLRRYQACTLRKKQNNQFRNNEKLFYRNLKQNTTNSQNNRDHNDVNDAPNPEVLQAFWAGIWEQPIEHNSQAEWIKTEVKNNTTTPQMNFEHIPIDTFQKVLLKLHNWKAPGSDNIHSYWYKKFTSIQGFLHNHLNYFIEEPSTIPSYITIGTTYMILKDRNDPSNPAKYRPITCLQTLYKILTACISELIYTHVDDNGILAEQQKGCRKFSQGCKEQLVIDSVILKQVQKLKSDLFSMYIDYRKAYDSVPHSWLMQILEVYKIHPKIITFLKTTMENWTTKLILTTNNQTLETEAIRIQRGIFQGDALSPLWFCLALNPLSNILNSSTLGYKLNYTNNDRQTDERQNINHLLYMDDIKLYADTESHLHQLATLTERFTNDIKMEFGIDKCKINSIKAGNSYKHHYTLQAGEQIEPLDEQETYKYLGYNQSLQIKFKETKDKLKQIFRHRLNSILKTQLDARNTFKAINSYAIPILTYSFGIINWSKSDLKALQRTINTTLTKYRKHHPRSCVQRLTLPRKEGGRGLIDITNLHNRQITTLRQYFFKKSESSLLHKSIAQNDKKATPLNLHDKTTQINEKLTDDKMKLAEWTQKSLHGRHRHDLCQSNVDKDASNAWLIRGELFPETEGFIMAIQDQVMETKNYRKHITKTLSTDTCRKCNSCPETIQHITGACKSIAQTDYKHRHDQVANVIHQKLAYQQKCITNIQPYYKYSPQTVLENSTTKLYFDRAILTDRTIHYNRPDITMINKTNKTGYLIDIAVPNTHNLQTTIAEKLTKYVELKEEITRLWHLQKVVIVPIVLSSTGVIPKQLHQSLKTLNLPPNTYHILQKAVILNTCRIVRKFLQNDQDQVLARQATQPTQRTSSVIAQPNPDIHHTTESNTTQTFQNIRTTTQPNYTYSTTQPNTQLEIDIHLA

SEQ ID NO: 16673 - protein, 1466 aa, Tuta absoluta
MEHSNRKYNLRPLPGGRRGASGAGAGCYSLRDTGDEELSRRTPVTQYVTAGRRELSRRAHGEDATAEYSGDDTISLFSSIPSTRRSYMTRRTSTLSSSSTLADVVQQVNTDFELAPTSSAPTMRRRWTPEMNKFILRTYLQLTALDTDTKTYLEPLHLKFMERYPDMNASRQRVGDQRRAIVRNKLLSQNTINEIYNEVKEELRILEHNLSSQYPHSNTPTVPFTIPRTPLSDTQNTTRDTQNLQSSTRMRWTTEHNETIMRIYYRITELETNRTTYRQPLHEAFISAFPSLAHLSEQRIADQRRAIIYNEYFDDARLNTIKHQVAEELSINIPQCVNNTNYIQCDNTTPHTNAEDTYTQFLNCFEVESPAESLPEQRNPTSNPQIDETFNQTLNHFLDTNPTTRPYIPKQKTSKKFAAIVDYINQVTLPKTVNLDTDFSTLQTVIYCAAWTAAKVNGAKISFEIVNRSRSTQRENKPNWQRRLERRIEHFRRNIGRITQFINGNSNTQLKQQVESIVDQYKIHSVHEEPNTQLAHTLDTLKQKLAVITGRLRRYQACTLRKKQNNQFRNNEKLFYRNLKQNTTNSQNNRDHNDVNDAPNPEVLQAFWAGIWEQPIEHNSQAEWIKTEVKNNTTTPQMNFEHIPIDTFQKVLLKLHNWKAPGSDNIHSYWYKKFTSIQGFLHNHLNYFIEDPSTIPSYITIGTTYMILKDRNDPSNPAKYRPITCLQTLYKILTACISELIYTHVDDNGILAEQQKGCRKFSQGCKEQLVIDSVILKQVQKLKSDLFSMYIDYRKAYDSVPHSWLMQILEVYKIHPKIITFLKTTMESWTTKLILTTNNQTLETEAIRIQRGIFQGDALSPLWFCLALNPLSNILNSSTLGYKLNYTNNDRQTDERQNINHLLYMDDIKLYADTESHLHQLATLTERFTNDIKMDFGIDKCKINSIKAGNSYKHHYTLQAGEQIEPLDEQETYKYLGYNQSLQIKFKETKDKLKQIFRHRLNSILKTQLDARNTFKAINSYAIPILTYSFGIITWSKSDLKALQRTINTTLTKYRKHHPRSCVQRLTLPRKEGGRGLIDITNLHNRQITTLRQYFFKKSESSLLHKSIAQNDKKATPLNLHDKTTQINEKLTDDKMKLAEWTQKSLHGRHRHDLCQSNVDKDASNAWLSRGELFPETEGFIMAIQDQVMETKNYQKHITKTLATDTCRKCNSCPETIQHITGACKSIAQTDYKHRHDQVANVIHQKLAYQQKFITNIQPYYKYSPQTVLENSTTKLYFDRAILTDRTIHYNRPDITMINKTNKTGYLIDIAVPNTHNLQTTIAEKLTKYVELKEEITRLWHLQKVVIVPIVLSSTGVIPKQLHQSLKTLNLPPNTYHILQKAVILNTCRIVRKFLQNDQDQVLSRQATQPTQRTSIVIAQPNPNIHHTTESNTTQTFQNIQTTTPPNYTYSTTQPNTQLEIDMHLA

SEQ ID NO: 16674 - protein, 829 aa, Tuta absoluta
MNFEHIPIDTFQKVLLKLHNWKAPGSDNIHSYWYKKFTSIQGFLHNHLNYFIEDPSTIPSYITIGTTYMILKDRNDPSNPAKYRPITCLQTLYKILTACISELIYTHVDDNGILAEQQKGCRKFSQGCKEQLVIDSVILKQVQKLKSDLFSMYIDYRKAYDSVPHSWLMQILEVYKIHPKIITFLKTTMENWTTKLILTTNNQTLETEAIRIQRGIFQGDALSPLWFCLALNPLSNILNSSTLGYKLNYTNNDRQTDERQNINHLLYMDDIKLYADTESHLHQLATLTERFTNDIKMEFGIDKCKINSIKAGNSYKHHYTLQAGEQIEPLDEQETYKYLGYNQSLQIKFKETKDKLKQIFRHRLNSILKTQLDARNTFKAFNSYAIPILTYSFGIINWSKSDLKALQRTINTTLTKYRKHHPRSCVQRLTLPRKEGGRGLIDITNLHNRQITTLRQYFFKKSESSLLHKSIAQNDKKATPLNLHDKTTQINEKLTDDKMKLAEWTQKSLHGRHRHDLCQSNVDKDASNAWLSRGELFPETEGFIMAIQDQVMETKNYQKHITKTLATDTCRKCNSCPETIQHITGACKSIAQTDYKHRHDQVANVIHQKLAYQQKFISNIQPYYKYSPQTVLENSTTKLYFDRAILTDRTIHYNRPDITMINKTNKTGYLIDIAVPNTHNLQTTIAEKLTKYVELKEEITRLWHLQKVVIVPIVLSSTGVIPKQLHQSLKTLNLPPNTYHILQKAVILNTCRIVRKFLQNDQDQVLSRQATQPTQRTSIVIAQPNPNIHHTMESNTTQTFQNIQTTTQPNYTYSTTQPNTQLEIDMHLA

SEQ ID NO: 16675 - protein, 1422 aa, Agrochola circellaris
MEMSNKRVYNLRSLPGERRGASGADARCHSMRTIGGEELSKRAPTNKIVTAGRNELNRRAHYVEATADSTGDDTISLFSSIPSTRPSYMTRRTASLSTTSTLDSVVQEVNLDSELAPTISAPSTRRRWTPEMNKFILRTYLQLTALDTDRKTYLEPLHLKFIEKFPNMQVSRQRIGDQRRAIINNKLLPQTTIEEIRNDVKEELDRLHFNHSIQQSQNSIDHVQQILTPTQSTQMQPRTTEAHNTKNRTQARMRWTNEQNEAIMRSYYRVTDLGRNETVYRRRMYEDFIKTFPDLAHLSEQRIADQRRAIINNNYITSDRLNSIKLEISEELQLDNLNFSNFTGETTIVNPNHNNNSETQFLYSIDINSTQESSVTLNHTEINIAEEMVPNQEINLDRDPLIDETFQQAFQYYKEINPTNRIFIPKQKPSKKLARIVSYLNKIILPENMNKETDFYTLQTAIYCAAWTAAKVNGAKLTLQPRVVTQMAKKQYKPKWETRLERKLNDLRSKIAKMTQFINGIRSSKIIKHVNKIIEEYRIHTVHEEPNTQAVHTLDTLKQKLSVVTGRLQRYKACNQRKLQNTQFTHNEKLFYRNIRQATSNVQDNNPNDDDHNNPDSETLQNFWAGIWEQPIEHNAQADWIQTELTNSNTNIQAMSFEHISPEIFHKVLSRLHNWKAPGSDNIHSYWYKKFTSIHSFLYNHINTFIQDPKTIPSYVTSGTTFMISKDRSDLSNPAKYRPITCLQTLYKIITSCISELIYQHIDTNNILAEQQKGCRKFSQGCKEQLIIDSVILKKVQKTKTDLFCMYIDYKKAYDSVPHSWLIKILEIYKIHPIITSSTKTVDTSPIKIQRGIFQGDALSPLWFCLALNPLSNILNATTLGIPLKNITTQGHTEVQKIELNHLLYMDDIKLYAKSETQLYELANLTEQFSNDIKMEFGIDKCKINSIRAGQNYQHQYTLGTGEHIEPLEEQDSYKYLGYTQSRQIHYKETKQRLTLQFQHRLNTILKTQLYSRNTIKSINTFAIPVLTYSFGIINWTKTDLKNLQRKINTTMTKFRKHHPRSCLQRLTLPRKEGGRGLIDILNLHNRQIKALRLFFFSKTETSILHKIITHNDQQLTPLNLKDTSEQRNEKLIDDKIKLLDWTQKSLHGRHRQDLCHINVDKEASNAWLNRGELFPETEGFMLAIQDQVIETKNYRKFIIKNLNNDTCRKCNSSPETIQHITGACKSIAQTDYKHRHDQVANIIHQKLAQQYKLIDSVTPYYKYNPETVLENPSTKLYFDRAILTDRTIHFNRPDITLINKINKTGYLIDIAIPNTHNLQTTIAEKLSKYTELKDEVARLWHLQKVTIVPIVLSTTGVIPKQLHQSLISLNLPPNTFHLLQKAAILNTCRLVRKFLQCESENPHQNINTLPSSVQFPARDRT

SEQ ID NO: 16676 - protein, 1419 aa, Hypena proboscidalis
MSNNRYNLRSLPGGRRGASGADAGCFSIRTIGGRELSRRTSTDKNITAERRELSRRAHDVEATADFTDDDTISLFSSIPSTRPSYMTRSRKSSTLSSISAPNSVVQEVIPDVELAPTSGSSTSRKRWTPELNKFILRTYLQLTALDTDTSTYLEPLHHKFIEKFPNIEVSRQRLGDQRRAIIRNRLLPQKTIDYIYDEVKTELDLQTDIHTSLNLTSQHFSQNIATSENSTLLQPTQTQPISRIVTKNTTQTRMRWTTRQNEEIMRSYYRVTSLEANQTAYRKLMFEDFITKFPDLSHVSEQRIADQRRAIINNKYLSNDRLDVLRQEISIELATNSSDNVENHSESIHERSQFQNVEDTETSIFEVLQFAEESVLDRQPPIDETFQQAFEYYKDTEPTSRTFIPKQRPSKKLAKIVNYLNEVIFPEVIKEDTDFHKLQTAIYCAAWTAAKINGAKITLQGNTSHQPDKRDYKPNWQRRLERKLTNLRTKISHLTQYIKGNRSRNVVKYAKSIIEQYKTHTIHENPNTQPIHTLDTLKQKLAVVTGRIKRYKACTQRKQQNSQFSNNEKVFYRNIKQSTMNTQQNNSNSTSTPTSEELHDFWARIWSDPVQHNTEAEWIQKECTTNTSSIQTMEFEYISVEIFQRVLRHLHNWKSPGSDFVQSYWYKKFTYVHSHLHKFINIFIQDPNTIPTYLTLGKTFMIPKDHNDLTNPAKYRPITCLQTLYKIITSCISELIYQHADANNILAEQQKGCRKFSQGCKEQLVIDSVILTQVQKTHSDLFSMYIDYKKAYDSVPHSWLLKVLEIYKVHPTIVSFLKTTMTRWSTKLAISTVTHTVETNSIQINRGLFQGDALSPLWFCLALNPLSNILNATPIGYDFKISPTNGQTDIQDFKINHLLYMDDIKLYANTENEINDLASLTEQFTNDIHMEFGIDKCKINSIRAGQNYQHQYVLGTGEQIKALGEQDTYKYLGYRQSLQINHKDTKQKLTQEFQHRLNTILKTQLNSRNTVKAINTFVIPVLTYSFGIINWTKTDLTNLRRKINTTLTKFRKHHPRSCLQRLTLSRKEGGRGIVDIINLHNKQIRSLRQYFFKKAESCKLHKTIVQNDKNFTPLNLKDNREQKNEKVIDDTVKIGNWTQKALHGRHRLDLCQQNVDKDASNAWLNRGELFETRNYRKYIIKNLPFDTCRKCNSSPETIQHITGACKSIAQTDYKHRHDQVANIVHQKLAYHFKFVDSIHPYYKYNPQTVLENSTTKLYYDRAILTDKTIHYNRPDITLINKINKTGYLIDIAIPNTHNLQTTIAQKLTKYIELKDEITRLWHLEKVTIVPIVISSTGVIPKQLHQSLNSLQLSPNTYQLMQKAVILNTCRLVRKFLQCEPDTTHSITHDSEQSNTYSSTLAPPTHITIQTSNPTDEHLA

SEQ ID NO: 16677 - protein, 1334 aa, Endotricha flammealis
MSDRRTSTSTSNTLESVVQYVNIDSEIAPTSSAIRTRRRWTSEINQFILRNYLILTNLDTDTKTYLEPLHLKFMETYPEMQVSRQRIGDQRRAIIRRNLLPKKTVDKIYEEVKNILHQQHVTSQAQNISGTQAHPTSTTATQNSCNTQTRNIESQITTKNTRMRWTNEHNEAIMRIYYRITNLDTNRTAYRKQLHNNFIMAFPSLSHLSEQRIADQRRAILNNQYLSKERLNDIIQEVTEELSVTVAQPDSLHNTQESNNTLNNAENFIDDFFINNIGLGTDTSDEHTPMATSQTLETQPKTDELFSQAFEYYKNTEPINRTYIPKQKSSRKLSNIVDYLNKVTLPNYVNIDTDFNTLQTIIYCAAWTAAKANGAKITLNPTEKQYTAKKEHKPRWQERLERRIEELRRNIGRLTNFIKGNRSQKLIKQVNSITKQYKIHSIHEEHNTRLTHTLDTMKQKLSALAGRLKRYKACTLRKQQNNQFRNNEKLFYRNIKQTSTNSQQHNTQDTNIYPTTEDLHKYWAGIWEQPVQHNTQAEWIQSEIDFINAKTEPMNFDYITPDIFIKVISNLHNWKASGSDYIHSYWYKKFTHIHTYLLNYINDFLENPNSMPIYITSGTTYMIPKDRYDSSNPAKYRPITCLQTLYKIITSCITEVIYKHAETNNILAEQQKGCRKFSQGCKEQLIIDSIIHRKVKKSKSNLFTMYIDYKKAFDSVPHTWLLEVLNIYKIHPKILDFLKTTMTNWTTKLRLFTTSDTIETSTIKIQRGIFQGDSLSPLWFCLALNPLSNILNSTAIGYPLHYTQTDRQTGTEQNEATLNHLMYMDDIKLYATTEEHLVQLANLAEQFTSDIKMEFGLDKCKINSIKDGHRYQHQHTLETGAYIDSLNEQDSYKYLGYNQAMQIDHKEIKQNLKQEFRHRINTILRSQLCSGNIIKGINTFAMPVLTYSFGVINWSKTELKNLQRLINTSMTKHRKHHPRSCLQRLTLPRKEGGRGLIDIINLHNSQIKNLRQYFFSKAENSTIHKAITQNDRKLTSLNLLDTTVQSNENIHDQKAKLAEWAGKSLHGRHYQDLRHHSVDKKASNEWLRRGELFPETEGFMLAIQDQVVETKNYQKFIMKQHVNDICRKCNSSSETIQHITGACKSIAQTDYKHRHDQVANIIHQKLAHQHNLIESVQPYYKYNPDTVLENSTTKLYYDRAILTDRTVHYNRPDITIIDKISQTGYLIDIAVPNTHNIQTTIAEKLSKYVELKDEIIRLWHLKTVTIVPIVLSTTGIVPKQLHQSLITLNLPCHIYTLLQKAVILNTCRLVRKFLQIEHTHPLTAPQSKPQTHSQ

SEQ ID NO: 16678 - protein, 878 aa, Endotricha flammealis
MKQKLSALAGRLKRYKACTLRKQQNNQFRNNEKLFYRNIKQTSTNSQQHNTQDTNIYPTTEDLHKYWAGIWEQPVQHNTQAEWIQSEIDFINAKTEPMNFDYITPDIFIKVISNLHNWKASGSDYIHSYWYKKFTHIHTYLLNYINDFLENPNSMPIYITSGTTYMIPKDRYDSSNPAKYRPITCLQTLYKIITSCITEVIYKHAETNNILAEQQKGCRKFSQGCKEQLIIDSIIHRKVKKSKSNLFTMYIDYKKAFDSVPHTWLLEVLNIYKIHPKILDFLKTTMTNWTTKLRLFTTSDTIETSTIKIQRGIFQGDSLSPLWFCLALNPLSNILNSTAIGYPLHYTQTDRQTGTEQNEATLNHLMYMDDIKLYATTEEHLVQLANLAEQFTSDIKMEFGLDKCKINSIKDGHRYQHQHTLETGAYIDSLNEQDSYKYLGYNQAMQIDHKEIKQNLKQEFRHRINTILRSQLCSGNIIKGINTFAMPVLTYSFGVINWSKTELKNLQRLINTSMTKHRKHHPRSCLQRLTLPRKEGGRGLIDIINLHNSQIKNLRQYFFSKAENSTIHKAITQNDRKLTPLNLLDTTVQSNENIHDQKAKLAEWAGKSLHGRHYQDLRHHSVDKKASNEWLRRGELFPETEGFMLAIQDQVVETKNYQKFIMKQHVNDICRKCNSSSETIQHITGACKSIAQTDYKHRHDQVANIIHQKLAHQHNLIESVQPYYKYNPDTVLENSTTKLYYDRAILTDRTVHYNRPDITIIDKISQTGYLIDIAVPNTHNIQTTIAEKLSKYVELKDEIIRLWHLKTVTIVPIVLSTTGTVPKQLHQSLITLNLPCHIYTLLQKAVILNTCRLVRKFLQIEHTHPLTAPQSKPQTHSQ

SEQ ID NO: 16679 - protein, 726 aa, Tuta absoluta
MQFDHIPIDTYQKVLHNLHNWKAPGSDNIHSFWYKKFTSIQGFLHNHLNNFIEYPEQLPAFITAGTTIMIQKDRNDPTNPAKYRPITCLQTIYKILTACISELIYTHVNENNILAEQQKGCRKFSQGCKEQLIIDSVILKQIQKLKSNLHSMYIDYKKAYDSVPHSWLLKVLDIYKIHPKIINLLKVTMTNWSTRLKLSTPTNLITTGPIRIQRGIFQGDALSPLWFCLALNPLSNVLNSTTLGYPLRYAENDQQTDRQNLSHLLYMDDIKLYARDEEQLHQLANLTEQFSVDIKMEFGLDKCKINSIKAGKSYKHNYTLETGQQIEPLDGQETYKYLGYSQSLQIQYKETKEKLKQTFRHRLNSILKTQLHSRNTFKAINTYAIPVLTYSFGIINWSKSDLKALQRTVNTTLTKFRKHHPRSCLQRLTLPRKQGGRGLIDIVNLHNRQVITLRKYFFSKSETSTLHKAIVQNDLNATPLNLHDTNAQTNEKLTDDKTKLTEWAGKSLHGRHFHDLSQPNVDKDASNAWLNRGDLFPETEGFIMAIQDQVIETKNYQKYITKTLTSDTCRKCNSSPETIQHITGACKSIAQTDYKYRHDQVANIIHQKLAHQYNLIPSIQPYYKYNPQTVLENPTTKLYYDRAILTDRTIHYNRPDITLIDKSNKTGYLIDIAVPNTHNLQSTIADKLTKYVELKGEITRIWHLQKVTIVPIVVSSSDSKAAPPVS

SEQ ID NO: 16680 - protein, 1418 aa, Melitaea cinxia
MENSNRIYNLRPLPGGRRGAPGADAGCHSMRTIGDVELNRRAPIDKKTTAGPRELIRRTPDVDATADSSGDETNSLFTSVPSTCPSYMTRKTLNTNTSLESVVQDVNIDTELAPIESAHNRRRRWTREMNTFILRTYLQLTELNLDTRSYLEPLHSKFTEKFPNMQVSRQRIGDQRRAIVRNKLLPQNIIDQIYDEVKTELTQMNNSISSHYTQKPKHHHTLEVESVKSQTHFLPSEVPIVSNTTQRRMRWTREHNEAIMRSYYRITSLGLNNSAYRKQLYNDFINRFPSLTFLNEQRVADQRRAIVNNKYIDSNRLSELKLEVSKELQVNSREISNCIDVTNSVSDNTNIQFTNNSKNTIQQPLVNNQSLIMDTVNHPGEPQSEIINGNRHLEIDQIFQQTFEFYKNTEPENRTYIPKQKPSKKFANIVSYLNEVTIPENVNENTDFLTLQTIIYCAAFTAAKANGSKINLQIHTQHSKNKTEHKPNWQKRLERKVKDLRSKIGRLTEFNNGNRSRKVINHVNKIIEQYKVHTIHEEQNTKVTHTLDTLKQKLAAVAGRLQRYKACTLRKQQNIQFIQNEKQFYRKITQTTTNTQDNISNEITTKIPDPDLVRQYWAKMWEDPVQHNDQANWIQTEISNNDEKIRPMTFEHIPLLTFEKVLRNLHNWKSPGSDYIHSYWYKKLTNIHKYLYHHLNNFIQNPEIIPLYLTAGITFMIPKDKNDLSNPAKYRPITCLQTLYKILTSCVSELIYAHSDLNNILTEQQKGCRKYSQGCKEQLIIDSIILKKVQKTKSDLFSMYIDYKKAFDSVPHSWLMKVLKIYKIHPTIINFLKITMSNWTTVLQLTTQTTSLVETKKIKIQRGIFQGDALSPLWFCLALNPLSNMLNSTSLGISLSDRQTDKQTDIDSEDYILNHLMYMDDIKLYSSTENQLIEITKITEQFTKDIKMEFGIDKCRINSIKAGKNYQHQYKLITGEKIEPLNEEDTYKYLGYDQSLQIHHKEAKTRLTQQFQHRLNTILKTQLYSRNTIKAINTFAIPILTYSFGIIKWTKSELKSLQRKINTTMTKCHKHHPRSCLQRLTLPRKEGGRGLVDILNLHNKQISTLRKYFFAKIEYSRLHKIITEMDQAFTPLNLKIRSAQKNETVIDNRIKITEWAQKSLHGRHRQDLCLSNVDKEASNEWLHRGALFPETEGFMIAIQDQVIETKNYRKYIIKNLTTTDSCRKCNSNPETIQHITGACKSIAQTDYKHRHDQIASIIHQKLAYECKLTDTLLPYYKYTPEPALENSTTRLYFDRGILTDRTIHFNRPDITLIDKISKIGFLIDIAVPNTHNLQSTIAEKLSKYTELKNEITRIWHLQKVTIVPIVLSTTGVIPTQLHTSLQTLKLPASTYQLLQKAAILNTCRLVRKFLQSEPNPSD

SEQ ID NO: 16681 - protein, 1282 aa, Mellicta athalia
MENSKRIYKLRPLPGGRRGAPGADAGCHSMRSIGDVELSRRAPIDKKTTAGPRELIRRTPDVDATADSSGDETNSLFTSVPSTCPSYMTKITLTTNTSLDSVVQDVNLDTELAPIESAQNRRRRWTQEMNIFILRTYLQLTELNLDTRSYLEPLHLKFTEKFPNMQVSRQRIGDQRRAIVRNKLLPQNIIDQLIHDEVKTELNQMNSSISTHYTQKPKHYHALEMESVKSQTHSLPPEVPIARNTTQRRMRWTCEHNEAIMRSYYRVTSLGLNNTAYRKQLYNDFINQFPSLTFLNEQRIADQRRAIVNNKYIDSNRLSELKLEVSKELQVNSRELNNCIDGTSFICDNTNIQLTNNSTNTIQQLSPNSQSLIMDSVNLPDEPLSEKFNGNRRLEIDQTFQQTFEFYKNTEPENRTYIPKQKPSKKFANIVNYLNEVTIPENVNENTDFLTLQTIIYCAAWTAAKANGSKINLQVSNIRHSKNKLDHKPNWQKRLERKVKDLRSKIGRLTEFNNGNRSKKVIDHANKIIEQYKTHTIHEEQNTKVTHTLDTLKQKLAVVAGRLQRYKACTLRKQQNIQFIHNERLFYRNITQTTTNTQDNRPNEIATKTPDPDLLRQYWAKIWEDPVQHNDQADWIQTETLNNDVTIRPMTFEHIPLSTFEKVLRNLHNWKSPGSDYIHSYWYKKLTNIQKCLYHHLNNFIQNPETIPLYLTSGITFMIPKDKNDLSNPAKYRPITCLQTLYKILTACISELMYAHSDLNKILAEQQKGCRRYSQGCKEQLIIYSIVLKKVQKTKSDLFSMYIDYKKAYDSVPHSWLMKVLKIYKIHPTIINFLKVTMSNWTTVLQLTTQITSPVETNKIKIQRGIFQGDALSPLWFCLALNPLSNILNSTSLGISLSDRQTDKQTDIDSEVHILNHLMYMDDIKLYSSTENELNEVTKITEQFTNDIKMEFGIDKCRINSIKAGKNYQHQYKLRTGEKIVPLNEEDTYKYLGYDQSLQIHHKEVKTRLTQQFQHRLNTILKTQLYSRNTIKAINTFAIPILTYSFGIIKWTKSELKSLQRKINTTMTKSHKHHPRSCLQRLTLPRKEGGRGLIDILNLHNKQISSLRKYFFAKTESSKLHKIITKMDQAFTPLNLKIRSAQKNETLIDEITKITEWAQKSLHGRHRQDLCLSNVDKEASNEWLHRGELFPETEGFMIAIQDQVIETKNYRKYIIKNLTTSDFCRKCNSNPETIQHITGACKSIAQTDYKHRHNQIASIIHQKLAYEYKRYYHITNTPQNLL

SEQ ID NO: 16682 - protein, 1419 aa, Mellicta athalia
MENSNRIYNLRPLPGGRRGAPGADAGCHSMRSIGDVELSRRAPIDKKTTAGPRELIRRTPDVDATADSSGDETNSLFTSVPSTCPSYMTKRTLTTNTSLDSVVQDVNLDTELAPIESAQNRRRRWTQEMNIFILRTYLQLTELNLDTRSYLEPLHLKFTEKFPNMQVSRQRIGDQRRAIVRNKLLPQNIIDQIHDEVKTELNQMNSSISTHYTQKPKHYHALEMESVKSQTHSLPPEVPIARNTTQRRMRWTREHNEAIMRSYYRVTSLGLNNTAYRKQLYNDFINQFPSLTFLNEQRIADQRRAIVNNKYIDSNRLSELKLEVSKELQVNSRELNNCIDGTSFICDNTNIQLTNNSTNTIQQLSPNSQSLIMDSVNLPDEPQSERFNGNRRLEIDQTFQQTFEFYKNTEPENRTYIPKQKPSKKFANIVNYLNEVTIPENVNENTDFLTLQTIIYCAAWTAAKANGSKLNLQVSNMRHSKNKVDHKPNWQKRLERKVKDLRSKIGRLTEFNNGNRSKKVIDHVNKIIEQYKTHTIHEEQNTKVTHTLDTLKQKLAVVAGRLQRYKACTLRKQQNIQFIHNERLFYRNITQTTTNAQDNRPNEIATKTPDPDLLRQYWAKIWEDPVQHNDQADWIQTETLNNDVTIRPMTFEHIPLPTFEKVLRNLHNWKSPGSDYIHSYWYKKLTNIQKCLYHHLNNFIQNPETIPLYLTSGITFMIPKDKNDLSNPAKYRPITCLQTLYKILTACISELMYAHSDLNKILAEKQKGCRRYSQGCKEQLIIDSIVLKKVQKTKSDLFSMYIDYKKAYDSVPHSWLMKVLKIYKIHPTIINFLKVTMSNWTTVLQLTTQITSPVETNKIKIQRGIFQGDALSPLWFCLALNPLSNILNSTSLGISLSDRQTDKQTDIDSEVHILNHLMYMDDIKLYSSTENELNEVTKITEQFTNDIKMEFGIDKCRINSIKAGKNYQHQYKLRTGEKIEPLNEEDTYKYLGYDQSLQIHHKEVKTRLTQQFQHRLNTILKTQLYSRNTIKAINTFAIPILTYSFGIIKWTKSELKSLQRKINTTMTKSHKHHPRSCLQRLTLPRKEGGRGLIDILNLHNKQISSLRKYFFAKTESSKLHKIITKMDQAFTPLNLKMRSAQKNETLIDEITKITEWAQKSLHGRHRQDLCLSNVDKEASNEWLHRGELFPETEGFMIAIQDQVIETKNYRKYIIKNLTTSDFCRKCNSNPETIQHITGACKSIAQTDYKHRHDQIASIIHQKLAYEYKLIGTLLPYYKYTPEPALENSTTRLYFDRGILTDRTIHFNRPDITLIDKISKTGFLIDIAVPNTHNLQSTIAEKLSKYTELKNELARIWHLQKVTIVPIVLSTTGVIPNQLHASLHTLKLPASTYRLLQKAAILNTCRLVRKFLQNDPNQSD

SEQ ID NO: 16683 - protein, 1419 aa, Mellicta athalia
MENSHRIYNLRPLPGGRRGAPGADAGCHSMRSIGDVELSRRAPIDKKTTAGPRELIRRTPDVDATADSSSDETNSLFTSVPSTCPSYMTKRTLTTNTSLDSVVQDVNLDTEIAPIESAQNRRRRWTREMNMFILRTYLQLTELNLDTRSYLEPLHLKFTEKFPNMQVSRQRIGDQRRAIVRNKLLPQNIIDQIHDEVKTELNQMNNSILTHYTQKPKHHHALEMESVKSRTHSLPPEVPIVRNTTQRRMRWSREHNEAIMRSYYRVTSLGLNNTAYRKPLYDDFINQFPSLTFLNEQRIADQRRAIVNNKYIDSNRLSELKLEVSKELQVNGRELNNCIDGTSFICDNTNIQLTNNSTNTVQQPSLNNQSLIMDNVNLPDEPQSERFNENRRLEIDQTFKQTFEFFKNTEPENRTYIPRQKPSKKFANIVNYLNEVTIPETVNENTDFLTLQTIIYCAAWTAAKANGSKINLQISNIRHPKNKLEHKPNWQKRLERKVKDLRSKIGRLTEFNNGNRSKKVIDHANKIIEQYKTHTIHEEQNTKVTHTLDTLKQKLAVVAGRLQRYKACTLRKQQNIQFIRNERLFYRNITQSTINTQDNRPNEIATKTPDPDLLRQYWAKIWEDPVQHNDQADWIQTETSNNDLTIRPMSFEHIPPPIFEKVLRNLHNWKSPGSDYIHSYWYKKFTNIHKYLYHHLNNFIQNPEIIPLYLTSGITFMIPKDKNDLSNPAKYRPITCLQTLYKILTSCISELIYAHSNLNNILAEQQKGCRKYSQGCKEQLVIDSVVLKKVQKTKSDLFSMYIDYKKAFDSVPHSWLMKVLKIYKIHPTIINFLNVTMSNWSTVLQLTTQTTSPVETNKIKIQRGIFQGDALSPLWFCLALNPLSNILNSTSLGISLSDLETDKQTDADSEVYILNHLMYMDDIKLYSSTENQLIEITKITEQFTKDIKMEFGIDKCKINSTKAGKNHQHQYELRTGEKIEPLNEEDTYKYLGYDQSLQIHHKEVKTKLTQQFQHRLNTILKTQLYSRNTIKAINTYAIPILTYSFGIIKWTKSELKSLQRKINTTMTKFHKHHPRSCLQRLTLPRKEGGRGLIDILNLHNKQISTLRKYFFAKIDSSRLHKIITKMDQEFTPLNLKSKSIQKNETLIDDRSKITEWAQKSLHGRHRQDLCLSNVDKEASNEWLYRGALFPETEGFMIAIQDQVIETKNYRKYIIKNLTTSDSCRKCNSNPETIQHITGACKAIAQTDYKHRHDQIASIIHQKLAYEYKLINTLLPYYKYTPEPTLENSTSRLYFDRGILTDRTIHFNRPDITLIDKISKTGFLIDIAVPNTHNLQSTIAEKLSKYTELKNEITRIWHLQKVTIVPIVLSTTGVIPTQLHASLQTLKLPVSTYQLLQKAAVLNTCRLVRKFLQSDQNQSE

SEQ ID NO: 16684 - protein, 1419 aa, Mellicta athalia
MENSHRIYNLRPLPGGRRGAPGADAGCHSMRSIGDVELSRRAPIDKKTTAGPRGLIRRTPDVDATADSSSDETNSLFTSVPSTCPSYMTKRTLTTNTSLDSVVQDVNLDTEIAPIESAQNRRRRWTREMNMFILRTYLQLTELNLDTRSYLEPLHLKFTEKFPNMQVSRQRIGDQRRAIVRNKLLPQNIIDQIHDEVKTELNQMNNSILTHYTQKPKHHHALEMESVKSRTHSLPPEVPIVRNTTQRRMRWSREHNEAIMRSYYRVTSLGLNNTAYRKPLYDDFINQFPSLIFLNEQRIADQRRAIVNNKYIDSNRLSELKLEVSKELQVNGRELNNCIDGTSFICDNTNIQLTNNSTNTVQQPSLNNQSLIMDNVNLPDEPQSERFNENRRLEIDQTFKQTFEFFKNTEPENRTYIPRQKPSKKFANIVNYLNEVTIPETVNENTDFLTLQTIIYCAAWTAAKANGSKINLQISNIRHPKNKLEHKPNWQKRLERKVKDLRSKIGRLTEFNNGNRSKKVIDHANKIIEQYKTHTIHEEQNTKVTHTLDTLKQKLAVVAGRLQRYKACTLRKQQNIQFIRNERLFYRNITQSTINTQDNRPNEIATKTPDPDLLRQYWAKIWEDPVQHNDQADWIQTETSNNDLTIRPMSFEHIPPPIFEKVLRNLHNWKSPGSDYIHSYWYKKFTNIHKYLYHHLNNFIQNPEIIPLYLTSGITFMIPKDKNDLSNPAKYRPITCLQTLYKILTSCISELIYAHSNLNNILAEQQKGCRKYSQGCKEQLVIDSVVLKKVQKMKSDLFSMYIDYKKAFDSVPHSWLMKVLKIYKIHPTIINFLNVTMSNWSTVLQLTTQTTSPVETNKIKIQRGIFQGDALSPLWFCLALNPLSNILNSTSSGISLSDLETDKQTDADSEVYILNHLMYMDDIKLYSSTENQLIEITKITEQFTKDIKMEFGIDKCKINSTKAGKNHQHQYELRTGEKIEPLNEEDTYKYLGYDQSLQIHHKEVKTKLTQQFQHRLNTILKTQLYSRNTIKAINTYAIPILTYSFGIIKWTKSELKSLQRKINTTMTKFHKHHPRSCLQRLTLPRKEGGRGLIDILNLHNKQISTLRKYFFAKIDSSRLHKIITKMDQEFTPLNLKSKSIQKNETLIDDRNKITEWAQKSLHGRHRQDLCLSNVDKEASNEWLYRGALFPETEGFMIAIQDQVIETKNYRKYIIKNLTTSDSCRKCNSNPETIQHITGACKAIAQTDYKHRHDQIASIIHQKLAYEYKLINTLLPYYKYTPEPTLENSTSRLYFDRGILTDRTIHFNRPDITLIDKISKTGFLIDIAVPNTHNLQSTIAEKLSKYTELKNEITRIWHLQKVTIVPIVLSTTGVIPTQLHASLHTLKLPVSTYQLLQKAAVLNTCRLVRKFLQSDQNQSE

SEQ ID NO: 16685 - protein, 1419 aa, Melitaea cinxia
MENSNRIYNLRPLPGGRRGAPGADAGCHSMRTIGDVELNRRAPIDKKTTAGPRELIRRTPDVDATADSSGDETNSLFTSVPSTCPSYMTRKTLNTNTSLESVVQDVNIDTELAPIESAHNRRRRWTREMNTFILRTYLQLTELNLDTRSYLEPLHSKFTEKFPNMQVSRQRIGDQRRAIVRNKLLPQDIIDQIYDEVKTELTQMNNSISSHYTQKPKHHHALEVESVKSQTHCLPSEVPIVSNTTQRRMRWTREHNEAIMRSYYRITSLGLNNSAYRKQLYNDFINRFPSLTFLNEQRVADQRRAIVNNKYIDSNRLSELKLEVSKELQVNSREISNCIDVTNSVSDNTNIQFTNNSKNTIQQPLVNNQSLIMATVNHPGEPQSEIINGNRHLEIDQIFQQTFEFYKNTEPENRTYIPKQKPSKKFANIVNYLNEVTIPENVNENTDFLTLQTTIYCAAFTAAKANGSKINLHIHTQHSKNKTEQNKPNWQKRLERKVKDLRSKIGRLTEFNNGNRSRKVINHVNKIIEQYKVHTIHEEQNTKVTYTLDTLKQKLAAVAGRLQRYKACTLRKQQNIQFIQNEKQFYRKITQTTTNTQDNISNEITTKIPDPDLVRQYWAKMWEDPVQHNDQANWIQTEISNNDEKIRPMTFEHIPLLTFEKVLRNLHNWKSPGSDYIHSYWYKKLTNTHKYLYHHLNNFIQNPEIIPLYLTAGITFMIPKDKNDLSNPAKYRPITCLQTLYKILTSCVSELIYAHSDLNNILTEQQKGCRKYSQGCKEQLIIDSIILKKVQKTKSDLFSMYIDYKKAFDSVPHSWLKKVLKIYKIHPTIINFLKITMSNWTTVLQLTTQTTSLVETKKIKIQRGIFQGDALSPLWFCLALNPLSNILNSTSLGISLSDRQTDKQTDIDSEDYILNHLMYMDDIKLYSSTENQLIEITKITEQFTKDIKMEFGIDKCRINSIKAGKNYQHQYKLITGEKIEPLNEEDTYKYLGYDQSLQIHHKEAKTRLTQQFQHRLNTILKTQLYSRNTIKAINTFAIPILTYSFGIIKWTKSELKSLQRKINTTMTKCHKHHPRSCLQRLTLPRKEGGRGVVDILNLHNKQISTLRKYFFAKIEYSRLHKIITEMDQAFTPLNLKIRSAQKNETVIDNRTKITEWAQKSLHGRHRQDLCLSNVDKEASNEWLHRGALFPETEGFMIAIQDQVIETKNYRKYIIKNLTTTDSCRKCNSNPETIQHITGACKSIAQTDYKHRHDQIASIIHQKLAYECKLTDTLLPYYKYTPEPALENSTTRLYFDRGILTDRTIHFNRPDITLIDKISKTGFLIDIAVPNTHNLQSTIAEKLSKYTELKNEITRIWHLQKVTIVPIVLSTTGVIPTQLHTSLQTLKLPASTYQLLQKAAILNTCRLVRKFLQSEPNPSD

SEQ ID NO: 16686 - protein, 1418 aa, Melitaea cinxia
MENSNRIYNLRPLPGGRRGAPGADAGCHSMRTIGDVELNRRAPIDKKTTAGPRELIRRTPDVDATADSSGDETNSLFTSVPSTCPSYMTRKSLNTNTSLESVVQDVNIDTELAPIESAHNRRRRWTREMNTFILRTYLQLTELNLDTRSYLEPLHLKFTEKFPNMQVSRQRIGDQRRAIVRNKLLPQNIIDQIYDEVKTELTQMNNSISSHYTQKPKHHHALEVESVKSQTHCLPSEVPTVSNTTQRRMRWTREHNEAIMRSYYRITSLGLNNSAYRKQLYNDFINRFPSLTFLNEQRVADQRRAIVNNKYIDSNRLSQLKLEVSKELQVNSREISNCIDVTNSVSDNTNIQSTNNSKNTIQQPSVNNQSLIMDTVNDPGEPQSEIINGNRHLEIDQIFQQTFEFYKNTEPENRTYIPKQKPSKKFANIVNYLNEVTIPENVNENTDFLTLQTIIYCAAFTAAKANGSKINLQIHTQHSKNKTEHKPNWQKRLERKVKDLRSKIGRLTEFNNGNRSRKVINHVNKIIEQYKVHTIHEEQNTKVTHTLDTLKQKLAVVAGRLQRYKACTLRKQQNIQFIQNEKQFYRKITQTTTNTQDNISNEITTKTPDPDLVRQYWAKMWEDPVQHNDQANWIQTEISNNDETIRPMTFEHIPLLTFEKVLRNLHNWKSSGSDYIHSYWYKKLTNIHKYLYHHLNNFIQNPEIIPLYLTAGITFMIPKDKNDLYNPAKYRPITCLQTLYKILTSCISELIYAHSDLNNILTEQQKGCRKYSQGCKEQLIIDSIILKKVQKTKSDLFSMYIDYKKAFDSVPHSWLMKVLKIYKIHPTIINFLKITMSNWTTVLQLTTQATSLVETKKIKIQRGIFQGDALSPLWFCLALNPLSNILNSTSLGISLSDRQTDKQTDIDSEDYILNHLMYMDDIKLYSSSENQLIEITKITEQFTKDIKMEFGIDKCRINSIKAGKNYQHQYKLITGEKIEPLNEEDTYKYLGYDQSLQIHHKEAKTRLTQQFQHRLNTILKTQLYSRNTIKAINTFAIPILTYSFGIIKWTKSELKSLQRKINTTMTKSHKHHPRSCLQRLTLPRKEGGRGLVDILNLHNKQISTLRKYFFAKIEYSRLHKIITEMDQAFTPLNLKIRSAQKNETLIDNRTKITEWAQKSLHGRHRQDLCLSNVDKEASNEWLHRGALFPETEGFMIAIQDQVIETKNYRKYIIKNLTTTDSCRKCNSNPETIQHITGACKSIAQTDYKHRHDQIASIIHQKLAYECKLTDTLLPYYKYTPEPALENSTTRLYFDRGILTDRTIHFNRPDITLIDKISKTGFLIDIAVPNTHNLQSTIAEKLSKYTELKNEITRIWHLQKVTIVPIVLSTTGVIPTQLHTSLQTLKLPASTYQLLQKAAILNTCRLVRKFLQSEPNPSD

SEQ ID NO: 16687 - protein, 1419 aa, Mellicta athalia
MENSNRIYNLRPLPGGRRGAPGAGAGCHSMRSIGDVELSRRAPIDKKTTAGPRELIRRTPDVDATADSSGDETNSLFTSVPSTCPSYMTKRTLTTNTSLDSVVQDVNLDTELAPIESAQNRRRRWTQEMNIFILRTYLQLTELNLDTRSYLEPLHLKFTEKFPNMQVSRQRIGDQRRAIVRNKLLPQNIIDQIHDEVKTELNQMNSSISTHYTQKPKHYHALEMESVKSQTHSLPPEVPIARNTTQRRMRWTREHNEAIMRSYYRVTSLGLNNTAYRKQLYNDFINQFPSLTFLNEQRIADQRRAIVNNKYIDSNRLSELKLEVSKELQVNSEELNNCIDGTSFICDNTNIQLTNNSTNTIQQLSPNSQSLIMDSVNLPDEPQSERFNGNRRLEIDQTFQQTFEFYKNTEPENRTYIPKQKPSKKFANIVNYLNEVTIPENVNENTDFLTLQTIIYCAAWTAAKANGSKLNLQVSNIRHSKNKLDHKPNWQKRLERKVKDLRSKIGRLTEFNNGNRSKKVIDHVNKIIEQYKTHTIHEEQNTKVTHTLDTLKQKLAVIAGRLQRYKACTLRKQQNIQFIHNERLFYRNITQTTTNTQDNRPNEIATKTPDPDLLRQYWAKIWEDPVQHNDQADWIQTETLNNDVTIRPMTFEHIPLPTFEKVLRNLHNWKSPGSDYIHSYWYKKLTNIQKCLYHHLNNFIQNPETIPLYLTSGITFMIPKDKNDLSNPAKYRPITCLQTLYKILTACISELMYAHSDLNKILAEQQKGCRRYSQGCKEQLIIDSIVLKKVQKTKSDLFSMYIDYKKAYDSVPHSWLMKVLKIYKIHPTIINFLKVTMSNWTTVLQLTTQITSPVETNKIKIQRGIFQGDALSPLWFCLALNPLSNILNSTSLGISLSDRQTDKQTDIDSEVHILNHLMYMDDIKLYSSTENELNEVTKITEQFTNDIKMEFGIDKCRINSIKAGKNYQHQYKLRTGEKIEPLNEEDTYKYLGYDQSLQIHHKEVKTRLTQQFQHRLNTILKTQLYSRNTIKAINTFAIPILTYSFGIIKWTKSELKSLQRKINTTMTKSHKHHPRSCLQRLTLPRKEGGRGLIDILNLHNKQISSLRKYFLAKTESSKLHKIITKMDQAFTPLNLKMRSAQKNETLIDEITKITEWAQKSLHGRHRQDLCLSNVDKEASNEWLHRGELFPETEGFMIAIQDQVIETKNYRKYIIKNLTTSDFCRKCNSNPETIQHITGACKSIAQTDYKHRHDQIASIIHQKLAYEYKLIDTLLPYYKYTPEPALENSTTRLYFDRGILTDRTIHFNRPDITLIDKISKTGFLIDIAVPNTHNLQSTIAEKLSKYTELKNEIARIWHLQKVTIVPIVLSTTGVIPNQLHASLHTLKLPASTYRLLQKAAILNTCRLVRKFLQSDPNQSD

SEQ ID NO: 16688 - protein, 1418 aa, Melitaea cinxia
MENSNRIYNLRPLPGGRRGAPGADAGCHSMRTIGDVELNRRAPIDKKTTAGPRELIRRTPDVDATADSSGDETNSLFTSVPSTCPSYMTRKTLNTNTSLESVVQDVNIDTELAPIESAHNRRRRWTREMNTFILRTYLQLTELNLDTRSYLEPLHSKFTEKFPNMQVSRQRIGDQRRAIVRNKLLPQNIIDQIYDEVKTELTQMNNSISSHYTQKPKHHHALEVESVKSQTHCLPSEVPIVSNTTQRRMRWTREHNEAIMRSYYRITSLGLNNSAYRKQLYNDFINRFPSLTFLNEQRVADQRRAIVNNKYIDSNRLSELKLEVSKELQVNSREISNCIDVTNSVSDNTNIQFTNNSKNTIQQPLVNNQSLIMDTVSHPGEPQSEIINGNRHLEIDQIFQQTFEFYKNTEPENRTYIPKQKPSKKFANIVNYLNEVTIPENVNENTDLLTLQTIIYCAAFTAAKANGSKINLHIHTQHSKNKREHKPNWQKRLERKVKDLRSKIGRLTEFNNGNRSRKVINHVNKIIEQYKVHTIHEEQNTKVTHTLDTLKQKLAAVAGRLQRYKACTLRKQQNIQFIQNEKQFYRKITQTTTNTQDNISNEITTKTPDPDLVRQYWAKMWEDPVQHNDQANWIQTEISNNDEKIRPMTFEHIPLLTFEKVLRNLHNWKSPGSDYIHSYWYKKLTNIHKYLYHHLNNFIQNPEIIPLYLTAGMTFMIPKDKNDLSNPAKYRPITCLQTLYKILTSCVSELIYAHSDLNNILTEQQKGCRKYSQGCKEQLIIDSIILKKVQKTKSDLFSMYIDYKKAFDSVPHSWLMKVLKIYKIHPTIINFLKITMSNWTTVLQLTTQTTSLLETKKIKIQRGIFQGDALSPLWFCLALNPLSNILNSTSLGISLSDRQTDKQTDIDSQDYILNHLMYMDDIKLYSSTENQLIEITKITEQFTKDIKMEFGIDKCRINSIKAGKNYQHQYKLITGEKIEPLNEEDTYKYLGYDQSLQIHHKEAKTRLTQQFQHRLNTILKTQLYSRNIIKAINTFAIPILTYSFGIIKWTKSELKSLQRKINTTMTKCHKHHPRSCLQRLTLPRKEGGRGLVDILNLHNKQISTLRKYFFAKIEYSRLHKTITEMDQAFTPLNLKIRSAQKNETVIDNRTKITEWAQKSLHGRHRQDLCLSNVDKEASNEWLHRGALFPETEGFMIAIQDQVIETKNYKKYIIKNLTTTDSCRKCNSNPETIQHITGACKSIAQTDYKHRHDQIASIIHQKLAHECKLTDTLLPYYKYTPEPALENSTTRLYFDRGILTDRTIHFNRPDITLIDKISKTGFLIDIAVPNTHNLQSTIAEKLSKYTELKNEITRIWHLQKVTIVPIVLSTTGVIPNQLHTSLQTLKLPASTYQLLQKAAILNTCRLLRKFLQSEPNPSD

SEQ ID NO: 16689 - protein, 1418 aa, Melitaea cinxia
MENSNRIYNLRPLPGGRRGAPGADAGCHSMRTIGDVELNRRAPIDKKTTAGPRELIRRTPDVDATADSSGDETNSLFTSVPSTCPSYMTRKTLNTNTSLESVVQDVNIDTELAPIESAHNRRRRWTREMNTFILRTYLQLTELNLDTRSYLEPLHSKFTEKFPNMQVSRQRIGDQRRAIVRNKLLPQNIIDQIYDEVKTELTQMNNSISSHYTQKPKHHHALEVESVKSQTHCLPSEVPIVSNTTQRRMRWTREHNEAIMRSYYRITSLGLNNSAYRKQLYNDFINRFPSLTFLNEQRVADQRRAIVNNKYIDSNRLSELKLEVSKELQVNSREISNCIDVTNSVSDNTNIQFTNNSKNTIQQPLVNNQSLIMDTVNHPGEPQSEIINGNRHLEIDQIFQQTFEFYKNTEPENRTYIPKQKPSKKFANIVNYLNEVTIPENVNENTDFLTLQTIIYCAAFTAAKANGSKINLQIHTQHSKNKTEHKPNWQKRLERKVKDLRSKIGRLTEFNNGNRSRKLINHVNKIIEQYKVHTIHEEQNTKVTHTLDTLKQKLAAVAGRLQRYKACTLRKQQNIQFIQNEKQFYRKITQTTTNTQDNISNEITTKTPDPDLVRQYWAKMWEDPVQHNDQANWIQTEISNNDEKIRPMTFEHIPLLTFEKVLRNLHNWKSPGSDYIHSYWYKKLTNIHKYLYHHLNNFIQNPEIIPLYLTAGITFMIPKDKNDLSNPAKYRPITCLQTLYKILTSCVSELIYAHSDLNNILTEQQKGCRKYSQGCKEQLIIDSIILKKVQKTKSDLFSMYIDYKKAFDSVPHSWLMKVLKIYKIHPTIINFLKITMSNWTTVLQLTTQTTSLVETKKIKIQRGIFQGDALSPLWFCLALNPLSNILNSTSLGISLSDRQTDKQTDIDSEDYILSHLMYMDDIKLYSSTENQLIEITKITEQFTKDIKMEFGIDKCRINSIKAGKNYQHQYKLITGEKIEPLNEEDTYKYLGYDQSLQIHHKEAKTRLTQQFQHRLNTILKTQLYSRNIIKAINTFAIPILTYSFGIIKWTKSELKSLQRKINTTMTKCHKHHPRSCLQRLTLPRKEGGRGLVDILNLHNKQISTLRKYFFTKIEYSRLHKTITEMDQAFTPLNLKIRSAQKNETVIDNRTKITEWAQKSLHGRHRQDLCLSNVDKEASNEWLHRGALFPETEGFMIAIQDQVIETKNYRKYIIKNLTTTDSCRKCNSNPETIQHITGACKSIAQTDYKHRHDQIASIIHQKLAYECKLTDTLLPYYKYTPEPALENSTTRLYFDRGILTDRTIHFNRPDITLIDKISKTGFLIDIAVPNTHNLQSTIAEKLSKYTELKNEITRIWHLQKVTIVPIVLSTTGVIPTQLHTSLQTLKLPASTYQLLQKAAILNTCRLVRKFLQSEPNPSD

SEQ ID NO: 16690 - protein, 1444 aa, Xestia xanthographa
MEMSNKRIYSLRSLPGERRGASGADARCHSMRSIGGEELSKRAPTDKIVTAGRSKLNRRAHYVDATADSTGDDTISLFSSIPSTRPSYMTRRKASLSTTSTLDSVVQDVIHDNELAPATSAPSKRRRWTPEMNMFILRTYFQLTLLDTDKRTYLEPLHLKFMERFPEMQVSRQRIGDQRRAIINNKLLPQKAIDDIRNEVEKELEQLQLNHFSLQTQNTIDYTQQMSPPTQTQPTTIDTHSTQNKTQTRMRWTSEQNEAIMRSYYRVTDLGSNETVYRKRMYDDFVSNFPSLAHLSEQRIADQRRAIINNKYISNDKLNSLKAEVAEELGLRTLNSHNNRERGTFAAIRNMNNTNTQLTNHTEITSIEELTPNTETLDSTELNNMTDLLPNPQISPVRDSMIDDTFQQALDFFKETSPTERIYIPKQKPSKNLARIISYLNKIILPENVDKDTDFDRLQTVIYCSAWTVAKVNGARITLEPRESIRVPKTEFKPKWQKRLEQKVKDLRTKIGRMTQFVNGNSSRKLRKHANKIMKQYKIHTIHEEPNTKAAHTLDTLKQKLCVVKGRLERYKACTLRKQQNTQFINNEKLFYRNIRQTTTNIQQNTTDDNDNNTPDPDTLKQFWARIWEQPVCHNSQADWIQSEVTNNNSNIQPMAFEQISPDIFHKVLSRLHNWKAPGSDHIHSYWYKKFTAIHCYLYHFINKFIQDPNSIPSYVTSGTTFMIPKDHNDLSNPAKYRPITCLQTLYKIITSCISELIYEHIDSNNILAEQQKGCRKFSQGCKEQLIIDSVVLKTVQKSKSDLFTMYIDYKKAYDSVPHSWLVQVLEIYKIHPSVIAFLKTVMTTWTTVLRLTTPTETKNTSPIKIQRGIFQGDALSPLWFCLALNPLSKILNTTSLGIPLNSTADGQEETHGNILNHLLYMDDIKLFAKSENQLNELANITEKFTNDIKMEFGIDKCKINSVKAGQNYQHQYTLATGEQIEPLDEQDTYKYLGYIQSNQIHYKDIKLKLKQQFQHRLNTILKTQLCSRNTIKAINTFAIPVLTYSFGIIKWTKSDLKNLQRKINTTMTKFRKHHPRSCVQRMTLPRKEGGRGLIDISNLHNRQITTLRQYFFAKTESSTLHKLIAQNDQRLTPLNLKDTTEQKNERVTDDKTKYLEWTQKSLHGRHRQDLCQPNVDKEASNAWLNRGELFPETEGFMLAIQDQVIETKNYRKHIIKNLPNDTCRKCNSSPETIQHITGACKSIAQTDYKHRHDQVANIIHQKLAHQYKLVDTVVPYYKYSPETVLENTTTKLYFDRALFTDRTIHYNRPDITLINKLNNTGFLIDIAVPNTHNLQTTIAEKLSKYIELKDEITRLWRLQKVIIVPIVISSTGVIPKQLHQSLSSLNLPASTYYLLQKAVILNTCRLVRKFLQCESENITQSAHNRVETNISIPEINPTDEHLA

SEQ ID NO: 16691 - protein, 927 aa, Xestia c-nigrum
MTQFVNGNSSRKLLKHVNKIIKQYKTHTIHEEPNTKAAHTLDTLKQKLCVVKGRFERYKACSLRKQQNTKFNNNEKLFYRNIRQTTTNIQHTNENSTPDPDTLKQFWARIWEQPVCHNSQADWIQSEVSDNNSNIQPMAFEHIPPEIFHKVLSKLHNWKAPGSDHIHGYWYKKFTAIHCYLYNFINTFIQDPKLIPSFVTSGTTFMIPKDQNDLSNPAKYRPITCLQTLYKIITSCISELIYEHIDANNILAEQQKGCRKFSQGCKEQLIIDSVVLRKVQKSKSDLFTMYIDYKKAYDSVPHSWLVQVLEIYKIHPSVIAFLKTVMTTWTTVLRLTTQTETKDTSPIKIQRGIFQGDALSPLWFCLALNPLSKILNTTSLGIPLNSVAVGQEETHGKTLNHLMYMDDIKLYAKSEDQLSELANLTEKFTHDIKMQFGIDKCKINSVRAGQNYQHQYTLATGEQIEPLDEQGTYKYLGYIQSSQIHYRDIKQKLKQQFQHRLNTILKTQLYSRNTVKAINTFAIPVLTYSFGIINWTKTDLKNLQRKVNTTMTKFRKHHPRSCVQRLTLPRKEGGRGLIDILNLHNRQISTLRQYFFAKTEFSTLHKLIAQNDQRLTPLNLNNITEQKNERVTDDKTKYLEWTQKSLHGRHRQDLCQPNVDKEASNAWLNRGELFPETEGFMLAIQDQVIETKNYRKHIIKNLPNDTCRKCNSSPETIQHITGACKSIAQTDYKHRHDQVANIIHQKLAHQCKLVDTIVPYYKYSPETVLENNTTKLYFDRALFTDRTIHFNRPDITLINKVNNTGFLIDIAVPNTHNLQPTIAEKISKYTELKDEITRLWRLQKVIIVPIVISSTGVIPKQIHQSLSSLNLPDSTYYLLQKAVILNTCRLVRKFLQCESDNIIQSAYNCMEPNVSVPALNPTDEHLA

SEQ ID NO: 16692 - protein, 931 aa, Xestia xanthographa
MTQFVNGNSSRKLRKHANKIMKQYKIHTIHEEPNTKAAHTLDTLKQKLCVVKGRLERYKACTLRKQQNTQFINNEKLFYRNIRQTTTNIQQNTTDDNDNNTPDPDTLKQFWARIWEQPVCHNSQADWIQSEVTNNNSNIQPMAFEQISPDIFHKVLSRLHNWKAPGSDHIHSYWYKKFTAIHCYLYHFINKFIQDPNSIPSYVTSGTTFMIPKDHNEITNPAKYRPITCLQTLYKIITSCISELIYEHIDSNNILAEQQKGCRKFSQGCKEQLIIDSVVLKTVQKSKSDLFTMYIDYKKAYDSVPHSWLVQVLEIYKIHPSVIAFLKTVMTTWTTVLRLTTPTETKNTSPIKIQRGIFQGDALSPLWFCLALNPLSKILNTTSLGIPLNSTADGQEETHGNILNHLLYMDDIKLFAKSENQLNELANITEKFTNDIKMEFGIDKCKINSVKAGQNYQHQYTLATGEQIEPLDEQDTYKYLGYIQSNQIHYKDIKLKLKQQFQHRLNTILKTQLCSRNTIKAINTFAIPVLTYSFGIINWTKTDLKNLQRKINTTMTKFRKHHPRSCVQRMTLPRKEGGRGFIDISNLHNRQITTLRQYFFAKTESSTLHKLIAQNDQRLTPLNLKDTTEQKNERVTDDKTKYLEWTQKSLHGRHRQDLCQPNVDKEASNAWLNRGELFPETEGFMLAIQDQVIETKNYRKHIIKNLPNDTCRKCNSSPETIQHITGACKSIAQTDYKHRHDQVANIIHQKLAHQYKLVDTVVPYYKYSPETVLENTTTKLYFDRALFTDRTIHYNRPDITLINKLNNTGFLIDIAVPNTHNLQTTIAEKLSKYIELKDEITRLWRLQKVIIVPIVISSTGVIPKQLQHSLSSLNLPASTYYLLQKAVILNTCRLVRKFLQCESENITQSAHNRVETNISIPEINPTDEHLA

SEQ ID NO: 16693 - protein, 1444 aa, Xestia xanthographa
MEMSNKRIYSLRSLPGERRGASGADARCHSMRSIGGEELSKRAPTDKIVTAGRSKLNRRAHYVDATADSTGDDTISLFSSIPSTRPSYMTRRKASLSTTSTLDSVVQDVIHDNELAPATSAPSKRRRWTPEMNMFILRTYFQLTLLDTDKRTYLEPLHLKFMERFPEMQVSRQRIGDQRRAIINNKLLPQKAIDDIRNEVEKELEQLQLNHFSLQTQNTIDYTQQMSPPTQTQPTTIDTHSTQNKTQTRMRWTSEHNEAIMRSYYRVTDLGSNETVYRKRMYDDFVSNFPSLAHLSEQRIADQRRAIINNKYISNDKLNSLKAEVAEELGLRTLNSHNNRERGTFAAIRNMNNTNTQLTNHTEINSIEELTPNTETSDSTELNNMTDLLPNSQISPVRDSMIDDTFQQALDFFKETSPTERIYIPKQKPSKNLARIISYLNKIILPENVDKDTDFDRLQTVIYCSAWTVAKVNGARITLEPRESIRVPKTEFKPKWQKRLEQKVKDLRTKIGRMTQFVNGNSSRKLRKHANKIMKQYKIHTIHEEPNTKAAHTLDTLKQKLCVVKGRLERYKACTLRKQQNTQFINNEKLFYRNIRQTTTNIQQNTTDDNDNNTPEPDTLKQFWARIWEQPVCHNSQADWIQSEVTNNNSNIQPMAFEQISPDIFHKVLSRLHNWKAPGSDHIHSYWYKKFTAIHCYLYHFINKFIQDPNSIPSYVTSGTTFMIPKDHNDLSNPAKYRPITCLQTLYKIITSCISELIYEHIDSNNILAEQQKGCRKFSQGCKEQLIIDSVVLKTVQKSKSDLFTMYIDYKKAYDSVPHSWLVQVLEIYKIHPSVIAFLKTVMTTWTTVLRLTTPTETKNTSPIKIQRGIFQGDALSPLWFCLALNPLSKILNTTSLGIPLNSTADGQEETHGNILNHLLYMDDIKLFAKSENQLNELANITEKFTNDIKMEFGIDKCKINSVKAGQNYQHQYTLATGEQIEPLDEQDTYKYLGYIQSNQIHYKDIKLKLKQQFQHRLNTILKTQLCSRNTIKAINTFAIPVLTYSFGIINWTKTDLKNLQRKINTTMTKFRKHHPRSCVQRMTLPRKEGGRGLIDISNLHNRQITTLRQYFFAKTESSTLHKLIAQNDQRLTPLNLKDTTEQKNERVTDDKTKYLEWTQKSLHGRHRQDLCQPNVDKEASNAWLNRGELFPETEGFMLAIQDQVIETKNYRKHIIKNLPNDTCRKCNSSPETIQHITGACKSIAQTDYKHRHDQVANIIHQKLAHQYKLVDTVVPYYKYSPETVLENTTTKLYFDRALFTDRTIHYNRPDITLINKLNNTGFLIDIAVPNTHNLQTTIAEKLSKYIELKDEITRLWRLQKVIIVPIVISSTGVIPKQLHQSLSSLNLPASTYYLLQKAVILNTCRLVRKFLQCESENITQSAHNRVETSISIPEINPTDEHLA

SEQ ID NO: 16694 - protein, 920 aa, Noctua pronuba
MTQFTNGNSSRKLRKHVNKIIKQYRTHTIHEEPNTKAAHTLDTLKQKLCVVKGRLERYKACSLRKQQNTKFNHNEKLFYRNIRQTTTNIQHNNPHVNENNTPDPETLKQFWASIWEQPVCHNYQADWIQSEVSNNNSNIQPMAFEHISPEIFHKVLSRLHNWKAPGSDHIHSYWYKKFTAIHCYLYHFINTFIKDPKSIPSFVMSGTTFIIPKDNNDLSNPAKYRPITCLHTLYKIITSCISELIYEHIDANNILAEQQKGCRKFSQGCKEQLIIDSVVCTKVQKSKSDLFTMYIDYKKAYDSVPHSWLVQVLEIYKIHPSLIAFLKTAMTAWTTVLRLTTPTETKDTSPIKIQRGIFQGDALSPLWFCLALNPLSKILNSTSLGIPLNSIVDGQEETHGSTLNHLMYMDDIKLFAKSEDQLNELANLTEKFTNDIKMEFGIDKCKINSVRAGRKYQHQYTLETGEQIEPLDEQDTYKYLGYIQSNQIHYKDIKQKLKQQFQHRLNTILKTQLYSRNTIKAINTFAIPILTYSFGIINWTKTDLKNLQRKVNTTMTKFRKHHPRSCVQRLTLPRKEGGRGLIDILNLHNRQITTLRQYFFTKTESSTLHKLIAQNDQRLTPLNLKDTTEQKNERVTDDKTKFLEWTQKSLHGRHRQDLCQPNVDKEASNAWLNRGELFPETEGFMLAIQDQVIETKNYRKHIIKNLPNDTCRKCNSSSETIQHITGACKSIAQTDYKHRHDQVANVIHQKLAHQYKLVDTVVPYYKYNPETVLENTTTKLYFDRALFTDRTIHYNRPDITLINKVNNTGFLIDIAVPNTHNLQTTIAEKLSKYTELKDEITRLWRLQKVIIVPIVISSTGVIPKQLHQSLSSLNLPPSTYHLLQKAVILNTCRLVRKFLQCESDNIIQSAHNRVESNISN

SEQ ID NO: 16695 - protein, 1094 aa, Xestia xanthographa
MNNTNTQLTNHTEINSIEELTPNTETSDSTELNNMTDLLPNSQISPVRDSMIDDTFQQALDFFKETSPTERIYIPKQKPSKNLARIISYLNKIILPENVDKDTDFDRLQTVIYCSAWTVAKVNGARITLEPRESIRVPKTEFKPKWQKRLEQKVKDLRTKIGRMTQFVNGNSSRKLRKHANKIMKQYKIHTIHEEPNTKAAHTLDTLKQKLCVVKGRLERYKACTLRKQQNTQFINNEKLFYRNIRQTTTNIQQNTTDDNDNNTPEPDTLKQFWARIWEQPVCHNSQADWIQSEVTNNNSNIQPMAFEQISPDIFHKVLSRLHNWKAPGSDHIHSYWYKKFTAIHCYLYHFINKFIQDPNSIPSYVTSGTTFMIPKDHNDLSNPAKSRPITCLQTLYKIITSCISELIYEHIDSNNILAEQQKGCRKFSQGCKEQLIIDSVVLKTVQKSKSDLFTMYIDYKKAYDSVPHSWLVQVLEIYKIHPSVIAFLKTVMTTWTTVLRLTTPTETKNTSPIKIQRGIFQGDALSPLWFCLALNPLSKILNTTSLGIPLNSTADGQEETHGNILNHLLYMDDIKLFAKSENQLNELANITEKFTNDIKMEFGIDKCKINSVKAGQNYQHQYTLATGEQIEPLDEQDTYKYLGYIQSNQIHYKDIKLKLKQQFQHRLNTILKTQLCSRNTIKAINTFAIPVLTYSFGIINWTKTDLKNLQRKINTTMTKFRKHHPRSCVQRMTLPRKEGGRGLIDISNLHNRQITTLRQYFFAKTESSTLHKLIAQNDQRLTPLNLKDTTEQKNERVTDDKTKYLEWTQKSLHGRHRQDLCQPNVDKEASNAWLNLGKLFPETEGFMLAIQDQVIETKNYRKHIIKNLPNDTCRKCNSSPETIQHITGACKSIAQTDYKHRHDQVANIIHQKLAHQYKLVDTVVPYYKYSPETVLENTTTKLYFDRALFTDRTIHYNRPDITLINKLNNTGFLVDIAVPNTHNLQTTIAEKLSKYIELKDEITRLWRLQKVIIVPIVISSTGVIPKQLHQSLSSLNLPASTYYLLQKAVILNTCRLVRKFLQCESENITQSAHNRVETSISIPEINPTDEHLA

SEQ ID NO: 16696 - protein, 931 aa, Xestia xanthographa
MTQFVNGNSSRKLRKHANKIMKQYKIHTIHEEPNTKAAHTLDTLKQKLCVVKGRLERYKACTLRKQQNTQFINNEKLFYRNIRQTTTNIQQNTTDDNDNNTPDPDTLKQFWARIWEQPVCHNSQADWIQSEVTNNNSNIQPMAFEQISPDIFHKVLSRLHNWKAPGSDHIHSYWYKKFTAIHCYLYHFINKFIQDPNSIPSYVTSGTTFMIPKDHNDLSNPAKYRPITCLQTLYKIITSCISELIYEHIDSNNILAEQQKGCRKFSQGCKEQLIIDSVVLKTVQKSKSDLFTMYIDYKKAYDSVPHSWLVQVLEIYKIHPSVIAFLKTVMTTWTTVLRLTTPTETKNTSPIKIQRGIFQGDALSPLWFCLARNPLSKILNTTSLGIPLNSTADGQEETHGNILNHLLYMDDIKLFAKSENQLNELANITEKFTNDIKMEFGIDKCKINSVKAGQNYQHQYTLATGEQIEPLDEQDTYKYLGYIQSNQIHYKDIKLKLKQQFQHRLNTILKTQLCSRNTIKAINTFAIPVLTYSFGIINWTKTDLKNLQRKINTTMTKFRKHHPRSCVQRMTLPRKEGGRGFIDISNLHNRQITTLRQYFFAKTESSTLHKLIAQNDQRLTPLNLKDTTEQKNERVTDDKTKYLEWTQKSLHGRHRQDLCQPNVDKEASNAWLNRGELFPETEGFMLAIQDQVIETKNYRKHIIKNLPNDTCRKCNSSPETIQHITGACKSIAQTDYKHRHDQVANIIHQKLAHQYKLVDTVVPYYKYSPETVLENTTTKLYFDRALFTDRTIHYNRPDITLINKLNNTAFLIDIAVPNTHNLQTTIAEKLSKYIELKDEITRLWRLQKVIIVPIVISSTGVIPKQLHQSLSSLNLPASTYYLLQKAVILNTCRLVRKFLQCESENITQSAHNRVETNISIPEINPTDEHLA

SEQ ID NO: 16697 - protein, 915 aa, Xestia xanthographa
MHNNMKQFKIHTIHEEPNTKAAHTLDTLKQKLCVVKGRLERYKACTLRKQQNTQFINNEKLFYRNIRQTTTNIQQNTTDDNDNNTPDPDTVKQFWARIWEQPVCHNSQAYWIQSEVTNNNSNIQPMAFEQISPDIFHKVLSRLHNWKAPGSDHIHSYWYKKFTAIHCYLYHFINKFIQDPNSIPSYVTSGTTFMIPKDHNDLSNPAKYRPITCLQTLYKIITSCISELIYEHIDSNNILAEQQKGCRKFSQGCKEQLIIDSVVLKTVQKSKSDLFTMYIDYKKAYDSVPHSWLVQVLEIYKIHPSVIAFLKTVMTTWTTVLRLTTPTETKNTSPIKIQRGIFQGDALSPLWFCLALNPLSKILNTTSLGIPLNSTADGQEETHGNILNHLLYMDDIKMFAKSENQLNELANITEKFTNDIKMEFGIDKCKINSVKAGQNYQHQYTLATGEQIEPLDEQDTYKYLGYIQSNQIHYKDIKPKLKQQFQHRLNTILKTQLCSRNTIKAINTFAIPVLTYSFGIINWTKTDLKNLQRKINTTMTKFRKHHPRSCVQRMTLPRKEGGRGLIDISNLHNRQITTLRQYFFAKTESTTLHKLIAQNDQRLTPLNLKDTTEQKNERVTDDKTKYLEWTQKSLHGRHRQDLCQPNVDKEASNAWLNRGELFPETEGFMLAIQDQVIATKNYRKHIIKNLPNDTCRKCNSSPETIQHITGACKSIAQTDYKHRHDQVANIIHQKLAHQYKLVDTVVPYYKYSPETVLENTTTKLYFDRALFTDRTIHYNRPDITLINKLNNTGFLIDIAVPNTHNLQTTIAEKLSKYIELKDEITRLWRLQKVIIVPIVISSTGVIPKQLHQSLSSLNLPASTYYLLQKAVILNTCRLVRKFLQCESENITQSAHNRVETNISIPEINPTDEHLA

SEQ ID NO: 16698 - protein, 1047 aa, Xestia xanthographa
MYSMIDDTFQQALDFFKETSPTERIYIPKQKPSKNLARIISYLNKIILPENVDKDTDFDRLQTVIYCSAWTVAKVNGARITLKPRESIRVPKTEFKPKWQKRLEQKVKDLRTKIGRMTQFVNGNSSRKLRKHANKIMKQYKIHTIHEEPNTKAAHTLDTLKQKLCVVKGRLERYKACTLRKQQNTQFINNEKLFYRNIRQTTTNIQQNTTDDNDNNTPDPDTLKQFWARIWEQPVCHNSQADWIQSEVTNNNSNIQPMAFEQISPDIFHKILSRLHNWKAPGSDHIHSYWYKKFTAIHCYLYHFINKFIQDPNSIPSYVTSGTTFMIPKDHNDLSNPAKYRPITCLQTLYKIITSCISELIYEHIDSNNILAEQQKGCRKFSQGCKEQLIIDSVVLKTVQKSKSDLFTMYIDYKKAYDSVPHSWLVQVLEIYKIHPSVIAFLKTVMTTWTTVLRLTTPTETKNTSPIKIQRGIFQGDALSPLWFCLALNPLSKILNTTSLGIPLNSTADGQEETHGNILNHLLYMDDIKLFAKSENQLNELANITEKFTNDIKMEFGIDKCKINSVKAGQNYQHQYTLATGEQIEPLDEQDTYKYLGYIQSNQIHYKDIKLKLKQQFQHRLNTILKTQLCSRNTIKAINTFAIPVLTYSFGIINWTKTDLKNLQRKINTTMTKFRKHHPRSCVQRMTLPRKEGGRGLIDISNLHNRQITTLRQYFFAKTESSTLHKLIAQNDQRLTPLNLKDTTEQKNERVTDDKTKYLEWTQKSLHGRHRQDLCQPNVDKEASNAWLNRGELFPETEGFMLAIQDQVIETKNYRKHIIKNLPNDTCRKCNSSPETIQHITGACKSIAQTDYKHRHDQVANIIHQKLAHQYKLVDTVVPYYKYSPETVLENTTTKLYFDRALFTDRTIHYNRPDITLINKLNNTGFLIDIAVPNTHNLQTTIAEKLSKYIELKDEITRLWRLQKVIIVPIVISSTGVIPKQLHQSLSSLNLPASTYYLLQKAVILNTCRLVRKFLQCESENITQSAHNRVETNNSIPEINPTDEHLA

SEQ ID NO: 16699 - protein, 1083 aa, Xestia xanthographa
MNNTNTQLTNHTEINSIEALTPNTETLDSTELNNMTDLLPNPQISPVRDSMIDDTFQQALDFFKETSPTERIYIPKQKPSKNLARIISYLNKIILPENVDKDTDFDRLQTVIYCSAWTVAKVNGARITLEPRESIRVPKTEFKPKWQKRLEQKVKDLRTKIGRMTQFVNGNSSRKLRKHANKIMKQYKIHTIHEEPNTKAAHTLDTLKQKLCVTLRKQQNTQFINNEKLFYRNIRQTTTNIQQNTTDDNDNNTPDPDTLKQFWARIWEQPVCHNSQADWIQSEVTNNNSNIQPMAFEQISPDIFHKVLSRLHNWKAPGSDHIHSYWYKKFTAIHCYLYHFINKFIQDPNSIPSYVTSGTTFMIPKDHNDLSNPAKYRPITCLQTLYKIITSCISEQIYEHIDSNNILAEQQKGCRKFSQGCKEQLIIDSVVLKTVQKSKSDLFTMYIDYKKAYDSVPHSWLVQVLEIYKIHPSVIAFLKTVMTTWTTVLRLTTPTETKNTSPIKIQRGIFQGDALSPLWFCLALNPLSKILNTTSLGIPLNSTADGQEETHGNILNHLLYMDDIKLFAKSENQLNELANITEKFTNDIKMEFGIDKCKINSVKAGQNYQHQYTLATGEQIEPLDEQDTYKYLGYIQSNQIHYKDIKLKLKQQFQHRLNTILKTQLCSRNTIKAINTFAIPVLTYSFGIIKWTKSDLKNLQRKINTTMTKFRKHHPRSCVQRMTLPRKEGGRGLIDISNLHNRQITTLRQYFFAKTESSTLHKLIAQNDQRLTPLNLKDTTEQKNERVTDDKTKYLEWTQKSLHGRHRQDLCQPNVDKEASNAWLNRGELFPETEGFMLAIQDQVIETKNYRKHIIKNLPNDTCRKCNSSPETIQHITGACKSIAQTDYKHRHDQVANIIHQKLAHQYKLVDTVVPYYKYSPETVLENTTTKLYFDRALFTDRTIHYNRPDITLINKLNNTGFLIDIAVPNTHNLQTTIAEKLSKYIELKDEITRLWRLQKVIIVPIVISSTGVIPKQLHQSLSSLNLPASTYYLLQKAVILNTCRLVRKFLQCESENITQSAHNRVETNISIPEINPTDEHLA

SEQ ID NO: 16700 - protein, 1375 aa, Xestia xanthographa
MEMSNKRIYSLRSLPGERRGASGADARCHSMRSIGGEELSKRAPTDKIVTAGRSKLNRRAHYVDATADSTGDDTISLFSSIPSTRPSYMTRRKASLSTTSTLDSVVQDVIHDNELAPATSAPSKRRRWTPEMNMFILRTYFQLTLLDTDKRTYLEPLHLKFMERFPEMQVSRQRIGDQRRAIINNKLLPQKAIDDIRNEVEKELEQLQLNHFSLQTQNTIDYTQQMSPPTQTQPTTIDTHSTQNKTQTRMRWTSEQNEAIMRSYYRVTDLGSNETVYRKRMYDDFVSNFPSLAHLSEQRIADQRRAIINNKYISNDKLNSLKAEVAEELGLRTLNSHNNRERGTFAAIRNMNNTNTQLTNYTEINSIEELTPNTETSDSTELNTMTDLLPNPQISPVRDSMIDDTFQQALDFFKETSPTERIYIPKQKPSKNLARIISYLNKIILPENVDKDTDFDRLQTVIYCSAWTVAKVNGARITLEPRESIRVPKTEFKPKWQKRLEQKVKDLRTKIGRMTQFVNGNSSRKLRKHANKIMKQYKIHTIHEEPNTKAAHTLDTLKQKLCVVKGRLERYKACTLRKQQNTQFINNEKLFYRNIRQTTTNIQQNTTDDNDNNTPDPDTLKQFWARIWEQPVCHNSQADWIQSEVTNNNSNIQPMAFEQISPDIFHKVLSRLHNWKAPGSDHIHSYWYKKFTAIHCYLYHFINKFIQDPNSIPSYVTSGTTFMIPKDHDDLSNPAKYRPITCLQTLYKIITSCISELIYEHIDSNNILAEQQKGCRKFSQGCKEQLIIDSVVLKTVQKSKSDLFTMYIDYKKAYDSVPHSWLVQVLEIYKIHPSVIAFLKTVMTTWTTVLRLTTPTETKNTSPIKIQRGIFQGDALSPLWFCLALNPLSKILNTTSLGIPLNSTADGQEETHGNILNHLLYMDDIKLFAKSENQLNELANITEKFTNDIKMEFGIDKCKINSVKAGQNYQHQYTLATGEQIEPLDEQDTYKYLGYIQSNQIHYKDIKLKLKQQFQHRLNTILKTQLCSRNTIKAINTFAIPVLTYSFGIINWTKTDLKNLQRKINTTMTKFRKHHPRSCVQRMTLPRKEGGRGLIDISNLHNRQITTLRQYFFAKTESSTLHKLIAQNDQRLTPLNLKDTTEQKNERVTDDKTKYLEWTQKSLHGRHRQDLCQPNVDKEASNAWLNRGELFPETEGFMLAIQDQVIETKNYRKHIIKNLPNDTCRKCNSSPETIQHITGACKSIAQTDYKHRHDQVANIIHQKLAHQYKLVDTVVPYYKYSPETVLENTTTKLYFDRALFTDRTIHYNRPDITLINKLNNTGFLIDIAVPNTQLTDYNSRKTIEIHRVKRRNNPTLAPTKSYNCPYSYFVNRSNP

SEQ ID NO: 16701 - protein, 1431 aa, Hypena proboscidalis
MSNNRYNLRSLPGGRRGASGADAGCFSIRTIGGRELSRRTSTDKNITAERRELSRRAHDVEATADFTDDDTISLFSSIPSTRPSYMTRSRKSSTLSSISAPNSVVQEVIPDVELAPTSGSSTSRKRWTPELNKFILRTYLQLTALDTDTSTYLEPLHHKFIEKFPNIEVSRQRLGDQRRAIIRNRLLPQKTIDYIYDEVKTELDLQTDIHTSLNLTSQHFSQNIATSENSTLLQPTQTQPISRIVTKNTTQTRMRWTTRQNEEIMRSYYRVTSLEANQTAYRKLMFEDFITKFPDLSHVSEQRIADQRRAIINNKYLSNDRLDVLRQEISIELATNSSDNVENHSESIHERSQFQNVEDTETSIFEVLQFAEESVLDRQPPIDETFQQAFEYYKDTEPTSRTFIPKQRPSKKLAKIVNYLNEVIFPEVIKEDTDFHKLQTAIYCAAWTAAKINGAKITLQGNTSHQPDKRDYKPNWQRRLERKLTNLRTKISHLTQYIKGNRSRNVVKYAKSIIEQYKTHTIHENPNTQPIHTLDTLKQKLAVVTGRIKRYKACTQRKQQNSQFSNNEKVFYRNIKQSIMNTQQNNSNSTSTPTSEELHDFWARIWSDPVQHNTEAEWIQKECTTNTSSIQTMEFEYISVEIFQRVLRHLHNWKSPGSDFVQSYWYKKFTYVHSHLHKFINIFIQDPNTIPTYLTQGKTFMIPKDHNDLTNPAKYRPITCLQTLYKIITSCISELIYQHADANNILAEQQKGCRKFSQGCKEQLVIDSVILTQVQKTHSDLFSMYIDYKKAYDSVPHSWLLKVLEIYKVHPTIVSFLKTTMTRWSTKLAISTVTHTVETNSIQINRGLFQGDALSPLWFCLALNPLSNILNATPIGYDFKISPTNGQTDIQDFKINHLLYMDDIKLYANTENEINDLASLTEQFTNDIHMEFGIDKCKINSIRAGQNYQHQYVLGTGEQIKALGEQDTYKYLGSLQINHKDTKQKLTQEFQHRLNTILKTQLNSRNTVKAINTFVIPVLTYSFGIINWTKTDLTNLRRKINTTLTKFRKHHPRSCLQRLTLSRKEGGRGIVDIINLHNKQIRSLRQYFFKKAESCKLHKTIVQNDKNFTPLNLKDNREQKNEKVIDDTVKIGNWTQKALHGRHRLDLCQQNVDKDASNAWLNRGELFPETEGFMIAIQDQVIETRNYRKYIIKNLPFDTCRKWNSSPETIQHITGACKSIAQTDYKHRHDQVANIVHQKLAYHFKFVDSIHPYYKYNPQTVLENSTTKLYYDRAILTDKTIHYNRPDITLINKINKTGYLIDIAIPNTHNLQTTIAQKLTKYIELKDEITRLWHLEKVTIVPIVISSTGVIPKQLHQSLNSLQLSPNTYQLMQKAVILNTCRLVRKFLQCEPDTTHSITHDSEQSNTYSSTLAPPTHITIQTSNPTDEHLA

SEQ ID NO: 16702 - protein, 835 aa, Tuta absoluta
MQFDHIPIDTYQKVLHNLHNWKAPGSDNIQSFWYKKFTSIQGFLHNHLNKFIEYPEQLPAFITAGTTIMIQKDRNDPTNPAKYRPITCLQTIYKILTACISELIYTHVNENNILAEQQKGCRKFSQGCKEQLIIDSVILKQIQKLKSDLHSMYIDYKKAYDSVPHSWLLKVLDIYKIHPKIVNLLKVTMTNWSTRLKLSTPTNLITTGPIRIQRGIFQGDALSPLWFCLALNPLSNVLNSTTLGYPLKYAENDQQTDRQNLSHLLYMDDIKLYARDEEQLHQLANLTEQFSVDIKMEFGLDKCKINSIKAGKSYKHNYTLETGQQIEPLDGQETYKYLGYSQSLQIQYKETKEKLKQTFRHRLNSILKTQLHSRNTFKAINTYTIPVLTYSFGIINWSKSDLKALQRTVNTTLTKFRKHHPRSCLQRLTLPRKQGGRGLIDIVNLHNRQVITLRKYFFSKSETSTLHKAIVQNDLNATPLNLHDTNEQTNEKLTDDKTKLTEWAGKSLHGRHFHDLSQPNVDKDASNAWLNRGDLFPETEGFIMAIQDQVIETKNYQKYITKTLTSDTCRKCNSSPETIQHITGACKSIAQTDYKYRHDQVANIIHQKLAHQYNLIPSIQPYYKYNPQTVLENPTTKLYYDRAILTDRTIHYNRPDITLIDKSNKTGYLIDIAVPNTHNLQSTIADKLTKYVELKDEITRIWHLQKVTIVPIVVSSTGVIPKQLHQSLKTLNLSANTYNLLQKAVILNTCRIVRKFLHNEQDHSTPSLSTYLQNTRADTQITSTITRPNTQITSTMTRPDTHNTQTTTRPDRHNTLTTTQTDTLNYISNPDIHLA

SEQ ID NO: 16703 - protein, 835 aa, Tuta absoluta
MQFDHIPIETYQKVLHNLHNWKAPGSDNIHSFWYKKFTSIQGFLHNHLNNFIEYPEQLPAFITAGTTIMIQKDRNDPTNPAKYRPITCLQTIYKILTACISELIYTHVNENNILAEQQKGCRKFSQGCKEQLIIDSVILKQIQKLKSDLHSMYIDYKKAYDSVPHSWLLKVLDIYKIHPKIVNLLKVTMTNWSTRLKLSTPTNLITTGPIRIQRGIFQGDALSPLWFCLALNPLSNVLNSTTLGYPLKYAENDQQTDRQNLSHLLYMDDIKLYARDEEQLHQLANLTEQFSVDIKMEFGLDKCKINSIKAGKSYKHNYTLETGQQIEPLNGQETYKYLGYSQSLQIQYKETKEKLKQTFRHRLNSILKTQLHSRNTFKAINTYAIPVLTYSFGIINWSKSDLKALQRTVNTTLTKFRKHHPRSCIQRLTLPRKQGGRGLIDIVNLHNRQIITLRKYFFSKSETSTLHKAIVQNDLNATPLNLHDTNEQTNEKLTDDKTKLTEWAGKSLHGRHFHDLSQPNVDKDASNAWLNRGDLFPETEGFIMAIQDQVIETKNYQKYITKTLTSDTCRKCNSSPETIQHITGACKSIAQTDYKYRHDQVANIIHQKLAHQYDLIPSIQPYYKYNPQTVLENPTTKLYYDRAILTDRTIHYNRPDITLIDKSNKTGYLIDIAVPNTHNLQSTIADKLTKYVELKDEITRIWHLQKVTIVPIVVSSTGVIPKQLHQSLKTLNLSANTYNLMQKAVILNTCRIVRKFLHNEQDHSTPSLSTYLQNTRTDTQITSIITRPNTQITSTMTRPDTHNTQTTTRPDRHNTLTTTQTDTLNYISNPDMHLA

SEQ ID NO: 16704 - protein, 1249 aa, Zera sp.
MHVSRQRVGDQRRAIIRNKLLPQNTMDQIYNDVKKELNNFQSSFSSNTQPTFNSKKQIRMRWTNEQNETIIRSYYRITQLEKNRTTYRRPLHEAFISAFPSLAHLSEQRIADQRRAIISNKYICDTRLDEIKREVACELSPNQDNFNKQDTNNAQEADTDIFDIEFLQNIELNLPEDPQLHHTTQQLERSPLIDQTFQETFEHFKNISPTERIYIPKQKPSKKLAKIVHYLNEITLPEKINIHTDFHTLQTAIYCAAWTAAKVNGSKMSLEPYKKPSSSQNNFTPHWQRRLERRLEDLRSKIGRITQYINGSRSKRLIKHVKTISQQYKIHSTHEEPNKQLTHTLDTLKQKLSVVAGRLHRYKECTLRKQQNNQFYKNEKQFYRNIRLNSTNLQINNSNNSVESSPDPDALYKFWAGIWEQPIHHNDQADWVQTETEKNNLTTPEMRFDYIPLDIFHKVLQNLHNWKAPGSDFIHSYWYKKFTNIHIYLYNYLNEFIEHPNNLPQFLTQGTTYMIPKCPNNLTDPAKYRPITCLQTLYKILTSCISELIYKHTDNTKILAEQQKGCRKFSQGCKEQLIIDSVILKEVQRKKSDLFTMYIDYKKAYDSVPHSWLIQILEIYKIHPKLITLLKTTMTNWTTHLKLITSTTTIQTKQIKIQRGLFQGDSLSPLWFCLAMNPLSNILKAAAVGYNLQCRNTNSQINIDECINHLFYMDDIKIYADEENHLNQLAYMTEKFSTDIKMEFGIDKCRINSIRSGQSYKHNYTLETGGKIEALDEEETYKYLGYNQSRQIQYKITKQKLKQQFRHRLNIILKTKLNARNTIKAINTFAIPVLTYSFGIINWSKSDLKAIQRTINTTMTKFRKHHPRSCLQRLTLPRKEGGRGLIDVINLHNKQISTLREYFFKKAESSPLHRAIVETDNKSTPLNLQVHTKQNNENLIDTKSKFVEWAGKSLHGRHYRDLNQPNVDKKASNAWLSRGELFPETEGFIIAIQDQVIETKNYQKYIIKALHSDTCRKCNSCPETIQHITGACKSIAQTDYKHRHDQIANIIHQKLAHEQQFITTLQPYYKYTPESVLENSTCKIYFDRAILTDRTIHYNRPDITLINKVKKTGYLIDIAIPNTHNLQTTIAEKLAKYTELKDEITRLWHLQKVTIVPIVLSTTGVIPTQLHQSMKTLNLPPNTYILLQKAAILNTCRIVRKFLQNENETPEANTIQPITYATMLQPSTYTIGTTQNISSSVPMSDMHLA

SEQ ID NO: 16705 - protein, 1411 aa, Abrostola tripartita
MEMNSKRVYDLRSLPGGRRGTSGADAGCHSMRTIGGERLSRRASPDKHTTAGRRVLSKRAHDVEATAELSGDDTHSLFSSIPSTRPSYMTRSLSSTSTLDSVVQEVALDQDLAPTTSSSNLRRRWTIEMNKFILRTYLQLTLMDTDTKTYLEPLHLKFIEKFPDMQTSRQRVGDQRRAIIRNKLLPQETIDEIQKEVREELNQIHINTHTQALGHFTQTQTQSLVTSNINNTTQVRMRWTNEYNEAIMRAYYRVTSLGVNETAYRKPMHEDFVSRYPALAHLSEQRIADQRRAILKNKYISDERLNLLKLEVSVELGQSNNISSFSCELISEPLILNCNNNNIEINDSFTDELALDTLPLNNIQITPNTESPPPVTQNRHAEIDETFQQAFLFYKNTGPTDRIYIPKQKPSKRLARIISYLNQVVIPENINTDTEFFTVQTVIYSAAWTAAKVNGTKLTLEPSDNLRQTRKEYKPNWQTRLERKISDLRCKIGRVTQFVNGNTSRKITNYVRNIISQYKTHTIHEEPNTQAIHTLDTLKQKLLVLVGRLKRYNACTLRKQQNFQFNHNEKLFYRSIRQATSNVQESNVNNNVPNNPEPGAFRNFWSRIWENPIQHNDQADWIQAEIANTSENTQPMIFENISPQIFQKVLSRLHNWKAPGSDYIHSYWYKKFTAVHCYLHNFINKFIQEPNLIPNYLTLGTTFMISKDPNDLSNPAKYRPITCLQTLYKVMTSCLSELIYQHLDANNILAEQQKGCRKFSQGCKEQLVIDSVILNKIHKTKTDLYSMYIDYKKAYDSVPHSWLIKVLEMYQIHPKVVSFLKTMMANWTTVLKLTTATDTIETDPIKIQRGIFQGDALSPLWFCLALNPLSKILNSTSLGIPLTYRNEGLTEHIKLNHLLYMDDIKLYAKSESELYELANLTEQFTNVIKMEFGIDKCKINSIRAGQNYQHHYTLATSEQIDSLDEQDTYKYLGYSQSSQIRYKETKSKLRQQFQHRLNIILKSNLYSRNMIKAINTFAIPILTYSFGIINWSKSDLKDLQRKINTSMTKFRKHHPRSCLQRITLPRKEGGRGLIDICNLHNKQITTLRQYFFTKSESSTLHKLIVKNDQKLTPLNMKDSTEQNNEKQIDNNAKMLEWSRKSLHGRHHQDLCQVNVDKEASNAWLSRGELFPETEGFMLAIQDQVIETRNYRKYIIKNLATDTCRKCYSCPETIQHITGACKSLAQSDYKHRHDQVANIIHQKLAHQYQLIDSVVPYYKYIPQIVLENSTTKLYFDRAILTDRTVHFNRPDITLINKTSKTGYLIDIAVPNTHNLQTTIAEKLSKYTELRDEITRIWHLQKVTIVPVVLSATGVIPKSLHQSLNTLNLPSNTYHLMQKAAILNTCRLVRKFLQCEPDNLLSSRVSTAPIAPT

SEQ ID NO: 16706 - protein, 1412 aa, Autographa pulchrina
MEMNSKRVYDLRSLPGGRRGTSGADAGCHSMRTIGGERLSRRASPDKHTTAGRRVLSKRAHDVEATAELSGDDTHSLFSSIPSTRPSYMTRSLCSTSTLDSVVQEVALDQDLAPTTSSSNLRRRWTIEMNKFILRTYLQLTLMDTDTKTYLEPLHLKFIEKFPDMQTSRQRVGDQRRAIIRNKLLPQETIDEIQKEVREELNQIHINTHTTHTQALGHFTQTQSLVTSNINNTTQVRMRWTNEYNEAIMRAYYRVTSLGVNETAYRKPMHEDFVSRYPALAHLSEQRIADQRRAILKNKYISDERLNLLKLEVSVELGQSNNNSSFSCELISEPLILNRDINNIEINKSFTDELALDTLPLNNIQITPHTESPPPVTQNRHAEIDETFQQAFLFYKNTGPTDRIYIPKQKPSKRLARIISYLNQVVIPENINTDTEFFTVQTVIYSAAWTAAKVNGTKLTLEPSDNLRQTRKEYKPNWQTRLERKISDLRCKIGRVTQFVNGNTSRKITNYVRNIISQYKTHTIHEEPNTQVILTLDTLKQKLLVLVGRLKRYNACTLRKQQNFQFNHNEKLFYRSIRQATSNIQESNVNNNVPNNPEPGAFRNFWSRIWENPIQHNDQADWIQAEIANTSENTQPMIFENISPQIFQKVLSRLHNWKAPGSDYIHNYWYKKFTTVHCYLHNFINKFIQEPNLIPNYLTLGTTFMIPKDPNDLSNPAKYRPITCLQTLYKVMTSCLSELIYQHLDANNILAEQQKGCRKFSQGCKEQLIIDSVILNKIHKTKTDLYSMYIDYKKAYDSVPHSWLIKVLEMYQIHPKVVSFLKTMMANWTTVLKLTTATDTIETDPIKIQRGIFQGDALSPLWFCLALNPLSKILNSTSLGIPLTYRNDGLTEHIKLNHLLYMDDIKLYAKSESELYELANLTEQFTNVIKMEFGIDKCKINSIRAGQNYQHHYTLATSEQIDSLDEQDTYKYLGYSQSSQIRYKETKSKLRQQFQHRLNIILKSNLYSRNMIKAINTFAIPVLTYSFGIINWSKSDLKDLQRKINTSMTKFRKHHPRSCLQRITLPRKEGGRGLIDICNLHNKQIATLRQYFFTKSESSTLHKLIVKNDQKLTPLNMKDSTEQNNEKQIDNNAKMLEWSRKSLHGRHHQDLCQVNVDKEASNAWLSRGELFPETEGFMLAIQDQVIETRNYRKYIKKNLATDTCRKCNSCPETIQHITGACKSLAQSDYKHRHDQVANIIHQKLAHQYQLIDSVVPYYKYIPQIVLENSTTKLYFDRAILTDRTVHFNRPDITLINKTSKTGYLIDIAVPNTHNLQTTIAEKLSKYTELRDEITRIWHLQKVTIVPVVLSATGVIPKSLHQSLNTLNLPSNTYHLMQKAAILNTCRLVRKFLQCEPDNLLSPRVSTAPLAPT

SEQ ID NO: 16707 - protein, 1411 aa, Abrostola tripartita
MEMNSKRVYDLRSLPGGRRGTSGADAGCHSMRTIGGERLSRRASPDKHTTAGRRVLSKRAHDVEATAELSGDDTHSLFSSIPSTRPSYMTRSLSSTSTLDSVVQEVALDQDLAPTTSFSNLRRRWTIEMNKFILRTYLQLTLMDTDTKTYLEPLHLKFIEKFPDMQTSRQRVGDQRRAIIRNKLLPQETIDEIQKEVREELNQIHINTHTTHTQALGHFTQTQTQSLVTSNINNTTQVRMRWTNEYNEAIMRAYYRVTSLGVNETAYRKPMHEDFVSRYPALAHLSEQRIADQRRAILKNKYISDERLNLLKLEVSVELGQSNNNSSFSCELISEPLIRNCNNNNIEINDSFTDELALDTLPLNNIQITPNTESPPPVTQNRHAEIDETFQQAFLFYKNTGPTDRIYIPKPQPSKRLARIISYLNQVVIPENINTDTEFFTVQTVIYSAAWTAAKVNGTKLTLEPSDNLRQTRKEYKPNWQTRLERKISDLRCKIGRVTQFVNGNTSRKITNYVRNIISQYKTHTIHEEPNTQVIHTLDTLKQKLLVLVGRLKRYNACTLRKQQNFQFNHSEKLFYRSIRQATSNIQESNVNNNVPNNPEPGAFRNFWSRIWENPIQHNDQADWIQADIANTSENTQPMIFENISPQIFQKVLSRLHNWKAPGSDYIHSYWYKKFTAVHCYLHNFINKFIQEPNLIPIYLTLGTTFMISKDPNDLSNPAKYRPITCLQTLYKVMTSCLSELIYQHLDANNILAEQQKGCRRFSQGCKEQLVIDSVILNKIYKTKTDLYSMYIDYKKAYDSVPHSWRIKVLEMYQIHPKVVSFLKTMMANWTTVLKLTTATDTIETDPIKIQRGIFQGDALSPLWFCLALNPLSKILNSTSLGIPLTYRNEGLTEHIKLNHLLYMDDIKLYAKSESELYELANLTEQFTNVIKMEFGIDKCKINSIRAGQNYQHHYTLATSEQIDSLDEQDTYKYLGYSQSSQIRYIETKSKLRQQFQHRLNIILKSNLYSRNMIKAINTFAIPILTYSFGIINWSKSDLKDLQRKINTSMTKFRKHHPRSCLQRITLPRKEGGRGLIDICNLHNKQMTTLRQYFFTKSESSTLHKLIVKNDQKLTPLNMKDSTEQNNEKQIDNNAKMLEWSRKSLHGRHHQDLCQVNVDKEASNAWLSRGELFPETEGFMLAIQDQVIETRNYRKYIIKNLATDTCRKCNSCPETIQHITGACKSLAQSDYKHRHDQVANIIHQKLAHQYQLIDSVVPYYKYIPQIVLENATTKLYFDRAILTDRTVHFNRPDITLINKTSKTGYLIDIAVPNTHNLQTTIAEKYTELRDEITRIWHLQKVTIVPVVLSATGVIPKSLHQSLNTLNLPSNTYHLMQKAAILNTCRLVRKFLQCEPDNLLSSRVSTAPIAPT

SEQ ID NO: 16708 - protein, 1412 aa, Autographa gamma
MEMNSKRVYDLRSLPGGRRGTSGADAGCHSMRTIGGERLSRRASPDKHTTAGRRVLSKRAHDVEATAELSGDDTHSLFSSIPSTRPSYMTRSLSTTSTLDSVVQEVTLDQDLAPTTSSSNMRRRWTIEMNKFILRTYLQLTLMDTDTKTYLEPLHLKFIEKFPDMQISRQRVGDQRRAIIRNKLLPKEIIDEIQNEVREELNQININTHTTHTQALGYFTQTQSLVTSNLNNTTQVRMRWTNEYNEAIMRAYYRVTSLGVNETAYRKPMHQDFVSRYPALAHLSEQRIADQRRAILNNKYISDERLNLLKLEVSVELGQSNNNSSFSCELISEPPIFNCNNDNIEINTSITDELALDTLPLNNIQLTPHTEPLPPVTQNRHAEIDETFQQAFLFYKNTGPTDRIYIPKQKPSKRLAGIISYLNQVVIPENINTDTEYSTVQTVIYSAAWTAAIVNGTKLTLEPSDNLRQTRKEYKPNWQTRLERKISDLRCKIGRVTQFVNGNTSRKITNYVRNIIRQYKIHTIHEEPNTQVIHTLDTLKQKLLVLVGRLKRYNACSLRKQQNIQFTHNEKLFYRSIRQATSNIQETNVNNNVPNNPEPGAFRNFWSSIWENPIQHNDQVDWIQAEIANISENTQPMIFETISPQIFQKVLSRLHNWKAPGSDYIHSYWYKKFTAVHCYLHNFINKFIQEPNLIPNYLTLGTTFMIPKDTNDLSNPAKYRPITCLQTLYKVMTSCLSELIYQHLDANNILAEQQKGCRKFSQGCKEQLIIDSVILNKIHKTKADLYSMYIDYKKAYDSVPHSWLIKVLEMYQIHPKVVAFLKTMMANWTTVLKLTTATDTIETDPIKIQRGIFQGDALSPLWFCLALNPLSKILNSTSLGIPLTYRHDGLTEQIKLNHLLYMDDIKLYANSESELYELANLTEQFTNVIKMEFGIDKCKINSIRAGQNYQHHYTLATSEQIDSLDEQDTYKYLGYSQSSQIRYQETKSKLRQQFQHRLNIILKSNLYSRNMIKAINTFAIPILTYSFGIINWSKSDLKDLQRKINTSMTRFRKHHPRSCLQRITLPRKEGGRGLIDICNLHNKQITILRQYFFTKSESSTLHKLIVKNDLKLTPLNMKDPTEQNNEKQIDNNAKMLEWSRKSLHGRHHQDLCQLNVDKEASNAWLSRGELFPETEGFMLAIQDQVIETRNYRKYIIKNLATDTCRKCNSCPETIQHITSACKSLAQSDYKHRHDQVANIIHQKLAHQYQLVDSVVPYYKYIPQIVLENSTTKLYFDRAILTDRTVHFNRPDITLINKTSKTGYLIDIAVPNTHNLQTTIAEKLSKYTELRDEITRIWHLQKVTIVPVVLSATGVIPKLLHQSLNTLNLPSHTYHLMQKAAILNTCRLVRKFLQCEPDNSVSSRVSTAPIAPT

SEQ ID NO: 16709 - protein, 1411 aa, Abrostola tripartita
MEMNSKRVYDLRSLPGGRRGTSGADAGCHSMRTIGGERLSRRASPDKHTTAGRRVLSKRAHDVEATAELSGDDTHSLFSSIPSTRPSYITRSLSSTSTLDSVVQEVALDQDLAPTTSSSNLRRRWTIEMNKFILRTYLQLTLMDTDTKTYLEPLHLKFIEKFPDMQTSRQRVGDQRRAIIRNKLLPQETIDEIQKEVREELNQIHINTHTTHTQALGHFTQTQSLVTSNINNTTQVRMRWTNEYNEAIMRAYYRVTSLGVNETAYRKPMHEDFVSRYPALAHLSEQRIADQRRAILKNKYISDERLNLLKLEVSVELGQSNNISSFSCELISEPLILNCNNNNIEINDSFTDELALDTLPLNNIQTPNTESPPPVTQNRHAEIDETFQQAFLFYKNTDPTDRIYIPKQKPSKRLARIISYLNQVIIPENINTDTEFFTVQTVIYSAAWTAAKVNGTKLTLEPSDNLRQTRKEYKPNWQTRLERKISDLRCKIGRVTQFVNGNTSRKITNYVRNIISQYKTHTIHEEPNTQAIHTLDTLKQKLLVLVGRLKRYNACTLRKQQNFQFNHNEKLFYRSIRQATSNVQESNVNNNVPNNPEPGAFRNFWSRIWENPIQHNDQADWIQAEIANTSENTQPMIFENISPQIFQKVLSRLHNWKAPGSDYIHSYWYKKFTAVHCYLHNFINKFIQEPNLIPNYLTLGTTFMISKDPNDLSNPAKYRPITCLQTLYKVMTSCLSELIYQHLNANNILAEQQKGCRKFSQGCKEQLVIDSVILNKIHKTKTDLYSMYIDYKKAYDSVPHSWLIKVLEMYQIHPKVVSFLKTMMANWTTVLKLTTATDTIETDPIKIQRGIFQGDALSPLWFCLALNPLSKILNSTSLGIPLTYRNEGLTEHIKLNHLLYMDDIKLYAKSESELYELANLTEQFTNVIKMEFGIDKCKINSIRAGQNYQHHYTLATSEQIDSLDEQDTYKYLGYSQSSQIRYKETKSKLRQQFQHRLNIILKSNLYSRNMIKAINTFAIPILTYSFGIINWSKSDLKDLQRKINTSMTKFRKHHPRSCLQRITLPRKEGGRGLIDICNLHNKQITTLRQYFFTKSESSTLHKLIVKNDQKLTPLNMKDSTEQNNEKQIDNNAKMLEWSRKSLHGRHHQDLCQVNVDKEASNAWLSRGELFPETEGFMLAIQDQVIETRNYRKYIIKNLATDTCRKCYSCPETIQHITGACKSLAQSDYKHRHDQVANIIHQKLAHQYQLIDSVVPYYKYIPQIVLENSTTKLYFDRAILTDRTVHFNRPDITLINKTSKTGYLIDIAVPNTHNLQTTIAEKLSKYTELRDEITRIWHLQKVTIVPVVLSATGVIPKSLHQSLNTLNLPSNTYHLMQKAAILNTCRLVRKFLQCEPDNLLSSRVSTAPIAPT

SEQ ID NO: 16710 - protein, 1411 aa, Abrostola tripartita
MEMNSKRVYDLRSLPGGRRGTSGADAGCHSMRTIGGERLSRRASPDKHTTAGRRVLSKRAHDVEATAELSGDDTHSLFSSIPSTRPSYMTRSLSSTSTLDSVVQEVALDQDLAPTTSSSNLRRRWTIEMNKFILRTYLQLTLMDTDTKTYLEPLHLKFIEKFPDMQTSRQRVGDQRRAIIRNKLLPQETIDEIQKEVREELNQIHINTHTQALGHFTQTQTQSLVTSNINNTTQVRMRWTNEYNEAIMRAYYRVTSLGVNETAYRKPMHEDFVSRYPALAHLSEQRIADQRRAILKNKYISDERLNLLKLEVSVELGQSNNISSFSCELISEPLILNCNNNNIEINDSFTDELALDTLPLNNIQITPNTESPPPVTQNRHAEIDETFQQAFLFYKNTGPTDRIYIPKQKPSKRLARIISYLNQVVIPENINTDTEFFTVQTVIYSAAWTAAKVNGTKLTLEPSDNLRQTRKEYKPNWQTRLERKISDLRCKIGRVTQFVNGNTSRKITNYVRNIISQYKTHTIHEEPNTQAYNTLDTLKQKLLVLVGRLKRYNACTLRKQQNFQFNHNEKLFYRSIRQATSNVQESNVNNNVPNNPEPGAFRNFWSRIWENPIQHNDQADWIQAEIANTSENTQPMIFENISPQIFQKVLSRLHNWKAPGSDYIHSYWYKKFTAVHCYLHNFINKFIQEPNLIPNYLTLGTTFMISKDPNDLSNPAKYRPITCLQTLYKVMTSCLSELIYQHLDANNILAEQQKGCRKFSQGCKEQLVIDSVILNKIHKTKTDLYSMYIDYKKAYDSVPHSWLIKVLEMYQIHPKVVSFLKTMMANWTTVLKLTTATDTIETDPIKIQRGIFQGDALSPLWFCLALNPLSKILNSTSLGIPLTYRNEGLTEHIKLNHLLYMDDIKLYAKSESELYELANLTEQFTNVIKMEFGIDKCKINSIRAGQNYQHHYTLATSEQIDSLDEQDTYKYLGYSQSSQIRYKETKSKLRQQFQHRLNIILKSNLYSRNMIKAINTFAIPILTYSFGIINWSKSDLKDLQRKINTSMTKFRKHHPRSCLQRITLPRKEGGRGLIDICNLHNKQITTLRQYFFTKSESSTLHKLIVKNDQKLTPLNMKDSTEQNNEKQIDNNAKMLEWSRKSLHGRHHQDLCQVNVDKEASNAWLSRGELFPETEGFMLAIQDQVIETRNYRKYIIKNLATDTCPKCYSCPETIQHITGACKSLAQSDYKHRHDQVANIIHQKLAHQYQLIDSVVPYYKYIPQIVLENSTTKLYFDRAILTDRTVHFNRPDITLINKTSKTGYLIDIAVPNTHNLQTTIAEKLSKYTELRDEITRIWHLQKVTIVPVVLSATGVIPESLHQSLNTLNLPSNTYHLMQKAAILNTCRLVRKFLQCEPDNLLSSRVSTAPIAPT

SEQ ID NO: 16711 - protein, 1284 aa, Autographa pulchrina
MNKFILRTYLQLTLMDTDTKTYLEPLHLKFIEKFPEMQTSRQRVGDQRRAIIRNKLLPQETIDEIQKEVREELNQIHINTHTTHTQALGHFTQTQSLVTSNINNTTQVRMRWTNEYNEAIMRAYYRVTSLGVNETAYRKPMHEDFVSRYPALAHLSEQRIADQRRAILKNKYISDERLNLLKLEVSVELGQSNNNSSFSCELISEPLILNRDINNIEINKSFTDELALDTLPLNNIQITPHTESPPPVTQNRHAEIDETFQQAFLFYKNTGPTDRIYIPKQKPSKRLARIISYLNQVVIPENINTDTEFFTVQTVIYSAAWTAAKVNGTKLTLDPSDNLRQTRKEYKPNWQTRLERKISDLRCKIGRVTQFVNGNASRKITNYVRNIISQYKTHTIHEEPNTQVIHTLDTLKQKLLVLVGRLKRYNACTLRKQQNFQFNHNEKLFYRSIRQATSNIQESNVNNNVPNNPEPGAFRNFWSRIWENPIQHNDQADWIQAEIANTSENTQPMIFENISPQIFQKVLSRLHNWKAPGSDYIHSYWYKKFTTVHCYLHNFINKFIQEPNLIPNYLTLGTTFMIPKDPNDLSNPAKYRPITCLQTLYKVMTSCLSELIYQHLDANNILAEQQKGCRKFSQGCKEQLIIDSVILNKIHKTKTDLYSMYIDYKKAYDSVPHSWLIKVLEMYQIHPKVVSFLKTMMANWTTVLKLTTATDTIETDPIKIQRGIFQGDALSPLWFCLALNPLSKILNSTSLGIPLTYRNDGLTEHIKLNHLLYMDDIKLYAKSESELYELANLTEQFTNVIKMEFGIDKCKINSIRAGQNYQHHYTLATSEQIDSLDEQDTYKYLGYSQSSQIRYKETKSKLRQQFQHRLNIILKSNLYSRNMIKAINTFAIPVLTYSFGIINWSKSDLKDLQRKINTSMTKFRKHHPRSCLQRITLPRKEGGRGLIDICNLHNKQIATLRQYFFTKSESSTLHKLIVKNDQKLTPLNMKDSTEQNNEKQIDNNAKMLEWSRKSLHGRHHQDLCQVNVDKEASNAWLSRGELFPETEGFMLAIQDQVIETRNYRKYIIKNLATDTCRKCNSCPETIQHITGACKSLAQSDYKHRHDQVANIIHQKLAHQYQLIDSVVPYYKYIPQIVLENSTTKLYFDRAILTDRTVHFNRPDITLINKTSKTGYLIDIAVPNTHNLQTTIAEKLSKYTELRDEITRIWHLQKVTIVPVVLSATGVIPKSLHQSLNTLNLPSNTYHLMQKAAILNTCRLVRKFLQCEPDNLLSSRVSTAPLAPT

SEQ ID NO: 16712 - protein, 1412 aa, Autographa gamma
MEMSSKKVYNLRSLPGGRRGTSGADAGCHSMRTIGGERLSRRASPDKHTTAGRRVLSKRAHDVEATAELSGDDTHSLFSSIPSTRPSYMTRSLSTTSTLDSVVQEVTLDQDLAPTTSSSNMRRRWTIEMNKFILRTYLQLTLMDTDTKTYLEPLHLKFIEKFPDMQISRQRVGDQRRAIIRNKLLPKEIIDEIQNEVREELNQININTHTTHTQALGYFTQTQSLVTSNLNNTTQVRMRWTNEYNEAIMRAYYRVTSLGVNETAYRKPMHQDFVSRYPALAHLSEQRIADQRRAILNNKYISDERLNLLKLEVSVELGQSNNNSSFSCELISEPPIFNCNNDNIEINTSIPDELALDTLPLNNIQLTPHTEPLPPVTQNRHAEIDETFQQAFLFYENTGPTDRIYIPKQKPSKRLAGIISYLNQVVIPENINTDTEYSTVQTVIYSAAWTAAKVNGTKLTLEPSDNLRQTRKEYKPNWQTRLERKISDLRCKIGRVTQFVNGNTSRKITNYVRNIIRQYKIHTIHEEPNTQVIHTLDTLKQKLLVLVGRLKRYNACTLRKQQNIQFTHNEKLFYRSIRQATSNIQETNVNNNVPNNPEPGAFRNFWSSIWENPIQHNDQADWIQAEIANISENTQPMIFETISPQIFQKVLSRLHNWKAPGSDYIHSYWYKKFTAVHCYLHNFINKFIQEPNLIPNYLTLGTTFMIPKDTNDLSNPAKYRPITCLQTLYKVMTSCLSELIYQHLDANNILAEQQKGCRKFSQGCKEQLIIDSVILNKIHKTKADLYSMYIDYKKAYDSVPHSWLIKVLETYQIHPKVVAFLKTMMANWTTVLKLTTATDTIETDPIKIQRGIFQGDALSPLWFCLALNPLSKILNSTSLGIPLTYRHDGLTEQIKLNHLLYMDDIKLYANSESELYELANLTEQFTNVIKMEFGIDKCKINSIRAGQNYQHHYTLATSEQIDSLDEQDTYKYLGYSQSSQIRYQETKSKLRQQFQHRLNIILKSNLYSRNMIKAINTFAIPILTYSFGIINWSKSDLKDLQRKINTSMTRFRKHHPRSCLQRITLQRKEGGRGLIDICNLHNKQITTLRQYFFTKSESSTLHKLIVKNDLKLTPLNMKDPTEQNNEKQIDNNAKMLEWSRKSLHGRHHQDLCQLNVDKEASNAWLSRGELFPETEGFMLAIQDQVIETRNYRKYIIKNLATDTCRKCNSCPETIQHITGACKSLAQSDYKHRHDQVANIIHQKLAHQYQLVDSVVPYYKYIPQIVLENSTTKLYFDRAILTDRTVHFNRPDITLINKTSKTGYLIDIAVPNTHNLQTTIAEKLSKYTELRDEITRIWHLQKVTIVPVVLSATGVIPKLLHQSLNTLNLPSHTYHLMQKAAILNTCRLVRKFLQCEPDNSVSSRVSTAPIAPT

SEQ ID NO: 16713 - protein, 1406 aa, Trichoplusia ni
MEMSSKRVYDLRSLPGGRRGTSGADAGCHSMRTIGGEGLSRRASPDKNITAGRRDLSKRAHDVEATAEISGDDTISLFSSIPSTRPSYMTRSLSTTSTPDSVVQEVTFDQDIVPTTSSSKTRKRWTTEMNKFILRTYLQLTLMDTDTKTYLEPLHLKFLENFPNMQISRQRIGDQRRAIIRNKLLSKETIDQIHNEVREELNQIQTNINTTPTHISQLHLSETSNTSQGRMKWTNEYNEAIMRAYYKVTSLGINETAYRKSMHQEFVSRYPALAHLSEQRVADQRRAILNNRYISEDRLNSLKLEVSIELGQINSDNSFPNEVFPLTLNDNIQINDNFIDETASPLEVQPSSNAEVSILRTEPASILIQGRQTEIDKAFQEAFLFYKNTSPCERVYIPKQNPSKRLARIINYLNEIVIPENISPDTDFHTFQTVIYSAAWTAAKMNGTKIALQPSENLRVTKRENKPNWQRRLERKLQDLRFKIGRVTQFINGNASRKIRNYVQSVISQYKTHTLHEEPNSQAIHTLDTLKQKLSVVSGRLQRYKACTLRKQQNFQFTHNEKLFYRNIRTTATNVQETIINNSEHTNLEPETLQNFWANIWETPIQHNDQADWIKAEVANTSENVQAMVFESITPQIFQKVLSQLHNWKAPGSDFIHCYWYKKFTAVHGYLFKFINNFIQEPDSLPTYLTLGTTFMIPKDPKDLANPAKYRPITCLQTLYKIVTSCLSELIYQHLDANNILAEQQKGCRRFSQGCKEQLIIDSVILNRTHKTKTDLYSMYVDYKKAYDSVPHSWLIKVLDIYKIHPKLVCFLRNVMENWTTVLKLSNEAATVVTNPIKIQRGIFQGDALSPLWFCLALNPLSKILNSTSLGTPLTCNNNRLTEEIKLNHLLYMDDIKLYANSENELHELADLTEQFTNDIKMEFGIDKCKINSIREGQNYQHHYTLATLEQIESLKEHDTYKYLGYNQSSQIRYKETKLKLRQQFQHRLNIILKTNLYSRNTIKAINTFAVPILTYSFGIINWSKSDLKDLQRKINTTMTKFRKHHPRSCLQRLTLPRKEGGRGIIDITNLHNKQISTLRQYFFTKSESSTLHKLIVNNDLKLTPLNLKDSAEQNNEKQTENRDKIVEWSRKSLHGRHHHDLCHGNVDKEASNAWLSRGELFPETEGFMLAIQDQVIETRNYRKFIIKNLNTDTCRKCNSCPETIQHITGACKSLAQTDYKHRHDQVANIIHQRLAHQYHLIDSVTPYYKYSPEIVLENSTTKLYFDRAILTDRTVHYNRPDITLINKTTKTGYLIDIAVPNTHNLQTTIAEKLAKYTELRDEISRIWHLQKVTIVPIVLSTTGVIPKQLHQSLNTLNLPPNTYYLLQKAAILNTCRLVRKFLQCESDTSLLPRVTATPTVAVGIT

SEQ ID NO: 16714 - protein, 779 aa, Trichoplusia ni
MVFESITPQIFQKVLSQLHNWKAPGSDFIHCYWYKKFTAVHGYLFKFINNFIQEPDSLPTYLTLGTTFMIPKDPKDLANPAKYRPITCLQTLYKIVTSCLSELIYQHLDANNILAEQQKGCRRFSQGCKEQLIIDSVILNRTHKTKTDLYSMYVDYKKAYDSVPHSWLIKVLDIYKIHPKLVCFLRNVMENWTTVLKLSNEAATVVTNPIKIQRGIFQGDALSPLWFCLALNPLSKILNSTSLGTPLTCNNNRLTEEIKLNHLLYMDDIKLYANSENELHELADLTEQFTNDIKMEFGIDKCKINSIREGQNYQHHYTLATLEQIESLKEHDTYKYLGYNQSSQIRYKETKLKLRQQFQHRLNIILKTNLYSRNTIKAINTFAVPILTYSFGIINWSKSDLKDLQRKINTTMTKFRKHHPRSCLQRLTLPRKEGGRGIIDITNLHNKQISTLRQYFFTKSESSTLHKLIVNNDLKLTPLNLKDSAEQNNEKQTENRDKIVEWSRKSLHGRHHHDLCHGNVDKEASNAWLSRGELFPETEGFMLAIQDQVIETRNYRKFIIKNLNTDTCRKCNSCPETIQHITGACKSLAQTDYKHRHDQVANIIHQRLAHQYHLIDSVTPYYKYSPEIVLENSTTKLYFDRAILTDRTVHYNRPDITLINKTTKTGYLIDIAVPNTHNLQTTIAEKLAKYTELRDEISRIWHLQKVTIVPIVLSTTGVIPKQLHQSLNTLNLPPNTYYLLQKAAILNTCRLVRKFLQCESDTSLLPRVTATPTVAVGIT

SEQ ID NO: 16715 - protein, 779 aa, Trichoplusia ni
MVFESITPQIFQKVLSQLHNWKAPGSDFIHCYWYKKFTAVHGYLFKFINNFIQEPDSLPTYLTLGTTFMIPKDPKDLDNPAKYRPITCLQTLYKIVTSCLSELIYQHLDANNILAEQQKGCRRFSQGCKEQLIIDSVILNRTHKTKTDLYSMYVDYKKAYDSVPHSWLIKVLDIYKIHPKLVCFLRNVMENWTTVLKLSNEAATVVTNPIKIQRGIFQGDALSPLWFCLALNPLSKILNSTSLGTPLICNNNRPTEEIKLNHLLYMDDIKLYANSENELHELADLTEQFTNDIKMEFGIDKCKINSIREGQNYQHHYTLATLEQIESLNEHDTYKYLGYNQSSQIRYKETKLKLRQQFQHRLNIILKTNLYSRNTIKAINTFAVPILTYSFGIINWSKSDLKDLQRKINTTMTKFRKHHPRSCLQRLTLPRKEGGRGIIDITNLHNKQISTLRQYFFTKSESSTLHKLIVNNDLKLTPLNLKDSAEQNNEKQTENRDKIVEWSRKSLHGRHHHDLCHGNVDKEASNAWLSRGELFPETEGFMLAIQDQVIETRNYRKFIIKNLNTDTCRKCNSCPETIQHITGACKSLAQTDYKHRHDQVANIIHQRLAHQYHLIDSVTPYYKYSPEIVLENSTTKLYFDRAILTDRTVHYNRPDITLINKTTKTGYLIDIAVPNTHNLLTTIAEKLAKYTELRDEISRIWHLQKVTIVPIVLSTTGVIPKQLHQSLNTLNLPPNTYYLLQKAAILNTCRLVRKFLQCESDTSLLPRVTATPTVAVGIT

SEQ ID NO: 16716 - protein, 1406 aa, Trichoplusia ni
MEMSSKRVYDLRSLPGGRRGASGADAGCHSMRTIGGEGLSRRASPDKNITAGRRDLSKRAHDVEATAEISGDDTISLFSSIPSTRPSYMTRSLSTTSTPDSVVQEVTFDQDIVPTTSSSKTRKRWTTEMNKFILRTYLQLTLMDTDTKTYLEPLHLKFLENFPNMQISRQRIGDQRRAIIRNKLLSKETIDQIHSEVREELNQIQTNINTTPTHISQLHLSETSNTSQGRMKWTNEYNEAIMRAYYKVTSLGINETAYRKSMHQEFVSRYPALAHLSEQRVADQRRAILNNRYISEDRLNSLKLEVSIELGQINSDNSFPNEVFPLTLNDNIQINDNFIDKTASPLEVQPSSNAEVSILRTEPASILIQGRQTEIDKAFQEAFLFYKNTSPCERVYIPKQNPSKRLARIINYLNEIVIPENISPDTDFHTFQTVIYSAAWTAAKMNGTKIALQPSENLRVTKRENKPNWQRRLERKLQDLRFKIGRVTQFINGNASRKIRNYVKSVISQYKTHTLHEEPNSQAIHTLDTLKQKLSVVSGRLQRYKACTLRKQQNFQFTHNEKLFYRNIRTTATNVQETIINKSEHTNLEPETLQNFWANIWETPIQHNDQADWIKAEVANTSENVQAMVFESITPQIFQKVLSQLHNWKAPGSDFIHCYWYKKFTAVHGYLFKFINNFIQEPDSLPTYLTLGTTFMIPKDPKDLANPAKYRPITCLQTLYKIVTSCLSELIYQHLDANNILAEQQKGCRRFSQGCKEQLIIDSVILNRTHKTKTDLYSMYVDYKKAYDSVPHSWLIKVLDIYKIHPKLVCFLRNVMENWTTVLKLSNEAATVVTNPIKIQRGIFQGDALSPLWFCLALNPLSKILNSTSLGTPLTCNNNRLTEEIKLNHLLYMDDIKLYANSENELHELADLTEQFTNDIKMEFGIDKCKINSIREGQNYQHHYTLATLEQIESLNEHDTYKYLGYNQSSQIRYKETKLKLRQQFQHRLNIILKTNLYSRNTIKAINTFAVPILTYSFGIINWSKSDLKDLQRKINTTMTKFRKHHPRSCLQRLTLPRKEGGRGIIDITNLHNKQISTLRQYFFTKSESTTLHKLIVNNDLKLTPLNLKDSAEQNNEKQTENRDKIVEWSRKSLHGRHHHDLCHGNVDKEASNAWLSRGELFPETEGFMLAIQDQVIETRNYRKFIIKNLNTDTCRKCNSCPETIQHITGACKSLAQTDYKHRHDQVANIIHQRLAHQYHLIDSVTPYYKYSPEIVLENSTTKLYFDRAILTDRTVHYNRPDITLINKTTKTGYLIDIAVPNTHNLQTTIAEKLAKYTELRDEISRIWHLQKVTIVPIVLSTTGVIPKQLHQSLNTLNLPPNTYYLLQKAAILNTCRLVRKFLQCESDTSLLPRVTATPTVAVGIT

SEQ ID NO: 16717 - protein, 1406 aa, Trichoplusia ni
MEMSSKRVYDLRSLPGGRRGTSGADAGCHSMRTIGGEGLSRRASPDKNITAGRRDLSKRAHDVEATAEISGDDTISLFSSIPSTRPSYMTRSLSTTSTPDSVVQEVTFDQDIVPTTSSSKTRKRWTTEMNKFILRTYLQLTLMDTDTKTYLEPLHLKFLENFPNMQISRQRIGDQRRAIIRNKLLSKETIDQIHSEVREELNQIQTNINTTPTHISQLHLSETSNTSQGRMKWTNEYNEAIMRAYYKVTSLGINETAYRKSMHQEFVSRYPALAHLSEQRVADQRRAILNNRYISEDRLNSLKLEVSIELGQINSDNSFPNEDFPLTLNDNIQINDNFIDETASPLEVQPSSNAEVSILRTEPASILIQGRQTEIDKAFQEAFLFYKNTSPCERVYIPKQNPSKRLARIINYLNEIVIPENISPDTDFHTFQTVIYSAAWTAAKMNGTKIALQPSENLRVTKRENKPNWQRRLERKLQDLRFKIGRVTQFINGNASRKIRNYVQSVISQYKTHTLHEEPNSQAIHTLDTLKQKLSVVSGRLQRYKACTLRKQQNFQFTHNEKLFYRNIRTTATNVQETIINNSEHTNLEPETLQNFWANIWETPIQHNDQADWIKAEVANTSENVQAMVFESITPQIFQKVLSQLHNWKAPGSDFIHCYWYKKFTAVHGYLFKFINNFIQEPDSLPTYLTLGTTFMIPKDPKDLANPAKYRPITCLQTLYKIVTSCLSELIYQHLDANNILAEQQKGCRRFSQGCKEQLIIDSVILNRTHKTKTDLYSMYVDYKKAYDSVPHSWLIKVLDIYKIHPKLVCFLRNVMENWTTVLKLSNEAATVVTNPIKIQRGIFQGDALSPLWFCLALNPLSKILNSTSLGTPLTCNNNRLTEEIKLNHLLYMDDIKLYANSENELHELADLTEQFTNDIKMEFGIDKCKINSIREGQNYQHHYTLATSEQIESLNEHDTYKYLGYNQSSQIRYKETKLKLRQQFQHRLNIILKTNLYSRNTIKAINTFAVPILTYSFGIINWSKSDLKNLQRKINTTMTKFRKHHPRSCLQRLTLPRKEGGRGIIDITNLHNKQISTLRQYFFTKSESSTLHKLIVNNDLKLTPLNLKDSAEQNNEKQTENRDKIVEWSRKSLHGRHHHDLCHGNVDKEASNAWLSRGELFPETEGFMLAIQDQVIETRNYRKFIIKNLNTDTCRKCNSCPETIQHITGACKSLAQTDYKHRHDQVANIIHQRLAHQYHLIDSVTPYYKYSPEIVLENSTTKLYFDRAILTDRTVHYNRPDITLINKTTKTGYLIDIAVPNTHNLQTTIAEKLAKYTELRDEISRIWHLQKVTIVPIVLSTTGVIPKQLHQSLNTLNLPPNTYYLLQKAAILNTCRLVRKFLQCESDTSLLPRVTATPTVAVGIT

SEQ ID NO: 16718 - protein, 1448 aa, Hydraecia micacea
MEMSNKRIYNLRSLPGERRGASGADARCHSMRTIGGEELSKRAPTDKIVTAGRSELNRRAHNVEATADSTGDDTVSLFSSIPSTRPSYMTRRTTSLSTSNTLDSVVRDVNLDSELAPTSSAPSTRRRWTPEMNKFILRTYFQLTLLDTDKRTYLEPLHLKFIEKYPNMQVSRQRIGDQRRAIQNNKLLPQKTIDEIQKEVQEELDQLQLNHFTLQSQTSIDHTQQTATQKQYTTLGTHTTQNRTQTRMRWTSEQNEGIMRSYYRVTDLGRNETVYRRRMYVDFISSFPSLAHLSEQRIADQRRAIINNNYITNDKLNSLKLEVSKELGLDNPNSRKNRETTPVVTNINNTNTITQLTNTIEEPTHNIQTSDNTELNSLTEIQCNPQINPDREPFIDDTFQQALQFFKETSPINRIYIPKQKPSKNLARIIDYLNKIILPENVNEDTEFNTLQTIIYCAAWTAAKVNGAKVSLEPREIIRGKTEYKQKWQRRLEKKVKDLRRKIGRMTQFMNGSSSRKLKKHAKKIIKLYKIHTIHEEPNTQAAHTLDTLKQKLSVVTGRLERYKACTLRKQQNTQFTHNEKLFYRNIRQATTNIQHDNPCDNENNTLDPETLQHFWARLWEHPICHNSQADWIQSELLNNNTNIQPMVFEHISPEIFHKVLTRLHNWKAPGSDHIHSYWYKKFTAIHCYLYNFINSFIQDPKSIPSYIMSGTTFMIPKDRKDLSNPAKYRPITCLQTFYKIITSCISELIYEHIDANNILAEQQKGCRKYSQGCKEQLIIDSVVLKKVQKSKSDLFTMYIDYKKAYDSVPHSWLVQVLEIYKIHPSVVTFLKTVMKTWTTVLRLTTPTETIDTSPIKIQRGIFQGDALSPLWFCLALNPLSKILNATSLGISLNSTATDGQDETQDGILNHLLYMDDIKLYAKTESQLNELANLTEKFTNDIKMEFGIDKCKINSVRAGQNYQHQYILETGEQIEPLDEQDSYKYLGYIQSSQIHYKETKHKLKQQFQHRLNTILKTQLYSRNTIKAINTFAIPVLTYSFGIINWTKTDLKNLQRKINTTMTKFRKHHPRSCLQRLTLPRKEGGRGLIDILNLHNRQITTLRKYFFDKTASALHKVIAQNDQHLTPLNLKDTTEQQNERVTDDKAKCLEWTQKSLHGRHRQDLCQLNVDKDASNAWLNRGELFPETEGFMLAIQDQVIETKNYRKYIIKNLTNDTCRKCNSSPETIQHITGACKSIAQTDYKHRHDQVANVIHQKLAHKYKFIDSIAPYYKYNPETVLENPTTKLYFDRAILTDRTIHFNRPDITLINKVDKTGFLIDIAVPNTHNLQTTIAEKLSKYTELKDEITRLWHLQKVTIVPIVLSTTGVIPKQLHQSLSSLNLPSNTYHLLQKAVILNTCRLVRKFLQCESDNMHYYSHSNIVSANIQPTADNHAVSNITPTLNPADEHLA

SEQ ID NO: 16719 - protein, 1344 aa, Cydia splendana
MSKKTSTLSSFSTHDGVVQDVIPDIEFVPTSEASKSRKRWTNEMNTFIMRTYLYLTALDTDTKAYLEPLHIKFIEKFPNMTVSRQRVGDQRRAIIRSKLLPQETLNQIYDEVKAELATIRTSITTTYTRATSNNQESHSMQAQTRLRWTNEQNESIMLSYYRITELETNRTSYRKPLHDAFINSFPALSHLSEQRISDQRRAIINNKYITDTRLTELKQQIAEELSINIYNSDDHIPDIEQSNTTQQPDLETQFLQNIQPDSPDNVPNNDPISERNLLIAETFKQTFKHFTDTDPTCRPYIPKQKTSKKLADIVQYLNNITFPEYINIDTDFDTLQTAIYSAAWTAAKVNGAKISLEPTDSSRSRSVNKDKRPHWQRRLERRLQDLRTKIGRVTHFIAGTRSINLEKQVNDIIDQYKIHSVHEEPNTQLTHTLDTLKQKLALISGRLNRYKVCTLRKQQNNQFQTNEKLFYRNVRQATTNTTDNNNPNIVSNLPDSHDLQNFWAGIWENPIDHNTDAEWIKTEIVRNDTNTTEMAYQHIPIDTFKKVLSNSHNWKAPGSDNIHSYWYKKFTNVHPFLHSYLNKFTDDPSTIPLYLTSGTTFMIPKDQNDLANPAKYRPITCLQTLYKILTACISNLIYRHINDNNILAEQQKGCRKFSQGCKEQLTIDSVILKHVTKTKTDLYSMYIDYKKAYDSVPHSWLLQVLEIYKIHPKIINVLKTTMTTWTTRLRLTTPTTVIETDPIKIQRGIFQGDSLSPLWFCLALNPLSNTLNSTTAGYQLHYTDTDRHTENINHLLYMDDIKLYAKNETDLYQLTDLTEQFSNDIKMEFGIDKCKINSVKAGQIYRHDYRLRTGEIIDSLNEQETYKYLGYNQSRQIQHGDIKQKLRQQFRHRLNIILKSQLYARNTIKAINTFAIPVLTYSFGVINWTKSDLKALQRTINTTMTRFRKHHPRSCIQRLTLPRKEGGRGLIDITNLHNRQITTLRQYFFTKSESSTLHKVTASNDRKLTPLNLQDMTTQKNENLTDDKHAEWARKSLHGRHHQDLCQPNVDKEASNAWLSRGELFPETEGFMLAIQDQVIETRNYQRHITKTLAIDTCRKCNSCPETIQHITGACKTIAQTDYKHRHDQVANIIHQKLAFQQHFVTDIEPYYKYKPESVLENPTAKLYFDRTILTDRTTHHNRPDITLIDKTCKTGYLIDIAVPNTHNLQSTIAEKLTKYIELKDEITRIWHLQKVIIVPIVLSSTGVIPTQLHQSLKTLKLPPKTFHLLQKAVILNTCRIVRKFLQTDHEGSAVTRRTAQAITHATLNPIEPVTTNIETHTTPRHMIAQPDSHSTNENVRILT

SEQ ID NO: 16720 - protein, 1431 aa, Cydia splendana
MQLRSRIIRPGPLPEGNRRGASGAVAGCHSMRSNGDAELSRRAPIEESVTAAVGPLPEGDRRGAPGAAAGCHSMRTSGDAELSRRAPIEESTTAANRERFAASSKYNLRPRSGGSSTTRSSDDDKSLFSSIPSTRPSYMSKKTPTLSSASTHDGVVQDVIPDIELVPTSEASKSRKRWTKEMNTFIMRTYLYLTALDTDTKTYLEPLYLKFIEKFPNMSVSRQRVGDQRRAIIRNKLLPQETLDRIYDEVKSELNSLQTSIQITYTTPANLNVQDINSTNTRLRWTTEQNEYIILSYYRITELETNRTSYRKPMHEAFINKFPALAHLSEQRIADQRRAIISNKYFSETRLNDLKQQIAEELSLNTHNSDNHTEMPVTTDFNQQPEPETLFLQSIQLNIPHESPCSPHHSQRDLLIDETFRQSLEYFKDTDPTSRMHIPKQKTSKKLANIVYYLNNITLPEHINIDTDFNTLQTAIYCAAWTAAKVNGAKISLVPSDSSRSRPANKDRRPQWQRRLERRLHDIRAKIGRITQFINGTRSRNIEKHVNDIMEQYKIHSVHEEPNTQLIHTLDTLKQKLALISGRLNRYKICTLRKQQNNQFHNNEKQFYRYVRQATTNTPNISTNVVNSSPDPGDLQTFWAEIWDKPVHHNAEADWIKTETARNSNSTTEMTFENIPLDIFKKVISNLHNWKAPGSDYIHNYWYKKFTNIHPYLHNYLNKFTDDPTTIPPYITTGTTFMIPKDKNDLTNPAKYRPITCLQTIYKILTSCISELMYKHVNDNNILTEQQKGCRKFSQGCKEQLTIDAVILRHVNKTKSDLYSMYIDYKKAYDSVPHSWLIQVLEIYKIHPKIINLLKTTMTTWTTRLKLNSPTVSLETNPIKIQRGIFQGDALSPLWFCLALNPLSNILNSTPTGYRLHYTDSNRHTENINHLFYMDDIKLYADSEADLNHLTNLTEQFTNDIKMEFGIDKCKINSMKAGQIYQHNYMLGTGEQIESLDEQDTYKYLGYNQSCQIQYKDTKQKLKQQFRHRLNTILKSHLYARNTIKAINTFAIPVLTYSFGIINWTKSDLKALQRTIHTTMTRFRKHHPRACIQRLTLPRKEGGRGLIDITNLHNRQITTLRQYFYTKAECSTLHKATLQNDHKFTPLNLQDSTTQKNENLTDDKTKIAEWTRKSLHGRHRHDLCQPNVDKEASNAWLRRGELFPETEGFMLAIQDQVIETRNYQRYITKTLTNDTCRKCSSCPETIQHITGACKAIAQTDYKHRHDQVTNIIHQKLAHQYHFITDIEPYYNYKPESVLDNSSTKLYFDRTILTDRTTHHNRPDITLIDKTTKSGFLIDIAVPNTHNLQSTISEKLTKYIELKDEISRIWHLQKVTIVPIVLSSTGVIPKQLHQSLKTLKLPANTYNLLQKATILNTCRLVRKFLQTDQSTR

SEQ ID NO: 16721 - protein, 1307 aa, Eupsilia transversa
MNTFILRTYFQLTALDTDRKTYLEPLHSKFIEKYPDMHVSRQRVGDQRRAIINNKLLTQKTIEEIKAEVRAELNQLQLSTQTQFSINNTPSIITPTQTQPTRTQMRMRWTTEQNEAVMRSYYRVTTLETNQTVYRKLMYEDFIKNFPSLAHLSEQRIADQRRAIVNNQYISTDRLNSLKLEVSNELGLANSNHNNETITVNSNTTDTLFRNNIDIHPTEEAILQIPSNDQINITADAPSIPYLQTSPDRDPLIDETFQQTLQFYTETNPTNRMYIPKQKPSKNLARIVDYLNKVILPENVNKETGFHSLQTVIYSAAWTAAKVNGAKLTLQPREATIIAKKRYSPNWQRRLERKVNDLRSKISRMIQFINGNRSRKIIKHVKNIAKQYKIHTIHEEPNTQAAHTLDTLKQKLSVVTGRLQRYKACTQRKQQNIQFTHNEKLFYRNIRQATTNVQDNTPNDDHNTPDTETLQNFWAGLWEQPIEHNAQAGWIETEVANSNSNIQAMTFEHISPEIFHKVLSRLHNWKAPGSDHIHSYWYKKFTAVHSFLYNYVNTFLRDPETIPSYITSGTTFMIPKDCNDLSNPAKYRPITCLQTLYKIITSCISELIYQHINTNNILSEQQKGCRKFSQGCKEQLIIDSVILKKVQKTKTDLFSMYIDYKKAYDSVPHSWLVKILEIYKIHPTIVTFLKVTMKTWTTVLRLTSPTATVDTNPIKIQRGIFQGDALSPLWFCLALNPLSNILNATTLGIPLEATTTEGYTQKIDINHLLYMDDIKLYAKTESQLNELANLTEQFSKDIKMEFGIDKCKINSIRAGQNYQHRYILGTGEQIDPLDEQNSYKYLGYTQSRQIHYKETKQKLTQQFQHRLNKILKTQLYSRNTVKAINTFAIPVLTYSFGIINWTKTDLKNLQRKMNTTMTKFRKHHPRSCQQRLTLPRKEGGRGLIDILNLHNRQIKTLRQYFFSKTETSILHKVITHNDQKLTPLNLQDTSEQTNEKVTDDKIKLLEWTQKSLHGRHRQDLSHINVDKTASNAWLNRGELFPETEGFMLAIQDQVIETKNYRKYIIKNLNNDTCRKCNSSPETIQHITGACKSIAQTDYKHRHDQVANVIHQKLAHQYKLIDSVTPYYKYNPETVLENPSTKLYFDRAILTDRTIHFNRPDITLINKINKTGYLIDIAVPNTHNLQTTIAEKLTKYTELKDEIVRLWHLQKVTIVPIVLSTTGVIPKQLHQSLHSLNLPPNTYHLLQKAVVLNTCRLVRKFLQCESETPLQNTTILSSSIQSSARDRTASIIIPPITITLNPTDEHLA

SEQ ID NO: 16722 - protein, 1163 aa, Noctua janthe
MYEDFITNFPALSHLSEQRIADQRRAILNNKYINSDRLNSLKLEVSQELRLDNINVTRFTSPTQAVDRNRNNNAGIQCINISNTNPTHETPLTLNDIEVNISEEMLPNQQENLDRDPLIDEIFQQAIQYFKETSPTNRIFIPKQKPSKKLARIVNYLNKIILPEHANKETNFNTLQTTIYCAAWTAAKVNGAKITLQPRVVTQRAKKQYKPNWEKRLERKLNDLRTKVGRMMQFINGNRSRKIMKHVNKIVEQYKIHTVHEEPNTQAVHTLDTLKQKLSVVTGRLQRYRACTQRKLQNTQFTHNEKLFYRNIRQATSNVQDNSANDDHNTPDPETLHNFWAGIWEQPTEHNAEADWIQTELTNGNTNIDAMAFDSISPDIFHRVLSRLHNWKTPGSDHIHSYWYKKFTSVHSFLYNHINLFIQDPESIPSYITLGTTFMVPKDRNDLTNPAKYRPITCLQTLYKIITSCISELMYGHIATNNILAEQQKGCRKFSQGCKEQLTIDSVILKKVQKTKTDLFSMYIDYKKAYDSVPHSWLVKILEIYKIHPTIVTFLKAMMTTWTTVLRLSSPTETVDTSPIKIRRGIFQGDALSPLWFCLALNPLSNILNASTLGFPLKDTPTEGHAQKIYLNHLLYMDDIKLYAKSDGQLHELANLTEQFSNDIKMKFGIDKCKINSIRAGQNYQHQYTLGTGEQIQPLDEQDSYKYLGYTQSRQIHYKETKQKLTQQFQHRLNTILKTQLYSRNTIKAINTFAIPVLTYSFGIINWTKTDLKNLQRKINTTMTKFRKHHPRSCVQRLTLPRKEGGRGLIDILNLHNRQIKALRQFFFSKSENSTLHKVVTQNDQQLTPLNLKDRSEQKNEKNTDERTKLLEWTQKSLHGRHRQDLCHINVDKEASNAWLNRGELFPETEGFMLAIQDQVIETKNYRKYIIKNLNNDTCRRCNSSPETIQHITGACKSIAQTDYKHRHDQVANIIHQKLAHQYKLIDSVVPYYKYNPETILENPTTKLYFDRGIFTDRTIHFNRPDITLINKINKTAYLIDIAVPNTHNLQTTIAEKLTKYIELKDEITRIWHLQKVTIVPIVLSSTGVIPKQLHQSLNSLSLPPNTYHLLQKAVILNTCRLVRKFLQCESEIPHQNSNTLPSSIHYSARDRTSSIPTDNHLA

SEQ ID NO: 16723 - protein, 1447 aa, Noctua janthe
MEMSSKRIYNLRSLPGERRGASGADAGCHSMRTIGGEELSKRAPTEKHVTAGRSELNRRAHNVEATADSTGDDTSSLFSSVPSTRPSYMTRRKASLSTTSTLDSVVQDVILDNELAPATSAPSKRRRWTLEMNMFILRTYLQLTLLDTDKRTYLEPLHLKFIEKFPDMQVSRQRIGDQRRAIINNKLLPQNTIQEIRKQVKEELDQLQLNRSTQQIQSSIDLARSTLTPTQSTQMQTTTQETNTSQNTTQTRMRWTCEQNEGIMRSYYRVTDLGRNETAYRRRMYEDFITNFPALSHLSEQRIADQRRAILNNKYINSDRLNSLKLEVSQELRLDNINVTRFTSPTQAVDRNRNNNAGIQCINISNTNPTHETPLTLNDIEVNIAEEMLPNQQENLDRDPLIDEIFQQAIQYFKETSPTNRIFIPKQKPSKKLARIVNYLNKIILPEHANKETNFNTLQTTIYCAAWTAAKVNGAKITLQPRVVTQRAKKQYKPNWEKRLERKLNDLRTKVGRMMQFINGNRSRKIMKHVNKIVEQYKIHTVHEEPNTQAVHTLDTLKQKLSVVTGRLQRYRACTQRKLQNTQFTHNEKLFYRNIRQATSNVQDNSANDDHNTPDPETLHNFWAGIWEQPTEHNAEADWIQTELTNGNTNIDAMAFDSISPDIFHRVLSSRLHNWKTPGSDHIHSYWYKKFTSVHSFLYNHINLFIQDPESIPSYITLGTTFMVPKDRNDLTNSAKYRPITCLQTLYKIITSCISELMYEHIDTNNILAEQQKGCRKFSQGCKEQLTIDSVILKKVQKTKTDLFSMYIDYKKAYDSVPHSWLVKILEIYKIHPTIVTFLKAMMTTWTTVLRLSSPTETVDTSPIKIRRGIFQGDALSPLWFCLALNPLSNILNASTLGFPLKDTPTEGHAQKIYLNHLLYMDDIKLYAKSEGQLHELANLTEQFSNDIKMEFGIDKCKINSIRAGQNYQHQYTLGTGEQIQPLDEQDSYKYLGYTQSRQIHYKETKQKLTQQFQHRLNTILKTQLYSRNTIKAINTFAIPVLTYSFGIINWTKTDLKNLQRKINTTMTKFRKHHPRSCVQRLTLPRKEGGRGLIDILNLHNRQIKALRQFFFSKSENSTLHKVVTQNDQQLTPLNLKDRSEQKNEKNTDERTKLLEWTQKSLHGRHRQDLCHINVDKEASNAWLNRGELFPETEGFMLAIQDQVIETKNYRKYIIKNLNNDTCRRCNSSPETIQHITGACKSIAQTDYKHRHDQVANVIHQKLAHQYKLIDSVVPYYKYNPETILENPTTKLYFDRGIFTDRTLHFNRPDITLINKINKTAYLIDIAVPNTHNLQTTIAEKLTKYIELKDEITRIWHLQKVTIVPIVLSSTGVIPKQLHQSLNSLSLPPNTYHLLQKAVILNTCRLVRKFLQCESEIPHQNSNTLPSSIHYSARDRTSSIPTDNHLA

SEQ ID NO: 16724 - protein, 1435 aa, Eupsilia transversa
MEMSSKRVYNLRSLPGERRGASGADARCHSMRTIGGEELSKRAPTEKIVTAGRSELNRRAHNVEATADSTGDDTISLFSSIPSTRPSYMTRRTASLSTTSTLDSVVQDVNLDSELAPTTSAHNKRRRWTPEMNTFILRTYFQLTALDTDRKTYLEPLHSKFIEKYPDMHVSRQRVGDQRRAIINNKLLTQKTIEEIKAEVRTELNQLQLSTQTQFSINNTPSIITPTQTQPTRTQMRMRWTTEQNEAVMRSYYRVTTLETNQTVYRKLMYEDFIKNFPSLAHLSEQRIADQRRAIVNNQYISTDRLNSLKLEVSNELGLANSNHNNETITVNSNTTDTLFRNNIDIHPTEEAILQIPSNDQINITADAPSIPYLQTNSDRDPLIDETFQQTLQFYTETNPTNRMYIPKQKPSKNLARIVDYLNKVILPENVNKETGFHSLQTVIYSAAWTAAKVNGAKLTLQPREATIIAKKRYSPNWQRRLERKVNDLRSKISRMIQFINGNRSRKIIKHVKNIAKQYKIHTIHEEPNTQAAHTLDTLKQKLSVVTGRLQRYKACTQRKQQNSQFTHNEKLFYRNIRQATTNVQDNTPNDDHNTPDAETLQNFWAGLWEQPIEHNAQAGWIETEVANSNSNIQAMTFEHISPEIFHKVLSRLHNWKAPGSDHIHSYWYKKFTAVHSFLYNYVNTFLRDPETIPSYITSGTTFMIPKDCNDLPNPAKYRPITCLQTLYKIITSCISELIYQHINTNNILSEQQKGCRKFSQGCKEQLIIDSVILKKVQKTKTDLFSMYIDYKKAYDSVPHSWLVKILEIYKIHPTIVTFLKVTMKTWTTVLRLTSPTATVDTNPIKIQRGIFQGDALSPLWFCLALNPLSNILNATTLGIPLEATTTEGYTQKIDINHLLYMDDIKLYAKTESQLNELANLTEQFSKDIKMEFGIDKCKINSIRAGQNYQHRYILGTGEQIEPLDEQNSYKYLGYTQSRQIHYKETKQKLTQQFQHRLNTILKTQLYSRNTVKAINTFAIPVLTYSFGIINWTKTDLKNLQRKINTTMTKFRKHHPCSCLQRLTLPRKEGGRGLIDILNLHNRQIKTLRQFFFSKTETSILHKVITHNDQKLTPLNLQDTSEQTNEKVTDDKIKLLEWTQKSLHGRHRQDLSHINVDKTASNAWLSRGELFPETEGFMLAIQDQVIETKNYRKYIIKNLNNDICRKCNSSPETIQHITGACKSIAQTDYKHRHDQVANVIHQKLAHQYKLIDSVTPYYKYNPETVLENPSTKLYFDRAILTDRTIHFNRPDITLINKINKTGYLIDIAVPNTHNLQTTIAEKLTKYTELKDEIVRIWHLQKVTIVPIVLSTTGVIPKQLHQSLHSLNLPPNTYHLLQKAVVLNTCRLVRKFLQCESETPLQNTTILSSSIQSSARDRTASIIIPPILNPTDEHLA

SEQ ID NO: 16725 - protein, 945 aa, Noctua janthe
MNENVMRAYYGATEGGINLTYRCRMLSLFQALEPAVNVSAQRLSDQVRVILNNHRLDDATLDRLRSEMQISPASNPLPSQNVTHVPAVLPLRANHHAEEEDDRTISADNLCNVELRSALEGAIREYRFMSPDLRPRLPRLLMNKKNRALVCALDALLPTFIESSTNLCDTHSILYCTAVAACRVANVKFPNTDSPTRPKSAVPAWQCWIERRINEARALIGKLICFREGNTRPRVIYRNIRQATSNVQDNSANDDHNTPDPETLHNFWAGIWEQPTEHNAEADWIQTELTNGNTNIDAMAFDSISPDIFHRVLSRLHNWKTPGSDHIHSYWYKKFTSVHSFLYNHINLFIQDPESIPSYITLGTTFMVPKDRNDLTNPAKYRPITCLQTLYKIITSCISELMYEHIDTNNILAEQQKGCRKFSQGCKEQLTIDSVILKKVQKTKTDLFSMYIDYKKAYDSVPHSWLVKILEIYKIHPTIVTFLKAMMTTWTTVLRLSSPTETVDTSPIKIRRGIFQGDALSPLWFCLALNPLSNILNASTLGFPLKDTPTEGHAQKIYLNHLLYMDDIKLYAKSEGQLHELANLTEQFSNDIKMEFGIDKCKINSIRAGQNYQHQYTLGTGEQIQPLDEQDSYKYLGYTQSRQIHYKETKQKLTQQFQHRLNTILKTQLYSRNTIKAINTFAIPVLTYSFGIINWTKTDLKNLQRKINTTMTKFRKHHPRSCVQRLTLPRKEGGRGLIDILNLHNRQIKALRQFFFSKSENSTLHKVVTQNDQQLTPLNLKDRSEQKNEKNTDERTKLLEWTQKSLHGRHRQDLCHINVDKEASNAWLNRGELFPETEGFMLAIQDQVIETKNYRKYIIKNLNNDTCRRCNSSPETIQHITGACKSIAQTDYKHRHDQVANVIHQKLAHQYKLIDSVVPYYKYNPETILENPTTKLYFDRGIFMK

SEQ ID NO: 16726 - protein, 1443 aa, Xestia xanthographa
MVMSNKRIYSLRSLPGERRGASGADARCHSMRSIGGEELSKRAPTDKIVTAGRSKLNRRAHYVDATADSTGDDTISLFSSIPSTRPSYMTRRKASLSTTSTLDSVVQDVIHDNELAPATSAPSKRRRWTPEMNMFILRTYFQLTLLDTDKRTYLEPLHLKFMERFPEMQVSRQRIGDQRRAIINNKLLPQKAIDDIRNEVEKELEQLQLNHFSLQTQNTIDYTQEMSPPTQTQPTTIDTHSTQNKTQTRMRWTSEQNEAIMRSYYRVTDLGSNETVYRKRMYDDFVSNFPSLAHLSEQRIADQRRAIINNKYISNDKLNSLKAEVAEELGLRTLNSHNNRERGTFAAIRNMNNTNTQLTNHTEINSIEELTPNTETSDSTELNNMTDLLPNPQISSVRDSMIDDTFQQALDFFNETSPTERIYIPKQKPSKNLARIISYLNKIILPENVDKDTDFDRLQTVIYCSAWTVAKVNGARITLKPRESIRVPKTEFKPKWQKRLEQKVKDLRTKIGRMTQFVNGNSSRKLRKHANKIMKQYKIHTIHEEPNTKAAHTLDTLKQKLYVVKGRLERYKACTLRKQQNTQFINNEKLFYRNIRQTTTNIQQNTTDDNDNNTPDPDTLKQFWARLWEQPVCHNSQADWIQSEVTNNNSNIQPMAFEQISPDIFHKVLSRLHNWKAPGSDHIHSYWYKKFTAIHCYLYHFINKFIQDPNSIPSYVTSGTTFMIPKDHNDLSNPAKYRPITCLQTLYKIITSCISELIYEHIDSNNILAEQQKGCRKFSQGCKEQLIIDSVVLKTVQKSKSDLFTMYIDYKKAYDSVPHSWLVQVLEIYKIHPSVIAFLKTVMTTWTTVLRLTTPTETKNTSPIKIQRGIFQGDALSPLWFCLALNPLSKILNTTSLGIPLNSTADGQETHGNILNHLLYMDDIKLFAKSENQLNELANITEKFTNDIKMEFGIDKCKINSVKAGQNYQHQYTLATGEQIEPLDEQDTYKYLGYIQSNQIHYKDIKLKLKQQFQHRLNTILKTQLCSQNTIKAINTFAIPVLTYSFGIINWTKTDLKNLQRKINTTMTKFRKHHPRSCVQRMTLPRKEGGRGLIDISNLHNRQITTLRQYFFAKTESSTLHKLIAQNDQRLTPLNLKDTTEQKNERVTDDKTKYLEWTQKSLHGRHRQDLCQPNVDKEASNAWLNRGELFPETEGFMLAIQDQVIETKNYRKHIIKNLPNDTCRKCNSSPETIQHITGACKSIAQTDYKHRHDQVANIIHQKLAHQYKLVDTVVPYYKYSPETVLENTTTKLYFDRALFTDRTIHYNRPDITLINKLNNTGFLIDIAVPNTHNLQTTIAEKLSKYIELKDEITRLWRLQKVIIVPIVISSTGVIPKQLHQSLSSLNLPTSTYYLLQKAVILNTCRLVRKFLQCESENITQSAHNRVETNISIPEINPTDEHLA

SEQ ID NO: 16727 - protein, 923 aa, Noctua janthe
MTQFLPIIIIRKIMKHVNKIVEQYKIHTVHEEPNTQAVHTLDTLKQKLSVVTGRLQRYRACTQRKLQNTQFTHNEKLFYRNIRQATSNVQDNSANDDHNTPDPETLHNFWAGIWEQPTEHNAEADWIQTELTNGNTNIDAMAFDSISPDIFHRVLSRLHNWKTPGSDHIHSYWYKKFTSVHSFLYNHINLFIQDPESIPSYITLGTTFMVPKDRNDLTNPAKYRPITCLQTLYKIITSCISELMYEHIDTKNILAEQQKGCRKFSQGCKEQLTIDSVILKKVQKTKTDLFSMYIDYKKAYDSVPHSWLVKILEIYKIHPTIVTFLKAMMTTWTTVLRLSSPTETVDTSPIKIRRGIFQGDALSPLWFCLALNPLSNILNASTLGFPLKDTPTEGHAQKIYLNHLLYMDDIKLYAKSEGQLHELANLTEQFSNDIKMEFGIDKCKINSIRAGQNYQHQYTLGTGEQIQPLDEQDSYKYLGYTQSRQIHYKETKQKLTQQFQHRLNTILKTQLYSRNTIKAINTFAIPVLTYSFGIINWTKTDLKNLQRKINTTMTEFRKHHPRYCVQRLTLPRKEGGRGLIDILNLHNRQIKALRQFFFSKSENSTLHKVVTQNDQQLTPLNLKDRSEQKNEKNTDERTKLLEWTQKSLHGRHRQDLCHINVDKEASNAWLNRGELFPETEGFMLAIQDQVIETKNYRKYIIKNLNNDTCRRCNSSPETIQHITGACKSIAQTDYKHRHDQVANIIHQKLAHQYKLIDSVVPYYKYNPETILENPTTKLYFDRGIFTDRTIHFNRPDITLINKINKTAYLIDIAVPNTHNLQTTIAEKLTKYIELKDEITRIWHLQKVTIVPIVLSSTGVIPKQLHQSLNSLSLPPNTYHLLQKAVILNTCRLVRKFLQCESEIPHQNSNTLPSSIHYSARDRT

SEQ ID NO: 16728 - protein, 1451 aa, Eupsilia transversa
MEMSSKRVYNLRSLPGERRGASGADARCHSMRTIGGEELSKRAPTEKIVTAGRSELNRRAHNVEATADSTGDDTISLFSSIPSTRPSYMTRRTASLSTTSTLDSVVQDVNLDSELAPTTSAHNKRRRWTPEMNTFILRTYFQLTALDTDRKTYLEPLHSKFIEKYPDMHVSRQRVGDQRRAIINIKLLTQKTIEEIKAEVRAELNQLQLSTQTQFSINNTPSIITPTQTQFSINNTQSIITPTQTQPTRTQMRMRWTTEQNEAVMRSYYRVTTLETNQTVYRKLMYEDFIKNFPSLAHLSEQRIADQRRAIVNNQYISTDRLNSLKLEVSNELGLANSNHNNETITVNNNTTDTLFRHNIDIHPTEEAILQIPSNDQINITADAPSIPYLQTNSDRDPLIDETFQQTLQFYTETNPTNRMYIPKQKPSKNLARIVDYLNKVILPENVNKETGFHSLQTVIYSAAWTAAKVNGAKLTLQPREATIIAKKRYSPNWQRRLERKVNDLRSKISRMIQFINGNRSRKIIKHVKKIAKQYKIHTIHEEPNTQAAHTLDTLKQKLSVVTGRLQRYKACTQRKQQNSQFTHNEKLFYRNIRQATTNVQDNTPNDDHNTPDAETLQNFWAGLWEQPIEHNAQAGWIETEVANSNSNIQAMTFEHISPEIFHKVLSRLHNWKAPGSDHIHSYWYKKFTAVHSFLYNYVNTFLRDPETIPSYITSGTTFMIPKDCNDLPNPAKYRPITCLQTLYKIITSCISELIYQHINTNNILSEQQKGCRKFSQGCKEQLIIDSVILKKVQKTKTDLFSMYIDYKKAYDSVPHSWLVKILEIYKIHPTIVTFLKVTMKTWTTVLRLTSPTATVDTNPIKIQRGIFQGDALSPLWFCLALNPLSNILNATTLGIPLEATTTEGYTQKIDINHLLYMDDIKLYAKTESQLNELANLTEQFSKDIKMEFGIDKCKINSIRAGQNYQHRYILGTGEQIEPLDEQNSYKYLGYTQSRQIHYKETKQKLTQQFQHRLNTILKTQLYSRNTVKAINTFAIPVLTYSFGIINWTKTDLKNLQRKMNTTMTKFRKHHPRSCLQRLTLPRKEGGRGLIDILNLHNRQIKTLRQFFFSKTETSILHKVITHNDQKLTPLNLQDTSEQTNEKVTDDKIKLLEWTQKSLHGRHRQDLSHINVDKTASNAWLSRGELFPETEGFMLAIQDQVIETKNYRKYIIKNLNNDTCRKCNSSPETIQHITGACKSIAQTDYKHRHDQVANVIHQKLAHQYKLIDSVTPYYKYKPETVLENPSTKLYFDRAILTDRTIHFNRPDITLINKINKTGYLIDIAVPNTHNLQTTIAEKLTKYTELKDEIVRIWHLQKVTIVPIVLSTTGVIPKQLHQSLHSLNLPPNTYHLLQKAVVLNTCRLVRKFLQCESETQLQNTTILSSSIQSSARDRTASIIIPPILNPTDEHLA

SEQ ID NO: 16729 - protein, 1441 aa, Noctua janthe
MEMSSKRIYNLRSLPGERRGASGADAGCHSMRTIGGEELSKRAPTEKHVTAGRSELNRRAHNVEATADSTGDDTSSLFSSVPSTRPSYMTRRKASLSTTSTLDSVVQDVILDNELAPATSAPSKRRRWTLEMNMFILRTYLQLTLLDTDKRTYLEPLHLKFIEKFPDMQVSRQRIGDQRRAIINNKLLPQNTIQEIRKQVKEELDRSTQQIQSSIDLARSTLTPTQSTQMQTTTQETNTSQNTTQTRMRWTCEQNEGIMRSYYRVTDLGRNETAYRRRMYEDFITNFPALSHLSEQRIADQRRAILNNKYINSDRLNSLKLEVSQELRLDNINVTRFTSPTQAVDRNRNNNAGIQCINISNTNPTHETPLTLNDIEVNISEEMLPNQQENLDRDPLIDEIFQQAIQYFKETSPTNRIFIPKQKPSKKLARIVNYLNKIILPEHANKETNFNTLQTTIYCAAWTAAKVNGAKITLQPRVVTQRAKKQYKPNWEKRLERKLNDLRTKVGRMMQFINGNRSRKIMKHVNKIVEQYKIHTVHEEPNTQAVHTLDTLKQKLSVVTGRLQRYRACTQRKLQNTQFTHNEKLFYRNIRQATSNVQDNSANDDHNTPDPETLHNFWAGIWEQPTEHNAEADWIQTELTNGNTNIDAMAFDSISPDIFHRVLSRLHNWKTPGSDHIHSYWYKKFTSVHSFLYNHINLFIQDPESIPSYITLGTTFMVPKDRNDLTNPAKYRPITCLQTLYKIITSCISELMYGHIDTNNILAEQQKGCRKFSQGCKEQLTIDSVILKKVQKTKTDLFSMYIDYKKAYDSVPHSWLVKILEIYKIHPTIVTFLKAMMTTWTTVLRLSSPTETVDTSPIKIRRGIFQGDALSPLWFCLALNPLSNILNASTLGFPLKDTPTEGHAQKIYLNHLLYMDDIKLYAKSEGQLHELANLTEQFSNDIKMKFGIDKCKINSIRAGQNYQHQYTLGTGEQIQPLDEQDSYKYLGYTQSRQIHYKETKQKLTQQFQHRLNTILKTQLYSRNTIKAINTFAIPVLTYSFGIINWTKTDLKNLQRKINTTMTKFRKHHPRSCVQRLTLPRKEGGRGLIDILNLHNRQIKALRQFFFSKSENSTLHKVVTQNDQQLTPLNLKDRSEQKNEKNTDERTKLLEWTQKSLHGRHRQDLCHINVDKEASNAWLNRGELFPETEGFMLAIQDQVIETKNYRKYIIKNLNNDTCRRCNSSPETIQHITGACKSIAQTDYKHRHDQVANIIHQKLAHQYKLIDSVVPYYKYNPETILENPTTKLYFDRGIFTDRTIHFNRPDITLINKINKTAYLIDIAVPNTHNLQTTIAEKLTKYIELKDEITRIWHLQKVTIVPIVLSSTGVIPKQLHQSLNSLSLPPNTYHLLQKAVILNTCRLVRKFLQCESEIPHQNSNTLPSSIHYSARDRTSSIPTDNHLA

SEQ ID NO: 16730 - protein, 1446 aa, Noctua janthe
MEMSSKRIYNLRSLPGERRGASGADAGCHSMRTIGGEELSKRAPTEKHVTAGRSELNRRAHNVEATADSTGDDTSSLFSSVPSTRPSYMTRRKASLSTTSTLDSVVQDVILDNELAPATSAPSKRRRWTLEMNMFILRTYLQLTLLDTDKRTYLEPLHLKFIEKFPDMQVSRQRIGDQRRAIINNKLLPQNTIQEIRKQVKEELDQLQLNRSTQQIQSSIDLARSTLTPTQSTQMQTTTQETNTSQNTTQTRMRWTCEQNEGIMRSYYRVTDLGRNETAYRRRMYEDFITNFPALSHLSEQRIADQRRAILNNKYINSDRLNSLKLEVSQELRLDNINVTRFTSPTQAVDRNRNNNAGIQCINISNTNPTHETPLTLNDIEVNISEEMLPNQQENLDRDPLIDEIFQQAIQYFKETSPTNRIFIPKQKPSKKLARIVNYLNKIILPEHANKETNFNTLQTTIYCAAWTAAKVNGAKITLQPRVVTQRAKKQYKPNWEKRLERKLNDLRTKVGRMMQFINGNRSRKIMKHVNKIVEQYKIHTVHEEPNTQAVHTLDTLKQKLSVVTGRLQRYRACTQRKLQNTQFTHNEKLFYRNIRQATSNVQDNSANDDHNTPDPETLHNFWAGIWEQPTEHNAEADWIQTELTNGNTNIDAMAFDSISPDIFHRVLSRLHNWKTPGSDHIHSYWYKKFTSVHSFLYNHINLFIQDPESIPSYITLGTTFMVPKDRNDLTNPAKYRPITCLQTLYKIITSCISELMYEHIDTNNILAEQQKGCRKFSQGCKEQLTIDSVILKKVQKTKTDLFSMYIDYKKAYDSVPHSWLVKILEIYKIHPTIVTFLKAMMTTWTTVLRLSSPTETVDTSPIKIRRGIFQGDALSPLWFCLALNPLSNILNASTLGFPLKDTPTEGHAQKIYLNHLLYMDDIKLYAKSEGQLHELANLTEQFSNDIKMEFGIDKCKINSIRAGQNYQHQYTLGTGEQIQPLDEQDSYKYLGYTQSRQIHYKETKQKLTQQFQHRLNTILKTQLYSRNTIKAINTFAIPVLTYSFGIINWTKTDLKNLQRKINTTMTKFRKHHPRSCVQRLTLPRKEGGRGLIDILNLHNRQIKALRQFFFSKSENSTLHKVVTQNDQQLTPLNLKDRSEQKNEKNTDERTKLLEWTQKSLHGRHRQDLCHINVDKEASNAWLNRGELFPETEGFMLAIQDQVIETKNYRKYIIKNLNNDTCRRCNSSPETIQHITGACKSIAQTDYKHRHDQVANIIHQKLAHQYKLIDSVVPYYKYNPETILENPTTKLYFDRGIFTDRTIHFNRPDITLINKINKTAYLIDIAVPNTHNLQTTIAEKLTKYIELKDEITRIWHLQKVTIVPIVLSSTGVIPKQLHQSLNSLSLPPNTYHLLQKAVILNTCRLVRKFLQCESEIPHQNSNTLPSSIHYSARDRTSSIPTDNHLA

SEQ ID NO: 16731 - protein, 940 aa, Eupsilia transversa
MIQFINGNRSRKIIKHVKHIAKQYKIHTIHEEPNTQAAHTLDTLKQKLSVVTGRLQRYKACTQRKQQNIQFTHNEKLFYRNIRQATTNVQDNTPNDDHNTPDAETLQKFWAGLWEQPIEHNAQAGWIETEVANSNSNIQAMTFEHISPEIFHKVLSRLHNWKAPGSDHIHSYWYKKFTAVHSFLYNYVNTVLRDPETIPSYITSGTTFMIPKDCNDLSNPAKYRPITCLQTLYKIITSCISELIYQHINTNNILSEQQKGCRKFSQGCKEQLIIDSVILKKVQKTKTDLFSMYIDYKKAYDSVPHSWLVKILEIYKIHPTIVTFLKVTMKTWTTVLRLTSPTATVDTNPIKIQRGIFQGDALSPLWFCLALNPLSNILNATTLGIPLEATTTEGYTQKIDINHLLYMDDIKLYAKTESQLNELANLTEQFSKDIKMEFGIDKCKINSIRAGQNYQHRYILGTGEQIDPLDEQNSYKYLGYTQSRQIHYKETKQKLTQQFQHRLNTILKTQLYSRNTVKAINTFAIPVLTYSFGIINWTKTDLKNLQRKMNTTMTKFRKHHPRSCLQRLTLPRKEGGRGLIDIHNLHNRQIKTLRQFFFSKTETSILHKVITHNDQKLTPLNLQDTSEQTNEKVTDDKIKLLEWTQKSLHGRHRQDLSHINVDKTASNAWLSRGELFPETEGFMLAIQDQVIETKNYRKYIIKNLNNDTCRKCNSSPETIQHITGACKSIAQTDYKHRHDQVANVIHQKLAHQYKLIDSVTPYYKYNPETVLENPSTKLYFDRAILTDRTIHFNRPDITLINKINKTGYLIDIAVPNTHNLQTTIADKLTKYTELKDEIVRLWHLQKVTIVPIVLSTTGVIPKQLHQSLHSLNLPPNTYHLLQKAVVLNTCRLVRKFLQCESETPLQNTTIPSSSIQSSARDRSASIIIPPILNPTDEHLA

SEQ ID NO: 16732 - protein, 1091 aa, Eupsilia transversa
MLYKKKCYSIRKLYKVYNNNNNNAPSIPYLQTSSDRDPLIDETFQQTLQFYTETNPTNRMYIPKQKPSKNLARIVDYLNKVILPENVNKETGFHSLQTVIYSAAWTAAKVNGAKLTLQPREATIIAKKRYSPNWQRRLERKVNDLRSKISRMIQFINGNRSRKIIKHVKHIAKQYKIHTILEEPNTQAAHTLDTLKQKLSVVTGRLQRYKACTQRKQQNIQFTHNEKLFYRNIRQATTNVQDNTPNDDHNTPDAETLQNFWAGLWEQPIEHNAQAGWIETEVANSNSNIQAMTFEHISPEIFHKVLSRLHNWKAPGSDHIHSYWYKKFTAVHSFLYNYVNTFLRDPETIPSYITSGTTFMIPKDCNDLSNPAKYRPITCLQTLYKIITSCISELIYQHINTNNILSEQQKGCRKFSQGCKEQLIIDSVILKKVQKTKTDLFSMYIDYKKAYDSVPHSWLVKILEIYKIHPTIVTFLKVTMKTWTTVLRLTSPTATVDTNPIKIQRGIFQGDALSPLWFCLALNPLSNILNATTLGIPLEATTTEGYTQKIDINHLLYMDDIKLYAKTESQLNELANLTEQFSKDIKMEFGIDKCKINSIRAGQNYQHRYILGTGEQIDPLDEQNSYKYLGYTQSRQIHYKETKQKLTQQFQHRLNTILKTQLYSRNTVKAINTFAIPVLTYSFGIINWTKTDLKNLQRKMNTTMTKFRKHHPRSCLQRLTLPRKEGGRGLIDIHNLHNRQIKTLRQFFFSKTETSILHKVITHNDQKLTPLNLQDTSEQTNEKVTDDKIKLLEWTQKSLHGRHRQDLSHINVDKTASNAWLSRGELFPETEGFMLAIQDQVIETKNYRKYIIKNLNNDTCRKCNSSPETIQHITGACKSIAQTDYKHRHDQVANVIHQKLAHQYKLIDSVTPYYKYNPETVLENPSTKLYFDRAILTDRTIHFNRPDITLINKINKTGYLIDIAVPNTHNLQTTIADKLTKYTELKDEIVRLWHLQKVTIVPIVLSTTGVIPKQLHQSLHSLNLPPNTYHLLQKAVVLNTCRLVRKFLQCESETPLQNTTIPSSSIQSSARDRTASIIIPPILNPTDEHLA

SEQ ID NO: 16733 - protein, 1405 aa, Eupsilia transversa
MRTIGGEELSKRAPTEKIATAGRSELNRRAHNVEATADSTGDDTISLFSSIPSTRPSYMTRKTASLSTTSTLDSVVQDVNLDSELAPTTSAHNKRRRWTPEMNTFILRTYFQLTALDTDRKTYLEPLHSKFIEKYPDMHVSRQRVGDQRRAIINNKLLTQKTIEEIKAEVRAELNQLQLSAQTQFSIHNTPSIITPTQTQPTRTHMRMRWTTEQNEAVMRSYYRVTTLETNQTVYRKLMYEDFIKNFPSLAHLSEQRIADQRRAIVNNQYISTDRLNSLKLEVSNELGLANSNHNNETITVNSNTTDTLFRNNIDIHPTEEPILQIPSNDQINITADAPSIPYLQTSPDRDPLIDETFQQTLQFYTETNPTNRMYIPKQKPSKNLARIVDYLNKVILPENVNKETGFHSLQTVIYSAAWTAAKVNGAKLTLQPREATIIAKKRYSPNWQRRLERKVNDLRSKISRMIQFINGNRSRKIIKHVKHIAKQYKIHTIHEEPNTQAAHTLDTLKQKLSVVTGRLQRYKACTQRKQQNSQFTHNEKLFYRNIRQATTNVQDNTPNDDHNTPDAETLQNFWAGLWEQPIEHNAQAGWIETEVANSNSNIQAMTFEHISPEIFHEVLSRLHNWKVPGSDHIHSYWYKKFTAVHSFLYNYVNTFLRDPETIPSYITSGTTFMIPKDCNDLSNPAKYRPITCLQTLYKIITSCISELIYQHINTNNILSEQQKGCRKFSQGCKEQLIIDSVILKKVQKTKTDLFSMYIDYKKAYDSVPHSWLVKILEIYKIHPTIVTFLKVTMKTWTTVLRLTSPTATVDTNPIKIQRGIFQGDALSPLWFCLALNPLSNILNATTLGIPLEATTTEGYTQKIDINHLLYMDDIKLYAKTESQLNELANLTEQFSKDIKMEFGIDKCKINSIRAGQNYQHRYILGTGEQINPLDEQNSYKYLGYTQSRQIHYKETKQKLTQQFQHRLNTILKTQLYSRNTVKAINTFAIPVLTYSFGIINWTKTDLKNLQRKMNTTMTKFRKHHPRSCLQRLTLPRKEGGRGLIDIHNLHNRQIKTLRQFFFSKTETSILHKVITHNDQKLTPLNLQDTSEQTNEKVTDDKIKLLEWTQKSLHGRHRQDLSHINVDKTASNAWLSRGELFPETEGFMLAIQDQVIETKNYRKYIIKNLNNDTCRKCNSSPETIQHITGACKSIAQTDYKHRHDQVANVIHQKLAHQYKLIDSVTPYYKYNPETVLENPSTKLYFDRAILTDRTIHFNRPDITLINKINKTGYLIDIAVPNTHNLQTTIADKLTKYTELKDEIVRLWHLQKVTIVPIVLSTTGVIPKQLHQSLHSLNLPPNTYHLLQKAVVLNTCRLVRKFLQCESETPLQNTTIPSSSIQSSARDRTASIIIPPILNPTDEHLA

SEQ ID NO: 16734 - protein, 1179 aa, Lymantria dispar
MRWTNEHNEAIMRSYYRTTNLGTNETSYRKLMHADIIHSYPPLAHLSEQRVADQRRAIINNKYISVDRLNIIKQEIVAEFESTNNSNNSEERNLYSNEFPNHQENDNQDIQMETTSRADVIQGISQSHQDIDSDRYKEIDETFQQALQYYKNIEPTCRTYIPKQKPSKNLSRIINYLNMVTLKENITEDSDFFSLQTAIYCAAWTAAKVNGAKLTLQIGTDQLHNRKQYKPKWQQRLELKLQDIRKKIGRLTQYIQGNRSKKIVKYMNNITEQFKAHTAHEEPNTQNVHILDTLKQRLSVITGRLKRYKSCTLRKQQNSQFILNEKLFYRNIKQNTMHLTNYSNDNDSTKISPEKLKDFWSRIWENPLQHNTQAEWIQTETTNNIETMSYERIPSEIFQEVLRHLHNWKSPGSDYIHGYWYKKFTSIHNYLYKYINIFIQDPNIVPSYLTMGKTYMIPKDSTDLCDPAKYRPITCLQTLYKIITSCITKMLYNHIETNKILAEQQKGCRKFSQGCKEQLIIDSIILKNVQKTKSDLFSMYIDYKKAYDSVPHSWLIKVLEIYKIHPTIISFLKTIMTKWSTVLNLSTTTKTIETDPIQIQRGIFQGDSLSPLWFCLALNPLSYMLNATPYGYPLRLIDHSNIDLRQTTLNHLLYMDDIKLYAKSENQLYDLAYLVEQFSADIKMEFGIDKCKINSIKAGKNFQHKHVMTTGDEIEPLDEEGVYKYLGYEQSLLIHHKDIKLKLTRQFQHRLNTILKTQLDSRNTIKAINTFVIPLLTYSFGVINWNKTELKNLQRKINTTMTKFRKQHPRTCLQRITLPRKEGGRGLIDILNLHRKQIVTLRQYFFSKAHSSIVHKIIILNDRKLSPLNLENTTEPINEEITDEKAKIAEWNKKSLHGRHRQDLCQINVDKNASNAWLKRGDLLPETEGFMIAIQDQVIETRNYRKHIIKNLDNDNCRKCNSSPETIQHITGACKSIVQTDYKHRHDQIANIIHQKLAHQYKFIDTIIPYYKYKPETVLENSITKLYFDRAILTDRTVHYNRPDIRLINKITKTGYLIDIAVPNTHNLQTTITEKLTKYIDLKDEIIRLWHLQSVTIVPIVLSTTGVIPIQLHQSLTTLNLPTNTYQLMQKAAILNTCRIVRKFLQIDSNNAQLHNYISSAINTSQSQLGPSSTNDHLA

SEQ ID NO: 16735 - protein, 1405 aa, Lymantria monacha
MEMNKKVYNLRSLPGGRRGTSGADAGCHSMRTIGDEGLSRRAPIDKNTTAGRHELNRRTHDVETTADSLSDDTNSLFSSILSTPASHAISNSTDLTTSLPDSVVQDANFDNELAPTSGTKRRRWTIDMNEFILRTYLLLTAVDTDTRNYLEPLHLKFLEKYPSMNISRQRLGDQRRAIIRNKLLPQTTIDRIYYEVRQELNQLQSTCKTQETQHNLITQEETQSQTQVLQKNITQTRMRWTNDHNEAIMRSYYRTTKLGTNETSYRKLMHSDLIHSYPPLAHLSEQRIADQRRAIINNKYISTDRLNIIKQEILTGSISVNNSFNNIDLYSNNSPNNQENVNRDIQSEGISSTNVILEISQPYENINSEKYPEIDETFQQALQFYKDTDPTHRTYIPKQKPSKNLSRIISYLNSVTLKENITDGSDFYSLQTAIYCAAWTAAKVNGAKLRLQVGTNTSYQKKEYKPKWQQRLELKLQDIRKKIGRLTQYIQGNRSKKIVKHSNIIIKQYQTHTTHEEPNTQTVHVLDTLKQRLSVITGRLKRYISCTQRKQQNAQFTLNEKLFYRTIKQNTTNLTNYSNDDADIKISSEKLKNFWTSIWQNPVQHNFQAERIQSETTNNIETMSYESIPSGTFQEVLRHLHNWKSPGSDYIHGYWYKKFTATHTYLYKHINTFIQDPTTIPSYFTIGKTYLIPKDSTDLSNPAKYRPITCLQTLYKIITSCISEMLYHHIDTNKILAEQQKGCRKFSQGCKEQLIIDSFILREVQKTKSDLFSMYIDYKKAYDSVPHSWLIRVLEIYKIHPTIISFLKVIMTKWSTVLTLSNSKQTIETDPIQIQRGIFQGDSLSPLWFCLALNPLSHILNDTMYGYPLKPTDHANIDLPETMLSHLLYMDDIKLYAKTENQLHDLAHLVEQFSTDIKMEFGIDKCKINSIKAGRNFQHKYTMTTGNEIEPLDEQGAYKYLGYNQSLLIHHKDTKLKLTQQFQHRLNTILKTQLDSKNTIKAINTFVIPLLTYSFGIINWNKTELKNLQRKINTTMTKFRKHHPRTCLQRITLPRKEGGRGLIDILNLHKKQIISLRQYFYSKSQSSIAHKIITQNDRKLTALNLQNTTEQINVELIDERAKIAEWHKKSLHGRHRQDLCQSNVDKDASNAWLKRGDLFPETEAFMIAIQDQVIEIRNYRKHIIKNLHNDNCRKCNSSPETIQHLIGACKSIVQTDYKHRHDQIANIIHQKLAHRYKFVDAVIPYYKYKPQTVLENSIIKLYFDRAILTDRTIHYNRPDITLINKITKTGYLIDIAVPNTHNLQTTIAEKLTKYTELKDEITRLWHLQNVTIVPIVLSTTGVIPIQLHQSLTTLNLPANTYQLMQKAAILNTCRIVRKFLQVDPNNIHLHNHTSSTINVSTALNP

SEQ ID NO: 16736 - protein, 1418 aa, Lymantria dispar
MEMNKKVYNLRSLPGGRQGTSRADAGCHSMGNIGGAGLSRRALTDKNTTAGRYELNRRTHNVETTADFLSDDTTSLFPSIPSSVPSHAISNLNDLTTSSPDSVVQDVNFDSHLAPTLGTKRRRWTPEMNKFILRTYLLLTILDTDIKNYLEPLYLKFIEKYPNMNVSRQRLGDQRRAIMRNKLLPQTIIDRIYNEVRLELSQLQFASYTQHTQENLITQRETQSQTSVIPKTQNTLTRMRWTNEHNEAIMRSYYRTTNLGTNETSYRKLMHADIIHSYPPLAHLSEQRVADQRRAIINNKYISVDRLNIIKQEIVAEFESTNNNSNNSEERNLYSNEFPNHQENDNQDIQMETTSRADVIQGISQSHQDIDSDRYKEIDETFQQALQYYKNIEPTCRTYIPKQKPSKNLSRIINYLNMVTLKENITEDSDFFSLQTAIYCAAWTAAKVNGAKLTLQIGTDQLHNRKQYKPKWQQRLELKLQDIRKKIGRLTQYIQGNRSKKIVKYMNNITEQFKAHTSHEEPNTQNVHILDTLKQRLSVITGRLKRYKSCTLRKQQNSQFILNEKLYYRNIKQNTMHLTNYSNDNDSTKISPEKLKDFWSRIWENPLQHNTQAEWIQTETTNNIETMSYECIPSEIFQEVLRHLHNWKSPGSDYIHGYWYKKFTSIHNYLYKYINIFIQDPNIVPSYLTMGKTYMIPKDSTDLCDPAKYRPITCLQTLYKIITSCITKMLYNHIETNKILAEQQKGCRKFSQGCKEQLIIDSIILKKVQKTKSDLFSMYIDYKKAYDSVPHSWLIKVLEIYKIHPTIISFLKTIMTKWSTVLNLSTTTKTIETDPIQIQRGIFQGDSLSPLWFCLALNPLSYMLNATPYGYPLRLTDHSNINLRQTTLNHLLYMDDIKLYAKSENQLYDLAYLVEQFSADIKMEFGIDKCKINSIKAGKNFQHKHVMTTGDEIEPLDEEGVYKYLGYEQSLLIHHKDIKLKLTRQFQHRLNTILKTQLDSRNTIKAINTFVIPLLTYSFGVINWNKTELKNLQRKINTTMTKFRKQHPRTCLQRITLPRKEGGRGLIDILNLHRKQIVTLRQYFFSKAHSSIVHKIIILNDRKLSPLNLQNTTEPINEEITDEKAKIAEWNKKSLHGRHRQDLCQINVDKNASNAWLKRGDLFPETEGFMIAIQDQVIETRNYRKHIIKNLNNDNCRKCNSSPETIQHITGACKSIVQTDYKHRHDQIANIIHQKLAHQYKFIHTIIPYYKYKPETVLENSITKLYFDRAILTDRTVHYNRPDITLINKITKTGYLIDIAVPNTHNLQTTIAEKLTKYIDLKDEIIRLWHLQSVTIVPIVLSTTGVIPIQLHQSLTTLNLPTNTYQLMQKAAILNTCRIVRKFLQIDSNNAQLHNYISSAINTSQSQLGPSSTNDHLA

SEQ ID NO: 16737 - protein, 1418 aa, Lymantria dispar
MEMNKKVYNLRSLPGGRQGTSRADAGCHSMGNIGGAGLSRRALTDKNTTAGRHELNRRTHNVETTADFLSDDTTSLFSSIPSSVPSHAISNLNDLTTSSPDSVVQDVNFDSHLAPTLGTKRRRWTPEMNKFILRTYLLLTILDTDIKNYLEPLYLKFIEKYPNMNVSRQRLGDQRRAIMRNKLLPQTIIDRIYNEVRLELSQLQFASYTQHTQENLITQRETQSQTSVIPKTQNTLTRMRWTNEHNEAIMRSYYRTTNLGTNETSYRKLMHADIIHSYPPLAHLSEQRVADQRRAIINNKYISVDRLNIIKQEIVAEFESTNNNSNNSEERNLYSNEFPNHQENDNQDIQMETTSRADVIQGISQSHQDIDSDRYKEIDETFQQALQYYKNIEPTCRTYIPKQKPSKNLSRIINYLNMVTLKENITEDSDFFSLQTAIYCAAWTAAKVNGAKLTLQIGTDQLHNRKQYKPKWQQRLELKLQDIRKKIGRLTQYFQGNRSKKIVKYMNNITEQFKAHTSHEEPNTQNVHILDTLKQRLSVITGRLKRYKSCTLRKQQNSQFILNEKLFYRNIKQNTMHLTNYSNDNDSTKISPEKLKDFWSRIWENPLQHNTQAEWIQTETTNNIETMSYECIPSEIFQEVLRHLHNWKSPGSDYIHGYWYKKFTSIHNYLYKYINIFIQDPNIVPSYLTMGKTYMIPKDSTDLCDPAKYRPITCLQTLYKIITSCITKMLYNHIETNKILAEQQKGCRKFSQGCKEQLIIDSIILKKVQKTKSDLFSMYIDYKKAYDSVPHSWLIKVLEIYKIHPTIISFLKTIMTKWSTVLNLSTTTKTIETDPIQIQRGIFQGDSLSPLWFCLALNPLSYMLNATPYGYPLRLIDHSNINLRQTTLNHLLYMDDIKLYAKSENQLYDLAYLVEQFSADIKMEFGIDKCKINSIKAGKNFQHKHVMTTGDEIEPLDEEGVYKYLGYEQSLLIHHKDIKLKLTRQFQHRLNTILKTQLDSRNTIKAINTFVIPLLTYSFGVINWNKTELKNLQRKINTTMTKFRKQHPRTCLQRITLPRKEGGRGLIDILNLHRKQIVTLRQYFFSKAHSSIVHKIIILNDRKLSPLNLQNTTEPINEEITDEKAKIAEWNKKSLHGRHRQDLCQINVDKNASNAWLKRGDLFPETEGFMIAIQDQVIETRNYRKHIIKNLNNDNCRKCNSSPETIQHITGACKSIVQTDYKHRHDQIANIIHQKLAHQYKFIHTIIPYYKYKPETVLENSITKLYFDRAILTDRTVHYNRPDITLINKITKTGYLIDIAVPNTHNLQTTIAEKLTKYIDLKDEIIRLWHLQSVTIVPIVLSTTGVIPIQLHQSLTTLNLPTNTYQLMQKAAILNTCRIVRKFLQIDSNNAQLHNYISSAINTSQSQLGPSSTNDHLA

SEQ ID NO: 16738 - protein, 1291 aa, Lymantria dispar
MNKFILRTYLLLTILDTDIKNYLEPLYLKFIEKYPNMNVSRQRLGDQRRAIMRNKLLPQTIIDRIYNEVRLELSQLQFASYTQHTQENLITQRETQSQTSVIPKTQNTLTRMRWTNEHNEAIMRSYYRTTNLGTNETSYRKLMHADIIHSYPPLAHLSEQRVADQRRAIINNKYISVDRLNIIKQEIVAEFESTNNNSNNSEERNLYSNEFPNHQENDNQDIQMETTSRADVIQGISQSHQDIDSDRYKEIDETFQQALQYYKNIEPTCRTYIPKQKPSKNLSRIINYLNMVTLKENITEDSDFFSLQTAIYCAAWTAAKVNGAKLTLQIGTDQLHNRKQYKPKWQQRLELKLQDIRKKIGRLTQYIQGNRSKKIVKYMNNITEQFKAHTSHEEPNTQNVHILDTLKQRLSVITGRLKRYKSCTLRKQQNSQFILNEKLFYRNIKQNTMHLTNYSNDNDSTKISPEKLKDFWSRIWENPLQHNTQAEWIQTETTNNIETMSYECIPSEIFQEVLRHLHNWKSPGSDYIHGYWYKKFTSIHNYLYKYINIFIQDPNIVPSYLTMGKTYMIPKDSTDLCDPAKYRPITCLQTLYKIITSCITKMLYNHIETNKILAEQQKGCRKFSQGCKEQLIIDSIILKKVQKTKSDLFSMYIDYKKAYDSVPHSWLIKVLEIYKIHPTIISFLKTIMTKWSTVLNLSTTTKTIETDPIQIQRGIFQGDSLSPLWFCLALNPLSYMLNATPYGYPLRLIDHSNINLRQTTLNHLLYMDDIKLYAKSENQLYDLAYLVEQFSADIKMEFGIDKCKINSIKAGKNFQHKHVMTTGDEIEPLDEEGVYKYLGYEQSLLIHHKDIKLKLIRQFQHRLNTILKTQLDSRNTIKAINTFVIPLLTYSFGVINWNKTELKNLQRKINTTMTNFRKQHPRTCLQRITLPRKEGGRGLIDILNLHRKQIVTLRQYFFSKAHSSIVHKIIILNDRKLSPLNLQNTTEPINEEITDEKAKIAEWNKKSLHGRHRQDLCQINVDKNASNAWLKRGDLFPETEGFMIAIQDQVIETRNYRKHIIKNLNNDNCRKCNSSPETIQHITGACKSIVQTDYKHRHDQIANIIHQKLAHQYKFIHTIIPYYKYKPETVLENSITKLYFDRAILTDRTVHYNRPDITLINKITKTGYLIDIAVPNTHNLQTTIAEKLTKYIDLKDEIIRLWHLQSVTIVPIVLSTTGVIPIQLHQSLTTLNLPTNTYQLMQKAAILNTCRIVRKFLQIDSNNAQLHNYISSAINTSQSQLGPSSTNDHLA

SEQ ID NO: 16739 - protein, 1344 aa, Lymantria dispar
MTTWLRSVPLVLKYRLTEINNRIKIIIIIIIINNFDSHLAPTLGTKRRRWTPEMNKFILRTYLLLTILDTDIKNYLEPLYLKFIEKYPNMNVSRQRLGDQRRAIMRNKLLPQTIIDRIYNEVRLELSQLQFASYTQHTQENLITQRETQSQTSVIPKTQNTLTRMRWTNEHNEAIMRSYYRTTNLGTNETSYRKLMHADIIHSYPPLAHLSEQRVADQRRAIINNKYISVDRLNIIKQEIVAEFESTNNNSNNSEERNLYSNEFPNHQENDNQDIQMETTSRADVIQGISQSHQDIDSDRYKEIDETFQQALQYYKNIEPTCRTYIPKQKPSKNLSRIINYLNMVTLKENITEDSDFFSLQTAIYCAAWTAAKVNGAKLTLQIGTDQLHNRKQYKPKWQQRLELKLQDIRKKIGRLTQYIQGNRSKKIVKYMNNITEQFKAQTSHEEPNTQNVHILDTLKQRLSVITGRLKRYKSCTLRKQQNSQFILNEKLFYRNIKQNTMHLTNYSNDNDSTKISPEKLKDFWSRIWENPLQHNTQAEWIQTETTNNIETMSYECIPSEIFQEVLRHLHNWKSPGSDYIHGYWYKKFTSIHNYLYKYINIFIQDPNIVPSYLTMGKTYMIPKDSTDLCDPAKYRPITCLQTLYKIITSCITKMLYNHIETNKILAEQQKGCRKFSQGCKEQLIIDSIILKKVQKTKSDLFSMYIDYKKAYDSVPHSWLIKVLEIYKIHPTIISFLKTIMTKWSTVLNLSTTTKTIETDPIQIQRGIFQGGSLSPLWFCLALNPLSYMLNATPYGYPLRLIDHSNINLRQTTLNHLLYMDDIKLYAKSENQLYDLAYLVEQFSADIKMEFGIDKCKINSIKAGKNFQHKHVMTTGDEIEPLDEEGVYKYLGYEQSLLIHHKDIKLKLTRQFQHRLNTILKTQLDSRNTIKAINTFVIPLLTYSFGVINWNKTELKNLQRKINTTMTKFRKQHPRTCLQRITLPRKEGGRGLIDILNLHRKQIVTLRQYFFSKAHSSIVHKIIILNDRKLSPLNLQNTTEPINEEITDEKAKIAEWNKKSLHGRHRQDLCQINVDKNASNAWLKRGDLFPETEGFMIAIQDQVIETRNYRKHIIKNLNNDNCRKCNSSPETIQHITGACKSIVQTDYKHRHDQIANIIHQKLAHQYKFIHTIIPYYKYKPETVLENSITKLYFDRDILTDRTVHYNRPDITLINKITKTGYLIDIAVPNTHNLQTTIAEKLTKYIDLKDEIIRLWHLQSVTIVPIVLSTTGVIPIQLHQSLTTLNLPTNTYQLMQKAAILNTCRIVRKFLQIDSNNAQLHNYISSAINTSQSQLGPSSTNDHLA

SEQ ID NO: 16740 - protein, 1419 aa, Lymantria dispar
MEMNKKVYNLRSLPGGRQGTSRADAGCHSMGNIGGAGLSRRALTDKNTTAGRHELNRRTHNVETTADFLSDDTTSLFSSIPSSVPSHAISNLNDLTTSSPDSVVQDVNFDSHLAPTLGTKRRRWTPEMNKFILRTYLLLTILDTDIKNYLEPLYLKFIEKYPNMNVSRQRLGDQRRAIMRNKLLPQTIIDRIYNEVRLELSQLQFASYTQHTQENLITQRETQSQTSVIPKTQNTLTRMRWTNEHNEAIMRSYYRTTNLGTNETSYRKLMHADIIHSYPPLAHLSEQRVADQRRAIINNKYISVDRLNIIKQEIVAEFESTNNNSNNSEERNLYSNEFPNHQENDNQDIQMETTSRADVIQGISQSHQDIDSDRYKEIDETFQQALQYYKNIEPTCRTYIPKQKPSKNLSRIINYLNMVTLKENITEDSDFFSLQTAIYCAAWTAAKVNGAKLTLQIGTDQLHNRKQYKPKWQQRLELKLQDIRKKKIGRLTQYIQGNRSKKIVKYMNNITEQFKAHTSHEEPNTQNVHILDTLKQRLSVITGRLKRYKSCTLRKQQNSQFILNEKLFYRNIKQNTMHLTNYSNDNDSTKISPEKLKDFWSRIWENPLQHNTQAEWIQTETTNNIETMSYECIPSEIFQEVLRHLHNWKSPGSDYIHGYWYKKFTSIHNYLYKYINIFIQDPNIVPSYLTMGKTYMIPKDSTDLCDPAKYRPITCLQTLYKIITSCITKMLYNHIETNKILAEQQKGCRKFSQGCKEQLIIDSIILKKVQKTKSDLFSMYIDYKKAYDSVPHSWLIKVLEIYKIHPTIISFLKTIMTKWSTVLNLSTTTKTIETDPIQIQRGIFQGDSLSPLWFCLALNPLSYMLNATPYGYPLRLIDHSNINLRQTTLNHLLYMDDIKLYAKSENQLYDLAYLVEQFSADIKMEFGIDKCKINSIKAGKNFQHKHVMTTGDEIEPLDEEGVYKYLGYEQSLLIHHKDIKLKITRQFQHRLNTILKTQLDSRNTIKAINTFVIPLLTYSFGVINWNKTELKNLQRKINTTMTKFRKQHPRTCLQRITLPRKEGGRGLIDILNLHRKQIVTLRQYFFSKAHSSIVHKIIILNDRKLSPLNLQNTTEPINEEITDEKAKIAEWNKKSLHGRHRQDLCQINVDKNASNAWLKRGDLFPETEGFMIAIQDQVIETRNYRKHIIKNLNNDNCRKCNSSPETIQHITGACKSIVQTDYKHRHDQIANIIHQKLAHQYKFIHTIIPYYKYKPETVLENSITKLYFDRAILTDRTVHYNRPDITLINKITKTGYLIDIAVPNTHNLQTTIAEKLTKYIDLKDEIIRLWHLQSVTIVPIVLSTTGVIPIQLHQSLTTLNLPTNTYQLMQKAAILNTCRIVRKFLQIDSNNAQLHNYISSAINTSQSQLGPSSTNDHLA

SEQ ID NO: 16741 - protein, 1180 aa, Lymantria dispar
MRWTNEHNEAIMRSYYRTTNLGTNETSYRKLMHADIIHSYPPLAHLSEQRVADQRRAIINNKYISVDRLNIIKQEIVAEFESTNNNSNNSEERNLYSNEFPNHQENDNQDTQMETTSRADVIQGISQSHQDIDSDRYKEIDETFQQALQYYKNIEPTCRTYIPKQKPSKNLSRIINYLNMVTLKKNITEDSDFFSLQTAIYCAAWTAAKVNGAKVTLQIGTDQLHNRKQYKPKWQQRLELKLQDIRKKIGRLTQYIQGNRSKKIVKYMNSITEQFKAHTAHEEPNTQNVHILDTLKQRLSVITGRLKRYKSCTLRKQQNSQFILNEKLFYRNIKQNTMHLTNYSNDNDSTKISPEKLKDFWSRIWENPLQHNIQAEWIQTETNNNIETMSYECIPSEIFQEVLRHLHNWKSPGSDYIHGYWYKKFTSIHNYLYKYINIFIQDPNIVPSYLTMGKTYMIPKDSTDLCDPAKYRPITCLQTLYKIITSCITKMLYNHIETNKILAEQQKGCRKFSQGCKEQLIIDSIILKKVQKTKSDLFSMYIDYKKAYDSVPHSWLIKVLEIYKIHPTIISFLKTIMTKWSTVLNLSTTTKTIETDPIQIQRGIFQGDSLSPLWFCLALNPLSYMLNATPYGYPLRLIDHSNIDLRQTTLNHLLYMDDIKLYAKSENQLYDLAYLVEQFSADIKMEFGIDKCKINSIKAGKNFQHKHVMTTGDEIEPLDEEGVYKYLGYEQSLLIHHKDIKLKLTRQFQHRLNTILKTQLDSRNTIKAINTFVIPLLTYSFGVINWNKTELKNLQRKINTTMTKFRKQHPRTCLQRITLPRKEGGRGLIDILNLHRKQIVTLRQYFFSKAHSSIVHKIIILNDRKLSPLNLQNTTEPINEGITDEKAKIAEWNKKSLHGRHRQDLCQINVDKNASNAWLKRGDLFPETEGFMIAIQDQVIETRNYRKHIIKNLNNDNCRKCNSSPETIQHITGACKSIVQTDYKHRHDQIANIIHQKLAHQYKFIDTIVPYYKYKPETVLENSITKLYFDRAILTDRTVHYNRPDITLINKITKTGYLIDIAVPNTHNLQTTIAEKLTKYIDLKDEIIRLWHLQSVTIVPIVLSTTGVIPMQLHQSLTTLNLPTNTYQLMQKAAILNTCRIVRKFLQIDSNNAQLHNYISSAINTSQSQLGPSSTNDHLA

SEQ ID NO: 16742 - protein, 1418 aa, Lymantria dispar
MEMNKKVYNLRSLPGGRQGTSRADAGCHSMGNIGGAGLSRRALTDKNTTAGRHELNRRTHNVETTADFLSDDTTSLFSSIPSSVPSHAISNLNDLTTSSPDSVVQDVNFDSHLAPTLGTKRRRWTPEMNKFILRTYLLLTILDTDIKNYLEPLYLKFIEKYPNMNVSRQRLGDQRRAIMRNKLLPQTIIDRIYNEVRLELSQLQFASYTQHTQENLITQRETQSQTSVIPKTQNTLTRMRWTNEHNEAIMRSYYRTTNLGTNETSYRKLMHADIIHSYPPLAHLSEQRVADQRRAIINNKYISVDRLNIIKQEIVAEFESTNNNSNNSEERNLYSNEFPNHQENDNQDIQMETTSRADVIQGISQSHQDIDSDRYKEIDETFQQALQYYKNIEPTCRTYIPKQKPSKNLSRIINYLNMVTLKENITEDSDFFSLQTAIYCAAWTAAKVNGAKLTLQIGTDQLHNRKQYKPKWQQRLELKLQDIRKKIGRLTQYIQGNRRKKIVKYMNNITEQFKAHTSHEEPNTQNVHILDTLKQRLSVITGRLKRYKSCTLRKQQNSQFILNEKLFYRNIKQNTMHLTNYSNDNDSTKISPEKLKDFWSRIWENPLQHNTQAEWIQTETTNNIETMSYECIPSEIFQEVLRHLHNWKSPGSDYIHGYWYKKFTSIHNYLYKYINIFIQDPNIVPSYLTMGKTYMIPKDSTDLCDPAKYRPITCLQTLYKIITSCITKMLYNHIETNKILAEQQKGCRKFSQGCKEQLIIDSIILKKVQKTKSDLFSMYIDYKKAYDSVPHSWLIKVLEIYKIHPTIISFLKTIMTKWSTVLNLSTTTKTIETDPIQIQRGIFQGDSLSPLWFCLALNPLSYMLNATPYGYPLRLIDHSNINLRQTTLNHLLYMDDIKLYAKSENQLYDLAYLVEQFSADIKMEFGIDKCKINSIKAGKNFQHKHVMTTGDEIEPLDEEGVYKYLGYEQSLLIHHKDIKLKLTRQFQHRLNTILKTQLDSRNTIKAINTFVIPLLTYSFGVINWNKTELKNVQRKINTTMAKFRKQHPRTCLQRITLSRKEGGRGLIDILNLHRKQIVTLRQYFFSKAHSSIVHKIIILNDRKLSPLNLQNTTEPINEEITDEKAKIAEWNKKSLHGRHRQDLCQINVDKNASNAWLKRGDLFPETEGFMIAIQDQVIETRNYRKHIIKNLNNDNCRKCNSSPETIQHITGACKSIVQTDYKHRHDQIANIIHQKLAHQYKFIHTIIPYYKYKPETVLENSITKLCFDRAILTDRTVHYNRPDITLINKITKTGYLIDIAVPNTHNLQTTIAEKLTKYIDLKDEIIRLWHLQSVTIVPIVLSTTGVIPIQLHQSLTTLNLPTNTYQLMQKAAILNTCRIVRKFLQIDSNNAQLHNYISSAINTSQSQLGPSSTNDHLA

SEQ ID NO: 16743 - protein, 1418 aa, Lymantria dispar
MEMNKKVYNLRSLPGGRQGTSRADAGCRSMGNIGGAGLSRRALTDKNTTAGRHELNRRTHNVETTADFLSDDTTSLFSSIPSSVPAHAISNLNDLTTSSPDSVVQDVNFDSHLAPTLGTKRRRWTPEMNKFILRTYLLLTILDTDIKNYLEPLYLKFIEKYPNMNVSRQRLGDQRRAIMRNKLLPQTIIDRIYNEVRLELSQLQFASYTQHTQENLITQRETQSQTSVIPKTQNTLTRMRWTNEHNEAIMRSYYRTTNLGTNETSYRKLMHADIIHSYPPLAHLSEQRVADQRRAIINNKYISVDRLNIIKQEIVAEFESTNNNSNNSEERNLYSNEFPNHQENDNQDIQMETTSRADVIQGISQSHQDIDSDRYKEIDETFQQALQYYKNIEPTCRTYIPKQKPSKNLSRIINYLNMVTLKENITEDSDFFSLQTAIYCAAWTAAKVNGAKLTLQIGTDQLHNRKQYKPKWQQRLELKLQDIRKKIGRLTQYIQGNRSKKIVKYMNNITEQFKAHTSHEEPNTQNVHILDTLKQRLSVITGRLKRYKSCTLRKQQNSQFILNEKLFYRNIKQNTMHLTNYSNDNDSTKISPEKLKDFWSRIWENPLQHNTQAEWIQTETTNNIETMSYECIPSEIFQEVLRHLHNWKSPGSDYIHGYWYKKFTSIHNYLYKYINIFIQDPNIVPSYLTMGKTYMVPKDSTDLCDPAKYRPITCLQTLYKIITSCITKMLYNHIETNKILAEQQKGCRKFSQGCKEQLIIDSIILKKVQKTKSDLFSMYIDYKKAYDSVPHSWLIKVLEIYKIHPTIISFLKTIMTKWSTVLNLSTTTKTIETDPIQIQRGIFQGDSLSPLWFCLALNPLSYMLNATPYGYPLRLIDHSNINLRQTTLNHLLYMDDIKLYAKSENQLYDLAYLVEQFSADIKMEFGIDKCKINSIKAGKNFQHKHVMTTGDEIEPLDEEGVYKYLGYEQSLLIHHKDIKLKLTRQFQHRLNTILKTQLDSRNTIKAINTFVIPLLTYSFGVINWNKTELKNLQRKINTTMTKFRKQHPRTCLQRITLPRKEGGRGLIDILNLHRKQIVTLRQYFFSKAHSSIVHKIIILNDRKLSPLNLQNTTEPINEEITDEKAKIAEWNKKSLHGRHRQDLCQINVDKNASNAWLKRGDLFPETEGFMIAIQDQVIETRNYRKHIIKNLNNDNCRKCNSSPETIQHITGACKSIVQTDYKHRHDQIANIIHQKLAHQYKFIHTIIPYYKYKPETVLENSITKLYFDRAILTDRTVHYNRPDITLINKITKTGYLIDIAVPNTHNLQTTIAEKLTKYIDLKDEIIRLWHLQSITIVPIVLSTTGVIPIQLHQSLTTLNLPTNTYQLMQKAAILNTCRIVRKFLQIDSNNAQLHNYISSAINTSQSQLGPSSTNDHLA

SEQ ID NO: 16744 - protein, 1418 aa, Lymantria dispar
MEMNKKVYNLRSLPGGRQGTSRADAGCHSMGNIGGAGLSRRALTDKNTTAGRHELNRRTHNVETTADFLSDDTTSLFSSIPSSVPSHAISNLNDLTTSSPDSVVQDVNFDSHLAPTLGTKRRRWTPEMNKFILRTYLLLTILDTDIKNYLEPLYLKFIEKYPNMNVSRQRLGDQRRAIMRNKLLPQTIIDRIYNEVRLELSQLQFASYTQHTQENLITQRETQSQTSVIPKTQNTLTRMRWTNEHNEAIMRSYYRTTNLGTNETSYRKLMHADIIHSYPPLAHLSEQRVADQRRAILNNKYISVDRLNIIKQEIVAEFESTNNNSNNSEERNLYSNEFPNHQENDNQDIQMETTSRADVIQGISQSHQDIDSDRYKEIDETSQQALQYYKNIEPTCRTYIPKQKPSKNLSRIINYLNMVTLKENITEDSDFFSLQTAIYCAAWTAAKVNGAKLTLQIGTDQLHNRKQYKPKWQQRLELKLQDIRKKIGRLTQYIQGNRSKKIVKYMNNITEQFKAHTAHEEPNTQNVHILDTLKQRLSVITGRLKRYKSCTLRKQQNSQFILNEKLFYRNIKQNTMHLTNYSNDNDSTKISPEKLKDFWSRIWENPLQHNTQAEWIQTETTNNIETMSYECIPSEIFQEVLRHLHNWKPPGSDYIHGYWYKKFTSIHNYLYKYINIFIQDPNIVPSYLTMGKTYMIPKDSTDLCDPAKYRPITCLQTLYKIITSCITKMLYNHIETNKILAEQQKGCRKFSQGCKEQLIIDSIILKKVQKTKSDLFSMYIDYKKAYDSVPHSWLIKVLEIYKIHPTIISFLKTIMTKWSTVLNLCTTTKTIETDPIHIQRGIFQGDSLSPLWFCLALNPLSYMLNATPYGYPLRLIDHSNIDLRQTTLNHLLYMDDIKLYAKSENQLYDLAYLVEQFSADIKMEFGIDKCKINSIKAGKNFQHKHVMTTGDEIEPLDEEGVYKYLGYEQSLLIHHKDIKLKLTRQFQHRLNTILKTQLDSRNTIKAINTFVIPLLTYSFGVINWNKTELKNLQRKINTTMTKFRKQHPRTCLQRITLPRKEGGRGLIDILNLHRKQIVTLRQYFFSKTHSSIVHKIIILNDRKLSPLNLQNITEPINEEITDEKTKIAEWNKKSLHGRHRQDLCQINVDKNASNAWLKRGDLFPETEGFMIAIQDQVIETRNYRKHIIKNLNNDNCRKCNSSPETIQHITGACKSIVQTDYKHRHDQIANIIHQKLAHQYKFIDTIIPYYKYKPETVLENSITKLYFNRAILTDRTVHYNRPDITLINKITKTGYLIDIAVPNTHNLQTTIAEKLTKYIDLKDEIIRLWHLQSVTIVPIVLTTTGVIPIQLHQSLTTLNLPTNTYQLMQKAAILNTCRIVRKFLQIDSNNAQLHNYISSAINTSQSQLGPSSTNDHLA

SEQ ID NO: 16745 - protein, 1418 aa, Lymantria dispar
MEMNKKVYNLRSLPGGHQGTSRADAGCHSMGNIGGAGLSRRALTDKNTTAGRHELNRRTHNVETTADFLSDDTTSLFSSIPSSVPSHAISNLKDLTTSSPDSVVQDVNFDSHLAPTLGTKRRRWTPEMNKFILRTYLLLTILDTDIKNYLEPLYLKFIEKYPNMNVSRQRLGDQRRAIMRNKLLPQTIIDRIYNEVRLELSQLQFASYTQHTQENLITQRETKSQTSVIPKTQNTLTRMRWTNEHNEAIMRSYYRTTNLGTNETSYRKLMHADIIHSYPPLAHLSEQRVADQRRAIINNKYISVDRLNIIKQEIVAEFESTNNNSNNSEERNLYSNEFPNHQENDNQDIQMETTSRADVIQGISQSHQDIDSDRYKEIDETFQQALQYYKNIEPTCRTYIPKQKPSKNLSRIINYLNMVTLKENITEDSDFFSLQTAIYCAAWTAAKVNGAKLTLQIGTDQLHNRKQYKPKWQQRLELKLQDIRKKIGRLTQYIQGNRSKKIVKYMNNITEQFKAHTSHEEPNTQNVHILDTLKQRLSVITGRLKRYKSCTLRKQQNSQFILNEKLFYRNIKQNTMHLTNYSNDNDSTKISPEKLKDFWSRIWENPLQHNTQAEWIQTETTNNIETMSYECIPSEIFQEVLRHLHNWKSPGSDYIHGYWYKKFTSIHNYLYKYINIFIQDPNIVPSYLTMGKTYMIPKDSTDLCDPAKYRPITCLQTLYKIITSCITKMLYNHIETNKILAEQQKGCRKFSQGCKEQLIIDSIILKKVQKTKSDLFSMYIDYKKAYDSVPHSWLIKVLEIYKIHPTIISFLKTIMTKWSTVLNLSTTTKTIETDPIQIQRGIFQGDSLSPLWFCLALNPLSYMLNATPYGYPLRLIDHSNINLRQTTLNHLLYMDDIKLYAKSENQLYDLAYLVEQFSADIKMEFGIDKCKINSIKAGKNFQHKHVMTTGDEIEPLDEEGVYKYLGYEQSLLIHHKDIKLKLTRQFQHRLNTILKTQLDSRNTIKAINTFVIPLLTYSFGVINWNKTELKNLQRKINTTMTKFRKQHPRTCLQRITLPRKEGGRGLIDILNLHRKQIVTLRQYFFSKAHSSIVHKIIILNDRKLSPLNLQNTTEPINEEITDEKAKIAEWNKKSLHGRHRQDLCQINVDKNASNAWLKRGDLFPETEGFMIAIQDQVIETRNYRKHIIKNLNNDNCRKCNSSPETIQHITGACKSIVQTDYKHRHDQIANIIHQKLAHQYKFIHTIIPYYKYKPETVLENSITKLYFDRAILTDRTVHYNRPDITLINKITKTGYLIDIAVPNTHNLQTTIAEKLTKYIDLKDEIIRLWHLQSVTIVPIVLSTTGVIPIQLHQSLTTLNLPTNTYQLMQKAAILNTCRIVRKFLQIDSNNAQLHNYISSAINTSQSQLGPSSTNDHLA

SEQ ID NO: 16746 - protein, 1418 aa, Lymantria dispar
MEMNKKVYNLRSLPGGRQGTSRADAGCHSMGNIGGAGLSRRALTDKNTTAGRHELNRRTHNVETTADFLSDDTTSLFSSIPSSVPSHAISNLNDLTTSSPDSVVQDVNFDSHLAPTLGTKRRRWTPEMNKFILRTYLLLTILDTDIKNYLEPLYLKFIEKYPNMNVSRQRLGDQRRAIMRNKLLPQTIIDRIYNEVRLELSQLQFASYTQHTQENLITQRETQSQTSVIPKTQNTLTRMRWTNEHNEAIMRSYYRTTNLGTNETSYRKLMHADIIHSYPPLAHLSEQRVADQRRAIINNKYISVDRLNIIKQEIVAEFESTNNNSNNSEERNLYSNEFPNHQENDNQDIQMETTSRADVIQGISQSHQDIDSDRYKEIDETFQQALQYYKNIEPTCRTYIPKQKPSKNLSRIINYLNMVTLKENITEDSDFFSLQTAIYCAAWTAAKVNGAKLTLQIGTDQLHNRKQYKPKWQQRLELKLQDIRKKIGRLTQYIQGNRSKKIVKYMNNITEQFKAHTSHEEPNTQNVHILDTLKQRLSVITGRLKRYKSCTLRKQQNSQFILNEKLFYRNIKQNTMHLTNYSNDNDSTKISPEKLKDFWSRIWENPLQHNTQAEWIQTETTNNIETMSYECIPSEIFQEVLRHLHNWKSPGSDYIHGYWYKKFTSIHNYLYKYINIFIQDPNIVPSYLTMGKTYMIPKDSTDLCDPAKYRPITCLQTLYKIITSCITKMLYNHIETNKILAEQQKGCRKFSQGCKEQLIIDSIILKKVQKTKSDLFSMYIDYKKAYDSVPHSWLIKVLEIYKIHPTIISFLKTIMTKWSTVLNLSTTTKTIETDPIQIQRGIFQGDSLSPLWFCLALNPLSYMLNATPYGYPLRLIDHSNINLRQTTLNHLLYMDDIKLYAKSENQLYDLAYLVEQFSADIKMEFGIDKCKINSIKAGKNFQHKHVMTTGDEIEPLDEEGVYKYLGYEQSLLIHHKDIKLKLTRQFQHRLNTILKTQLDSRNTIKAINTFVIPLLTYSFGVINWNKTELKNLQRKINTTMTKFRKQHPRTCLQRITLPRKEGGRGLIDILNLHRKQIVTLRQYFFSKAHSSIVHKIIILNDRKLSPLNLQNTTEPINEEITDEKAKIAEWNKKSLHGRHRQDLCQINVDKNASNAWLKRGDLFPETEGFMIAIQDQVIETRNYRKHIIKNLNNDNCRKCNSSPETIQHITGACKSIVQTDYKHRHDQIANIIHQKLAHQYKFIHTIIPYYKYKPETVLENSITKLYFDRAILTDRTVHYNRPDITLINKITKTGYLIDIAVPNTHNLQTTIAEKLTKYIDLKDEIIRLWHLQSVTIVPIVLSTTGVIPIQLHQSLTTLNLPTNTYQLMQKAAILNTCRIVRKFLQIDSNNAQLHNYISSAINTSQSQLGPSSTNDHLA

SEQ ID NO: 16747 - protein, 1389 aa, Lymantria dispar
MGNIGGAGLSRRALTDKNTTAGRHELNRRTHNVETTADFLSDDTTSLFSSIPSSVPSHAISNLNDLTTSSPDSVVQDVNFDSHLAPTLGTKRRRWTPEMNKFILRTYLLLTILDTDIKNYLEPLYLKFIEKYPNMNVSRQRLGDQRRAIMRNKLLPQTIIDRIYNEVRLELSQLQFASYTQHTQENLITQRETQSQTSVIPKTQNTLTRMRWTNEHNEAIMRSYYRTTNLGTNETSYRKLMHADIIHSYPPLAHLSEQRVADQRRAIINNKYISVDRLNIIKQEIVAEFESTNNNSNNSEERNLYSNEFPNHQENDNQDIQMETTSRADVIQGISQSHQDIDSDRYKEIDETFQQALLYYKNIEPTCRTYIPKQKPSKNLSRIINYLNMVTLKENITEDSDFFSLQTAIYCAAWTAAKVNGAKLTLQIGTDQLHNRKQYKPKWQQRLELKLQDIRKKIGRLTQYIQGNRSKKIVKYMNNITEQFKAHTSHEEPNTQNVHILDTLKQRLSVITGRLKRYKSCTLRKQQNSQFILNEKLFYRNIKQNTMHLTNYSNDNDSTKISPEKLKDFWSRIWENPLQHNTQAEWIQTETTNNIETMSYECIPSEIFQEVLRHLHNWKSPGSDYIHGYWYKKFTSIHNYLYKYINIFIQDPNIVPSYLTMGKTYMIPKDSTDLCDPAKYRPITCLQTLYKIITSCITKMLYNHIETNKILAEQQKGCRKFSQGCKEQLIIDSIILKKVQKTKSDLFSMYIDYKKAYDSVPHSWLIKVLEIYKIHPTIISFLKTIMTKWSTVLNLSTTTKTIETDPIQIQRGIFQGDSLSPLWFCLALNPLSYMLNATPYGYPLRLIDHSNINLRQTTLNHLLYMDDIKLYAKSENQLYDLAYLVEQFSADIKMEFGIDKCKINSIKAGKNFQHKHVMTTGDEIEPLDEEGVYKYLGYEQSLLIHHKDIKLKLTRQFQHRLNTILKTQLDSRNTIKAINTFVIPLLTYSFGVINWNKTELKNLQRKINTTMTKFRKQHPRTCLQRITLPRKEGGRGLIDILNLHRKQIVTLRQYFFSKAHSSIVHKIIILNDRKLSPLNLQNTTEPINEEITDEKAKIAEWNKKSLHGRHRQDLCQINVDKNASNAWLKRGDLFPETEGFMIAIQDQVIETRNYRKHIIKNLNNDNCRKCNSSPETIQHITGACKSIVQTDYKHRHDQIANIIHQKLAHQYKFIHTIIPYYKYKPETVLENSITKLYFDRAILTDRTVHYNRPDITLINKITKTGYLIDIAVPNTHNLQTTIAEKLTKYIDLKDEIIRLWHLQSVTIVPIVLSTTGVIPIQLHQSLTTLNLPTNTYQLMQKAAILNTCRIVRKFLQIDSNNAQLHNYISSAINTSQSQLGPSSTNDHLA

SEQ ID NO: 16748 - protein, 1418 aa, Lymantria dispar
MEMNKKVYNLRSLPGGRQGTSRADAGCHSMGNIGGAGLSRRALTDKNTTAGRHELNRRTHNVETTADFLSDDTTSLFSSIPSSVPSHAISNLNDLTTSSPDSVVQDVNFDSHLAPTLGTKRRRWTPEMNKFILRTYLLLTILDTDIKNYLEPLYLKFIEKYPNMNVSRQRLGDQRRAIMRNKLLPQTIIDRIYNEVRLELSQLQFASYTQHTQENLITQRETQSQTSVIPKTQNTLTRMRWTNEHNEAIMRSYYRTTNLGTNETSYRKLMHADIIHSYPPLAHLSEQRVADQRRAIINNKYISVDRLNIIKQEIVAEFESTNNNSNNSEERNLYSNEFPNHQENDNQDIQMETTSRADVIQGISQSHQDIDSDRYKEIDETFQQALQYYKNIEPTCRTYIPKQKPSKNLSRIINYLNMVTLKENITEDSDFFSLQTAIYCAAWTAAKVNGAKLTLQIGTDQLHNRKQYKPKWQQRLELKLQDIRKKIGRLTQYIQGNRSKKIVKYMNNITEQFKAHTAHEEPNTQNVHILDTLKQRLSVITGRLKRYKSCTLRKQQNSQFILNEKLFYRNIKQNTMHLTNYSNDNDSTKISPEKLKDFWSRIWENPLQHNTQAEWIQTETTNNIETMSYECIPSEIFQEVLRHLHNWKSPGSDYIHGYWYKKFTSIHNYLYKYINIFIQDPNIVPSYLTMGKTYMIPKDSTDLCDPAKYRPITCLQTLYKIITSCITKMLYNHIETNKILAEQQKGCRKFSQGCKEQLIIDSIILKKVQKTKSDLFSMYIDYKKAYDSVPHSWLIKVLEIYKIHPTIISFLKTIMTKWSTVLNLSTTTKTIETDPIQIQRGIFQGDSLSPLWFCLALNPLSYMLNATPYGYPLRLIDHSNIDLRQTTLNHLLYMDDIKLYAKSENQLYDLAYLVEQFSADIKMEFGIDKCKINSIKAGKNFQHKHVMTTGDEIEPLDEEGVYKYLGYEQSLLIHHKDIKLKLTRQFQHRLNTILKTQLDSRNTIKAINTFVIPLLTYSFGVINWNKTELKNLQRKINTTMTKFRKQHPRTCLQRITLPRKEGGRGLIDILNLHRKQIVTLRQYFFSKAHSSIVHKIIILNDRKLSPLNLQNTTEPINEEITDEKAKIAEWNKKSLHGRHRQDLCQINVDKNASNAWLKRGDLFPETEGFMIAIQDQVIETRNYRKHIIKNLNNDNCRKCNSSPETIQHITGACKSIVQTDYKHRHDQIANIIHQKLAHQYKFIDTIIPYYKYKPETVLENSITKLYFDRAILTDRTVHYNRPDITLINKITKTGYLIDIAVPNTHNLQTTIAEKLTKYIDLKDEIIRLWHLQSVTIVPIVLSTTGVIPIQLHQSLTTLNLPTNTYQLMQKAAILNTCRIVRKFLQIDSNNAQLHNYISSAINTSQSQLGPSSTNDHLA

SEQ ID NO: 16749 - protein, 1418 aa, Lymantria dispar
MEMNKKVYNLRSLPGGRQGTSRADAGCHSMGNIGGAGLSRRALTDKNTTAGRHELNRRTHNVETTADFLSDDTTSLFSSIPSSVPSHAISNLNDLTTSSPDSVVQDVNFDSHLAPTLGTKRRRWTPEMNKFILRTYLLLTILDTDIKNYLEPLYLKFIEKYPNMNVSRQRLGDQRRAIMRNKLLPQTIIDRIYNEVRLELSQLQFTSYTQHTQENLITQRETQSQTSVIPKTQNTLTRMRWTNEHNEAIMRSYYRTTNLGTNETSYRKLMHADIIHSYPPLAHLSEQRVADQRRAIINNKYISVDRLNIIKQEIVAEFESTNNNSNNSEERNLYSNEFPNHQENDNQDIQMETTSRADVIQGISQSHQDIDSDRYKEIDETFQQALQYYKNIEPTCRTYIPKQKPSKNLSRIINYLNMVTLKENITEDSDFFSLQTAIYCAAWTAAKVNGAKLTLQIGTDQLHNRKQYKPKWQQRLELKLQDIRKKIGRLTQYIQGNRSKKIAKYMNNITEQFKAHTSHEEPNTQNVHILDTLKQRLSVITGRLKRYKSCTLRKQQNSQFILNEKLFYRNIKQNTMHLTNYSNDNDSTKISPEKLKDFWSRIWANPLQHNTQAEWIQTETTNNIETMSYECIPSEIFQEVLRHLHNWKSPGSDYIHGYWYKKFTSIHNYLYKYINIFIQDPNIVPSYLTMGKTYMIPKDSTDLCDPAKYRPITCLQTLYKIITSCITKMLYNHIETNKILAEQQKGCRKFSQGCKEQLIIDSIILKKVQKTKSDLFSMYIDYKKAYDSVPHSWLIKVLEIYKIHPTIISFLKTIMTKWSTVLNLSTTTKTIETDPIQIQRGIFQGDSLSPLWFCLALNPLSYMLNATPYGYPLRLIDHSNINLRQTTLNHLLYMDDIKLYAKSENQLYDLAYLVEQFSADIKMEFGIDKCKINSIKAGKNFQHKHVMTTGDEIEPLDEEGVYKYLGYEQSLLIHHKDIKLKLTRQFQHRLNTILKTQLDSRNTIKAINTFVIPLLTYSFGVINWNKTELKNLQRKINTTMTKFRKQHPRTCLQRITLPRKEGGRGLIDILNLHRKQIVTLRQYFFSKAHSSIVHKIIILNDRKLSPLNLQNTTEPINEEITDEKAKIAEWNKKSLHGRHRQDLCQINVDKNASNAWLKRGDLFPETEGFMIAIQDQVIETRNYRKHIIKNLNNDNCRKCNSSPETIQHITGACKSIVQTDYKHRHDQIANIIHQKLAHQYKFIHTIIPYYKYKPETVLENSTTKLYFDRAILTDRTVHYNRPDITLINKITKTGYLIDIAVPNTHNLQTTIAEKLTKYIDLKDEIIRLWHLQSVTIVPIVLSTTGVIPIQLHQSLTTLNLPTNTYQLMQKAAILNTCRIVRKFLQIDSNNAQLHNYISSAINTSQSQLGPSSTNDHLA

SEQ ID NO: 16750 - protein, 1418 aa, Lymantria dispar
MEMNKKVYNLRSLPGGRQGTSRADAGCHSMGNIGSAGLSRRALTDKNTTAGRHELNRRTHNVETTADFLSDDTTSLFSSIPSSVPSHAISNLNDLTTSSPDSVVQDVNFDSHLAPTLGTKRRRWTPEMNKFILRTYLLLTILDTDIKNYLEPLYLKFIEKYPNMNVIRQRLGDQRRAIMRNKLLPQTIIDRIYNEVRLELSQLQFASYTQHTQENLITQRETQSQTSVIPKTQNTLTRMRWTNEHNEAIMRSYYRTTNLGTNETSYRKLMHADIIHSYPPLAHLSEQRIADQRRAIINNKYISVDRLNIIKQEIVAEFESTNNNSNNSEERNLYSNEFPNHQENDNQDIQMETTSRADVIQGISQSHQDIDSDRYKEIDETFQQALQYYKNIEPTCRTYIPKQKPSKNLSRIINYLNMVTLKENITEDSDFFSLQTAIYCAAWTAAKVNGAKLTLQIGTDQLHNRKQYKPKWQQRLELKLQDIRKKIGRLTQFIQGNRSKKIVKYMNNITEQFKAHTSHEEPNTQNVHILDTLKQRLSVITGRLKRYKSCTLRKQQNSPFILNEKLFYRNIKQNTMHLTNYSNDNDSTKISPEKLKDFWSRIWENPLQHNTQAEWIQTETTNNIETMSYECLPSEIFQEVLRHLHNWKSPGSDYIHGYWYKKFTSIHNYLYKYINIFIQDPNIVPSYLTMGKTYMIPKDSTDLCDPAKYRPITCLQTLYKIITSCITKMLYNHKETNKILAEQQKGCRKFSQGCKEQLIIDSIILKKVQKTKSDLFSMYIDYKKAYDSVPHSWLIKVLEIYKIHPTIISFLKTIMTKWSTVLNLSTTTKTIETDPIQIQRGIFQGDSLSPLWFCLALNPLSYMLNATPYGYPLRLIDHSNINLRQTTLNHLLYMDDIKLYAKSENLLYDLAYLVEQFSADIKMKFGIDKCKINSIKAVKNFQHKHVMTTGDEIEPLDEEGVYKYLGYEQSLLIHHKDIKLKLTRQFQHRLNTILKTQLDSRNTIKAINTFVIPLLTYSFGVINWNKTELKNLQRKINTTMTKFRKQHPRTCLQRITLPRKEGGRGLIDILNLHRKQIVTLRQYFFSKAHSSIVHKIIILNDRKLSPLNLQNTTEPINEEITDEKAKIAEWNKKSLHGRHRQDLCQINVDKNASNAWLKRGDLFPETEGFMIAIQDQVIETRNYRKHIIKNLNNDNCRKCNSSPETIQHITGACKSIVQTDYKHRYDQIANIIHQKLAHQYKFIDTIIPYYKYKPETVLENSITKLYFDRAILTDRTVHYNRPDIILINKITKTGYLIDIAVPNTHNLQTTIAEKLTKYIDLKDEIIRLWHLQSVTIVPIVLSTTGVIPIQLHQSLTTLNLPTNTYQLMQKAAILNTCRIVRKFLQIDSNNAQLHNYISSAINTSQSQLGPSSTNDHLA

SEQ ID NO: 16751 - protein, 1291 aa, Lymantria dispar
MNKFILRTYLLLTILDTDIKNYLEPLYLKFIEKYPNMNVSRQRLGDQRRAIMRNKLLPQTIIDRIYNEVRLELSQLQFASYTQHTQENLITQRETQSQTSVIPKTQNTLTRMRWTNEHNEAIMRSYYRTTNLGTNETSYRKLMHADIIHSYPPLAHLSEQRVADQRRAIINNKYISVDRLNIIKQEIVAEFESTNNNSNNSEERNLYSNEFPNHQENDNQDIQMETTSRADVIQGISQSHQDIDSDRYKEIDETFQQALQYYKNIEPTCRTYIPKQKPSKNLSRIINYLNMVTLKENITEDSDFFSLQTAIYCAAWTAAKVNGAKLTLQIGTDQLHNRKQYKPKWQQRLELKLQDIRKKIGRLTQYIQGNRSKKIVKYMNNITEQFKAHTAHEEPNTQNVHILDTLKQRLSVITGRLKRYKSCTLRKQQNSQFILNEKLFYRNIKQNTMHLTNYSNDNDSTKISPEKLKDFWSRIWENPLQHNTQAEWIQTETTNNIETMSYECIPSEIFQEVLRHLHNWKSPGSDYIHGYWYKKFTSIHNYLYKYINIFIQDPNIVPSYLTMGKTYMIPKDSTDLCDPAKYRPITCLQTLYKIITSCITKMLYNHIETNKILAEQQKGCRKFSQGCKEQLIIDSIILKKVQKTKSDLFSMYIDYKKAYDSVPHSWLIKVLEIYKIHPTIISFLKTIMTKWSTVLNLSTTTKTIETDPIQIQRGIFQGDSLSPLWFCLALNPLSYMLNATPYGYPLRLIDHSNIDLRQTTLNHLLYMDDIKLYAKSENQLYDLAYLVEQFSADIKMEFGIDKCKINSIKAGKNFQHKHVMTTGDEIEPLDEEGVYKYLGYEQSLLIHHKDIKLKLTRQFQHRLNTILKTQLDSRNTIKAINTFVIPLLTYSFGVINWNKTELKNLQRKINTTMTKFRKQHPRTCLQRITLPRKEGGRGLIDILNLHRKQIVTLRQYFFSKAHSSIVHKIIILNDRKLSPLNLQNTTEPINEEITDEKAKIAEWNKKSLHGRHRQDLCQINVDKNASNAWLKRGDLFPETEGFMIAIQDQVIETRNYRKHIIKNLNNDNCRKCNSSPETIQHITGACKSIVQTDYKHRHDQIANIIHQKLAHQYKFIDTIIPYYKYKPETVLENSITKLYFDRAILTDRTVHYNRPDITLINKITKTGYLIDIAVPNTHNLQTTIAEKLTKYIDLKDEIIRLWHLQSVTIVPIVLSTTGVIPIQLHQSLTTLNLPTNTYQLMQKAAILNTCRIVRKFLQIDSNNAQLHNYISSAINTSQSQLGPSSTNDHLA

SEQ ID NO: 16752 - protein, 947 aa, Lymantria dispar
MAAKTRIKITRYTKKIGRLTQYIQGNRSKKIVKYMNNITEQFKAHTSHEEPNTQNVHILDTLKQRLSVITGRLKRYKSCTLRKQQNSQFILNEKLFYRNIKQNTMHLTNYSNDNDSTKISPEKLKDFWSRIWENPLQHNTQAEWIQTETTNNIETMSYECIPSEIFQEVLRHLHNWKSPGSDYIHGYWYKKFTSIHNYLYKYINIFIQDPNIVPSYLTMGKTYMIPKDSTDLCDPAKYRPITCLQTLYKIITSCITKMLYNHIETNKILAEQQKGCRKFSQGCKEQLIIDSIILKKVQKTKSDLFSMYIDYKKAYDSVPHSWLIKVLEIYKIHPTIISFLKTIMTKWSTVLNLSTTTKTIETDPIQIQRGIFQGDSLSPLWFCLALNPLSYMLNATPYGYPLRLIDHSNINLRQTTLNHLLYMDDIKLYAKSENQLYDLAYLVEQFSADIKMEFGIDKCKINSIKAGKNFQHKHVMTTGDEIEPLDEEGVYKYLGYEQSLLIHHKDIKLKLTRQFQHRLNTILKTQLDSRNTIKAINTFVIPLLTYSFGVINWNKTELKNLQRKINTTMTKFRKQHPRTCLQRITLPRKEGGRGLIDILNLHRKQIVTLRQYFFSKAHSSIVHKIIILNDRKLSPLNLQNTTEPINEEITDEKAKIAEWNKKSLHGRHRQDLCQINVDKNASNAWLKRGDLFPETEGFMIAIQDQVIQTRNYRKHIIKNLNNDNCRKCNSSPETIQHITGACKSIVQTDYKHRHDQIANIIHQKLAHQYKFIHTIIPYYKYKPETVLENSITKLYFDRAILTDRTVHYNRPDITLINKITKTGYLIDIAVPNTHNLQTTIAEKRTKYIDLKDEIIRLWHLQSVTIVPIVLSTTGVIPIQLHQSLTTLNLPTNTYQLMQKAAILNTCRIVRQFLQIDSNNAQLHNYISSAINTSQSQLGPSSTNDHLA

SEQ ID NO: 16753 - protein, 783 aa, Lymantria monacha
MSYESIPSGTFQEVLRHLHNWKSPGSDYIHGYWYKKFTATHTYLYKHINIFIQDPTTIPSYLTIGKTYLIPKDSTDLSNPAKYRPITCLQTLYKIITSCISEMLYHHIDTNKILAEQQKGCRKFSQGCKEQLIIDSFILREVQKTKSDLFSMYIDYKKAYDSVPHSWLIRVLEIYKIHPTIISFLKVIMTKWSTVLTLSNSKQTIETDPIQIQRGIFQGDSLSPLWFCLALNPLSHILNDTMYGYPLKPSDHANIDLPETMLSHLLYMDDIKLYAKTENQLHDLAHLVEQFSTDIKMEFGIDKCKINSIKTGRNFQHKYTMTTGDEIEPLDEQGAYKYLGYNQSLLIHHKDTKLKLTQQFQHRLNTILKTQLDSKNTIKAINTFVIPLLTYSFGIINWNKTELKNLQRKINTTMTKFRKHHPRTCLQRITLPRKEGGRGLIDILNLHKKLIISLRQYFYSKSQSSIVHKIITQNDRKLTALNLQNTTEQINVELIDERAKIAEWHKKSLHGRHRQDLCQSNVDKDASNAWLKRGDLFPETEAFMIAIQDQVIETRNYRKHIIKNLHNDNCRKCNSSPETIQHLTGACKSIVQTDYKHRHDQIANIIHQKLAHRYKFVDAVIPYYKYKPQTVLENSIIKLYYDRAILTDRTIHYNRPDITLINKITKTGYLIDIAVPNTHNLQTTIAEKLTKYTELKDEITRLWHLQNVTIVPIVLSTTGVIPIQLHQSLTTLNLPANTYQLMQKAAILNTCRIVRKFLQVDPNNIHLHNHTSSTINVSTALNP

SEQ ID NO: 16754 - protein, 1405 aa, Lymantria monacha
MEMNKKVYNLRSLPGGRRGTSGADAGCHSMRTIGDEGLSRRAPIDKNTTAGRHELNRRTHDVETTADSLSDDTNSLFSSIPSTPASHAISNSTDLTSSLPDSVVQDANFDNELVPTSGTKRRRWTIDMNEFILRTYLLLTAVDTDTRNYLEPLHLKFLEKYPNMNVSRQRLGDQRRAIIRNKLLPQITIDRIYYEVRQELNQLQSTCKTQETQQNLITQEETQSQTQVLQKNITQTRMRWTNDHNEAIMRSYYRTTKLGTNETSYRKLMHSDLIHSYPPLAHLSEQRIADQRRAIINNKYISTDRLNIIKQEILTESISVNNSFNNIDLYSNNSPNNQENGNRDIQSEGISSTNVILEISQPYENINSEKYPEIDETFQQALQFYKDTDPTHRTYIPKQKPSKNLSRIISYLNSVTLKENITDGSDFYSLQTAIYCAAWTAAKVNGAKLRLQVGTNTSYQKKEYKPKWQQRLELKLQDIRKKIGRLTQYIQGNRSKKIVKHSNIIIKQYQTHTTHEEPNTQTVHVLDTLKQRLSVITGRLKRYISCTKRKQQNAQFTLNEKVFYRTIKQNTTNLTNYSNDDADIKISSEKLKNFWTSIWQNPVQHNFQAERIQSETTNNIETMSYESIPSGTFQEVLCHLHNWKSPGSDYIHGYWYKKFTATHTYLYKHINIFIQDPTTIPSYLTIGKTYLIPKDSTDLSNPAKYRPITCLQTLYKIITSCISEMLYHHIDTNKILAEQQKGCRKFSQGCKEQLIIDSFILREVQKTKSDLFSMYIDYKKAYDSVPHSWLIRVLEIYKIHPTIISFLKVIMTKWSTVLTLSNSKQTIETDPIQIQRGIFQGDSLSPLWFCLALNPLSHILNDTMYGYPLKPSDHANIDLPETMLSHLLYMDDIKLYAKTENQLHDLAHLVEQFSTDIKMEFGIDKCKINSIKAGRYFQHKYTMTTGDEIEPLDEQGAYKYLGYNQSLLIHHKDTKLKLTQQFQHRLNTILKTQLDSKNTIKAINTFVIPLLTYSFGIINWNKTELKNLQRKINTTMTKFRKHHPRTCLQRLTLPRKEGGRGLIDILNLHKKQIISVRQYFYSKSQSSIAHKIITQNDRKLTALNLQNTTEQINVELIDERAKIAEWHKKSLHGRHRQDLCQSNVDKDASNAWLKRGDLFPETEAFMIAIQDQVIETRNYRKHIIKNLHNDNCRKCNSSPETIQHLTGACKSIVQTDYKHRHDQIANIIHQKLAHRYKFVDAVIPYYKYKPQTVLENSIIKLYFDRAILTDRTIHYNRPDITLINKITKTGYLIDIAVPNTHNLQTTIAEKLTKYTELKDEITRLWHLQNVTIVPIVLSTTGVIPIQLHQSLTTLNLPANTYQLMQKAAILNTCRIVRKFLQVDPNNIYLHNHTSSTINVSTALNP

SEQ ID NO: 16755 - protein, 1370 aa, Lymantria monacha
MRGLSRRAPIDKNTTAGRHELNRRTHDVETTADSLSDDTNSLFSSIPSTPASHAISNSTDLTSSLPDSVVQDANFDNELAPISGTKRRRWTIDMNEFILRTYLLLTAVDTDTRNYLEPLHLKFLEKYPNMNVSRQRLGDQRRAIIRNKLLPQITIDRIYYEVRQELNQLQSTCKTQETQQNLITQEETQSQTQVLQKNITQTRMRWTNDHNEAIMRSYYRTTKLGTNETSYRKLMHSDLIHSYPPLAHLSEQRIADQRRAIINNKYISTDRLNIIKQEILTESISVNNSFNNIDLYSNNSPNNQENGNRDIQSEGISSTNVILEISQPYENINSEKYPEIDETFQQALQFYKDTDPTHRTYIPKQKPSKNLSRIISYLNSVTLKENITDGSDFYSLQTAIYCAAWTAAKVNGAKLRLQVGTNTYQKKEYKPKWQQRLELKLQDIRKKIGRLTQYIQGNRSKKIVKHSNIIIKQYQTHTTHEEPNTQTVHVLDTLKQRLSVITGRLKRYISCTQRKQQNAQFTLNEKVFYRTIKQNTTNLTNYSNDDADIKISSEKLKNFWTSIWQNPVQHNFQAERIQSETTNNIETMSYESIPSGTFQEVLRHLHNWKSPGSDYIHGYWYKKFTATHTYLYKHINIFIQDPTTIPSYLTIGKTYLIPKDSTDLSNPAKYRPITCLQTLYKIITSCISEMLYHHIDTNKILAEQQKGCRKFSQGCKEQLIIDSFILREVEKTKSDLFSMYIDYKKAYDSVPHSWLIRVLEIYKIHPTIISFLKVIMTKWSTVLTLSNSKQTIETDPIQIQRGIFQGDSLSPLWFCLALNPLSHILNDTMYGYPLKPSDHANIDLPETMLSHLLYMDDIKLYAKTENQLHDLAHLVEQFSTDIKMEFGIDKCKINSIKAGRNFQHKYTMTTGDEIEPLDEQGAYKYLGYNQSLLIHHKDTKLKLTQQFQHRLNTILKTQLDSKNTIKAINTFVIPLLTYSFGIINWNKTELKNLQRKINTTMTKFRKHHPRTCLQRITLPRKEGGRGLIDILNLHKKLIISLRQYFYSKSQSSIAHKIITQNDRKLTALNLQNTTEQINVELIDERAKIAEWHKKSLHGRHRQDLCQSNVDKDASNAWLKRGDLFPETEAFMIAIQDQVIETRNYRKHIIKNLHNDNCRKCNSSPETIQHLTGACKSIVQTDYKHRHDQIANIIHQKLAHRYKFVDAVIPYYKYKPQTVLENSIIKLYFDRAILTDRTIHYNRPDITLINKITKTGYLIDIALPNTHNLQTTIAEKLTKYTELKDEITRLWHLQNVTIVPIVLSTTGVIPIQLHQSLTTLNLPANTYQLMQKAAILNTCRIVRKFLQVDPNNIHLHNHTSSTINVSTALNP

SEQ ID NO: 16756 - protein, 1405 aa, Lymantria monacha
MEMNKKVYNLRSLPGGRRGTSGADAGCHSMRTIGDEGLSRRAPIDKNTTAGRHELNRRTHDVETTADSLSDDTNSLFSSIPSTPASHAISNSTDLTTSLPDSVVQDANFDNELAPTSGTKRRRWTIDMNEFILRTYLLLTAVDTDTRNYLEPLHLKFLEQYPSMNISRQRLGDQRRAIIRNKLLPQTTIDRIYYEVRQELNQLQSTCKTQETQHNLITQEETQSQTQVLQKNITQTRMRWTNDHNEAIMRSYYRTTKLGTNETSYRKLMHSDLIHSYPPLAHLSEQRIADQRRAIINNKYISTDRLNIIKQEILTESISVNNSFNNIDLYSNNSPNNQENVNRDIQSEGISSTNVILEILQPYENINSEKYPEIDETFQQALQFYKDTDPTHRTYIPKQKPSKNLSRIISYLNSVTLKENITDGSDFYSLQTAIYCAAWTAAKVNGAKLRLQVGTNTSYQKKEYKPKWQQRLELKLQDIRKKIGRLTQYIQGNRSKKIVKHSNIIIKQYQTHTTHEEPNTQTVHVLDTLKQRLSVITGRLKRYISCTQRKQQNAQFTLNEKLFYRTIKQNTTNLTNYSNDDADIKISSEKLKNFWTSIWQNPVQHNFQAERIQSETTNNIETMSYESIPSGTFQEVLRHLHNWKSPGSDYIHGYWYKKFTATHTYLYKHINTFIQDPTTIPSYLTIGKTYLIPKDSTDLSNPAKYRPITCLQTLYKIITSCISEMLYHHIDTNKILAEQQKGCRKFSQGCKEQLIIDSFILREVQKTKSDLFSMYIDYKKAYDSVPHSWLIRVLEIYKIHPTIISFLKVIMTKWSTVLTVSNSKQTIETDPIQIQRGIFQGDSLSPLWFCLALNPLSHILNDTMYGYPLKPTDHANIDLPETMLSHLLYMDDIKLYAKTENQLHDLAHLVEQFSTDIKMEFGIDKCKINSIKAGRNFQHKYTMTTGNEIEPLDEQGAYKYLGYNQSLLIHHKDTKLKLTQQFQHRLNTILKTQLDSKNTIKAINTFVIPLLTYSFGIINWNKTELKNLQRKINTTMTKFRKHHPRTCLQRITLPRKEGGRGLIDILNLHKKQIISLRQYFYSKSQSSIAHKIITQNDRKLTALNLQNTTEQINVELIDERAKIAEWHKKSLHGRHRQDLCQSNVDKDASNAWLKRGDLFPETEAFMIAIQDQVIETRNYRKHIIKNLHNDNCRKCNSSPETIQHLTGACKSIVQTDYKHRHDQIANIIHQKLAHRYKFVDAVIPYYKYKPQTVLENSIIKLYFDRAILTDRTIHYNRPDITLINKITKTGYLIDIAVPNTHNLQTTIAEKLTKYTELKDEITRLWHLQNVTIVPIVLSTTGVIPIQLHQSLTTLNLPANTYQLMQKAAILNTCRIVRKFLQVDPNNIHLHNHTSSTINVSTALNP

SEQ ID NO: 16757 - protein, 1418 aa, Lymantria dispar
MEMNKKVYNLRSLPGGRQGTSRADAGCHSMGNIGGAGLSRRALTDKNTTAGRHELNRRTHNVETTADFLSDDTTSLFSSIPSSVPSHAISNLNDLTTSSPDSVVQDVNFDSHLAPTLGTKRRRWTPEMNKFILRTYLLLTILDTDIKNYLEPLYLKFIEKYPNMNVSRQRLGDQRRAIMRNKLLPQTIIDRIYNEVRLELSQLQFASYTQHTQENLITQRETQSQTSVIPKTQNTLTRMRWTNEHNEAIMRSYYRTTNLGTNETSYRKLMHADIIHSYPPLAHLSEQRVADQRRTIINNKYISVDRLNIIKQEIVAEFESTNNNSNNSEERNLYSNEFPNHQENDNQDIQMETTSRADVIQGISQSHQDIDSDRYKEIDETFQQALQYYKNIEPTCRTYIPKQKPSKNLSRIINYLNMVTLKENITEDSDFFSLQTAIYCAAWTAAKVNGAKLTLQIGTDQLHNRKQYKPKWQQRLELKLQDIRKKIGRLTQYIQGNRSKKIVKYMNNITEQFKAHTSHEEPNTQNVHILDTLKQRLSVITGRLKRYKSCTLRKQQNSQFILNEKLFYRNIKQNTMHLTNYSNDNDSTKISPEKLKDFWSRIWENPLQHNTQAEWIQTETTNNIETMSYECIPSEIFQEVLRHLHNWKSPGSDYIHGYWYKKFTSIHNYLYKYINIFIQDPNIVPSYLTMGKTYMIPKDSTDLCDPAKYRPITCLQTLYKIITSCITKMLYNHIETNKILAEQQKGCRKFSQGCKEQLIIDSIILKKVQKTKSDLFSMYIDYKKAYDSVPHSWLIKVLEIYKIHPTIISFLKTIMTKWSTVLNLSTTTKTIETDPIQIQRGIFQGDSLSPLWFCLALNPLSYMLNATPYGYPLRLIDHSNINLRQTTLNHLLYMDDIKLYAKSENQLYDLAYLVEQFSADIKMEFGIDKCKINSIKAGKNFQHKHVMTTGDEIEPLDEEGVYKYLGYEQSLLIHHKDIKLKLTRQFQHRLNTILKTQLDSRNTIKAINTFVIPLLTYSFGVINWNKTELKNLQRKINTTMTKFRKQHPRTCLQRITLPRKEGGRGLIDILNLHRKQIVTLRQYFFSKAHSSIVHKIIILNDRKLSPLNLQNTTEPINEEITDEKAKIAEWNKKSLHGRHRQDLCQINVDKNASNAWLKRGDLFPETEGFMIAIQDQVIETRNYRKHIIKNLNNDNCRKCNSSPETIQHITGACKSIVQTDYKHRHDQIANIIHQKLAHQYKFIHTIIPYYKYKPETVLENSITKLYFDRAILTDRTVHYNRPDITLINKITKTGYLIDIAVPNTHNLQTTIAEKLTKYIDLKDEIIRLWHLQSVTIVPIVLSTTGVIPIQLHQSLTTLNLPTNTYQLMQKAAILNTCRIVRKFLQIDSNNAQLHNYISSAINTSQSQLGPSSTNDHLA

SEQ ID NO: 16758 - protein, 1423 aa, Ochlodes sylvanus
MERSQSSRYNLRSLPGGRRGAPGAGAGCFRMRDTGGEALSRRAPVTQDATAGRRGLNRRARDVEVTAGSSTGEDTISLFSSIPSTRPSYMTRSRSTLSCVSSLDGVVQDVNLDAEPAPTSSAPLKRKRWTPEMNEFILRTYLQLTALDTDTKNYLEPLYLKFIEKFPNMQVSHQRVGDQRRAIIRNKLLPQNIIDQIFNQVKAQINLTQPQTRTTETQQNIAANNLTQTRRTRLTWLNHHNEVIMKIYYRITKLETNRTMYRKTLHEEFVKIFPTLSHISEQRVADQRRAIVKNKYLSDDKIQEIKKQITEELLLNVNDNTNNTHNTHTTNTDKTYNYEADDVLNSIELNPQNESTYQRQTERQAHIDELFYEAYQFYRFTEATHRTYIPKQKSSKNFAKVVNYINEILIPENVTEDTDFNTLQLVLYCAAWTAAKTNGTKLTLEPSITNQADKKDRRPNWQKRLERKLGDLRAKIGRVTQFINGNRNTNITNQVKNIMEQYKIHSAHEEPNIYLTHTLDTLKQKLSVISGRLKRYKACTLRKQQNNQFKNNEKQFYRNIRQATTNLQENSSSNKVNNTPNPADLQSFWAAIWEQPVKHNDEAMWIREEIINSESVIQPMNFEHIPLDTFKEVISNLHNWKAPGSDYIHSYWYKKFTSTHKYLHKFINNFIHDPGTVPSYITAGTTYMIPKDINDLTNPEKYRPITCLQTIYKIITSCISQLLYNHTEDNNILAEQQKGCRKFSQGCKEQLILDSVVLKQVQKTKSDLYTMYIDYKKAYDSVPHSWLIQILEIYKVHPNIITFLKTIMTNWTTRLKLTTPTEIIETCPISIQRGIFQGDALSPLWFCLALNPLSRLLNLTSLGYPLYYKTDGQTQKNTLNHLLYMDDIKLYAATENQLYHLTKLTEEFTDDIKMIFSIDKCKINSIKAGKMYQHHHTLNTGLQIQPLEEQEVYKYLGYNQSHEIQFKDTKLKLKLNFRHRLNTVLKTQLNSRNTIKAINSYAIPILTYSFGIIKWTKTDLKNLQRIINTTMTKFRKHHPRACLQRLTLPRKEGGRGLIDISNLHNRQITTLRQYFFSKMESSELHKSIVMNDSKATPLNLHDKTTQTNEHITDMKTNIAEWTKKSLHGRHRQDLCQPNVDKEASNAWLHRGELFPETEGFLVAIQDQVIETRNYQKHIIHKIATDHCRKCNSASETIQHITGACKSIAQTDYKYRHDQVANIIHQKLAQNYNFINALQPYYKYSPESVLENATTKLYFDRAILTDRTIHYNRPDLTLIDKTNKTGYLIDIAVPNTHNLQSTIVEKLTKYTELKDEIIRIWQLRTVTIVPIVISTTGVIPKQLHQSLKTLNLPPNTYHILQKAVILNTCRIVRKFLQIDHQTTVAHTQPPDTTDVTRSQQHQPQNHTQDSSHSSSSLEPIVHLA

SEQ ID NO: 16759 - protein, 1393 aa, Ochlodes sylvanus
MEKSQSRYNLRSLPGGRRGAPGAGAGCFRMRDTGGEALSRRAPVTQDATAGRRGLNRRARDVEVTAGSSAGEDTISLFSSIPSTRPSYMTRSRSSLSCVSSLDSVVQDVNLDSEPVPTTSAPIKRKRWTPEMNEFILRTYLKLTTLDTDTKNYLEPLYLKFIEKFPNMQVSHQRVGDQRRAIIRNKLLPQNIIDQIFNQVKEEITSTQSQICTNGIQQTITAHNITQTRTRLTWLTHHNEAIMKIYYRITNLETNRTLYRKILHEEFVKIFPTLSHISEQRVADQRRAIVKNRYISEDKLEDIKKEIAEELLLNNCDSIHDNANNIHSTNTDETINTEADVLVNNMELNLQHDSTEQLETERRPHIDESFYEAYQFYSLTEATHRTYIPKQKSSKNLVKIVNYINEILIPENVTADTDFNTLQLVIYCAAWTAAKTNGSKLTLELSKTNRTDVKDRKPNWQRRLERKLEDLRSKIGRVTQFVNGNRNTKITKQVKNIMDQYKIHSIHEEPNTHLTHILDTLKQKLSVVAGRLKRYKACTLRKQQNNEFKNNEKQFYRHIKQEATNLQENSNSKVTYAPNPEELQSFWATIWEQPIKHNNEASWITEEINNSDLMIQPMQFEHITIDRFKEVISNLHNWKAPGSDYIHSYWYKKFTSTHIYLHKFINEFIQDPEIVPKYITTGTTYMIPKDTNDLTDPEKYRPITCLQTIYKIITSCISKVLYEHVQDNNILAEQQKGCRKFSQGCKEQLIIDSVILRQVQKTKSDLYTMYIDYKKAYDSVPHSWLVQVLEIYKVHPNIITFLKTIMTKWTTRLKLTTPTEVIETCPISIQRGIFQGDALSPLWFCLALNPLSRLLNLTSLGYPLCYKTDGQTQKNTLSHLLYMDDIKLYAASENQLYQLTQITEEFTEDIKMILSINKCKINSIKAGKIYQHSYTLNNGLQIQPLDEHEVYKYLGYNQSLQIHFKETKLKLKQSFRHRLNTILKTQLNSRNTIKAINSYAIPILTYSFGIIKWTKTDLKNLQRIINTTMTKFRKHHPRACLQRLTLPRKEGGRGLIDIRNLHNRQISTLRQYFFRRMETSELHKAVVTNDSKATPLNLHDKNIQANEQLTDNKTKIAEWTKKSLHGRHRQDLCQPNVDKEASNAWLHRGELFPETEGFLMAIQDQVIETRNYQKHIIHNTAIDHCRKCNSSSETIQHITGACKSIAQTDYKYRHDQVANIIHQKLAQQYNFIKVLRPYYKYTPETVLENASTKLYFDRAILTDRTIHYNRPDLTLIDKRNKTGYLIDIAVPNTHNLQSTIAEKLTKYSELKDEIIRIWQLRTVTIVPIVISTTGVIPKQLHQSLKTLKLSPYTYTILQKAVILNTCRLVRKFLQTEINFTHTQPPGTTDITSS

SEQ ID NO: 16760 - protein, 1396 aa, Thymelicus lineola
MEKSQSSRYNLRSLPGGRRGAPGAGAGCFSMRDTGDAALSRRTLVTQDATAGRRGLNRRVHDVETTAEPTSGEDTISLFSSIPSTRPSYMTRSTSTLSSVTSLDSVVQDVNLDSEPAPTPSAPPKRKRWTPEMNEFILRTYLKLTTLDTDTKNYLEPLYVKFLEKFPNMQVSSQRLGDQRRAIIRNKLLPQNIIDQIFNQVKEEITRTQSQICTAGIQQIAATTSLSQSRTRMTWLNHHNETIMRIYFRITNLETNRTMYRKTLHEEFVKIFPTLSHISEQRIADQRRAIVKYKYLDYNRIEEIKKEIAEELLVHVNEDISDNANNILSANSDNLEADFLNNIELNLPSDHSKQTELERQPHIDKSFNEAYQFYRLSEATQRTYIPKQKSSKNLVKIVNYINEILIPENVSPDTDFNTLQLVIYCAAWTAAKINGSRLLLEIPKTNQTNRKDYTPKWQRRLERKLEDLRAKIGRVTQYINGNRNTKITKQVKSIMEQYKIHSVHEEPNTQLTHTLDTLKQKLSVVSGRLKRYKACTLRKKQNNQFNNNEKLFYRNIRQASTNLQDNSANNENHAPNAEDLQRFWADTWEQPVKHNDKAVWIKEEVTNSESETQPMKFENISIDTLKSVINNQHNWKATGSDYIHSYWYKKFTSTHTYLHKFINEFIQDPGIVPMYITDGTTYMIPKDNNDLTNPEKYRPITCLQTIYKIITSCISQLLYKHVQDNNILAEQQKGCRKYSQGCKEQLIIDSVILKHVQKTKSDLYSMYIDYKKAYDSVPHSWLVQVLEIYKVHPNIITFLKTIMTNWTTRLKLSTSTEIIETCPISIKRGIFQGDSLSPLWFCLALNPLSRLLNSTSLGYPLCYKTDGLTQKNTLNHLLYMDDIKLYAASESQLCQLTNLTEEFSDDIKMIFSIDKCKINSIKGGKMYQHHYTMKTGLQIQPLDEHEVYKYLGYNQSLQIQFKDTKLTLKQNFRHRLNTILKTQLNSRNTIKAINSYAIPILTYSFGIIKWTKSDLKNLQRIINTTMTKFRKHHPRACLQRLTLPRKEGGRGLIEISNLHNRQISTLRQYFFSRMETSELHKSVVINDSKATALNLQDKLKQTNEQLTDNKTKIAEWTQKSLHGRHRQDLCQPYVDIEASNAWLYRGELFPETEGFLMAIQDQVIETRNYQKYIIKKIASDICRKCNSSAETIQHITGACKSITQTDYKYRHDQVANIIHQKLAKQYNFINILQPYYKYNPEPVLENTTTKLYYDRAILTDRTIHYNRPDITLIDKTNKVGYLIDIAVPNTHNIQNTITEKISKYTELKDEITRIWQLRKVTIVPIVISSTGVIPKLLHQSLKTLNLPPNTYNILQKAVILNTCRIVRKFLQSDQEVTVTHTEPSATTEITISTVST

SEQ ID NO: 16761 - protein, 1408 aa, Hesperia comma
MENRQSSKYNLRSLPGGRRGAPGAGAGCFSMRDTGDEALSRRAPVTQDATAGRRGLSRRARDVEVTAGVSTGEDTVSLFSSIPSTRPSYMTRSRSTQSCVSSLEGVVQDVNFDAEPTPTPGAPVKRKRWTPEMNEFILRTYLKLTALDTDTKNYLEPLYLKFIEKFPTMQVSHQRVGDQRRAIIRNKLLPQNTIDKIFNQVKEEITVTQPETLTPEIQHTTDTQNRTQTRTRFTWLNQHNEAIMKIYYRITNLETNRTMYRKTLHEEFIKLFPTLSHFSEQRIADQRRAIVKNKYISEAKIEEIKKEISEELLLNGGEAVQTNNTNTDNSYNYETDDVLNSIECNLESEPTKQRQIEREPHIDEAFYEALQFYRLTEATQRSYIPKQKSSKNFAKIVSYINEVLIPENVTEDIDFNTLQLILYCAAWTAAKSNGTKLTLEPSTTKTSDRKDRRPNWQKRLERKLEDLRAKIGRVTQFMNGNRNTKITNQVKHITEQYKIHSIHEEPNIHLTHILDTLKQKLSVIAGRLKRYKACTLRKTQNNQFKNNEKQFYRNIRQAATNLQENNSNKVNNAPNPEDLHRCWATIWEQPVEHNSEAKWIKDEISVNESVTEPMQFEHISFETFKNVISNLHNWKAPGSDFIHSYWYKKFTSTHTYLHKFINEFILSPGTVPKYITAGTTYMIPKDNNDLANPEKYRPITCLQTMYKIITSCISQLLYKHIQDNDILAEQQKGCRKFSQGCKEQLIIDSVVLKQVQKTKSDLYTMYIDYKKAYDSVPHSWLVKILEIYKVHSNIITFLKTIMTNWTTRLKLTTPTDVIETSPISIQRGIFQGDALSPLWFCLALNPLSRLLNSTSIGYPLYYKTDGQTQKNTLNHLLYMDDIKLYAATENHLHQLTKLTEEFTDDIKIIFSIDKCKINSIKAGKMYQHHHTLNTGLQIQPLDEHEVYKYLGYNQSQQIQVKNTKQKLKLNFRHRLNTVLKTQLNSRNTIKAINSYTIPILTYSFVIIKWTKTDLKNLQRIINTTMTKYRKHHPRACLQRLTLPRKEGGRGLIDISNLHNRQISTLRKYFFNRMDTSELHKSIVINDMKATPLNLHDQTQQTNELLTDKKVKIAEWTKKSLHGRHRQDLCQPNVDKEASNAWLHRGELFPETEGFIMAIQDQVIETRNYQKHIIQKTTIDRCRKCNSSPETIQHITGACKNIAQTDYKYRHDQVANIIHQKLAQQYNFINTLQPYYKYAPETVLENATTKLYYDRAILTDRTIHYNRPDLTLINKTNKTGYLIDIAVPNTHNLQSTIAEKLTKYTELKDEIIRIWQLRTVTIVPIVISTTGVIPKQLHQSLKTLNLPPNTFNIIQKAVILNTCRLVRKFLQTDHQSTDTHVEPPDTTDITNSELSRPQNHTQESNISSC

SEQ ID NO: 16762 - protein, 775 aa, Orphe vatinius
MKFEHISIDTLKEVISNLHNWKAPGSDYIHSYWYKKFTATHTHLHKFINKFIQDPETVPANITAGTTYMIPKETNNVNNPEKYRPITCLQTIYKIITSCISQILYKHVQDNNILAEQQKGCRKFSQGCKEQLIIDSVILKEVQRSKSDLYTMYIDYQKAYDSVPHSWLVQSLEIYKVHPYIITFLKTIMANWTTRLKLMTPTEIIETNPISIQRGIFQGDALSPLWFCLALNPLSRLLNETSIGYPLNYKTDGQTQKHTLSHLLYMDDIKLYAASENQLSQLANVTEEFTDDIKMVFSIDKCKINSIKAGKMYQHHYTLNTGLEIQPLDEHEVYKYLGYNQSLQIQFKDTKLKLKQNFRHRLNTILKTQLNSRNTIKAINSYAIPILTYSFGIIKWSKSDLKNLQRIINTTMTKFRKHHPRACIQRLTLPRKEGGRGLIDISNLHNRQISTLRQYFYKRMATSDLHKSVVASDKRATALNLQDKTTQKNEQLTDNKTKITEWTKKSLHGRHRQDLCQSNVDKEASNAWLHRGELFPETEGFLMAIQDQVIETRNYQKHIIKKIVDDRCRKCNSSSETIQHITGACKSIAQTDYKYRHDQVANIIHQKLAHQHNFIKTLDPYYKYNPEPVLENTTAKLYFDRAILTDRTIHYNRPDLTLIDKTNKTGYLIDIAVPNTHNLQSTIAEKISKYTELKDEIMRIWQLNKVTIVPIVISTTGVLPKQIHQSLKILNLTPNTYNILQKAVVLNTCRLVRKFLQTDQDITFTHSQPSTPLET

SEQ ID NO: 16763 - protein, 900 aa, Carystus phorcus
MEQYKIHSIHEEPNTHLTHTLDTLKQKLSLTSGRLKRYKACTLRKQQNNQFNNNEKQFYRNIKHASTNLQHNNVGKVNHPPNPESLQSFWAGIWEQPVKHNDEAMWIKEETVNSDSLIQPMQFENIPIDTLKQVISKLHNWKAPGSDYIHSYWYKKFTSTHIYLHKFINMFIQDSRIIPMYITAGTTYMIPKDSNDFSNPEKYRPITCLQTIYKIITSCISQILYKHVKDNNILAEQQKGCRKFSQGCKEQLIIDSVILKQVQRNKSDLYSLYIDYKKAYDSVPHSWLVKILEIYKVHPNIITFLKTIMTNWTTRLKLTTSTDTIETLPISIQRGIFQGDALSPLWFCLALNPLSRLLNSTLLGYPLNYMTDGQTQKNILSHLLYMDDIKLYAASEDQLYQLIKLTEEFTNDIKMIFSIDKCKINSIKAGKMYKHHYTLNTGLQIQPLDEHEVYKYLGYNQSLQIQFKDTKLKLKQNFRHRLNTVLKTQLNSRNTIKAINTYAIPILTYSFGIIPWSKTDLKNLQRTINTTMTKFRKHHPRACIQRLTLPRKEGGRGLIDVVNLHNRQINTLRQYFFNRMGTSELHKSVVVNDQKATALNLQDRTTQTNEQIIDNNAKIAEWTKKSLHGRHRQDLCQSNVDIDASNAWLHRGELFPETEGFIMAIQDQVIETRNYQKYIIKKTVSDSCRKCNSSSETIQHITGACKSIAQTDYKHRHDQVANIIHQKLAQKYYFINALQPYYKYTPEPVLENSTTKLYFDRAILTDRTIHYNRPDLTLIDKTNKTGYLIDIAVPNTHNLQSTIAEKISKYTELKDEITRIWQLNKVTIVPIVISTTGVIPVQLHPSLKTLQLPPQTYIMLQKAVILNTCRLVRKFLQGDHDNISHTHTHTHFTSFQQYQP

SEQ ID NO: 16764 - protein, 1405 aa, Thymelicus sylvestris
MEKSQSSRYNLRPLPGGRRGAPGAGAGCFSMRDTGDAALSRRAPVTQDATAGRRGLNRRVHDVETTAEPTSGEDTISLFSSIPSTRPSYMTRSTSTLSSVTSLDSVVQDVNLDYEPAPTPSAPPKRKRWTPEMNEFILRTYLKLTTLDTDTKNYLEPLYVKFLEKFPSMQVSSQRLGDQRRAIIRNKLLPQNKIDQIFNQIKEEITRTQSQICTAEIQHITATTSLSQNRTRMTWLNHHNEIIMRIYYRITNLETNRTMYRKTLHEEFVKIFPTLSHISEQRLADQRRAIVKYKYLNDNRIEEIKKEIAEELSVNAIDVVNDNTNNILSTNSDNTNDLEADFLNNIELNLPSDPSKQRELERQPNIDESFNKAYQFYRLTEATQRTYIPKQRSSKNLVKVVNYINEILIPENVSADTDFNTLQLVIYCAAWTAAKINGSRLSLEIPKTNQTNRKDCTPNWQRRLERKLEDLRSKIGRVTQYINGNRNTKITNHVRNIMEQYKIHSVHEEPNTQLTHTLDTLKQKLSVVSGRLKRYKSCTLRKKQNNQFNNNEKLFYRNIRRTSANLQNNSANKENHAPNANDLQGFWADMWEQPVKHNEEAVWIKEEIANSESGTQPMKFEKISIDTLKSVINNQHNWKAAGSDYIHSYWYKKFTSTHTYLHKFINEFIQDPGIVPTYITAGTTYMIPKDNNDLTNPEKYRPITCLQTIYKIITSCISQLLYKHVQDNNILAEQQKGCRKYSQGCKEQLIIDSVILKHVQKTKSDLYSMYIDYKKAYDSVPHSWLVQVLEIYKVHPNIITFLKTIMTNWTTRLKLSTSTEVIETCPISIKRGIFQGDALSPLWFCLALNPLSRLLNSTSLGYPLCYKTDGLNQKNILNHLLYMDDIKLYAASESQLCQLTNLTEEFSDDIKMIFSIDKCKINSIKGGNMYQHKYTMKTGLQIQPLDEHEVYKYLGYNQSLQIQFKDTKLTLKQNFRHRLNTILKTQLSSRNTIKAINSYAIPILTYSFGIIRWTKSDLKNLQRIINTTMTKFRKHHPRACLQRLTLPRKEGGRGLIDISNLHNRQISTLRQYFFSRAETSELHKSVVINDSKATALNLRDKVKQANEQLTDNLTKIADWTQKSLHGRHRQDLCQPNVDMEASNAWLHRGELFPETEGFLMAIQDQVIETRNYQKYIIKNIASDICRKCNSSAETIQHITGACKSITQTDYKYRHDQVANIVHQKLAKQYNFINILHPYYKYSPEPVLENTTTKLYYDRAILTDRTIHYNRPDLTLIDKTNKVGYLIDIAVPNTHNIQNTIAEKISKYTELKEEITRIWQLRKVTIVPIVISTTGVIPKTLHQSLKTLNLPPSTYNILQKAVILNTCRIVRKFLQSDQEVTVTHTQSPTTKDITSSQHSQPNVHLA

SEQ ID NO: 16765 - protein, 1402 aa, Hesperia comma
MENRQSSRYNFRSLPGGRRGAPGAGAGCFRMRDTGDEALSRRTPVTQDATAGRRGLNRRGRDVEATAESLTGEDTISLFSSIPSTRPSYMTRSTSTLSFVSSLDDVVQDVNIDSEPAPIPSAPVKRKRWTPEMNEFILRTYLKLTSLDTDTKNYLEPLYLKFIEKYPDMQVGRQRVGDQRRAIIRNKLLPQKIIDQIFKQVKEEITQTHSTQSQICPTGTQQIINVPNLTQTRTRLTWLNHHNETIMKIYYRITHLETNKTMYRKTLHDEFVKIFPTLSHISEQRIADQRRAIVKNKYFSEDKLESIKKEIAEELLLNINDYKTDNSNNTHSTETDKPNNPEADVLLNSVELGIQHESTEQGETERQPHIDQSFYEAYQFYRLTDATHRTYIPKQKSSKNLVKIVNYINEILIPEYITEDIDFNTLQLVLYCGAWTAAKTNGSKLTLDISKPSRTGRKDCKPNWQRRLERKLEDLRCKIGRVTQYMNGIRNTKITKQVQNIMNQYKIHSTHEEPNIHLTHVLDTLKQKLSLVAGRLKRYKACTLRKQQNTQFKNNEKQFYRNIKQEATNLQGSTNSRVSQTPNSENLQSFWAALWEQPIRHNREASWIKEEIIKSDLMIQPMQFESITMDSFKEVISNIHNWKAPGSDYIHNYWYKKFTSTHILLHKFINDFIQDPEIIPTYITAGTTYMIPKDNNDLTDPEKYRPITCLQTIYKIITSCISKHLYKHVQDNNILAEQQKGCRKFSQGCKEQLIIDSVILNQVQKTKADLYTMYIDYKKAYDSVPHSWLVKVLEIYKVHPNIITFLKTIMKNWTTRLKLTTQTEVIETRPISIQRGIFQGDALSPLWFCLALNPLSRLLNSSSLGYPLKYKTDGLTQKYTLSHLLYMDDIKLYAASESQLDQLTQVTEDFTEDIKMIFAIDKCKINSIKAGKMYQHHYTLNTGLQIQPLDEHEVYKYLGYNQSLQIHFKDTKSKLKQSFRHRLNTILKTQLNARNTIKAINSYAIPVLTYSFGIIKWSKTELKNLQRIINTTMTKHRKHHPRSCIQRLTLPRKEGGRGIIDIINLHNRQISTLRQYFFHRMETSELHESIGRNDSKATPLNLHDKTTQANEQLTDNKTKICEWTKKSLHGRHRQDLCQLNVDKEASNAWLHHGELFPETEGFLLAIQDQVIETRNYQKHIIHNTAIDNCRKCNSSSETIQHITGACKSIAQTDYKYRHDQVANIIHQKLAQQYKFIEALQPYYKYTPESVLENASTKLYFDRAILTDRTIHYNRPDITLIDKSNKTGYIIDIAVPNTHNIQSTIAEKLTKYTELKDEITRIWQLNTVTIIPIVISTTGVIPKQLHQSLKTLKLSPNTYHILQKAVILNTCRLVRKFLQTDTTVTHTQPSEVAHISNSQQPQV

SEQ ID NO: 16766 - protein, 1273 aa, Thymelicus sylvestris
MNEFILRTYLKLTTLDTDTKNYLEPLYVKFLEKFPSMQVSSQRLGDQRRAIIRNKLLPQNKIDQIFNQIKEEITRTQSQICTAEIQHITATTSLSQNRTRMTWLNHHNEIIMRIYYRITNLETNRTMYRKTLHEEFVKIFPTLSHISEQRLADQRRAIVKYKYLNDNRIEEIKKEIAEELSVNAIDVVNDNTNNILSTNSDNTNDLEADFLNNIELNLPSDPSKQRELERQPNIDESFNKAYQFYRLTEATQRTYIPKQRSSKNLVKVVNYINEILIPENVSADTDFNTLQLVIYCAAWTAAKINGSRLSLEIPKTNQTNRKDCTPNWQRRLERKLEDLRSKIGRVTQYINGNRNTKITNHVRNIMEQYKIHSVHEEPNTQLTHTLDTLKQKLSVVSGRLKRYKSCTLRKKQNNQFNNNEKLFYRNIRRTSANLQNNSANKENHAPNANDLQGFWADMWEQPVKHNEEAVWIKEEIANSESGTQPMKFEKISIDTLKSVINNQHNWKAAGSDYIHSYWYKKFTSTHTYLHKFINEFIQDPGIVPTYITAGTTYMIPKDNNDLTNPEKYRPITCLQTIYKIITSCISQLLYKHVQDNNILAEQQKGCRKYSQGCKEQLIIDSVILKHVQKTKSDLYSMYIDYKKAYDSVPHSWLVQVLEIYKVHPNIITFLKTIMTNWTTRLKLSTSTEVIETCPISIKRGIFQGDALSPLWFCLALNPLSRLLNSTSLGYPLCYKTDGLNQKNILNHLLYMDDIKLYAASESQLCQLTNLTEEFSDDIKMIFSIDKCKINSIKGGNMYQHKYTMKTGLQIQPLDEHEVYKYLGYNQSLQIQFKDTKLTLKQNFRHRLNTILKTQLSSRNTIKAINSYAIPILTYSFGIIRWTKSDLKNLQRIINTTMTKFRKHHPRACLQRLTLPRKEGGRGLIDISNLHNRQISTLRQYFFSRAETSELHKSVVINDSKATALNLRDKVKQANEQLTDNLTKIADWTQKSLHGRHRQDLCQPNVDMEASNAWLHRGELFPETEGFLMAIQDQVIETRNYQKYIIKNIASDICRKCNSSAETIQHITGACKSITQTDYKYRHDQVANIVHQKLAKQYNFINILHPYYKYSPEPVLENTTTKLYYDRAILTDRTIHYNRPDLTLIDKTNKVGYLIDIAVPNTHNIQNTIAEKISKYTELKEEITRIWQLRKVTIVPIVISTTGVIPKTLHQSLKTLNLPPSTYNILQKAVILNTCRIVRKFLQSDQEVTVTHTQSPTTTDITSSQHSQPNVHLA

SEQ ID NO: 16767 - protein, 1451 aa, Dalla cyprius
MSSNVAREPSANTLMPINDTTNPTRGSNRDTNNIRVETNPNTRSLITPTPSSHDTTTGNVLVTQPNPNTLMDKSQSSRYNLRPLPGGRWGAPGAGAGCFRMRDTSDAALSRRAPFTQDATAGRRGLSRRAYDVETTAEAPTGEDTISLFSSIPSTRPSYMTRSTSTLSFTSSLDGVVQDVNLDSEPAPTPSASLKRKRWTPEMNEFILRTYFQLTALNTDTKNYLEPMYLKFIEKFPNMQITRQRVGDQRRAIMRNKLLPQNIIDQIFNQVKEELTSTLTQICLTGITQTRTRMTWSNHHNEAIMRTYYRITSLETNKTMYRKTLHEEFVKIFPTLSHISEQRVADQRRAIVKNKYFSDDKLEDIKKEIGEELLLNVNDFTKNNTNNIHSTNIDNTNNIEAEFLNSIELHLQSEPIDQTAPERQTHIDETFQEAYEFFRFTEATHRTYIPKQKSSKKFSNIISYIDKIIIPENVTEDTDFNTLQAVVYCAAWTAAKINGAKLTIEPSTTNRKDKKDRKPNWQKRLERKLEDLRSKIGRVTQYINGNRNRKIAYQVKIIMEQYKIHSVHEEPNTQLTHTLDTLKQKLSVTAGRLRRYKACTLRKQQNHQFNNYEKQFYRNISNATTNIQDINKVNHTPRPEDLQSFWAATWEQPVKHNNEAAWIKEEMIINDSITQPMKFEHIPIDTFKEVLSNLHNWKAPGSDYIHSYWYKKFTSIHTYLHKFINEFIQDPGTVPTYITAGTTYMIPKDNNDLTNPEKYRPITCLQTIYKIITSCISQLLYKHVHDNNILAEQQKGCRKFSQGCKEQLIIDSVILKQVQKTKSDLYTMYIDYKKAYDSVPHTWLVQILEIYKVHPIIITFLKTIMAKWTTRLKLTTPTEIIETCPIFIQRGIFQGDALSPLWFCLALNPLSKLLNSTSLGYPLWYNSDGQSQNNTLNHLLYMDDIKLYAASENELYQLTKLTEEFTDDIKMIFSIDKCKINSIKSGKMYQHNYTLNTGHQIQPLDEHEVYKYLGYNQSLQIQFKDTKVKLKQNFRHRLNTILKTQLNSRNTIKAINTYAIPILTYSFGIIKWTKSDLKNLQRTINTTMTKFRKHHPRACLQRLTLPRKEGGRGLIDINNLHNKQISTLRRYFFSKMETSTLHKSVVINDSKATPLNLQDKTTQMTEQLTDNKTKIAEWTKKSLHGRHRQDLCQPNVDKEASNAWLHRGELFPETEGFLMAIQDQVIETRNYQRYIIKNLASDNCRKCKSSPETIQHITGACKIIAQTDYKYRHDQAANVIHQKLAHRYKFINSVKPYYNYKPEAVLENSSTKLYFDRAILTDRTIHYNRPDITLIDKTNKTGYLIDIAVPNTHNLQNTIGEKLTKYAELKDEISRIWHLQKVTIVPIVISTTGVVPKQLHLSLKTLNLPANTYNTLQKAVILNTCRLVRKFLQTDHETTNQGIQFTSTSLS

SEQ ID NO: 16768 - protein, 1391 aa, Thymelicus sylvestris
METNKSSRYNLRPLPGGRRGAPGAGAGCFSMRDTGDVVLSRRAPVTQDVTAGRRGLNRRVHDVETTAESSSGEETMSLFSSIPSTRPSYMTRSTSALSSVSSLDSVVQDVNLDSEPAPTPSAPLKRKRWTPEMNEFILRTYLRLTALDTDTKNYLEPLYLKFIEKFPSMQVSSQRVGDQRRAIIRNKLLPQTIIDQVFKQVKEEISSQTCTTEVQHTEGSNSIVQIQARTRMTWLNHHNEAIMKIYYRITNLETNRTMYRKALHEEFLKIFPTLSHISEQRIADQRRAIVKYKYFSDNKLEEIKKEIAGELLLNSNDDTNNILSTNTGNANNLEAEFLNNIELNTQNEPTERGELKRQPNIDESFLEAYQFYRLTEASNRTYIPKQKSSKNLVKIVNYINEILIPEHITTNTDFNTLQLVVYCAAWTAAKINGSKLMLEPTKSSRTDKKHHTPNWQKRLERKREDLRSKIGRVTQFINGNRNKKIANQVKNIIEQYKIHSVHEEPNTQLTHTLDTLKQKLAVVSGRLKRYKACTQRKQQNNQFNNNEKQFYRNIRQASTNLQENTVNDLHQTPNVEQVQKFWAALWEQPLTHNNEALWIKEEINNSDAVTQPMKFESIPIDTLIEVINSQHNWKAPGSDYIHSYWYKKFTSTHTYLHKFINEFIQDPGTVPTYITAGITYMIPKDNNDLTNPEKYRPITCLQTIYKIITSCISQLLYKHLQDNNILAEQQKGCRKFAQGCKEQLIIDSVILKQVKKTKSDLYTMYIDYKKAYDSVPHSWLVQILEIYKVHPNIITFLKTIMAYWTTRLKLTTPTKIIETSPISIKRGIFQGDALSPLWFCLALNPLSRLLNATSLGYPLYYNTNGQTQKNNLNHLLYMDDIKLYAASENQLYQLTKLTEEFTNDIKMVFSIDKCKINSIKAGNMYQHHYTLNTGLQIQPLEEKEVYKYLGYNQSLQIQFKDTKLKLKQNFRHRLNTILKTQLNSRNTIKAINSYAIPILTYSFGIIKWSKSDLKNLQRTVNTTLTKFRKHHPRACLQRLTLPRKEGGRGLIDINNLHNRQISTLRQYFYNRMKTSELHKSVVLNDSKATPLNLQDNSTQSNEQLTDNKTKIVEWTKKSLHGRHRQDLCQPNVDKEASNAWLHRGELFPETEGFLMAIQDQVIETRNYQKFIIKNIVSDSCRKCNSSSETIQHITGACKNIAQTDYKYRHDQVAHIIHQKLAKLYNFINDLKPYYKYNPEPVLENPTTKLYFDRAILTDRTIHYNRPDLTLIDKVNKNGYLIDIAVPNTHNLQNTISEKLSKYSELKDEIIRIWQLRKVTIVPIVLSTTGIIPKQLHLSLKTLNLPSNTYNILQKAVVLNTCRIVRKFLQSDHENTYTHIQPSATSDITTCQ

SEQ ID NO: 16769 - protein, 1383 aa, Niconiades incomptus
MERSQSSKYYLRSLPGGRRGAPGAGAGCFSMRDTGGVALSRRAPVTQDATAGRCGLNRRTRDVEVTAESSTGEDTTSLFSSIPSTRPSYMTRSTSTLSSVSSLDGVVQDVNFDSEPAPIPSAPRKRKRWTPEMNEFILRTYLKLTALDTDTKNYLEPLYLKFIEKFPDMQVSPQRIGDQRRAIIRNKLLPQKIIDQIFNQVKEEFTSINTCTQQTAPAPNSLTQPRTRMAWLNHHNETIMKLYYRITDLETNRTMYRKTLQEEFVKAYPTLSHISEQRIADQRRAIVKYKYLSNDKIEEIKKEIAEELSLNNYDSINVISNDILCSTDINNTDNSVPDVLNDIELSLQNEPTEQVEPERQPYIDKSFHEAYLFYRFTEATHRTYIPKQKTSKNLARIVNYINEILIPENVTIDTDFNTLQLIIYCAAWTAAKVNGTKITLEVSNTNRTDKYNHKPNWQRRLERKLEDLRSKIGRVTQFINGNRNKKITNQVKKIMEQYKIHSIHEEPNTHLSHTLDTLKQKLSVVSGRLKRYKACTLRKQQNNQFYNNEKQFYRNIRQGTTNLQESSVNKANCAPNVEDLRRFWAAIWEQPVKHNNEAAWIQEEIKNNNSVTESMKFKHIPLDIVKDVISKLHNWKAPGSDYIHSYWYKKFTFTHTYLHKFINAFIQDPETVPTYITAGTTYMIPKDNNDLTNPEKYRPITCLQIIYKIITSCISQLLYKHIVNDNNILAEQQKGCRKSSQGCKEQLIIDSVILKQVQKTKSDLYTMYIDYRKAYDSVPHSWLVQILEIYKVHPHIITFLKTIMTNWTTRLKLTTPTQTIETGPIAIQRGIFQGDALSPLWFCIALNPLSRLLNLTSLGYPLRYNTDGQTQKYILSHLLYMDDIKLYAESEKQLHQLTKLTEEFTDDIRMSFSIDKCKINSIKAGNMYQHHYILNTGLRIEPLDEHEVYKYLGYNQSLQIQFKDTKIKLKQNFRHRLNTVLKTQLNSRNTIKAINSFAIPILTYSFGIIKWTKTDLKNLQRIINTTMTKFRKHHPRGCLQRLTLPRKEGGRGLIDIKNLHSRQITTLRQYFYNQMKTSELHKSIVINDIKATALNLQDKTTQKNEQLTDNKTKITEWNQKSLHGRHRQDLCQPNVDKEASNAWLYRGELFPETEGFLMAIQDQVIETRNYQKYIIKNIASDNCRKCNSSSETIQHVTGACKSIAQTDYKYRHDQVANIVHQKLAQKYNFLTSLCPYYKYNPEPVLESPTTKLYFDRAILTDRTIHYNRPDLTLIDKSNKTAYLIDIAVPNTHNLQTTIAEKISKYTELKDEIIRIWQLRKVTIVPIVISTTGVIPKQFHQSLKTLNLSPNTYIKVQKAVILNTCRLVRKFLQTDAENTLNLTH

SEQ ID NO: 16770 - protein, 1256 aa, Hesperia meskei
MNEFILRTYLKLTSLDTDTKNYLEPLYLKFIEKYPDMQVGRQRIGDQRRAIIRNKLLPQNIIDQIFKQVKEEITQTHSTQSQICPTGTQQIINAPNLTQTRTRVTWLNHHNETIMKIYYRLTHLETNKTMYRKTLYEEFVKIFPTLSHISEQRIADQRRAIVKNKYFSEDKLESIKKEIAEELLLNINVYKTDNSNNTHSTETDKLNNPEADVLLNSVELGIQHESTEQGETERQPHIDQSFYEAYQFYRLTDATHRTYIPKQKSSKNLVKIVNYINEILIPEYITEDIDFNTLQLVLYCGAWTAAKTNGSKLTLEISKPSRTGRKDCKPNWQRRLERKLEDLRRKIGRVTQYMNGIRNTKITKQVHNIMNQYKIHSTHEEPNRHLTHVLDTLKQKLSVVAGRLKRYKACTLRKKQNTQFKNNEKQFYRDIKQEATNLQGSTNSRVSQTPNSENLKSFWAALWEQPIRHNREASWIKEEITKSDLMIQPMQFESITMDSFKEVISNIHNWKASGSDYIHNYWYKKFTSTHIHLHKFINDFIQDPEIIPAYITAGTTYMIPKDNNDLTDPEKYRPITCLQTIYKIITSCISKHLYKHVQDNNILAEEQKGCRKFSQGCKEQLIIDSVILNQVQKTKADLYTMYIDYKKAYDSVPHSWLVKVLEIYKVHPNIITFLKTIMKNWTTRLKLTTQTEVIETRPISIQRGIFQGDALSPLWFCLALNPLSRLLNSSSLGYPLQYKTDGLTQKYTLNHLLYMDDIKLYAASVSQLDQLTQVTEDFTEDIKMIFAIDKCKINSIKAGKMYQHHYTLNTGMQIQPLDEHEVYKYLGYNQSLQIHFKDTKSKLKQSFRYRLNTILKTQLNARNTIKAINSYAIPVLTYSFGIIKWSKTELKNLQRIINTTMTKHRKHHPRSCIQRLTLPRKEGGRGIIDIINLHNRQISTLRQYFFHRMETSELHESIGRNDSKATPLNLHDKTTQANEQLTDNKTKICEWTKKSLHGRHRQDLCQFNVDKEASNAWLHHGELFPETEGFLLAIQDQVIETRNYQKHIIHNTAIDNCRKCNSSSETIQHITGACKSIAQTDYKYRHDQVANIIHQKLAQQYKFIEALQPYYKYNPESVLENASTKLYFDRAILTDRTIHYNRPDITLIDKSNKTGYIIDIAVPNTHNIQSTIAEKLTKYTELKDEITRIWQLSTVTIIPIVISTTGVIPKQLHQSLKTLKLSPNTYHILQKAVILNTCRLVRKFLQTDTTVTHTQR

SEQ ID NO: 16771 - protein, 904 aa, Euphyes dion
MAQYKIHSIHEAPNIHHTQTLDTLKQKLSVISGRLKRYKACTLRQHQNNLFKNNENKFYRNIRQATTNLQENTNNNVSNAPNPEDLQSFWASTWEQPVEHNKEAKWIKEETINSESITQPMKFDNISLDTLKQVISNLHNWKAPGSDNIHNYWYKKFTSTHIYLHKFINEFIQDPSRVPTYITVGTTYMIPKDTNDLTNPEKYRPITCLQTIYKIITSCISQILYKHVQDNNILAEQQKGCRKFSQGCKEQLIIDSVVLKQVHENKSDIYTMYIDYKKAYDSVPHSWLVQVLEIYKVHPNIVAFLKKIMTNWTTRLKITSATDIIETCPISIQRGIFQGDALSPLWFCLALNPLSRLLNSTSIGYPLSYKTNSQTQKNILNHLLYMDDIKLYAATENQLCKLIKLTEEFTDDIKMVFSIDKCKINSIKAGKMYQHHHTLNTGLQIQPLDEHEVYKYLGYSQSNQIHFKDTKIKLKLNFRHRLNTILKSQLNSVNTIKAINSYAIPILTYSFGIIKWTKTDLKNLQRIINTTMTKFRKHHPRSCLQRLTLPRKEGGRGLIDISNLHNRQISTLRQYFFNKMDTSELHKSIVINDIQATPLNMYNKTTQTNEHLIDNETKIAEWTKKSLHGRHRQDLCQPNVDKEASNAWLHRGELFPETEGFLMAIQDQVIETRNYQKHITHKIATDRCRKCNSSSETIQHITGACKSIAQTDYKYRHDQMANIIHQKLAQKYDFIKALQPYYKYTPEPVLENTTTKLYYDRAILTDRTIHYNRPDITLIDKTNKSGYLIDIAVPNTHNLQGTIAEKITKYTELKDEIIRLWQLRTVTIVPIVVSSTGVIPKQLHQCLRTLNLPPNTYIHLQKAVILNTCRLVRKFLQIDTTLTHTQPPDSTDITSLQQFQPENH

SEQ ID NO: 16772 - protein, 1401 aa, Duroca duroca
MERSQSSRYYLRSLPGGRRGAPGAGAGCFSMRDTGGAALSRRAPVTQHATAGRRGLNRRARDVEVTAESSTGEDTISLFPSIPSTRPSYMTRSTSTLSSISSLDGVVQDVNLDSEPAPIRSAPHKRKRWTPEMNEFILRTYLKLTALDTDTKNYLEPLYLKFIENFPNMQVSPQRIGDQRRAIIRNRLLPQNIIDQIVNQVKKEMTSTQICTQYTEDVHISTQTRTRMVWLNHHNEAIMKIYYRVTNLETNRTMYRKTLHEEFVKIFPTLSHISEQRIADQRRAIVKYKYFSNDKLEEIKKEIAKELSVNDNDPGNYNTNNIQSTDTDNTNIEVGLLHNIDLSLQNEPTERVEHDRQQHVDESFYEVYQFYRLTDATHRTYIPRQKSSKNFAKIVNYINEVLIPENVTAETDFNSLQLIIYCAAWTAAKVNGTKLTLEVSNTKRAIKNDHKPNWQRRLERKVEDLRSKIGRVTQFINGNRNTKITNQVKNIMEQYKIHSVHEEPNTHLTHTLDTLKQKLSVVSGRLKRYNACTLRKQQNNQFNNNEKQFYRNIRQAATNVQDKSVNEVNHAPDPEDLRTFWAAIWEKPVKHNNEAVWIKEEIIKSDSVTQSMKFEHIPLETIKEVISNLHNWKAPGSDYIHSYWYKKFTSTHTYLHKFINEFIQDPGKVPKYITAGTTYMIPKDNSDLTNPEKYRPITCLQTIYKIITSCICQLLYKHIVQDNNILAEQQKGCRKSAQGCKEQLIIDSVILNQVQKSKSDLYTMYIDYRKAYDSVPHSWLVQVLEIYKVHPNIITFLKTIMTNWTTRLKFTTSTEFIETCPISIQRGIFQGDALSPLWFCLALNPLSKLLNLTSLGYPLCYNTDGQTQKYILSHLLYMDDIKLYAASENQLHQLTKLTEEFTDDIKMTFSIDKCKINSIKAGKMYQHHYTLNTGLQIQPLDENEVYKYLGYNQSLQIHFKDTKLKLKQNFRHRLNTVLKTQLNSRNTIKAINSYAIPILTYSFGILKWTKTDLKNLQRIINTTMTKFRKHHPRGCLQRLTLPRKEGGRGLIDVKNLHNRQISTLRQYFFNRMETSELHRSIVISDRKATALNLQDKTTQTNEQLTDNKTKITEWTKKTLHGRHRQDLCQPNVDKEASNAWLHRGELFPETEGFLMAIQDQVIETRNYQKYIIKKIGTDSCRKCSSSSETIQHITGACKSLAQTDYKYRHDQVANIIHQRLAQKYNFINISCPYYKYNPEPVLENSLTKLYFDRAILTDRTIHYNRPDLTLIDKSNKTGYLIDIAVPNTHNLQNTIAEKLTKYTELKDEITRIWHLRKVTIVPIVISTTGVIPKQLHQSLKTLNLSPNTYNIMQKAVILNTCRLVRKFLQTDHEIIVPHTLPSAIRDTSSSQQSQQQINAVI

SEQ ID NO: 16773 - protein, 1410 aa, Alychna victa
MERSQSSKYYLRSLPGGRRGAPGAGAGCLRMRDTGDVALSRRAPVTQNATAGRRGLNRRARDVEATAESLTGEDTISLFSSIPSTRPSYMTRSKSTMSSASSLDGVVQDVNLDSEPEPTPSAPHKRKRWTPEMNEFILRTYLKLTALDTDTKNYLEPLYLKFIEKFPNMQVSPQRIGDQRRAIIRNKLLPQNMIDQIFHQIKAEITSTQICTQQTVDVGNLTQTRTRMAWLNHHNEAIMKIYYRITNLETNRTMYRKTLHEEFTKLFPTLSHVSEQRIADQRRAIVKYKYFSNDKLEEIKKEIAEEFSLNVNDSTNDNTHIVQIHSTNTDNTNSCEVDDLHNIELNVQNDPIEQVKLDRQPHIDESFRDAYQFYRLTEATHRTYIPKQKSSKNFAKIVNYINEILIPENITAEIDFNTLQLVVYCAAWTAAKVNGTKLTLELSNTNRTGQKDRKPNWQRRLERKLENLRSNIGRVTQFINGNRNTKITNKVKNIMEQYKIHSIHEEPNTHLTHTLDTLKQKLSVVSGRLKRYKACTLRKQQNNQFNNNEKQFYRNIRQVSTNIQDNSVNKVNQVPNQEVLRKFWADIWENPVKHDNEAVWIKDEIINSSSEVQPMKFEHISVDNLKEVISNLHNWKAPGSDYIHCYWYKKFTSIHTYLHKFINEFIKDPGTVPTYITAGTTYMIPKDTNDLTNPEKYRPITCLQTIYKIITSCVSQLLYKHVQDNNILAEQQKGCRKFSQGCKEQLVIDSVILKQVQKTKSDLYTIYIDYKKAYDSVPHSWLVEILEIYKVHPNIITFLKTTMTNWTTRLKLTTPTDIVETCPISIKRGIFQGDALSPLWFCLALNPLSRLLDSTSLGYPLCYSTDGQTKKYTLNHLLYMDDIKLYAVSENHLNQLTKVTEEFTDSIKMIFSIDKCKINSIKAGKMYQHYYTLNTGLQIEPLNEHEVYKYLGYNQSLQIEFKETKLKLKQNFRHRLNTVLKTQLNSRNTIKAINSYAIPILTYSFGIIKWTKSDLKNLQRIINTTMTKFRKHHPRACIQRLTLPRKEGGRGIIDISNLHNRQIGTLRHYFFNRMGTSELHKSVVINDRKATALNLQDETTQTNEQLTDNKTKIIEWTKKSLHGRHRQDLCQPNVDKEASNAWLHRGELFPETEGFLMAIQDQVIETRNYKKYITKQIVSDSCRKCSSSPETIQHITGACKSIAQTDYKHRHDQVANIIHQKLAQQYNFINVLQPYYKYNPEPVLENSTTKLYFDRAILTDRTVHYNRPDLTLIDKTNKTGYLIDIAVPNTHNLQSTIADKLSKYTELKDEIIRIWQLRRVTIVPIVVSTTGVIPKQLHQSLKTLNLSPNTYNILQKAVILNTCRVVRKFLQTDHEIPVTHPQPSATTNTSITSSQQPQTQHHAVGDHPHT

SEQ ID NO: 16774 - protein, 1393 aa, Ochlodes sylvanus
MEKSQSRYNLRSLPGGRRGAPGAGAGCFRMRDTGGEALSRRAPVTQDATAGRRGLNRRARDVEVTAGSSAGEDTISLFSSIPSTRPSYMTRSRSSLSCVSSLDSVVQDVNLDSEPVPTTSAPIKRKRWTPEMNEFILRTYLKLTTLDTDTKNYLEPLYLKFIEKFPNMQVSHQRVGDQRRAIIRNKLLPQNIIDQIFNQVKEEITSTQSQICTNGIQQTITAHNITQTRTRLTWLTHHNEAIMKIYYRITNLETNRTLYRKILHEEFVKIFPTLSHISEQRVADQRRAIVKNRYISEDKLEDIKKEIAEELLLNNCDSIHDNANNIHSTNTDETINTEADVLVNNMELNLQHDSTEQLETERRPHIDESFYEAYQFYSLTEATHRTYIPKQKSSKNLVKIVNYINEILIPENVTADTDFNTLQLVIYCAAWTAAKTNGSKLTLELSKTNRTDVKDRKPNWQRRLERKIEDLRSKIGRVTQFVNGNRNTKITKQVKNIMDQYKIHSIHEEPNTHLTHILDTLKQKLSVVAGRLKRYKACTLRKQQNNEFKNNEKQFYRHIKQEATNLQENSNSKVTYAPNPEELQSFWATIWEQPIKHNNEASWITEEINNSDLMIQPMQFEHITIDRFKEVISNLHNWKAPGSDYIHSYWYKKFTSTHIYLHKFINEFIQDPEIVPKYITTGTTYMIPKDTNDLTDPEKYRPITCLQTIYKIITSCISKVLYEHVQDNNILAEQQKGCRKFSQGCKEQLIIDSVILRQVQKTKSDLYTMYIDYKKAYDSVPHSWLVQVLEIYKVHPNIITFLKTIMTKWTTRLKLTTPTEVIETCPISIQRGIFQGDALSPLWFCLALNPLSRLLNLTSLGYPLCYKTDGQTQKNTLSHLLYMDDIKLYAASENQLYQLTQITEEFTEDIKMILSINKCKINSIKAGKIYQHSYTLNNGLQIQPLDEHEVYKYLGYNQSLQIHFKETKLKLKQSFRHRLNTILKTQLNSRNTIKAINSYAIPILTYSFGIIKWTKTDLKNLQRIINTTMTKFRKHHPRACLQRLTLPRKEGGRGLIDIRNLHNRQISTLRQYFFRRMETSELHKAVVTNDSKATPLNLHDKNIQANEQLTDNKTKIAEWTKKSLHGRHRQDLCQPNVDKEASNAWLHRGELFPETEGFLMAIQDQVIETRNYQKHIIHNTAIDHCRKCNSSSETIQHITGACKSIAQTDYKYRHDQVANIIHQKLAQQYNFIKVLRPYYKYTPETVLENASTKLYFDRAILTDRTIHYNRPDLTLIDKRNKNGYLIDIAVPNTHNLQSTIAEKLTKYSELKDEIIRIWQLRTVTIVPIVISTTGVIPKQLHQSLKTLKLSPYTYTILQKAVILNTCRLVRKFLQTEINFTHTQPPGTTDITSS

SEQ ID NO: 16775 - protein, 1387 aa, Curetis bulis
MSSNKYNLRPLPGGRRGASGANAGCYSMRSIGDAELSRRTSIDKNVTAGRRKLSRRALGEEATADNSGEDTISLFSSIPSTCPSYMTRRTATSSTHSTTESVVQDVNFDSELAPTSGAPSKRRHWTTEMNEFILRTYLQLTALDTDTKTYLEPLHTKFLEKYPNMQVSRQRVGDQRRAIIRNKLLPQRIIDQINNDVKRELEQLQPHLHATQNNSQNLTERQLPHTQRTIPRSQTRMRWTNEQNEGIMRAYYRVTELGINETAYRRRMYEDFISNFPSLTYLSEQRVADQRRAIINNQYISNNRLNILKQEVSHELAINRPTAIAVTTAITFDNNNISENSNFNSQTQASSTYDLMDGTLFDPQINSDRQPHVDETFAQAIQFYKDTTPTNRTYIPKQKSSKKLAKIINYINAIIIPENVTENTDFHTLQTVIYCAAWTAAKVNGAKISLQSGDSPQRQTQHKPNWQKRLERKVDDLRRKIGRLTQFINGNRHRKLVKRVNKIIEQYKTHTVHEEPNTQINHTLDTLKQKLSVASGRLQRYTACTLRKQQNSQFTHNEKLFYRNIREASTNTHQNNVNDTTVHGPSPEALQNFWGNIWEVPTYHNAQADWIERHTKLQTEEMTFEYIPLETFQKVLRCLHNWKSPGSDFIHSYWYKKFTAVHSNLYNIINQFIHDPSTLPEYLTIGKTYMIPKDSSDLSNPAKYRPITCLQTLYKIITSCLSEMIYEHIDANNILAEQQKGCRKSSQGCKEQLIIDSVILKNVQKTKSDLFTMYIDYKKAYDSVPHSWLLKVLEIYKIHPTIVTFLKTIMKNWSTILRLNTATGILETEAIKIQRGIFQGDALSPLWFCLALNPLSDILNSTSLGYPLKNRIETDAQETVLSHLLYMDDIKLYAETESQLNHLANVTEQFTVDIKMEFGIDKCKINSIKAGQNYQHLYTLDTGEKIEPLDEQDTYKYLGYQQSLLIHHKDTKEKITQQFQHRLNTIMKTHLNSRNMIKAINTFVIPLLTYSFGVINWTKTELKKLQRKINTTLTSFRKNHPRACLQRLTLPRKEGGRGLIDIYNLHNKQIKTFRQYFSHKSNLSTLHKLISEYDHKCTPLNLKDKSEQNSEKLIDDKTKLEDWIQKSLHGRHRQDLCQTNVDKEASNAWLNRGELFPETEGFMIAIQDQVIETKNYRRYIIKNLTSDVCRKCHSAPETIQHITGACKSIVQTDYKHRHDQVANIIHQKLAYNFKFVDSVVPYYKYQPQTVLENSTTKLYFDRAILTDRTIHYNRPDITLINKITKTGYLIDIAVPNTHNLQNTIAEKLTKYIELKDEITRLWHLQKVIIVPLVLSTTGVIPKQIHQSLQTLNLPKNTYCLLQKAVILNTCRIVRKFLQVEEVVEGHK

SEQ ID NO: 16776 - protein, 1316 aa, Piruna pirus
METAAESLSSEDTISLLSSIPSTRPSYMTRSTSTLSSVSSLDGVVQDVNFDCEPAPIPSAPLKRKRWTLEMNEFILRTYLKLTALDTDTKNYLEPLYLKFIEKFPNMQVGRQRIGDQRRAIIRNKLLSETKINQIFNQVKEEIAKTQSQSYITGILPTQHSDSLTQTRTRMMWQDFHNDAIMKVYYRLTNLETNKTMYRKRLHEDFIKMFPALSHISEQRVADQRRAIIKNKYFSEEKLEEIKINVAEELQLNQNNCNTIINNIDRTNTEINCNNTESVLNNIQLNLPSTSNEHIERSVCERQKHIDAAFQEAYKFYTCTEPTNRTYIPKQKPSKNFARTVNYINEIILPENISADTDFHTLQTIIYCAAWTAVKINGAKLALETPKNTQPNKRDHRPIWQRRLERKLEDLRSKIGRVTQFINGNRNKKISNHVHNIMKQYKIHSVHEDPNTHLTHTLDTLKQKLSVISARLKRYKACTLRKQQNNQFINNEKQFYRNLKQAATNTQINTNQVNRAPNPEDLQKFWAAIWEQPVKHNSEAEWINQETNNNDRFIQQMEFETITIDTLKSIINKLHNWKAPGSDCIHSYWYKKFTSTHIYLHKCINNFIQNPETVPLYITSGTTFMISKDCNDTTNPGKYRPITCLQTLYKIISSCISELLYNHVQKNNILAEQQKGCRKFSQGCKEQLIIDSVVLKKVQKTKSDLFTMYIDYKKAYDSVPHSWLIQILKIYKVHPKIISFLKTIMINWTTQLKLCTKTDLIETRPISIQRGIFQGDALSPLWFCLALNPLSRLLNSSSAGYPLYYETDGLTQENTLSHLLYMDDIKLYAASENELCKLIKITEEFTSDIKMSFSIDKTKLNSIKAGKIYKHHYTLNTGDQIQPLDEEEVYKYLGYNQSRQIIFKETKLKLKQNFRHRVNTILKTQLNSRNTIKAVNTYAIPILTYSFGIINWTKSDLKNLQRIVNTTMTKFRKHHPRSCIQRLTLPRKEGGRGFIDITNLHNQQISTLRQYFFSKMETSPLHKSIVTNDIKSTPLNLQDKTTQVNELLTDNKTKIEEWAQKSLHGRHRKDLCQPNVDKEASNAWLNRGELFPETEGFLMAIQDQVVETRNYQKHIIKKIVSDICRRCHSSSETIQHITGACKTIAQTDYKYRHDQVANVIHQKLASLYNLISSIQPYYKYNPEPVLENSTTKLYFDRAILTDRTIHFNRPDITLIDKINKTGYLIDIAVPNTHNLQSTITEKLSKYVELKDEVARIWQLQKVTIVPIVISTTGIIPKQLHQSLKTLKLPPYTYNIMQKAVILNTCRLVRKFLQTDQ

SEQ ID NO: 16777 - protein, 1365 aa, Piruna pirus
MSSSVSRRTTVLQDAIGRRGLIRRACDEKTTAESTSGEETSLFSSIPSTRPSYMTRSTSTLSTVSSLDGVAQDVNTDSEPAPTPSAPPKRKRWTLEMNKFILRTYLKLTALDTDTKNYLEPLYLKFIEKFPNMQVSRQRVGDQRRAIIRNKLLPDTTINQIFNQVKEELTSSQSQCLITTSNNMQATQHSHNSTQTRTRRMWQDSHNEAIMKAYYRVTRLETNKTMYRKTLHEHFIKMFPALSHISEQRVADQRRAIVKNKYFSDEKLEELKRNIAEELLLNQNNCSSENTIDNPNVEVSTNNIEPDFLHNIQLNLPLQSNEHIEQTVSERQKNIDETFQEVYKFYKYTEPTNRTYIPKQKPSKNFARIVNYINEIILPENITVDTDFNNLQTLIYCAAWTAVKINGTKLTLETSKNTRPIKKDRKPNWQRRLERRREDLRSKIGRVLQFINGNRNRKISNHVKNIMEQYKIHSIHEESNMLITHTLDTLKQKLSVISGRIRRYKACTQRKQQNNQFINNEKHFYRNIRQAATNTQNNNTSSVNRAPKPEHLQKYWATIWEQPVEHNSEAEWVKAEIISNNLVIQQMDFEYIPVDTLKAVISKLHNWKAPGSDYIHSYWYKKFTSTHTYLHKFINIFIQNPETVPTYITLGTTFMIPKDHNDTANPEKYRPITCLQTLYKIITSCLSELLYYHVQKNNILAEQQKGCRKFSQGCKEQLIIDSVVLKKVHRTKSDLYTTYIDYKKAYDSVPHSWLVQILEIYKVHPKIISFLKTMMSNWTTQLKITTQTETIETSPISIQRGIFQGDALSPLWFCLALNPLSKSLNSTSAGYPLLYETDGQTQQNTLNHLLYMDDIKLYAASENQLYKLIKITEEFSHDINMSFSINKSRINSIKAGKIYQHHYTLITGDQIQPLEEQEVYKYLGYNQSRQIQFKDTKLKLKQNFRHRLNTILKTQLNSRNTIKAINTYAIPILTYSFGIINWSKSDLKNLQRIINTTMTKFRKHHPRSCLQRLTLARKEGGRGLIDISNLHNQQICTLRQYFFNKMETSTLHKSIAINDIKSTPLNLNDKTKQPNELLTDNKTKVTDWTKKSLHGRHRQDLCQPNVDKEASNTWLNRGELFPETEGFLIAIQDQIIETRNYQKYIMKKLSSDNCRKCHSASETIQHITGACKTIAQTDYKYRHDQVANVIHQKLARLYNLKNSVHPYYKYIPEPVLENSTTKLYFDRAILTDRTIHYNRPDITLIDKCSKTGYLIDIAVPNTHNLQSTITEKLSKYAELKDEVIRIWQLRKVTIVPIVISTTGVIPKQLHQSLSTLNMPPNTYAILQKAVILNTCRLVRKFLLTDQESHVTYIQPSATLPPSARC

SEQ ID NO: 16778 - protein, 1430 aa, Nastra julia
MLVVIVKCCISFFLNIPNTLMERSQSSRYNLQSLPGGRRGAPGAGAGCFSMRDTGGEVLSRRAPVTQNTTAGRRGLNRRTRDVEATAESSTGEDTETLFSSIPSTRPSYMTRSTATLSTVSSLDGVAQDVNLDSEPAPTQSAPHKRKRWTPEMNEFILRTYYKLTALDTDTKNYLEPLYLKFIEKFPNMQVSSQRIGDQRRAIIRNKLLPQSIIDEIYNQVKDETTSPQISTEQTRTGDNVTQIRTRMAWLDHHNEAIMKIYYRITNLETNRTMYRKTLHEEFIKKFPTLSHVSEQRVADQRRAIVKYKYFSNDKIEKIKKEVAEELSLNTNDSINNNTNNIHYIDTDNSENEVTFLNDTELNLQHESREHLELERQPHIDETFHEAYEFYKFTEATCRTYIPKQKSSKNLSKIVNYINEVLIPEKVTADTDFNGLQLIIYCAAWTAAKVNHTKLTFENANNHRTNKNDHKPNWQRRLERKLEDLRSKIGRVTQYVNGNRNTKITNQVKTIVEQYKIHSVHEEPNTHLTHTLDTLKQKLSVVSGRLKRYKACTQRKQQNNQFNNNEKQFYRKIRQAATNIQDSGANEINLAPNSEDLRSFWAGIWEQPVKHNDEAMWIKEEMINSEAVALSMKFEHISVETFKDVISNLHNWKAPGSDYIQSFWYKKFTSTHTYLHKFINEFIQDPGKVPKYVTSGTTYMIPKDNSDLTNPEKYRPITCLQTIYKIITSCISQLVYKHIVQDNNILAEQQKGCRKSSQGCKEQLIIDSVILKQVQKTKSDIYTMYIDYRKAYDSVPHSWLVQVLEIYKVHPTIITFMKTIMTNWTTKLKLATSTEVIETSPISIQRGIFQGDALSPLWFCLALNPLSRLLNMTSLGYPLCYNTDGQTRQYILNHLLYMDDIKLYATSENQLHQLTKLTEEFTDDIKMTFSMDKCKINSIKAGKMHQHHLTLNTGLQIQSLDEHEVYKYLGYDQSLQIEFKDTKLKLKQNFRHRLNTVLRTQLNSRNTIKAINSYAIPILTYSFGIIKWTKTDLKNLQRIINTTMTKFRKHHPRACLQRLTLPRKEGGRGLIDIKNLHNRQVSTLRQYFFNRMETSELHKAIVINDIKATPLNLQDKTTQTNEQLTDNKTKITEWTKKSLHGRHRQDLCQPNVDKEASNAWLHRGDLFPETEGFLMAIQDQVIETKNYQKYITKKIGSDNCRKCSSSSETIQHITGACKSIAQTDYKYRHDQVANIIHQKLAQKYKFINTLCPYYKYNPEPVIENSTTKLYFDRAILTDRTIHYNRPDLTLIDKTNKTGYLIDIAVPNTHNLQNTIAEKLTKYTELKDEITRIWQLRKVTIVPIVLSTTGVIPKQLHTSLNTLNLAPNTYIKMQKSVILNTCRLVRKFLQTDHEVTLTHTLPSATSITDPHSSQQFQQQNNVAEVVNNSST

SEQ ID NO: 16779 - protein, 1270 aa, Polyctor polyctor
MNEFILRTYLKLTALDTDTKNYLEPLYLKFIEKFPTMQVGRQRVGDQRRAIIRNKLLPQNIIDQIFNQVKEEITRTQSQLLIPNTQLTTTENNITQTRTRMTWLDHHNEAIMTIYYRITNLEINKTMYRKKLHEEFIKTFPTLSYISEQRVADQRRAIINNKYLSDQKLEDIKQKVAKEFVQNDNNGINIINKHISTHNTTQNTDNPETDFLNNIVLNFENEYTKHEEAERKTHIDETFKKAYDFYRYTEPTNRTYIPKQNTSIKLVKIVNYINKIIIPEMITEEIDFATLQSVIYSAAWTAAKLNGAKLTLEPSKTSRIVKKNHMPNWQRRLERKLEDLRSKIGRVTQFINGNKNKKITKHVQKIMEQYKVHSVHEEPNTRLTHTLDTLKQKLAVIAGRIKRYKACTLRKCQNQQFVTNEKLFYRNIRQSTTNKQTNNISQDHLAPNPENLQKFWSAIWEQPVNHNEEAVWIKEEVIDNDLKIKPMEFERISLDTLKAVLGRLHNWKAPGSDYIHSYWYKKFTSVHTYLHKFINDFIQSPETIPLYISSGITFMIPKDPNDTTNPEKYRPITCLQTIYKIITSCLSELLYNHVQQNSILAEQQKGCRKFSQGCKEQLIIDSVILKQTHKNKSDLYTMYIDYKKAYDSVPHTWLVQILSIYKVHPKIISFLKIVMTNWTTRLKLSTPKDTIETDPISIKRGIFQGDALSPLWFCLALNPLSKLLNSTSLGYPLSYETKGRPEKTSLSHLLYMDDIKLYAESEKQLYQLAETTENFTEDIKMIVSIDKTKINSIKAGKRYQHYYTLLTGDQIQPLDEQEAYKYLGYNQSLQIHFKETKIKLKQNFQHRLNTIMKTQLNSRNTIKAINTYAIPILTYSFGIINWSKSDLKNIQRIINTTLTRFRKHHPRSCLQRLTLPRKEGGRGLIDITNLHNQQIKTLRHYFFNKMETSTLHKAIVSNDIKCTPLNLQNKTTQANELLTDNRTKIAEWTKKSLHGRHRQDLCQPNVDKEASNTWLHRGELFPETEGFLMAIQDQVIETKNYQKFIIKTVTSDSCRKCRSSAETIQHITGACKTIAQTDYKYRHDQTANIIHQKLAHRYNLINSVKPYYKYNPQPVLENSTIKLYFDRAILTDRTIHFNRPDITLIDKLNNTSYIIDIAVPNTHNLQSTIAEKLSKYTELKEEITRIWKLQKVTIVPIVISTTGVIPKQLHLSLKTLNLPPNTYKLMQKAVILNTCRLVRKFLQTDHENMYSSYIHDTQAQPSDTTPSSSQ

SEQ ID NO: 16780 - protein, 1300 aa, Calpodes ethlius
MEESQSSRYNLRSLPGGRRGAPGAGAGCFSMRDTGGEALSRRAPVTKDTTAGRRELNRRIRDVEVTAEPSSGEDTISLFSSIPSTRPSYMTRSKSALSSVSSLDSVVQDVNLDSEPAPTQSAPHKRKRWTPEMNEFILRTYLKLTALDTDTKNYLEPLYLKFIEKFPNMQVSSQRIGDQRRAIIRNKLLPQAVIDEIVKQVTNEMTSIPQMSTTGSQQDIAADNLPKTRTRMAWLNHHNEAIMKIYYRITNLETNKTMYRKTLHEEFVKTFPTLSHISEQRVADQRRAIVKYKYFSDDKIEKIKKEIAEELLLNANDSINDNSSSILITNADDTNNLETDFLKNIELHLQNELNEQMIPERQPHIDDLFHEAYTFYRVTVPTHRTYIPKQKSSKNLIKIVNYINEVLIPENINADTDFNTLQLIIYSAAWTAAKINGSKLKLEHPENNQNYKKDRIPNWQKRLERKRENLRCKIGRITQFINGNRNTKIHKQVKNIMEQYRVHSVHEEPNTHLSHTLDTLKQKLSVVSGRLKRYKACTLRKQQNNQFNNNEKQFYRNIRQASANLQDKGANKENQAPIADHLKSFWAGIWEQPVKHNDEAVWIKQEIINNESLIEPMKFEHIPIDTLKEVINNQHNWKAPGSDYIHSYWYKKFTSTHTYLHKFINQFIQDPGTVPTYIMNGTTYMISKDNNDLTNPEKYRPITCLQTIYKIITSCISHLLYKHIQNNNILAEQQKGCRKFSQGCKEQLIIDSVILKQVQKTKSDLYTMYIDYKKAYDSVPHSWLVQVLEIYKIHPNIITFLKTIMTNWTTRLRLTTPTETIDTCSISIQRGIFQGDALSPLWFCLALNPLSKLLNATSLGYPLYYKTDGQTQSNTLNHLLYMDDIKLYAASENQLCQLTRLTEEFTNDIQMVFSIDKCKINSIKAGKMYQHHYTMNTGLQIQPLDEHETYKYLGYNQSLQIQFKDTKLKLKQNFRHRLNTILKTQLNSRNTIKAINSYAIPILTYSFGIIKWTKSDIKNLQRIINTTMTKFRKHHPRACLQRLTLPRKEGGRGIIDINNLHNRQISTLRQYFFDRMETSELHKAVIINDSKATALNLQDNSTQPNEQLTDNKTKIAEWTKKSLHGRHRQDLCQPNVDKEASNAWLHRGELFPETEGFLMAIQDQVIETRNYQKFIIKKIASDSCRRCYTASETIQHITGACKSITQTDYKYRHDQVANIIHQKLAQQYKFIDTLQPYYKYNPESVLENCNTKLYYDRAILTDRTIHYNRPDLTLIDKTNKTGYLIDIAVPNTHNLQNTIA

SEQ ID NO: 16781 - protein, 1380 aa, Laspeyria flexula
MGRRGTPGANAGCLSMRTIGDAELNRRRTPIDKSVTADYLGDDSRSLFSSFPSTRPSYMTRRTPTLSTAGTSNSVVQEVNLDSQFAPTSDSNSSLIRRRWTPEMNKFIMRTYLQLTALNTDTKNYLEPLHLKFIEKFPQMQVSRQRIGDQRRAIIRNKLLPQDTIDLIHNEIKAELSQLQLSSSQNNTDPYLTCDPITTDHNTPETSKTQNTTQTRMRWTTEQNETIIRSYYRITNLGTNETAYRPLLHADFINRFPSLSHLSQQRIADQRRAIINNKYISKDRLNAIKQEVAEQLGINNNNVNNPSTDDNIDLNSHECNNENMESFFLDIIDINQESELNSNINSERQPQIDETFQQTLQFYNDSEPTKRAYIPRQKPSKKLANIIHYLNTIILPENTSINTDFNTLQTVIYCAAWTAAKVNGAKLTLQNRDTQQRATKEYKPKWQRRLENKLEDLRTKIARLTQFNKGNRSRNVVKHANKIMDQYKSHTIHEEPNTQASHTLDTLKQKLAVTTGRLQRYKACTLRKQQNIQFTRNEKLFYRNIKQATTNTPRSNTIDDAQDFPTADTLKNFWSGLWTDPIEHNDDADWIHTQMEHTNSHIHTMAFEHIPIEIFQTVLRNLHNWKSPGSDYIHSYWYKKFTTVHSYLHNFINIFIQDPSKIPTYLTLGRTYMISKDSNDLSNPAKYRPITCLQTLYKIITGCISSLIYEHINTNNILAEQQKGCRKFSQGCKEQLIIDSVILRQVQRERSDLFSMYIDYKKAYDSVPHSWLVKVLEIYKIHPSIVNFLKTIMTQWSTILTLTTSTQTIETSAIQIKRGIFQGDTLSPLWFCLALNPLSDILNSISLGYPLKNTETNDRNHLINHLLYMDDIKLYAETESQLHELANLTEIFSNDIRMEFGIDKCKINSVKAGQNYKHEYTLDTGEHIKSLNEQDAYKYLGYNQSLQIHHKETKLQLTQQFQHRLNTILKTQLNSRNTIKAINTFVIPLLTYSFGVINWTKTELKNLQRKINTTMTKFRKNHPRSCLQRLTLPRIEGGRGLIDIVNLHNKQITTLRQYFYTKTETSTLHKSIVQHDNKLTPLNLKDTTRQKNETLVEDRTKITEWTQKSLHGRHRQDLCQLNVDKEASNAWLNRGELFPETEGFMIAIQDQVIETKNYRKYIIKNLTTDICRKCNSSPETIQHITGACKSIAQTDYKHRHDQVAKVIHQKLAHQYKLIDKYTPYYNYNPETILENTTTKLYFDRAILTDRTIHYNRPDITLINKINKTGYLIDIAVPNTHNLQTTIAEKLTKYIELKDEISRLWHLEKVLIVPIVLSTTGVVPKQLHQSLKTLNIPPKTYHLLQKAVILNTCRLVRKFLQCTQDNTTDSPTIPTQPMISH

SEQ ID NO: 16782 - protein, 1393 aa, Laspeyria flexula
MEMSKKVYSLRPLPGGRRGTPGANAGCLSMRTIGDAELNRRRTPIDKSVTADYLGDDSRSLFSSIPSTRPSYMTRRTPTLSTAGTSNSVVQEVNLDSQFAPTSDSNSSLIRRRWTPEMNKFIMRTYLQLTALNTDTKNYLEPLHLKFIEKFPQMQVSRQRIGDQRRAIIRNKLLPQDTIDLIHNEIKAELSQLQLSSSQNNTDPYLTCDPITTDHNTPETSKTQNTTQTRMRWTTEQNETIIRSYYRITNLGTNETAYRPLLHADFINRFPSLSHLSQQRIADQRRAIINNKYISKDRLNAIKQEVAEQLGINNNNVNNPSTDDNIDLNSHECNNENMESFFLDIIDINQESELNSNINSERQPQIDETFQQALQFYNDSEPTKRAYIPRQKPSKKLANIIHYLNTIILPENTSINTDFNTLQTVIYCAAWTAAKVNGAKLTLQNRDTQQRATKEYKPNWQRRLENKLEDLRTKIARLTQFNKGNRSRNVIKHANKIMDQYKSHTIHEEPNTQASHTLDTLKQKLAVTTGRLQRYKACTLRKQQNIQFTRNEKLFYRNIKQATTNTPRSNTIDDAQDLPTADTLKNFWSGLWTDPIEHNDDADWIHTQMEHTNSHIHTMAFEHIPIEIFQTVLRNLHNWKSPGSDYIHSYWYKKFTTVHSYLHNFINIFIQDPSKIPTYLTLGRTYMISKDSNDLSNPAKYRPITCLQTLYKIITACISSLIYEHINTNNILAEQQKGCRKFSQGCKEQLIIDSVILRQVQRERSDLFSMYIDYKKAYDSVPHSWLVKVLEIYKIHPSIVNFLKTIMTQWSTILTLTTSTQTIETSAIQIKRGIFQGDTLSPLWFCLALNPLSDILNSISLGYPLKNTETNDRNHLINHLLYMDDIKLYAETESQLHELANLTEIFSNDIRMEFGIDKCKINSVKAGQNYKHEYTLDTGEHIKSLNEQDAYKYLGYNQSLQIHHKETKLQLTQQFQHRLNTILKTQLNSRNTIKAINTFVIPLLTYSFGVINWTKTELKNLQRKINTTMTKFRKNHPRSCLQRLTLPRIEGGRGLIDIVNLHNKQITTLRQYFYTKTETSTLHKSIVQHDNKLTPLNLKDTTRQKNETLVEEKTKITEWTQKSLHGRHRQDLCQLNVDKEASNAWLKRGELFPETEGFMIAIQDQVIETKNYRKYIIKNLTTDICRKCNSSPETIQHITGACKSIAQTDYKHRHDQVAKVIHQKLAHQYKLIDKYTPYYNYNPETILENTTTKLYFDRAILTDRTIHYNRPDITLINKINKTGYLIDIAVPNTHNLQTTIAEKLTKYIELKDEISRLWHLEKVLIVPIVLSTTGVVPKQLHQSLKTLNIPPKTYHLLQKAVILNTCRLVRKFLQCTQDNTTDSPTIPTQPMIS

SEQ ID NO: 16783 - protein, 1393 aa, Laspeyria flexula
MEMSKKVYSLRPLPGGRRGTPGANAGCLSMRTIGDAELNRRRTPIDKSVTADYLGDDSRSLFSSIPSTRPSYMTRRTPTLSTAGTSNSVVQEVNLDSQFAPTSDSNSSLIRRRWTPEMNKFIMRTYLQLTALNTDTKNYLEPLHLKFIEKFPQMQVSRQRIGDQRRAIIRNKLLPQDTIDLIHNEIKAELSQLQLSSSQNNTDPYLTCDPITADHNTPETSKTQNTTQTRMRWTTEQNETIIRSYYRITNLGTNETAYRPLLHADFINRFPSLSHLSQQRIADQRRAIINNKYISKDRLNAIKQEVAEQLGRNNNNLNNPSTDDNIDLNSHECNNENMESFFLDIIDINQESELNSNINSERQPQIDETFQQALQFYNDSEPTKRAYIPRQKPSKKLANIIHYLNTIILPENTSINTDFNTLQTVIYCAAWTAAKVNGAKLTLQNRDTQQRATKEYKPNWQRRLENKLEDLRTKIARLTQFNKGNRSRNVVKHANQIMDQYKSHTIHEEPNTQASHTLDTLKQKLAVTTGRLQRYKACTLRKQQNIQFTRNEKLFYRNIKQATTNTPRSNTIDDAQDFPTADTLKNFWSGLWTDPIEHNDDADWIHTQMEHTNSHIHTMAFEHIPIEIFQTVLRNLHNWKSPGSDYIHSYWYKKFTTVHSYLHNFINIFIQDPSKIPTYLTLGRTYMISKDSNDLSNPAKYRPITCLQTLYKIITACISSLIYEHINTNNILAEQQKGCRKFSQGCKEQLIIDSVILRQVQRERSDLFSMYIDYKKAYDSVPHSWLVKVLEIYKIHPSIVNFLKTIMNQWFTILTLTTSTQTIETSAIQIKRGIFQGDTLSPLWFCLALNPLSDILNSISLGYPLKNTETNDQNHLINHLLYMDDIKLYAETESQLHELANLTEIFSNDIRMEFGIDKCKINSVKAGQNYKHEYTLDTGEHIKSLNEQDAYKYLGYNQSLQIHHKETKLQLTQQFQHRLNTILKTQLNSRNTIKAINTFVIPLLTYSFGVINWTKTELKNLQRKINTTMTKFRKNHPRSCLQRLTLPRIEGGRGLIDIVNLHNKQITTLRQYFYTKTETSTLHKSIVQHDNKLTPLNLKDTIRQKNETLVEDKTKITEWTQKSLHGRHRQDLCQLNVDKEASNAWLNRGELFPETEGFMIAIQDQVIETKNYRKYIIKNLTTDICRKCNSSPETIQHITGACKSIAQTDYKHRHDQVAKVIHQKLAHQYKLIDKYTPYYNYNPETILENTTTKLYFDRAILTDRTIHYNRPDITLINKINKTGYLIDIAVPNTHNLQTTIAEKLTKYIELKDEISRLWHLEKVLIVPIVLSTTGVVPKQLHQSLKTLNIPPKTYHLLQKAVILNTCRLVRKFLQCTQDNTTDSPTIPTQPMIS

SEQ ID NO: 16784 - protein, 1360 aa, Spialia spio
MTRRTPTLSSASTVDGVVPDVIPDSELAPTSATTTTRRRWTPEMNMFILRTYFLLTALDTDTKTYLEPLHLKFIEKYPDMQVSRQRVGDQRRAIVRNKLLAQDIIDRIYNEVKEELNLLQTNIISTAQKQIHHPETHIPHTRMRWTTEQNETIIRLYYRITHLDTNRTAYRQPLHEAFISAFPSLTHLSEQRIADQRRAIISNQYISPTRLNEIKMQVAEELNINIDNTRTQETNQMTDDTDNNNPNFNNTDVTDTNFLNNIELNLPEECIPDQQQLTQDPVIDEQFQQAFKYFKNTDPTSRTYIPKQKPSKRLAKIVHYLNKITLHNHITLDTDFTTLQTAIYSAAWTAAKINGSKLSLEPCNRQGTLQTDKRPNWQKRLERRLEDLRTKIARLTQYINGNRSRKLEQHVNNIIKQYKIHSIHEEQNTHLSHTLDTLKQKLAVVAGRLRRYKECTIRKQQNNLFTNNEKQFYRNMRQTTSNVQENAINIDGSPDPEDLQNYWGSIWEQPVHHNYHADWIQSELEENNTRTSDMTFNHIPINTFKKVIQNLHNWKAPGSDFIHSYWYKKFTSVHPYLHNHLNLFLENPNTIPHYLTLGTTYMLPKDSNDRTNPAKYRPITCLQTLYKIMTSCLSELIYKHIDNNNILAEQQKGCRKFSQGCKEQLVIDSVILKQVQKNKSDLFTMYIDYRKAYDSVPHSWLIQVLEIYKIHPTIIKFLKTTMSNWTTRLKLTTQNNSIETEPIKIQRGLFQGDALSPLWFCLALNPLSNILNETSKGYFVKHKNTEGQTDITENINHLLYMDDIKLYADSENNLKELANITEKFSNDIKMDFGIDKCKINSVKAGQNYQHHYTLETGAQIEPLDEQETYKYLGYNQSRQIQHKDTKQKLKQQFRHRLNAILRTQLNSRNTVKAINTFAIPILTYSFGIINWSKSDLKALQRIVNTTMSKFRKHHPRSCFQRLTLPRKEGGRGLIDIMNLHNRQISTLRQYFFSKSVTSSLHKAIVNTDRKLTPLNLQDSSKQNNERLTDDKMKCAEWAGKSLHGRHYHDLSQTNVDKKASNAWLARGELFPETEGFIMAIQDQVIETRNYQKYITKTITVDTCRKCNSCPETIQHITGACKAIAQTEYKHRHDQIANIIHQKLAHQQNLISSIQPYYKYSPESVLENSSCKLYFDRAILTDRTIHYNRPDITLIDKTNKTAYLIDIAVPNTHNLQSTIAEKLTKYTELKDEIIRLWHLKKVTIIPIVLSTTGVIPTQLHQSIRSLNLPPETFNLLQKAAILNTCRIVRKFLQTEHEDPLLSITPLNTQPAIQTSTNTQPEIHPSTNTQPATHPSTNTQPAAHPSTNTTTTQYITDTSPTT

SEQ ID NO: 16785 - protein, 1407 aa, Spialia phlomidis
MEPSKSKYNLRSLLGGRRGAPGAGAGCYSSRDTGGEALSRRALVTQHATAGRRELSRRAHGVDATADSSGDDTISLFSSIPSTRPSYTTRGTSTLSSVSTVDGVVPDVNPDSELAPTSATSTTRRRWTPEMNMFILRTYLLLTALDTDTKTYLEPLHLKFIEKYPDMQVSRQRVGDQRRAIVRNKLLAQDIIDRIYNEVKEELNLLHTSITSTTQTQIHHPETHIPHTRMRWTTEQNETIIRLYYRITHLDTNRTAYRQPLHEAFISAFPSLAHLSEQRIADQRRVIISNKYISSTRLNEIKMQVAEELARNIDNSTTQETNQMTDDTDNNNINFSNNDTNFLNSIELNLPEEPIPDRQQLTRDPVIDEQFQQAFKYFKNTDPTSRTYISKQKPSKRLAKIVHYLNKVTLHEHINLDTDFTTLQTAIYSAAWTAAKVNGSKLSLEPCNRHCTLQTDKKPNWQRRLERRLDDLRAKIARLTQYINGNRNRKLEQHVNNIIKQYKIHSIHEKSNTHLSHTLDTLKQKLAVVSGRLRRYKECTLRKQQNNQFTNSEKQFYRNMRQTTSNVQENAINIDVSPDPEDLQNFWGRIWDQPVHHNYQADWIQTEIEENNTRTSDMPFNHIPIDTFKKVIQNLHNWKAPGSDFIHSYWYKKFTSVHPYLHNYLNLFLEKPNTMPHYLTLGTTYMLPKDSNDRTNPAKYRPITCLQTLYKIMTSCLSELIYKHIDNNNILAEQQKGCRKFSQGCKEQLVIDSVILKQVQKNKSDLFSMYIDYKKAYDSVPHSWLVQVLEIYKIHPTIITFLKTTMSNWTTRLKLTTLNNSIETEPIKIQRGLFQGDALSPLWFCLALNPLSNILNASSKGYVLKHTNTERQTDIRENINHLLYMDDIKLYADNENNLSELANITEMFSTDIKMDFGIDKCKINSIKAGRNYQHYYTLETGAQIEPLEEQESYKYLGYNQSRQIHYKDTKLKLKQQFRHRLNAILRTQLNSRNTIKAINTFAIPILTYSFGIINWSKSDLKALQRIINTTMSKFRKHHPRSCLQRLTLPRKDGGRGLIDIMNLHNKQISTLRQYFFSKAETSSLHKAIVKTDRKLTPLNLQDSSKQNTEKLTDDKTKCAEWAGKSLHGRHYHDLSQSNVDKKASNAWLNRGELFPETEGFIMAIQDQVIETRNYQKYITKTLTVDTCRKCNSCSETIQHITGACKAIAQTEYKHRHDQIANIIHQKLAYQQNLITTVQPYYKYSPESVLENSTCKLYFDRAILTDRTIHYNRPDITLIHKTNKTAYLIDIAIPNTHNLQSTIAEKLTKYTELKDEIIRLWHLQKVTIVPIVLSTTGVIPTQLHQSIRCLNLPPETYKLLQKAAILNTCRIVRKFLQTEHEGSLLSTTPSNTQSAIHPAIQPSTNTTT

SEQ ID NO: 16786 - protein, 1323 aa, Spialia mafa
MTRGTSTLSSASTVDGVVPDVIPDSELAPTSATSTTRRRWTPEMNMFILRTYLLLTALDTDTKTYLEPLHLKFIEKYPDMQVSRQRVGDQRRAIVRNKLLAQDTIDRIYNEVKEELNLLQTSIISTTQTQKDRLETHTPHTRIRWTTEQNETLIRLYYRITHLDTNRTAYRQPLHEAFISAFPSLAHLSEQRIADQRRAIISNQYISATRLKEIKIQVAEELAINIDNTRTQETNQMTDNIDNNNIININNTDTNFLNNIDLNLPEESIPDEQLTRDPVIDEQYKKAFEYFKNTDPTSRTYIPKQKPSKRLAKIVHYLNKVTLHDHINLDTDFTTLQAAIYSAAWTAAKVNGSKLSLELCNTNRTLKIDKRPNWQRRLERKLEDLRAKIARLTQYINGNRSRRLEQHVNNIIKQYKIHSIHEEPNTHLSHTLDTLKQKLAVVSGRLRRYKECTIRKQQNNLFTNNEKQFYRNMRQTTSNVQENSSNIDVSPDSEDLQNFWGRLWEQPVHHNYQADWLQTEFEKNNTRTIDMPFNHIPIDTFKKVIQNLHNWKAPGSDFIHSYWYKKFTSVHPYLHNYLNRFLEKPNSIPHYLTLGTTYMLPKDSNDRTDPAKYRPITCLQTLYKIMTSCLSELIYIHIDNNNILAEQQKGCRKFSQGCKEQLVIDSVILKQVHKNKSDLFTMYIDYKKAYDSVPHSWLIQVLEIYKIHPTIITFLKTTMSNWTTKLKLTTPNNSIETEPIKIKRGLFQGDALSPLWFCLALNPLSNILNATSKGYFIKHKNTEGQTDITENINHLLYMDDIKLYADSENNLNELANITEKFSNDIKMNFGIDKCKINSIKAGRNYKHHYTLETGAQIEPLDEHETYKYLGYNQSRQIQYKDTKHKLKQQFRHRLNAILKTQLNSRNTVKAINTFAIPILTYSFGIINWSKSDLKALQRIVNTTMSKFRKHHPRSCYQRLTLPRKDGGRGLIDIMNLHNRQISTLRQYFFSKSISSSLHKAIVNTDHKLTPLNLQDSSEQNNEKLTDDKMKCAEWAGKSLHGRHYHDLSQTNVDKKASNEWLTRGELFPETEGFIMAIQDQVIETRNYQKYITKTLTVDTCRKCNSCPETIQHITGACKAIAQTEYKHRHDQIANIIHQKIAYQQNLIASVQPYYKYSPESVLENSTCKLYFDRAILTDRTIHYNRPDITLIHKSSKSAYLIDIAVPNTHNLQSTIAEKLTKYTELKDEIIRLWHLQKVTIIPIVLSTTGVIPTQLHQSIRSLNLPPETYNLLQKAAILNTCRIVRKFLQTQHEDPLLSTTPLTTQPAIHHTIQPSQTSTPYNM

SEQ ID NO: 16787 - protein, 1333 aa, Spialia mafa
MTRGTTTLSSASTVDGVVPDVIPDSELAPTSATSTTRRRWTPEMNMFILRTYLLLTALDTDTKTYLEPLHLKFIEKYPDMQVSRQRVGDQRRAIVRNKLLAQDVIDRIYNEVKEELNLLQTNIISSSQTQMHHPETHIPQTRMRWTTEQNETIIRLYYRITHLDTNRTAYRQPLHEAFISAFPSLAHLSEQRIADQRRAIISNQYICSSRLNEIKMQVAEELSTNLDISRTQVTNEMTDNTDNNNINFDTNFLNSIEIDLPEESISDRQQLTRDPVIDEQFQQAFEYFKNIDPTSRIYIPKQKPSRRLAKIVHYLNKTTLHELINPNTEFNTLQTAIYSAAWTAAKVNGSKLSLEPCNRHRTLQTDKKPNWQRRLERKLDDLRTKIARLTQFINGNRSKKLEQHVNNIKKQYKIHSIHEEPNTHLSHTLDTLKQKLAVVSGRLRRYKECTLRKQQNNVFTNNEKQFYRNMRQTTTNLQENAFNIDVSPDPEDLQKFWGRIWEQPVHHNYQADWIRTEIEENNTKTLDMPFNNIPIDIFKKVIQNLHNWKAPGSDFIHSYWYKKFTSIHSYLHNYLNLFLEKPHKIPHYLTLGTTYMLLKDSNDRTNPSKYRPITCLQTLYKIMTSCISELIYKHIDSNNILAEQQKGCRKFSQGCKEQLVMDSVTLKQVQKNKSDLFSMYIDYKKAYDSVPHSWLIQVLEIYKIHPTIITFLKSTMANWMTRLKLTTSNNTIETEPIKIQRGLFQGDALSPLWFCLALNPLSNILNATSKGYNLKYSDTDGQTDITENINHLLYMDDIKLYAENEDYLNELANITENFSNDIKMDFGIDKCKINSIKAGQNYQHHYTLETGAQIESLGEQETYKYLGYNQSRQIQHKDTKLKLKQQFRHRLNAILRTKLNSRNTIKAINTFAIPILTYSFGIINWSKSDLKALQRIINTTMSKFRKHHPRSCLQRLTLRRKDGGRGLIDIMNLHNKQISTLRQYFFTKSESSSLHKAIVKADCKLTPLNLRDSSKQNNETVTDDKTKCAEWAGKSLHGRHYHDLSQPNVDKKASNAWLNRGELFPETEGFIMAIQDQVIETRNYQKYITKTLNNDTCRKCNSCPETIQHITGACKAIAQTEYKHRHDQIANIIHQKLAYQQNLITSVQPYYKYSPESVLENSTCKLYFDRAILTDRTIHYNRPDITLVNKTKKSAYLIDIAVPNTHNLQSTIAEKLTKYTELKDELIRLWHLQKVTIIPIVLSTTGVIPNQLHQSIQSLNLPPETYHLLQKAAILNTCRIVRKFLQTEHEDPQIVSTIPHTQLAINPTIQPSTHTNTAHIPNSTTLNIATFNS

SEQ ID NO: 16788 - protein, 1223 aa, Parnassius apollo
MNVFILRTYLQLTFLDTDTKNYLEPLRQKFVEKYPNMLVSRQRVGDQRRAIVRNKLISQKIIDQIYKEVREELYHHARLPTTHETQQEILETHNTQARTKMRWTKEQNETLMRLYYQITQLNTNRTSYRKQLHEAFVNAFPTLAHLNEQRIADQRRAIVNNKYISDDKLNEIKQQVNKQLSINLNNSSDANTIPHTIQENTQDANNTDIPFINSIEVSLLSLSQPERDPLIDETFQQALLHFKDTDPTSRVYIPKPSKKLAIIVHYLNEKTLPETINTETGFITLQTAIYCAAWTAAKVNGAKLSYESQKKSYQAKDDYKPHWQKRLERRLGELRTKIGRVTQYINGIRSKHLERHIKNIVQQHKTHSVHEEQNKHLTHTLDTLKQKLAVISGRLRRYKVCTLRKQQNNQIQNNEKQFYRNIKQTTANVQKRNWLGDGPNPEDMRKFWAEIWERPVEHNTHANWIQTETRNSNLNIQEMSFEHIPIETFKKVINKLHNWKAPGSDFIHNYWYKKFTSIHSYLYNHLNEFIVNPLTMPAYMTVGITYMIPKDHNDHNNPAKYRPITCLQTVYKILTSCVSELIYKHINDNSILAEQQKGCRKFSQGCKEQLIIDSVILKQVQKEKSDLFSMYIDYKKAYDSVPHSWLIEVLKMYKIHPKLIILLTSLMSLWKTRLILTTPTKMIETNPIKIQRGIFQGDALSPLWFCLAINPLSKLLNSSAVGYPLHYTDNNNIRININHLLYMDDIKLYADTENHLNQLAYLTEQFTNDIKMEFGIDKCKINSITAGHNYQHHFTLETGDKIEPLDENEAYKYLGYNQSRQIHYKYTKEKLKQQFRHRINTILKTQLNARNTIKAINTFAVPVLTYSFGIINWAKSDLKALQRIINTTLTKFRKHHPRSCLQRLTLPRKEGGRGIIDILNLHNKQITTLRQYFFNKSESSTFYKVIVQNDSKLTPLNLKENTTQNSKKLTDDKTKITEWANKSLHGRHDISQNNVDKEAWNAWLIHGELFPETEGFMIAIQDQVIETRNYQKHIIKILTSDTCRKCNNCPETIQHITGACKAIAQTDYKHRRDQVANIIHQKLAHQHYLINSIEPYYKYNPESVLENPKTKIYFDRAILTDRTIHCNRPDITLINKTNKTGYLIDIAVPNTHNLQTTIAEKLSKYAELKDEITRLWHLQKVIIVPIVVSTTGVIPKQLHQSVKTLNLPPNTYKLLQKAVILNT

SEQ ID NO: 16789 - protein, 1425 aa, Apostictopterus fuliginosus
MMERVQKSKYNLRPLPGGRRGAPGAGAGCLSMRTTGDEQLSRRALVTQDVTAERRELNRRAPGVEVTADSSTGDSTQSLFSSISSTHPSYMTRRTSSLSSIGMRDDVVQIVTPDTEPAPISGASRTRKRWTTDMNKLILRTYLQLTLLETDTYRYLEPLHSKFITEYPNMAVTPQRLGDQRRAIIRNRLLPQTTIETIYAQVKQELEHLQSSCSKLSKPTQNTVLSHLTSSEKPNTHIRMRWTEQQNEAIIRSYYRVTLLDTNKTGYRKLLHQNIVNTFPSLAHLSEQRIADQRRAIIVNKYFSNERLNAIKHEILQEISLSAHHNIQNIEGNTITQNSDIHQTNDDIQHTNRIELIFQEDCFPSPEITPHRCTQIDTTFHDIFQYYKNTEPMARKYIPKQNSSKKFARIVQYLNRVTLPEILVDNIDFHTLQTAIYCAAWTAAKVNGAKITTESTEPSPSTQKEYKPNWQRRLERRLDDIRAKIGRLTHFINGNNNKKKLTEQVNKIIKEYKIHSIHEEPNTQIMHTLDTLKQKLSVIAGRLRRYNSCTLRKQQNSLFKNNEKLFYRNIRQKTTNTQENKNTNNIESPNADDLQKFWAGIWEKDTNHNTEAQWLQTEILNHRSIELMHFEHVPVDIFQKVLHNIHNWKAPGSDFIHSYWYKKFTSTHTHILHHLNQFIQEPHTMPRYVSSGITYMLPKDRNDLANPAKYRPITCLQTIYKILTSCISELIYQHVNSNNILTEQQKGCRKLSQGCKEQLIIDSIILNTVHNTKSDLFTMYIDYKKAYDSVPHSWLTQVLEIYKIHPKIISFLKDTMRNWTTRLKLTTHSKIIESNLIQIKRGIFQGDSLSPLWFCLALNPLSNILLSTKLGYSIQYTEDDGQTQINTLNHLLYMDDIKLYAESENQLQQLANITELFSADIKMKFGIDKCKINSIRAGKNYQHHYLLNTGEQIDPLDTHESYKYLGYIQSRQIHHKNIKLELKQEFRHRLNVLLRTQLDSRNTIKAINTYAVPILTYSFGIIKWTKTDLKSLQRTITTTMTKFRKHHPRSCQQRLTLPRKDGGRGLIDIINLHNSQITNLRKYFYNRTQSSKLHKSIVQNDRKQTPLNLQDKSTQKHEIIASNSTKIAEWTAKALHGRHRQDLSQNNVDLQASNAWLIRGDLFPETEGFMLAIQDQVIETRNYQKFIIKHVVSDKCRKCSSASETIQHITGACKTIAQTDYKHRHDQVANIIHQRLAHQTNLIDTIQPYYKYIPETILENSTTKLYFDRAILTDKTIHFNRPDITLVNKSKKTCYLIDIAVPNTHNLQTTICEKLTKYIDLKDEILRLWHLQKVIIVPIVLSSTGVIPRQLHQSLITLNLAPNTFHLLQKAVLLNTCRLVRKFLQTDQNTNNPNNQPTEPHTHTPLSRTNRTTSITLPQQNTKVS

SEQ ID NO: 16790 - protein, 1419 aa, Gindanes brontinus
MELSKNRYNLRSLLGGRRGTPGAGAGCFSSRDTGGEALSRRASVTQDATAGRRELNRRALGVEATADRMGDDTSSLFSSIPSTRPSYMTRRTSTLSSATIADRVVQDVILDAEFVPTSAATQTRRRWTPEMNMFILRTYLQLTALDTDTTTYLEPLHLKFVEKFPDMQVNRQRVGDQRRAIVRNKLLPQNIIDQIYNNVKKELHHFQTNLPSSTPPSNLYNAKKPLKMRWTNEQNETIIRSYFRITQLEKNRSTYRRPLYQDFISAFPSLAHLSEQRIADQRRAIIVNKYICHSRLDEIKREVADELSLSQNSFNNDTIQITNHPQDNYTNNLDIQFLNNIELNLCEESTVHNTPQQLERNSLIDKTFQQTFQHFKNTSPINRIYIPKQKPSKKLAKIVHYLNEIILPEEVNVDTDFHTLQTAIYSAAWTAAKVNGAKISLEISTTPSSTKTSSKPHWQQRLERKLDNLRTYIGRITNYMDGNRNRNLKKHVKQILEQHKIHTLHEEPNKHLTHTLDTLKQKLSVVTARLTRYKECTLRKQQNNQFKNNEKQFYRNIKQTTTNLHLNRNNRIEQVPEREILHNYWSGIWEQPCHHNNLADWIQTETTKNNKIQEMSFDHIPIDIFKKTLQNLHNWKAPGSDYIHSYWYKKFTNIHGYLHNYLNEFIQKPDNMPQYLTLGTTYMIAKCQKDLSDPSKYRPITCLQTLYKILTSCISDLIHTHVEDSKILAEQQKGCRKFSQGCKEQLIIDSVILKEVQRKKSDLFTMYIDYKKAYDSVPHSWLIQVLKIYKIHPKIITLLKTTMTKWTTRLRLTTPTSTVETELIKIQRGLFQGDTLSPLWFCLAINPLSNILKAAAVGYNLQYRDIINHTNTYECINHLFYMDDIKLYADTEKQLHLLAEITEKFSEDIRMEFGIDKCRINSVKAGQNYQHNYTLETGDRIKSLDEEETYKYLGYNQSRQIQYKTTKLKLKQEFRHRLNAILKTQLNSRNTVKAINTFVIPVLTYSFGIINWSKSELKALQRTINTNMTKFRKHHPRSCIQRLTLPRKEGGRGLIDIVNLHNKQISNLREYFFNKSEFCSLHNAIVKTDKKLTPLNLQDNTKQNNEKVIDTKTKFAEWAGKSLHGRHYNDLSQPNVDKKASNAWLSRGDLFPETEGFMIAIQDQVIETRNYQKYIIKTLHSDTCRKCTSCPETIQHIIGACKSIAQTDYKHRHDQIANIVHQKLAHQHNLITSFLPYYKYIPESVLENSTSKLYFDRAILTDRTIHYNRPDITLINKTNKIGFLIDIAIPNTHNIQTTIAEKLSKYTELKDEITRLWHLQKVTIVPIVLSSTGVIPLHLHQSIKTLNLPPNIYNLLQKAAILNTCRIVRKFLQSGNEDGEVNNTRYTTKATTRRQQSSAHMLTTQNSSSIIPNPDMYLA

SEQ ID NO: 16791 - protein, 1420 aa, Pythonides amaryllis
MELSKHKYNLRSLLGGRRGAPGAGAGCFSMRDTGDEALSRRAPVTQNATAGRRELSRRAHGVGATADIMGDDASSLFSSIPSTRPSYMTRRTSALSSATTADCVVQEVTYDSEFVPTSAISQKRRRWTTEMNMFILRTYLQLTTLDTDTTTYLEPLHLKFVEKFPDMQVSRQRVGDQRRAKLLPQNTIDQIYNDVQKEINNLQTSLLVNAIQERSTETNSLKRQTRMRWTNEQNEAIMRLYYRITQLETNRTSYRRLLHEAFTSAFPSLSHLSEQRIADQRRAIISNKYISDTRLEEIKQQITDELSLSQDNLNNCTTQITNNTQHVNIDDSDTHFLHSIELHSLEQSTINHTRQLERNSLIDQTFEQTFQHFKDISPTNRIYIPKQKTSKKLAMIVNYLNEITLYEFVNIHTDFYTLQTAIYCAAWTAAKVNGSKMSFESCTKARTTKNNYIPSWQQRLERRLEILRNKIGRITHYINGSRNKHLDKQVKVILEQYKIHSTHEEPNKSLTHTLDTLKQKLSVVAGRLRRYKECTLRKQQNNQFYNNEKLFYRNIIQTTTNTQINNSNNRVESLPDPQVLHKFWAGIWEQPDHHNEQADWITAETHNNVTTPEMSFDHIPEDIFAKVLQNLHNWKAPGSDFIHSYWYKKFTSIHRYLHNYLNEFIGKPDKIPQYLTEGTTYMIPKCHNNLTDPAKYRPITCLQTFYKILTACISELIYKHTEDTKILTELQKGCRKFSQGCKEQLIIDSVILKEVQRKKSDLFTIYIDYKKAYDSVPHSWLIHILEIYKIHPKIITLLKTTMTHWITRLKLITPTDIIETQPIKIQRGLFQGDTLSPLWFCLAMNPLSNILKAADIGYKLKCTENNNPVDTYECINHLFYMDDIKIYANEEKHLIQLAEITEKFSADIKMEFGIDKCRINSIKAGQNYQHNYMLQTGEKIEPLTEEETYKYLGYNQSQQIQYKATKLKLQQQFRHRLNAILKTQLNSRNTVKAINTFAVPVLTYSFGIINWSKSELKTLQRTINTTMTKLRKHHPRSCLQRLTLPRKEGGRGLIDIMNLHNKQISNLRQYFFNKSESSSIHKAIVKTDNKLTPLNLVDYTPQNNERLVENKTKLAEWAGKSLHGRHYHDLSQSNVDKKASNAWLCRGELFPETEGFIMAIQDQVIETKNYQKFITKTLQSDTCRKCSSCPETIQHITGACKAIAQTDYKHRHDQVANIIHQKLAHQQNLITFLQPYYKYVPNNVLENSKSKLYFDRAILTDRTIHYNRPDITFINKSSKIGYLIDIAIPNTHNLQTTIAEKLSKYTELKDEITRLWHLQKVIIVPIVISSTGVIPNQLHQSIKTLNLPPNTFHLLQKATILNTCRIVRKFLQNESENAKINIRQPPAPTIRYHTTHNSIDTLLNTPIIPSVSPNPDIHLA

SEQ ID NO: 16792 - protein, 813 aa, Cydia splendana
MAYQHIPIDTFKKVLSNSHNWKAPGSDNIHSYWYKKFTNVHPFLHSYLNKFTDDPSTIPLYLTSGTTFMIPKDQNDLANPAKYRPITCLQTLYKILTACISNLIYRHINDNNILAEQQKGCRKFSQGCKEQLTIDSVILKHVTKTKTDLYSMYIDYKKAYDSVPHSWLLQVLEIYKIHPKIINVLKTTMTTWTNRLRLTTPTTVIETDPIKIQRGIFQGDSLSPLWFCLALNPLSNTLNSTTAGYQLHYTDTDRHTENINHLLYMDDIKLYAKNETDLYQLTDLTEQFSNDIKMEFGIDKCKINSVKAGQIYRHDYRLRTGEIIDSLNEQETYKYLGYNQSRQIQHGDIKQKLRQQFRHRLNIILKSQLYARNTIKAINTFAIPVLTYSFGVINWTKSDLKALQRTINTTMTRFRKHHPRSCIQRLTLPRKEGGRGVIDITNLHNRQITTLRQYFFTKSESSTLHKVTASNDRKLTPLNLQDMTTQKNENLTDDKAKHAEWARKSLHGRHHQDLCQPNVDKEASNAWLSRGELFPETEGFMLAIQDQVIETRNYQRHITKTLAIDTCRKCNSCPETIQHITGACKTIAQTDYKHRHDQVANIIHQKLAFQQHFVTDIEPYYKYKPESVLENPTAKLYFDRTILTDRTTHHNRPDITLIDKTCKTGYLIDIAVPNTHNLQSTIAEKLTKYIELKDEITRIWHLQKVIIVPIVLSSTGVIPTQLHQSLKTLKLPPKTFHLLQKAVILNTCRIVRKFLQTDHEAPAVTRRTAQAITHATLNPIEPVTTNIETHTTPRHMIAQPDSHSTNENVRILT

SEQ ID NO: 16793 - protein, 1263 aa, Apotomis turbidana
MNMFILRTYLQLTALDTDTRAYLEPLHLQFIEKFPEMPVSRQRVGDQRRAIMRNKLLSQEQLDYIYDEVKTELNQLHTNVSSTHTPPTQIFNSQNTLNTQTQSRMSWTNEHNEAIIKSYYLITQLETNRTAYRKQLHEAFINTFPSLAHVSEQRISDQRRLIINAGYISNHRLNEIKEQISMELGLSTNNHTPLDQSQTTNLTQQLDPDIQFLENIESEPYESTTPPNIELPERDSLIDETFSQTYRHFKGTDPTDRIYIPKQKTSKKFAKIVHYLNEITLPEHVNVDTDFDTLQTVLYCAAWTAAKVNGTKMSFDPTQKRRNAEKDKTPHWQKRLERRLQDLRAKIGRITQYINGTRTRHLERQVNEIMEQYKIHSVHEEPNTQLSHTLDTLKQKLAVISGRLHRYQVCTLRKQQNTQFKYNEKQFYRNLKQTTTNTSENNSSSSTSSMPHTEDLHRYWSGIWEQPTQHKANAEWIQAEIEKNNANVQEMTYEHIPIDTFKKVLNRLHNWKSTGSDYIHSYWYKKFTNIHSYLHNFLNKCIENPNIVPCYLTAGSTYMIPKDPDDLSNPAKYRPITCLQTLYKILTSCISDLIYTHVSNNSILAEQQKGCRKFSQGCKEQLTIDAVILKHVQKTKSDFYSMYIDYKKAYDSVPHSWLMQVLEIYKVNPQIIQFLKTTMTNWTTRLKLTTFNDTVETEPIKIQRGIFQGDALSPLWFCLALNPLSNILNSTNAGYHLNYIDTDEQTENINHLLYMDDIKLYADNETDLCRLANLTEQFTNDIKMEFGIDKCKINSTRAGQTYQHHYTLESGEHIEPLNEQDTYKYLGYNQELQIQYKETKQKLTRQFQHRLNTILKSQLYASNTVKAINTFAIPVLTYSFGVINWTKCDLKTLQRKINTTMTRFRKHHPRSCVQRLTLPRKEGGRGIIDISNLHNRQIITLRKYFFNKAEASTLHRAISKNDRKFTPLNLQDNTTQKNETLIDDKAKLTEWAGKSLHGRHRHDLCQVNVDKEASNAWLSRGELFPETEGFMMAIQDQVIETRNYQRHIIKSVTVDVCRKCNSCPETIQHITSACKSIAQTDYKHRHDQVANIIHQRLARQFNLITSIEPYYKYKPESVLDNHTIKLYFDRAILTDRTTHYNRPDITLLNKTNRTAFLIDIAVPNTHNLQTTIAEKLTKYIELKDEITRLWHLQKVTIVPIVLSATGVIPKQLHQSLKTLNLSPYTYNLLQKAVILNTCRIVRKFLQTDQEQSTIQTTAHPNNT

SEQ ID NO: 16794 - protein, 951 aa, Apotomis turbidana
MSFDPTQKRRNAEKDKTPHWQKRLERRLQDLRAKIGRITQYINGTRTRHLERQVNEIMEQYKIHSVHEEPNTQLSHTLDTLKQKLAVISGRLHRYQVCTLRKQQNTQFKYNEKQFYRNLKQTTTNTSENNSSSSTSSMPHTEDLHRYWSGIWEQPTQHKANAEWIQAEIEKNNANVQEMTYEHIPIDTFKKVLNRLHNWKSTGSDYIHSYWYKKFTNIHSYLHNFLNKCIENPNIVPCYLTAGSTYMIPKDPDDLSNPAKYRPITCLQTLYKILTSCISDLIYTHVSNNSILAEQQKGCRKFSQGCKEQLTIDAVILKHVQKTKSDFYSMYIDYKKAYDSVPHSWLMQVLEIYKVNPQIIQFLKTTMTNWTTRLKLTTFNDTVETEPIKIQRGIFQGDALSPLWFCLALNPLSNILNSTNAGYHLNYIDTDEQTENINHLLYMDDIKLYADNETDLCRLANLTEQFTNDIKMEFGIDKCKINSTRAGQTYQHHYTLESGEHIEPLNEQDTYKYLGYNQELQIQYKETKQKLTRQFQHRLNTILKSQLYASNTVKAINTFAIPVLTYSFGVINWTKCDLKTLQRKINTTMTRFRKHHPRSCVQRLTLPRKEGGRGIIDISNLHNKQIITLRKYFFNKAEASTLHRAISKNDRKFTPLNLQDNTTQKNETLIDDKAKLTEWAGKSLHGRHRHDLCQVNVDKEASNAWLSRGELFPETEGFMMAIQDQVIETRNYQRHIIKSVTVDVCRKCNSCPETIQHITSACKSIAQTDYKHRHDQVANIIHQRLARQFNLITSIEPYYKYKPESVLDNHTIKLYFDRAILTDRTTHYNRPDITLLNKTNRTAFLIDIAVPNTHNLQTTIAEKLTKYIELKDEITRLWHLQKVTIVPIVLSATGVIPKQLHQSLKTLNLSPYTYNLLQKAVILNTCRIVRKFLQTDQEQSTIQTTAHPNNT

SEQ ID NO: 16795 - protein, 813 aa, Cydia splendana
MAYQHIPIDTFKEVLSNSHNWKAPGSDNIHSYWYKKFTNVHPFLHSYLNKFTDDPSTIPLYLTSGTTFMIPKDQNDLANPAKYRPITCLQTLYKILTACISNLIYRHINDNNILAEQQKGCRKFSQGCKEQLTIDSVILKHVTKTKTDLYSMYIDYKKAYDSVPHSWLLQVLEIYKIHPKIINVLKTTMTTWTTRLRLTTPTTVIETDPIKIQRGIFQGDSLSPLWFCLALNPLSNTLNTTTAGYQLHYTDTDRHTENINHLLYMDDIKLYAKNETDLYQLTDLTEQFSNDIKMEFGIDKCKINSVKAGQIYRHDYRLRTGEIIDSLNEQETYKYLGYNQSRQIQHGDIKQKLRQQFRHRLNIILKSQLYARNTIKAINTFAIPVLTYSFGVINWTKSDLKALQRTINTTMTRFRKHHPRSCIQRLTLPRKEGGRGVIDITNLHNRQITTLRQYFFTKSESSTLHKVTASNDRKLTPLNLQDMTTQKNENLTDDKAKHAEWARKSLHGRHHQDLCQPNVDKEASNAWLSRGELFPETEGFMLAIQDQVIETRNYQRHITKTLAIDTCRKCNSCPETIQHITGACKTIAQTDYKHRHDQVANIIHQKLAFQQHFVTDIEPYYKYKPESVLENPTAKLYFDRTILTDRATHHNRPDITLIDKTCKTGYLIDIAVPNTHNLQSTIAEKLTKYIELKDEITRIWHLQKVIIVPIVLSSTGVIPTQLHQSLKTLKLPPKTFQLLQKAVILNTCRIVRKFLQTDHEAPAVTRRTAQAITHATLNPIEPVTTNIETHTTPRHMIAQPDSHSTNENVRILT

SEQ ID NO: 16796 - protein, 1267 aa, Cydia splendana
MTVSRQRVGDQRRAIIRSKLLPQETLNQIYDEVKAELATIRTGITTTYTRATSNNQESHSMQAQTRLRWTNEQNESIMLSYYRITELETNRTSYRKPLHDAFINSFPALSHLSEQRISDQRRAIINNKYITDTRLTELKQQIAEELSINIYNSDDHIPDIEQSNTTQQPDLETQFLQNIQPDSPDNVPNNDPISERNLLIDETFKQTFKHFTDTDPTCRPYIPKQKTSKKLADIVQYLNNITFPEYINIDTDFDTLQTAIYSAAWTAAKVNGAKISLEPTDSSRSRCVNKDKRPHWQRRLERRLQDLRTKIGRVTHFIAGTRSINLEKQVNDIIDQYKIHSVHEEPNTQLTHTLDTLKQKLALISGRLNRYKVCTLRKQQNNQFQTNEKLFYRNVRQATTNTTDNNNPNIVSNLPDSHDLQNFWAGIWENPIDHNTDAEWIKTEIVRNDTNTTEMAYQHIPIDTFKKVLSNSHNWKAPGSDNIHSYWYKKFTNVHPFLHSYLNKFTDDPSTIPLYLTSGTTFMIPKDQNDLANPAKYRPITCLQTLYKILTACISNLIYRHINDNNILAEQQKGCRKFSQGCKEQLTIDSVILKHVTKTKTDLYSMYIDYKKAYDSVPHSWLLQVLEIYKIHPKIINVLKTTMTTWTTRLRLTTPTTVIETDPIKIQRGIFQGDSLSPLWFCLALNPLSNTLNSTTAGYQLHYTDTDRHTENINHLLYMDDIKLYAKNETDLYQLTDLTEQFSNDIKMEFGIDKCKINSVKAGQIYRHDYRLRTGEIIDSLNEQETYKYLGYNQSRQIQHGDIKQKLRQQFRHRLNIILKSQLYARNTIKAINTFAIPVLTYSFGVINWTKSDLKALQRTINTTMTRFRKHHPRSCIQRLTLPRKEGGRGVIDITNLHNRQITTLRQYFFTKSESSTVHKVTASNDRKLTPLNLQDMTTQKNENLTDDKAKHAEWARKSLHGRHHQDLCQPNVDKEASNAWLSRGELFPETEGFMLAIQDQVIETRNYQRHITKTLAIDTCRKCNSCPETIQHITGACKTIAQTDYKHRHDQVANIIHQKLAFQQHFVTDIEPYYKYKPESVLENPTAKLYFDRTILTDRTTHHNRPDITLIDKTCKTGYLIDIAVPNTHNLQSTIAEKLTKYIELKDEITRIWHLQKVIIVPIVLSSTGVIPTQLHQSLKTLKLPPKTFHLLQKAVILNTCRIVRKFLQTDHEAPAVTRRTAQTITHATLNPIEPVTTNIETHTTPRHMIAQPDSHSTNENVRILT

SEQ ID NO: 16797 - protein, 1405 aa, Deilephila porcellus
MEPSERRYNLRSLPGGRRGAPGAGAGCFSMRDTGGAALSRRARATQDATADRRRLSRRARDVEATADLSDEDTISLFSSVPSTCPSYMTRRTPTLSSISSVDGVVQDVDLDAELAPTVDVTRTRRRWTSEMNQFILRTYLQLTSLDTDRKTYLEPLHLKFIEKFPNMQVSRQRVGDQRRAIIRSKLLPQSVIDKIYKDVEEEINSLPSSTNTPQTYTQSQTKSIQPNNTPSCSNRLRWTTAQNETIMRSYYRITHLETNKTAYRKLLHRDFINNFPSLSHVSEQRIADQRRTIVSNKYIADDRLQAIRQEVAEELSLNINSINHNSNPEYLCINSDETILNIRTIEINGSDEHHIILETAEDRDKEIDETFQKALDYFKNTDPTNRKYIPKQKPSKKFAKIVQYLNNITLPENINQDTDFNTLQTVMYCAAWTAAKVNGSKINLDAYEKTRNSRKERKPAWQVRLERRINDLRTKIGRLTQFINGNRTRNLTIHVKAIMEQYKTHSIHEEPNIQLTHTLDTLKQKPTVIAGRLHRYKNCTLRKQQNSRFNNNEKLFYRTIKQAATNTEANNTDNDINNIPSSEELKNFWAGIWETSENHNTQANWIEEEIINNARCTEMNFQQIPPETFVKVLHNLHNWKAAGSDHIHSYWYKKLTYLHPYLLKYINDFIREPNKMPSYLTLGVTYMIPKDRNDPMNPAKYRPITCLQTLYKIITSCLSEIIYQHIDANNILAEQQKGCRKFAQGCKEQLIIDSVILKHVHKTKANLFTMYIDYKKAYDSVPHSWLLQIMQIYKVHPNIIIFLEAIMKSWTTRIKLSTPTKTIETDPIKIQRGIFQGDSLSPLWFCLALNPLSNILNSTSLGYALKYRNTEQPIDDQECTNRLNHLLYMDDIKLYAQDEHQLDQLANLTESFSNDIRMDFGIDKCKINSVKAGVNYQHHYTLHTGERINPLTEQETYKYLGYNQSSQINYKTTKLKLKQEFQHRLNTILKTQLYARNTVKAINTFAIPILTYSFGIINWSKSDLKNLQRTINTSMTRFRKHHPRSCIQRLTLPRKEGGRGLIDIVNLHNKQITTLRQYFFDKTASSDLHKSIVENDNKFTPLNMKDRTDQKNEQLTDDKTKIEEWIQKSLHGRHRQDLSQLNVDKEASNAWLSQGQLFPETEGFMLAIQDQIIETRNYQKHIIKTLNSDTCRKCNSSPETIQHITGACKSITQTDYKHRHDQVANIIHQKLALNYSLIGNSQPYYKYKPDAVLENPRSKLYFDRAILTDRTIPYNRPDITLVDKISQTGYLIDIAVPNTHNLQTTIAEKLTKYTELKDEITRLWHLRKVVIVPIVLSTTGVIPKQLHQSLKTLNLPPNIYLLLQKAAILNTCRTVRKFLQTESDIPTTNTRLAAAQGNPPDVHLA

SEQ ID NO: 16798 - protein, 757 aa, Hyles vespertilio
MNFEQITLETFAKVVCNLHNWKAAGSDHIHSYWYKKFTYIHPYLLKHINDFLREPNKIPSYITSGVTYMIPKDRNDPMNPAKYRPITCLQTLYKIITSCLSELIYQHIDANNILAEQQKGCRKFAQGCKEQLIIDSVILKHVHKTKANLFSMYIDYKKAYDSVPHSWLLQILQIYKVHPNIIIFLEAIMKNWTTRLKLSSPTKTIETDPIKIQRGIFQGDSLSPLWFCLALNPLSNILNSTPFGYTLKYRNVEQPIDEQENINRLNHLLYMDDIKLYAQDEHQLDQLANLTELFSNDIRMDFGIDKCKINSVKSGLNYQHHYTLQTGEQINPLTEQETYKYLGYNQTTQINFKTTKHKLKQQFQHRLNTILKTQLYARNTVKAINTFAVPILTYSFGIINWSKSDLKNLQRSINTSMTRFRKHHPRSCIQRLTLPRKEGGRGLIDIVNLHNRQITTLRQYFFHKTASSLLHKSIVENDNNFTPLNMKDRTEQINERLTDDRTKLEEWIQKSLHGRHRQDLSQPNVDKEASNAWLSQGQLFPETEGFMLAIQDQVIETRNYQKHIIKTLSSDICRKCNSSAETIQHITGACKSITQTDYKHRHDQVANIIHQKLALNYGLIDNSQPYYKYNPETVLENTRTKLYFDRAILTDRTIPYNRPDITLVDKISQTGYLIDIAVPNTHNLQTTIAEKLTKYTELKDEITRLWHLRKVSIVRIVISTTGVIPKQLHQSLKTLNLPPKLYLLLQKAAILNTCRTV

SEQ ID NO: 16799 - protein, 724 aa, Hyles vespertilio
MNFEQITLETFAKVVCNLHNWNAAGSDHIHSYWYKKFTHIHPYLLKHINDFLREPNEIPSYITSGVTYMIPKDRNDPMNPAKYRPITSLQTLYKIITSCLSELIYQHIDANNILAEQQKGCRKFAQGCKEQLIIDSVILKHVHKTKANLFSMYIDYKKAYDSVPHSWLLQILQIYKVHPNNIIFLEAIMKNWTTRLKLSFPTKTIETDPIKIQRGIFQGDSLSPLWFCLALNPLSNILNSTPFGYTLKYRNVEQPIDEQENINRLNHLLYMDDIKLYAQDEHQLDQLANLTELFSNDIRMDFGIDKCKINSVKSGLNYQHHYTLQTGEQINPLTEQETYKYLGYNQTTQINLKTTKLKLKQQFQHRLNTILKTQLYARNTVKAINTFAVPILTYSFGIINWSKSDLKNLQRSINTSMTRFRKHHPRSCIQRLTLPRKEGGRGLIDIVNLHNRQITTLRQYFLHKTASSLLHKSIVENDNNFTPLNMKDRTEQRNERLTDDRTKLEEWIQKSLHGRHRQDLSQPNVDKEASNAWLSQGQLFPETEGFMLAIQDQVIETRNYQKHIIKTLSSDICRKCNSSAETIQHITGACKSITQTDYKHRHDQVANIIHQKLALNYGLIDNSQPYYKYNPETVLENTRTKLYFDRAILTDRTIPYNRPDITLVDKISQTGYLIDIAVPNTHNLQTTIAEKLTKYTELKDEITRLWHLRKVSIVPIVISTTQFE

SEQ ID NO: 16800 - protein, 1405 aa, Deilephila porcellus
MEPSERRYNLRSLPGGRRGAPGAGAGCFSMRDTGGAALSRRARATQDATADRRRLSRRARDVEATADLSDEDTVSLFSSVPSTCPSYMTRRTPTLSSISSVDGVVQDVDLDAELAPTVDVTRTRRRWTSEMNQFILRTYLQLTSLDTDRKTYLEPLHLKFIEKFPNMQVSRQRVGDQRRAIIRSKLLPQSVIDKIYKDVEEEINSLPSSTNTPQTYTQSQTKSIQPNNTPSCSNRLRWTTAQNETIMRSYYRITHLETNKTAYRKLLHRDFINNFPSLSHVSEQRIADQRRTIVSNKYIADDRLQAIRQEVAEELSLNINSINHNSNPEYLCINSDETILNIRTIEINGSDEHHIILETAEDRDKEIDETFQKALDYFKNTDPTNRKYIPKQKPSKKFAKIVQYLNNITLPENINQDTDFNTLQTVMYCAAWTAAKVNGSKINLDAYEKTRNSRKERKPAWQVRLERRINDLRTKIGRLTQFINGNRTRNLTIHVKAIMEQYKTHSIHEEPNIQLTHTLDTLKQKLTVIAGRLHRYKNCTLRKQQNSRFNNNEKLFYRTIKQAATNTEANNTDNDINNLPSSEELKNFWAGIWETSENHNTQANWIEEEIINNARCTEMNFQQIPPETFVKVLHNLHNWKAAGSDHIHSYWYKKLTYLHPYLLKYINDFIREPNKMPSYLTLGVTYMIPKDRNDPMNPAKYRPITCLQTLYKIITSCLSEIIYQHIDANNILAEQQKGCRKFAQGCKEQLIIDSVILKHVHKTKANLFTMYIDYKKAYDSVPHSWLLQIMQIYKVHPNIIIFLEAIMKSWTTRIKLSTPTKTIETDPIKIQRGIFQGDSLSPLWFCLALNPLSNILNSTSLGYTLKYRNTEQPIDDQECTNRLNHLLYMDDIKLYAQDEHQLDQLANLTESFSNDIRMDFGIDKCKINSVKAGVNYQHHYTLHTGERINPLTEQETYKYLGYNQSSQINYKTTKLKLKQEFQHRLNTILKTQLYARNTVKAINTFAIPILTYSFGIINWSKSDLKNLQRTINTSMTRFRKHHPRSCIQRLTLPRKEGGRGLIDIVNLHNKQITTLRQYFFDKTASSDLHKSIVENDNKFTPLNMKDRTDQKNERLTDDKTKIEEWIQKSLHGRHRQDLSQSNVDKEASNAWLSQGQLFPETEGFMLAIQDQIIETRNYQKHIIKTLNSDTCRKCNSSPETIQHITGACKSITQTDYKHRHDQVANIIHQKLALNYSLIGNSQPYYKYKPDAVLENPRSKLYFDRAILTDRTIPYNRPDITLVDKISQTGYLIDIAVPNTHNLQTTIAEKLTKYTELKDEITRLWHLRKVVIVPIVLSTTGVIPKQLHQSLKTLNLPPNIYLLLQKAAILNTCRTVRKFLQTESDIPTTNTRLAAAQGNPPDVHLA

SEQ ID NO: 16801 - protein, 1405 aa, Deilephila porcellus
MEPSERRYNLRSLPGGRRGAPGAGAGCFSMRDTGGAALSRRARATQDATADRRRLSRRARDVEATADLSDEDTISLFSSVPSTCPSYMTRRTPTLSSISSVDGVVQDVDLDAELAPTVDVTRTRRRWTSEMNQFILRTYLQLTSLDTDRKTYLEPLHLKFIEKFPNMQVSRQRVGDQRRAIIRSKLLPQSVIDKIYKDVEEEINSLPSSTNTPQTYTQSQTKSIQPNNTPSCSNRLRWTTAQNETIMRSYYRITHLETNKTAYRKLLHRDFINNFPSLSHVSEQRIADQRRTIVSNKYIADDRLQAIRQEVAEELSLNINSINHNSNPEYLCINSDETILNIRTIEINGSDEHHIILETAEDRDKEIDETFQKALDYFKNTDPTNRKYIPKQKPSKKFAKIVQYLNNITLPENINQDTDFNTLQTVMYCAAWTAAKVNGSKINLDAYEKTRNSQKERKPAWQVRLERRINDLRTKIGRLTQFINGNRTRNLTIHVKAIMEQYKTHSIHEEPNIQLTHTLDTLKQKLTVIAGRLHRYKNCTLRKQQNSRFNNNEKLFYRTIKQAATNTEANNTDNDINNIPSSEELKNFWAGIWETSENHNTQANWIEEEIINNARCTEMNFQQIPPETFVKVLHNLHNWKAAGSDHIHSYWYKKLTYLHPYLLKYINDFIREPNKMPSYLTLGVTYMIPKDRNDPMNPAKYRPITCLQTLYKIITSCLSEIIYQHIDANNILAEQQKGCRKFAQGCKEQLIIDSVILKHVHKTKANLFTMYIDYKKAYDSVPHSWLLQIMQIYKVHPNIIIFLEAIMKSWTTRIKLSTPTKTIETDPIKIQRGIFQGDSLSPLWFCLALNPLSNILNSTSLGYALKYRNTEQPIDDQECTNRLNHLLYMDDIKLYAQDEHQLDQLANLTESFSNDIRMDFGIDKCKINSVKAGVNYQHHYTLHTGERINPLTEQETYKYLGYNQSSQINYKTTKLKLKQEFQHRLNTILKTQLYARNTVKAINTFAIPILTYSFGIINWSKSDLKNLQRTINTSMTRFRKHHPRSCIQRLTLPRKEGGRGLIDIVNLHNKQITTLRQYFFDKTASSDLHKSIVENDNKFTPLNMKDRTDQKNEQLTDDKTKIEEWIQKSLHGRHRQDLSQLNVDKEASNAWLSQGQLFPETEGFMLAIQDQIIETRNYQKHIIKTLNSDTCRKCNSSPETIQHITGACKSITQTDYKHRHDQVANIIHQKLALNYSLIGNSQPYYKYKPDAVLENPRSKLYFDRAILTDRTIPYNRPDITLVDKISQTGYLIDIAVPNTHNLQTTIAEKLTKYTELKDEITRLWHLRKVVIVPIVLSTTGVIPKQLHQSLKTLNLPPNIYLLLQKATILNTCRTVRKFLQTESDIPTTNTRLAAAQGNPPDVHLA

SEQ ID NO: 16802 - protein, 1395 aa, Hyles vespertilio
MEPSERRYNLRSLPGGRRGAPGAGAGCFSLRDTGGAALSRRAHATQDATADRRMLTRRARDVEVTADLSDEDTVSLFSSVPSTCPSYMTRRTPTLSSTSTVDGVVQDVDLDVELEPTVDVSRTRRRWTSEMNQFILRTYLKLTSLDTDRKTYLEPLHVKFIEKFPNMQVSRQRVGDQRRAIIRSKLLPQNVIDQIYKEVEEEINASQSCTHSSQTNMQSQIESIQAENTPSSTNRIRWTTAQNEAIMRFYYRITQLETNKTAYRKLLHKDFINNFPSMSHVSEQRIADQRRAIIANKYIADDRLHAIRHEVAEELSLNTNSNVNNSSNPQYPCINSNETILNNVGVNDSNEHNINLETTEDRDKEIDETFQKAVDYFKNTEPTSRKYIPKQKPCKKFAKIVQYINNIILPENINQDTDFKTLQTVTYCAAWAAAKANGSKINLDSQERTPTSRKVCKPAWQVRLERRINDLRTKIGRLTQYINGNRTKKLIKHVKAITEQYKTHSLHEEPNTQLAHTLDTLKQKLTVIAGRLQRYKNCTLRKQQNSRFNNNEKLFYRTIKQSATNTEPDNTADNISNIPSSEELKDFWAGIWESPVNHNTQANWIEEEITNYAGCTEMNFEQITLETFAKVVCNLHNWKAAGSDHIHSYWYKKFTYIHPYLLKHINDFLREPNKIPSYITSGVTYMIPKDRNDPMNPAKYRPITCLQTLYKIITSCLSELIYQHIDANNILAEQQKGCRKFAQGCKEQLIIDSVILKHVHKTKANLFSMYIDYKKAYDSVPHSWLLQILQIYKVHPNIIIFLEAIMKNWTTRLKLSSPTKTIETDPIKIQRGIFQGDSLSPLWFCLALNPLSNILNSTPFGYTLKYRNVEQPIDEQENINRLNHLLYMDDIKLYAQDEHQLDQLANLTELFSNDIRMDFGIDKCKINSVKSGLNYQHHYTLQTGEQINPLTEQETYKYLGYNQTTQINFKTTKHKLKQQFQHRLNTILKTQLYARNTVKAINTFAVPILTYSFGIINWSKSDLKNLQRSINTSMTRFRKHHPRSCIQRLTLPRKEGGRGLIDIVNLHNRQITTLRQYFFHKTASSLLHKSIVENDNNFTPLNMQDRTEQRNERLTDDRTKLEEWIQKSLHGRHRQDLSQPNVDKEASNAWLSQGQLFPETEGFMLAIQDQVIETRNYQKHIIKTLSSDICRKCNSSAETIQHITGACKSITQTDYKHRHDQVANIIHQKLALNYGLIDNSQPYYKYNPETVLENTRTKLYFDRAILTDRTIPYNRPDITLVDKISQTGYLIDIAVPNTHNLQTTIAEKLTKYTELKDEITRLWHLRKVSIVPIVISTTGVIPKQLHQSLKTLNLPPKLYLLLQKAAILNTCRTVRKFLQTESDLPTTNILRLAAA

SEQ ID NO: 16803 - protein, 1214 aa, Clostera curtula
MELEILRDNIHSQQTNYNDRTQQPPTPRQVENENPISYTAKRTRTRMKWSNQHNETIMRLFLQITNLGTNLSAYRKPLHQQFISIFPDLAHLSEQRIADQRRLIETNKYISGDSLNLIRQQVSEELSQNNNTSNDINDNTPLIEPTTPLPIVQPLTNSQINTSSELPFNSGPFSRNSNIDETFHKALEFYRDTNPTERTYIPKQKSSRKLLTTLEYINKIIFPETVNDDTDFDTFQTVMYCGAWTVAKINGAKLSLETTGNSHPNNHRKPHKPKWQRRLEQKIKSLRASIGRLTQFINGNRSNKIKKHIDIILEKYKIHSLHEEPNTQLTHTLDTLKQKLSVTAGRLHRYEACTLRKQQNTQFTHNERQFYRNIKETAGNTHIPNNVSNPNNTPDTETLRSFWANIWEEPAHHNHDADWIESETSNNNFNIEPMSIHTVPAEIFDKVIRNLHNWKSPGSDFLHSYWYKKFTSAHKYLHKFINNFIQNPNSMPCYIMNGITYMIPKDPNDTTNPAKYRPITCLQTFYKIITACISEIIYQHTESNNILAEQQKGCRKFSQGCKEQLIIDSVILKHVHKSKSDLFTMYIDYKKAYDSVPHSWLIHVLEIYKVNPKIIYFLSTIMTQWTTRLRFSNHTDTKETDSIKIKRGIFQGDSLSPLWFCLALNPLSNILNNSSAGFPICYKGDDVTVNTNLLSHLMYMDDIKLYAKTEYQLRDLANITERFTHDIKMEFGTEKCKINSIKSGNKYIHQYTLETGENIDSLNEQETYKYLGYHQSSQIHIKDTKIKLKQQFRHRLNVILKTQLHGRNTIKAINTYAIPILTYSFGIINWNKTELKSLQRLINTSMTRFRKHHPRACIQRLTLPRKEGGRGLIDVKNLQQISTLRQYFTFKMQTSLLHKSIGQNDNKFTPLNLKDTTTQNNEQLTDNSTKIDEWTRKSLHGRHRQDLCQPNVDKEASNAWLSRGDVFPETEGFIIAIQDQVIETRNYQKYIIKKSTSDICRKCNTTSETIQHITGACRTIAQTDYKHRHDQVASIVHQKLAHQYNLIESTVAYYKYTPNVVLENTTAKLYFDRAILTDRRIHFNRPDITLIDKINRIGYLIDIAVPNTHNLQATISEKLTKYTELKDEITRLWHLQKVTIVPIVLSTTGVIPKSLHQSLNTLNLPPNIYITLQKAVILNTCRLVRKFLQTEPDIPQPRTINQPSQTPQITTNQN

SEQ ID NO: 16804 - protein, 1444 aa, Hecatera dysodea
MEMNNGRKYNLRSLPGDRRGASGADAGCHSIRTIGGEALSRRTLTENPVTAGRCELNRRVHNVEATADSMGDDTSSLFSSIPSTRPSYMTRRTKRSSTTSTLDSVVHDVHMDNDPASTTSVKNMRRRWTPEMNKFILRTYLQLTALDTDRRTYLEPLHSKFIEKYPNMQVSRQRVGDQRRAIVRNKLLPQKTIDEIHNEVKEELNQLQYNHQYPQTFTQQLLTSPQSTQIQPTISETPITQQRKNTRMRWTNEQNEAIMRSYYRVTDLGRNETAYRKPLYDDFINSFPSLAHLSEQRIADQRRAIINNKYIETNKLNSLRAEIAEELGHNNTNLRNTSETTIDNSSNINNTDKQFTDNVDLYTIDEPLPIVQTHNTETNITEELISNQQTCLERVPLIDETFQQAFQFYVETSPINRTYIPKQKPSKKLSRIVNYLNKIIFPENVNKDTDFQTIQTVIYSAAWTAAKVNGAKITLQTREINQGQKQEYIPNWQRRLERKLNDLRSKIGRMTQFINGNRSKKVMKHVNNIIEQYKTHTRHEEPNTQAKHTLDTLKQKLSVVTGRLQRYKACTLRKQQNSLFTHNEKLFYRNISQATANIQENHTNDNVTPEPNILKNFWATIWEQSVEHNTQANWIQTEQSHNKTNIQAMIFENITPQIFHKVISRLHNWKAPGSDHIHSYWYKKFTAIHGYLHSYINIFIQNPETIPTYLTLGTTYMIPKDHSDLSNPAKYRPITCLQTLYKIITSCIAELIYQHIDANNILAEQQKGCRKFSQGCKEQLIIDSVILKKIHKTKSDIFTMYIDYKKAYDSVPHSWLVKVLEIYKIHPTLITFLKVMMSSWTTVLRLNTPIETIDTSPIKILRGIFQGDALSPLWFCLALNPLSNILNATALGIPLKATDTIADNEQTTQTSILNHLLYMDDIKLYANTESQLNELANLTEQFTNDIKMEFGIDKCKINSIRAGQNYKHQYTLETGEQIEPLDELGTYKYLGYTQSRLIHYKDTKQKLKQTFQHRLNTILKTQLYSRNTIKAINTFAIPVLIYSFGIINWTKTDLKSLQRTINTTMTKFRKHHPRSCQQRITLPRKEGGRGLVDILNLHNRQITSLRQYFFAKSTSSTLHKLVAQNDQNSTPLNLKNKNEQNNEKVTDDKTKILEWNQKSLHGRHRQDLCQTNVDKEASNAWLNRGELFPETEGFMLAIQDQVIETRNYRKFIIKNSTTDTCRKCNSSSETIQHITGACKSIAQTDYKHRHDQVANIIHQKIAHQFKLIESVVPYYKYNPETVLENASTKLYFDRAILTDRTIHFNRPDIVVINKINKTGYLIDIAVPNTHNLQATIAEKLAKYIELKDEITRLWHLQKVTIVPIVLSTTGVIPKQLHQSLNSLNLPSSTYQLLQKAVILNTCRIVRKFLQCEPDIPYQNIHANTPSSIIQPTASTHTPIDEHLA

SEQ ID NO: 16805 - protein, 1444 aa, Hecatera dysodea
MEMNNRRKYNLRSLPGDRRGASGADAGCHSIRTIGGEALSRRTLTENPVTAGRCELNRRVHNVEATADSKGDDTSSLFSSIPSTRPSYMTRRTNRSATTSTLDSVVQDVHMDNDPASTTSLKNMRRRWTPEMNKFILRTYLQLTALDTDRSAYLEPLHSKFIEKYPNMQVSRQRVGDQRRAIVRNKLLPQKTIDEIHNEVKEELNQLQYNHQYPQTFTQQLLTSPQSTQIQPTISETPITQQRKNTRMRWTNEQNEAIMRSYYRVTDLGRNETAYRKPLYDDFINSFPSLAHLSEQRIADQRRAIINNKYIETNKLNLLRAEIAEELGHNNTNLRNTSETTIDHSSNINNTDTQFTDNVDLYTIDEPLPIVQTHNTETNITEELISNQQTCLERAPLIDETFQQAFQFYVETSPINRTYIPKQKPSKKLSRIVNYLNKIIFPENVNKDTDFQTIQTVIYSAAWTAAKVNGAKITLQARETNQGQKQEYIPNWQRRLERKLNDLRSKIGRMTQFINGNRSKKVMKHVNNIIEQYKTHTRHEEPNTQAKHTLDTLKQKLSVVTGRLQRYKACTLRKQQNSLFTHNEKLFYRNISQATANIQENHTNDNVTPEPNILKNFWATIWEQPVEHNTQANWIQTEQSHNNTNIQAMIFENITPQIFHKVISRLHNWKAPGSDHIHSYWYKKFTAIHGYLHSYINIFIQNPETIPTYLTLGTTYMIPKDHSDLSNPAKYRPITCLQTLYKIITSCIAELIYQNIDANNILAEQQKGCRKFSQGCKEQLIIDSVILKKIHKTKSDIFTMYIDYKKAYDSVPHSWLVKVLEIYKIHPTLITFLKVMMSSWTTVLRLNTPIETIDTSPIKILRGIFQGDALSPLWFCLALNPLSNILNATALGIPLKATDTIADNEQTTQTSILNHLLYMDDIKLYANTESQLNELANLTEQFTNDIKIEFGIDKCKINSIRAGQNYKHQYTLETGEQIEPLDELGTYKYLGYTQSRLIHYKDTQQKLKQTFQHRLNTILKTQLYSRNTIKAINTFAIPVLIYSFGIINWTKTDLKSLQRTINTTMTKFRKHHPRSCQQRITLPRKEGGRGLVDILNLHNTQITSLRQYFFAKSTSSTLHKLVAQNDQNSTPLNLKNKNEQNNEKVTDDKTKILEWNQKSLHGRHRQDLCQTNVDKKASNAWLSRGELFPETEGFMLAIQDQVIETRNYRKFIIKNLTTDTCRKCNSSSETIQHITGACKSIAQTDYKHRYDQVANIIHQKIAHQFKLIESVVPYYKYNPETVLENASTKLYFDRAILTDRTIHFNRPDIVVINKINKTGYLIDIAVPNTHNLQATIAEKLAKYIELKDEITRLWHLQKVTIVPIVLSTTGVIPKQLHQSLNSLNLPSSTYQLLQKAVILNTCRIVRKFLQCEPDIPHQNIHANTPSSIIQPTASTHTPIDEHLA

SEQ ID NO: 16806 - protein, 770 aa, Archon apollinus
MSYDYIPIDTFKKVLSNLHNWKAPGSDHIHSYWYKKFTHIHPYLHNFINDFIQDPSKVPSYITSGTTIMLLKDPKDPSNPAKYRPITCLQTLYKIITSCLAELIYKHVDNNNILTEQQKGCKKLSQGCKEQLIIDSVILNKVHKNKSNLFTMYIDYKKAYDSVPHSWLIQTLELYKIHPKLITFLKSVMNSWKTQLRINTPTEIIYSDPIKIQRGIFQGDALSPLWFCLALNPLSKMLNCTGLGYSLQYSNSNEEGLIDTQLHKINHLLYMDDIKLYAETEDELDKLASLTEKFTSDVKMEFGIDKCKINSTISGHIHKHHYTLEIGQQIESLDDRETYKYLGYDQSQKIHYKDIKLKLKKQFKYRLNAILKSQLYARNTIKAINTYAIPSLTYAFGIINYSKSDLKTLQRIINTKMTKFRKHHPRACIQRLTLPRREGGRGLIDIMNLHNRQISTLRQYFFHKMDSSPLHKAIVQNDCKLTPLNLKSPTPQSNEMLTENKAKHSAWAQKSLHGRHHNDLCQTNVDKDASNAWLNRGELFPETEGFMLAIQDQVIETRNYQKYIMKQQVFDICRKCNKSSETIQHITGSCKAIVQTDYKHRHDQVANIIHQKLANQYNLVDSIQPYYKYHPETVLENTNTKLYFDRAILTDRTVHYNRPDITLIDKNCKTGYLIDVAVPNTHNLQATISEKLSKYTELKDEIIRMWHLQKVTIVPIVLSTTGVIPIQLHQSLKTLNLHPKIYTLLQKAVILNTCRLVRKFLINDNSVPYG

SEQ ID NO: 16807 - protein, 1444 aa, Hecatera dysodea
MEMNNRRKYNLRSLPGDRRGASGADAGCHSIRTIGGEALSRRTLTENPVTAGRCELNRRVHNVEATADSKGDDTSSLFSSIPSTRPSYMTRRTKRSSTTSTLDSVVQDVHMDNDPASTTSVKNMRRRWTPEMNQFILRTYLQLTALDTDRKTYLEPLHSKFVEKYPNMQVSRQRVGDQRRAIVRNKLLPQKTIDEIHNEVKEELNQLQYNHQYPQTFTQQLLTSPQSTQIQPTISETPVTQQRKNTRMRWTNEQNEAIMRSYYRVTDLGRNETAYRKPLYDDFINSFPSLAHLSEQRIADQRRAIINNKYIETNKLNSLRAEIAEELGHNNTNLRNTSETTIDNSSNINNTDTQFIDNVDLYTIDEPLSIVQTHNTQTNITEELISNQQTCLERVPLIDETFQQAFQFYVETSPINRTYIPKQKPSKKLSRIVNYLNKIIFPENVSKDTDFQTIQTVIYSAAWTAAKVNGAKITLQARDMNQGQKQEYIPNWQRRLERKLNDLRAKIGRMTQFINGNRSKKVIKHVNNIIEQYKTHTRHEEPNTQANHTLDTLKQKLSVVTGRLQRYKACTLRKQQNSLFTHNEKLFYRNISQATANIQENHTNDNVTPEPNILKNFWETIWEQPVEHNTQANWIQTEQSHNNTNIQAMIFENITPQIFHKVISRLHNWKAPGSDHIHSYWYKKFTAIHGYLHSYINIFIQNPETIPTYLTLGTTFMIPKDHSDLSNPAKYRPITCLQTLYKIITSCIAELIYQHIDANNILAEQQKGCRKFSQGCKEQLIIDSVILKKIQKTKSDIFTMYIDYKKAYDSVPHSWLVKVLEIYKIHPTLITFLKVMMSSWTTVLRLSTLTETVDTSPIKILRGIFQGDALSPLWFCLALNPLSNILNTTALGISLKATDTIADNEQTTQTSILNHLLYMDDIKLYANTESQLNELTNLTEQFTNDIKMEFGINKCKINSIKAGQNYKHQYTLETGEQIEPLDELDTYKYLGYTQSRLIHYKDTKQKLKQTFQHRLNTILKTQLYSRNTIKAINTFAIPVLIYSFGIINWTKTDLKSLQRTINTTMTKFRKHHPRSCQQRITLPRKEGGRGLVDILNLHNRQITSLRQYFFVKSTSSTLHKLVAQNDQNSTPLNLKNKNEQNNEKVTDDKTKILEWNQKSLHGRHRQDLCQTNVDKEASNAWLNRGELFPETEGFMLAIQDQVIETRNYRKFIIKNLTTDTCRKCNSSSETIQHITGACKSIAQTDYKHRHDQVANIIHQKIAHQFKLIDSVVPYYKYNPETVLENASTKLYFDRAILTDRTIHFNRPDIVVINKISKTGYLIDIAVPNTHNLQATIAEKLTKYIELKDEITRLWHLQKVTIVPIVLSTTGVIPKQLHQSLNSLNLPSSTYQLLQKAVILNTCRLVRKFLQCEPDIPHQNVHANTPPSIIQPTASTHTPIDEHLA

SEQ ID NO: 16808 - protein, 1431 aa, Euproctis similis
MEQNNRKYNLRPLPGGRRGAPGAGAGCFSMRHTGDEELSRRAPVTQDATAGRRGLNRRAPDVEATAESIGDDTMSLFSSIPSTRPSYMTRRSSTLSSSSNLVDVVHEVNPGLEHVPIMRKTTSTRKRWTPEMNKFILRTYYHLTALETDTKTYLEPLHLKFTERYPGMQVSRQRVGDQRRAIIRNKLLPQNIIDEIYNTVKEDLNNLERNILKEHANTNTSNLKKSAPKTCTELSQTMYTILDTSPNPHSKSQNMSRMRWTTEHNEMIMRSYYKITQLDTNRTTYRKPLHEAFIAAFPSLSHLSEQRIADQRRAIINNNYISDARLNTIREEAEEELSINNIDTSTTENNVQVINNYSNEIQTLNRIEINIPEESVTENHRNSQIYLNFHQSLQHFKNTEPTNRPFIPKQKPSKKFAAIVDYLNSVIIPENTNSETDFSTLQTIIYCAAWTAAKTNGAKIFIETVGRYQSAQKEYKPRWQRRLEHKLEHLRTNIGRLTQFINGNNSIKLKKQVERILEQYKVHSIHEEPNTQFIHTLDTLKQKLAVITGRLRRYKECTLRKRQNNQFKQNEKQFYRNLRQTTTNKQENNNTTNTPDKNDLQKFWAAIWEHAAEHNTQAEWIQTEISNHMSIDTMNYEHIPIDIFQNVLLKLHNWKAPGSDNIHSFWYKKFTSIHGYLHRHLNKFIENPSTMPHYITLGTTYMIPKDCNKPSDPANYRPITCLQTLYKILTSCISELIYTHVDSNNILTEQQKGCRKFSQGCKEQLVIDSVVLKQVQKLKTDLFTMYIDYRKAYDSVPHSWLLQVLDIYKIHPKIITFLKFTMSNWITKLKLITPTDTIHTEPIKIKRGIFQGDALSPLWFCLALNPLSNTLNSTSLGYSLTYTDNNGQTNRQHKINHLLYMDDIKLYASHENNLEKLVKITERFTDDIKMEFGIDKCKINSIKAGQSYKHSYTLETGREIESLDEQETYKYLGYHQSLQIRYKETKEKLKQIFRHRLQSILKTQLHSGNMYKAINTYAIPVLTYSFGIISWTKSDLKCLQRSINTALTKSRKHHPRSCLQRLTLPRKEGGRGLIDITNLHNRQIITLRQYFFKKSDSSTLHKAIEQNDHKATPLNLQDKTPQNNEKLTNDKTKLAEWAEKSLHGRHRHDLCLPNVDKNASNAWLNCGGLFPETEGFIMAIQDQVIETKNYRKYITKTLTSDTCRKCNSSPETIQHITSACKSIAQTDYKHRHDQVANIIHQKLAHKQNLITSPIQPYYKYSPQTVLENSTTKLYFDRAILTDRTIHYNRPDITLINKINKTAYLIDIAIPNTHNLQSTIAEKLTKYIDLKDEIMRIWHLQKVTIVPIVLSSTAVIPKQLHQSLKTLDLSPNTYHLLQKAVILNTCRIVRKFLQNEQDLTLLPQNQTPSLPNTLNPTPTQPVTQINTNTYIT

SEQ ID NO: 16809 - protein, 1430 aa, Euproctis similis
MEQNNRKYNLRPLPGGRRGAPGAGAGCFSMRHTGDEELSRRAPVTQDATAGRRGLNRRAPDVEATAESIGDDTMSLFSSIPSTRPSYMTRRSSTLSSSSNLVDVVHEVNPGLEHVPIMRKTTSTRKRWTPEMNKFILRTYYHLTALETDTKTYLEPLHLKFTERYPDMQVSRQRVGDQRRAIIRNKLLPQNIIDEIYNSVKEDLNNLERNILKEQANTNTSNFKNSAPKTCTELSQTMYTILDTSPNPHSKSQNMSRMRWTTEHNEMIMRSYYKITQLDTNRTTYRKPLHEAFIAAFPSLSHLSEQRIADQRRAIINNNYISDARLNTIREEAEEELSINNIDTSTTENNVQVINNYSNEIQTFNRIEINIPEESVTENHRNSQIDLNFHQSLQHFKNTEPTNRPFIPKQKPSKKFAAIVDYLNSVILPENTNSETDFSTLQTIIYCAAWTAAKTNGAKIFIETVGRYQSAQKEYKPRWQRRLEHKLEHLRTNIGRLTQFINGNNSIKLKNQVERILEQYKVHSIHEEPNTQFTHTLDTLKQKLAVITGRLRRYKECTLRKRQNNQFKQNEKQFYRNLRQTTTNKQETNNTTNTPDKNDLQKFWAAIWEHAAEHNTQAEWIQTEISNHMSIDTMNYEHIPIDTFQNVLLKLHNWKAPGSDNIHSFWYKKFTSIHGYLHRHLNTFIENPSTMPHYITLGTTYMIPKDCNKPFDPANYRPITCLQTLYKILTSCISELIYTHVDSNNILTEQQKGCRKFSQGCKEQLVIDSVVLKQVQKLKTDLFTMYIDYRKAYDSVPHSWLLQVLDIYKIHPKIITFLKFTMSNWITKLKLITPTDTRHTEPIKIKRGIFQGDALSPLWFCLALNPLSNTLNSTSLGYSLTYTDNNGQTNRQHKINHLLYMDDIKLYASHENNLEKLVKITERFTDDIKMEFGIDKCKINSIKAGQSYKHSYTLETGREIESLDEQETYKYLGYHQSLQIRYKETKEKLKQIFRHRLQSILKTQLHSGNMFKAINTYAIPVLTYSFGIISWTKSDLKCLQRSINTALTKSRKHHPRSCLQRLTLPRKEGGRGLIDLANLHNRQIITLRQYFFKKSDSSTLHKAIEQNDHKATPLNLQDKTPQNNEKLTNDKTKLAEWAEKSLHGRHRHDLCLPNVDKNASNAWLNCGGLFPETEGFIMAIQDQVIETKNYRKYITKTLTSDTCRKCNSSPETIQHITSACKSIAQTDYKHRHDQVANIIHQKLAHKQNLITSPIQPYYKYSPQTVLENSTTKLYFDRAILTDRTIHYNRPDITLINKINKTAYLIDIAIPNTHNLQSTIAEKLTKYIDLKDEIMRIWHLQKVTIVPIVLSSTAVIPKQLHQSLKTLDLSPNTYHLLQKAVILNTCRIVRKFLQNEQDLTLLPQNQTPSLPNTLNPTPTQPVTQINTNTPT

SEQ ID NO: 16810 - protein, 802 aa, Euproctis similis
MSIVTMNYEHIPIDIFQNVLLKLHNWKAPGSDNIHSFWYKKLTSIHGYLHRHLNKFIENPSTMPHYITLGTTYMIPKDCNKPSDPANYRPITCLQTLYKILTSCISELIYTHVDSNNILTEQQKGCRKFSQGCKEQLVIDSVVLKQVQKLKTDLFTMYIDYRKAYDSVPHSWLLQVLDIYKIHPKIITFLKFTMSNWITKLKLITPTDTIHTEPIKIKRGIFQGDALSPLWFCLALNSLSNTLNSTSLGYSLTYTDNNGQTNRQHKINHLLYMDDIKLYASHENNLEKLVKITERFTDDIKMEFGIDKCKINSIKAGQSYKHSYTLETGREIESLDEQETYKYLGYHQSLQIRYKETKEKLKQIFRHRLQSILKLQLHSGNMFKAINTYAIPILTYSFGIISWTKSDLKCLQRSINTALTKSRKHHPRSCLQRLTLPRKEGGRGLIDITNLHNRQIITLRQYFFKKSDSSTLHKAIEQNDHKATPLNLQDKTPQNNEKLTNDKTKLAEWAEKSLHGRHRHDLCLPNVDKNASNAWLNCGGLFPETEGFIMAIQDQVIEIKNYRKYITKALTFVTCRKCNSSPETIQHITSACKSIAQTDYKHRHDQVANIIHQKLAHKQNLITSPIQPYYKYSPQTVLENSTTKLYFDRAILTDRTIHYNRPDITLINKINKTAYLIDIAIPNTHNLQNTIAEKLTKYIDLKDEIMRIWHLQKVTIVPIVLSSTAVIPKQLHQSLKTLDLSPNTYHLLQKAVILNTCRIVRKFLQNEQDLTLLPQNQTPSLPNTLNPTPTQPVTQINKNTPT

SEQ ID NO: 16811 - protein, 1430 aa, Euproctis similis
MEQNNRKYNLRPLPGGRRGAPGAGAGCFSMRHTGDEELSRRAPVTQDATAGRRGLNRRAPDVEATAESIGDDTMSLFSSIPSTRPSYMTRRSSTLSSSSNLVDVVHEVNPGLEHVPIMRKTTSTRKRWTPEMNKFILRTYYHLTALETDTKTYLEPLHLKFTERYPDMQVSRQRVGDQRRAIIRNKLLPQNIIDEIYNSVKEDLNNLERNILKEQANTNTSNFKNSAPKTCTELSQTMYTILDTSPNPHSKSQNMSRMRWTTEHNEMIMRSYYKITQLDTNRTTYRKPLHEAFIAAFPSLSHLSEQRIADQRRAIINNNYISDARLNTIREEAEEELSINNIDTSTTENNVQVINNYSNEIQTFNRIEINIPEESVTENHRNSQIDLNFHQSLQHFKNTEPTNRPFIPKQKPSKKFAAIVDYLNSVILPENTNSETDFSTLQTIIYCAAWKAAKTNGAKIFIETVGRYQSAQKEYKPRWQRRLEHKLEHLRTNIGRLTQFINGNNSIKLKNQVERILEQYKVHSIHEEPNTQFTHTLDTLKQKLAVITGRLRRYKECTLRKRQNNQFKQNEKQFYRNLRQTTTNKQETNNTTNTPDKNDLQKFWAAIWEHAAEHNTQAEWIQTEISNHMSIDTMNYEHIPIDTFQNVLLKLHNWKAPGSDNIHSFWYKKFTSIHGYLHRHLNTFIENPSTMPHYITLGTTYMIPKDCNKPFDPANYRPITCLQTLYKILTSCISELIYTHVDSNNILTEQQKGCRKFSQGCKEQLVIDSVVLKQVQKLKTDLFTMYIDYRKAYDSVPHSWLLQVLDIYKIHPKIITFLKFTMSNWITKLKLITPTDTRHTEPIKIKRGIFQGDALSPLWFCLALNPLSNTLNSTSLGYSLTYTDNNGQTNRQHKINHLLYMDDIKLYASHENNLEKLVKITERFTDDIKMEFGIDKCKINSIKAGQSYKHSYTLETGREIESLDEQETYKYLGYHQSLQIRYKETKEKLKQIFRHRLQSILKTQLHSGNMFKAINTYAIPVLTYSFGIISWTKSDLKCLQRSINTALTKSRKHHPRSCLQRLTLPRKEGGRGLIDLANLHNRQIITLRQYFFKKSDSSTLHKAIEQNDHKATPLNLQDKTPQNNEKLTNDKTKLAEWAEKSLHGRHRHDLCLPNVDKNASNAWLNCGGLFPETEGFIMAIQDQVIETKNYRKYITKTLTSDTCRKCNSSPETIQHITSACKSIAQTDYKHRHDQVANIIHQKLAHKQNLITSPIQPYYKYSPQTVLENSTTKLYFDRAILTDRTIHYNRPDITLINKINKTAYLIDIAIPNTHNLQSTIAEKLTKYIDLKDEIMRIWHLQKVTIVPIVLSSTAVIPKQLHQSLKTLDLSPNTYHLLQKAVILNTCRIVRKFLQNEQDLTLLPQNQTPSLPNTLNPTPTQPVTQINTNTPT

SEQ ID NO: 16812 - protein, 1444 aa, Caria ino
MMMQQVNKYNLRPLPGGRRGASGAGAGCYSMRDTGGEALNRRAPVTQNATADRRQLNRRATDVEDTAELSNEDSISLFSSVPSTHPSYMTRKTSTRSSSITLDDVVPDVNLDNELVPTSSIPRKRKRWTSNMNTYILRTYLQLTELETDTKTYLEPLYLKFLEKFPEMQVGRQRIGDQRRAIIRNKLLPQQMIDQIYKEVREELNNLHNRQQNKQTYEQTITADNITHHTNQDNNHSEQTTHERQKPRTQVRMKWSNEQNEALMRLYYQITQLDTNRSAYRKLLHEAFIKEFPSLGHLNEQRIADQRRAIIKNKYISDSKLEIIKQKAAENMSSNNYILDNYTNPQTQVQELDFNENQENHFTIAITPRFPDELSPRNQEIGIQGFDRSLLIDETFQQAFEYYKDTDPTRRTYIPKQKTSKRLAEIVHYINCTTLPKVINIETDFKTLQTAIYCAAWTAAKINGAKLTLEPAVKSNAPRKDYRPSWQRRLEKKIKDLRIKIGRLTQFINGNRNRNLEKHVNCIIKQYKIHSIHEDSNTHHTHTLDTLKQKLSVFSGRLKRYKACTLRKQQNNQFINNEKQFYRKIKQSTTNKHSNIDYNEFPNGNQLSNFWAAIWEQPDIHKTDAEWIRTETINSTSIQEMAFDHIHIETFKKVIQHLHNWKAPGSDNIHSYWYKKFTNIHGYLYNHIDNFIQNPNTMPRYLTTGITYMIPKDSDRSNPAKYRPITCLQTLYKIITSCISDLIYTHIDDNKILAEQQKGCRKFSQGCKEQLIIDSVILQKVRKHKSNLFTMYIDYKKAYDSVPHSWLVKALEIYKIHPQIIQFLRVTMSYWTTKLKLATPTETVETDPIKIKRGIFQGDALSPLWFCLALNPLSNILNSSGLGYHLKCKESDRDINDKINHLLYMDDIKLYAGTEDELMQLANLTERFSNDIKMEFGIDKCKINSIKSGTNYHLHYTLETGQQVEPLDEQETYKYLGYHQAKQINYKDTKRELTQKFQHRLNIILKTHLNSRNTIKAINTFAIPILTYSFGIINWTKSDLKNLQRKVNTTLTKFRKHHPRSCLQRLTLPRKEGGRGIIDILNLHNRQITTLRNYFFTKLQSSTLHKAVALHDYKLTPLNLKDNSIQDNEKLTDNRTKLADWALKSLHGRHYHDLCHPNVDKEASNAWLKHGELFPETEGFIMAIQDQVIETRNYQRYIIKSFSSTSDMCRKCNSSPETIQHITGACKTIAQSDYKHRHDQVASIIHQKLAHKYNFTTSLHPYYKYKPETVLENATTRLYFDRAILTDRTVHYNRPDITLINKTDKTGYLIDIAVPNTHNIQSTIAEKLTKYIELKDEIIRIWHLQKVIIVPIVLSTTGVIPKQLHQSIQTLNLKPHIYKMLQKAVILNTCRIVRKFLQTEPETNTATSYTSTPIITQTTITDDYTTTNPCPTTHAIHTTTDTNH

SEQ ID NO: 16813 - protein, 1456 aa, Notocelia uddmanniana
MRLRDRKLPQAGTGANRNGESHLESSNSGCPTYSGGDTVPHTSSAQSRSVADFSRDLPSRSRASAPIPNNYNLRPRRGGDVGNNYYSGDDASLFSSLPSTRPSYLTKDTITSSSISTHEGVVQDVIPDAELVPTSSVLQTRRRWTDEMNKFIMRTYFYLTALDTDKKAYLEPLHLKFIEKFPNMSVSRQRVGDQRRAIIRRMLLSQETLDQIYDEVRIELNNLQNSIPTTSTPAPLIEELHCTQTQTRLRWTNEQNEAIILTYYRITQLETNRTSYRKPLHEAFTNRFPALAHLSEQRIADQRRAIINKKYISDIRLNELRQQIAHELSLNTHNSNNDIHIPEITDVNQQPEPDPETQFLHNIQLNSPEESSNSIRPPERDPLIDETFRLTFQHFRDTEPTCRAFIPKQKSSKKFSNIVQYLNNITLPEYVNNYTDFNTLQTAIYCAAWTAAKVNGAKISLEPTNSSRSRSVYKDKRPEWERRLQRRLQDIRAKIGRLTQFINGIRSRNLDNHVNNIMEQYKIHSTHEEPNSQLTHTLDTLKQKLALTAARLHRYKVCTLRKQQNIQFHNNEKVFYRKIRQVTTNSLEDGNISTNNLPDPKYLQNFWAGIWEQPIHHNTEAEWINTETLRNSTNIRQMVFDSIPIDIFKRVLSNLHNWKAPGSDYIHSYWYKKLTYIHPYLHNYLNKFTDDPSTIPPYITSGITFMIPKDQNDLTNPAKYRPITCLQTLYKILTSCISELIYKHVDDNNILAEQQKGCRKFSQGCKEQLTIDAVILRNVNKTKSDLYSMYIDYKKAYDSVPHSWLIQVLQIYNIHPKIIKLLTTAMKTWTTRLKLSAHTATIESDPIKIQRGIFQGDALSPLWFCLALNPLSNMLNSTTAGYQLHYRDIDRRTENLNHLLYMDDIKLYANNETDLYQLINLTEQFTNDIKMEFGIDKCKINSIKAGQIYQHNYMLGSGEMIEPLDEHETYKYLGYNQSRQIQYKDTKHKLTQQFRHRLNIILKSQLYARNTVKAINTFAIPVLTYSFGVINWTKSDLKALQRTINTTMTRLRKHHPRSCIQRLTLPRKEGGRGLIDIPNLHNRQIATLRQYFFTKAESSTLHKAIEQNDRKFTPLNLQDNTIQKNESLTDDKTKLAEWARKSLHGRHRHDLCQSNVDKEASNAWLSRGELFPETEGFMLAIQDQVIETRNYQRYITKTLTSDTCRKCNSSPETIQHITGACKAIAQSDYKHRHDQVANIIHQKLAYQQNFVTNIEPYYKYKPESVLENPKTKLYFDRTILTDRTTHHNRPDITLIDKSNKIGYLIDIAVPNTHNLQSTIAEKLSKYIELKDEITRIWHLQKVTIVPIVLSTTGVIPKQLHISLKTLNLPLKTYNLLQKAVILNTCRIVRKFLQTDQEVFPYTIPPSQLNPQPASHSTALPTLNPTITPTVFTTEPLTTHFEILTTQTATSSPSEEM

SEQ ID NO: 16814 - protein, 1456 aa, Notocelia uddmanniana
MRLRDRKLPQAGTGANRNGESHLESSNSGCPTYSGGDTVPHTSSAQSRSVADFSRDLPSRSRASAPIPNNYNLRPRRGGDVGNNYYSGDDASLFSSLPSTRPSYLTKDTITSSSISTHEGVVQDVIPDAELVPTSSVLQTRRRWTDEMNKFIMRTYFYLTALDTDKKAYLEPLHLKFIEKFPNMSVSRQRVGDQRRAIIRRMLLSQETLDQIYDEVRIELNNLQNSIPTTSTPAPLIEELHCTQTQTRLRWTNEQNEAIILTYYRITQLETNRTSYRKPLHEAFTNRFPALAHLSEQRIADQRRAIINKKYISDIRLNELRQQIAHELSLNTHNSNNDIHIPEITDVNQQPEPDPETQFLHNIQLNSPEESSNSIRPPERDPLIDETFRLTFQHFRDTEPTCRAFIPKQKSSKKFSNIVQYLNNITLPEYVNNYTDFNTLQTAIYCAAWTAAKVNGAKISLEPTNSSRSRSVYKDKRPEWERRLQRRLQDIRAKIGRLTQFINGIRSRNLDNHVNNIMEQYKIHSTHEEPNSQLTHTLDTLKQKLALTAARLHRYKVCTLRKQQNIQYHNNEKVFYRKIRQVTTNSLEDGNISTNNLPDPKYLQNFWAGIWEQPIHHNTEAEWINTETLRNSTNIRQMVFDSIPIDIFKRVLSNLHNWKAPGSDYIHSYWYKKLTYIHPYLHNYLNKFTDDPSTIPPYITSGITFMIPKDQNDLTNPAKYRPITCLQTLYKILTSCISELIYKHVDDNNILAEQQKGCRKFSQGCKEQLTIDAVILRNVNKTKSDLYSMYIDYKKAYDSVPHSWLIQVLQIYNIHPKIIKLLTTAMKTWTTRLKLSAHTATIESDPIKIQRGIFQGDALSPLWFCLALNPLSNMLNSTTAGYQLHYRDIDRRTENLNHLLYMDDIKLYANNETDLYQLINLTEQFTNDIKMEFGIDKCKINSIKAGQIYQHNYMLGSGEMIEPLDEHETYKYLGYNQSRQIQYKDTKHKLTQQFRHRLNIILKSQLYARNTVKAINTFAIPVLTYSFGVINWTKSDLKALQRTINTTMTRLRKHHPRSCIQRLTLPRKEGGRGLIDIPNLHNRQIATLRQYFFTKAESSTLHKAIEQNDRKFTPLNLQDNTIQKNESLTDDKTKLAEWARKSLHGRHRHDLCQSNVDKEASNAWLSRGELFPETEGFMLAIQDQVIETRNYQRYITKTLTSDTCRKCNSSPETIQHITGACKAIAQSDYKHRHDQVANIIHQKLAYQQNFVTNIEPYYKYKPESVLENPKTKLYFDRTILTDRTTHHNRPDITLIDKSNKIGYLIDIAVPNTHNLQSTIAEKLSKYIELKDEITRIWHLQKVTIVPIVLSTTGVIPKQLHISLKTLNLPLKTYNLLQKAVILNTCRIVRKFLQTDQEVFPYTIPPSQLNPQPASHSTALPTLNPTITPTVFTTEPLTTHFEILTTQTATSSPSEEM

SEQ ID NO: 16815 - protein, 1413 aa, Calephelis perditalis
MTMQHNKYNLRPLPGGRRGAPGAGAGCFSLRDTGGETSSRRALVTQHATADCRELNRRAHDDDATAESLGDDTLSLFSSIPSTCPSYMTRRTSTLSTNTIDGVVQEVNIDLELAPTSNVTTKRKRWTKEMNVFILRTYLQLTALDTDTKNYLEALHSKFIEKYPEMGASRQRVGDQRRAIMRRKLLPQNILDQINTEVTTELQLFHSNIAALSDTNQNSTQVNNVENIDTQNPQTRMRWTNDHNETIMQSYYRVTHLETNKTAYRKPLHEAFIRAYPTLSHLSEQRIADQRRAIVCKKYVTDSRLNEIKAQIAEEFSETLIHDTNLTNYTQTHHNHNSGSIFLDSIEINPPNDTQDVPGNQERDNKIDEIFETALQHFKDTDPTKRAYIPKQKPSRKFSKIVKYLNEKTLPETVNIETDFNLLQTAIYCAAWTAAKVNGAKLSLEATHPLRDKQRDSRPHWQRRLERRLLDIRAKIGKLTQYINGNRSRRLEKQIQDIVEKYKIHSAHEEPNTQLVHTLDTLKQKLSVISGRIQGYKACTLRKQQNYQFSNNEKQFYRQIKQMTTNMQDDTTNANESPNPDTLKEFWSKIWENPVQHNKQASWIQKEINKNTTTQDMQFDYIPIDTFQKVLYKAHNWKAPGSDNIHTYWYKKFTYIQSFIHNFLNKFMEDPNTIPPYVTSGITFMIPKDHNDQLNPAKYRPITCLQTLYKILTGCITDMIYEHIDKNNLLTEQQKGCRRFSQGCKEQVIIDSVILNRVQKSKSHLYSMYIDYKKAYDSVPHSWLLHVLEIYKIHPKIITLMRATMLNWTTILKLNTSTSTMETEPIKIQRGIFQGDALSPLWFCLALNPLSNILNSTEAGHLLQYPDNNTGNSTQENINHLFYMDDIKLYADNEYQLNHLASLAEQFTNDIKMEFGIDKCKINSIRAGQSHQHHYTLETGDIIEPLSKQEIYKYLGYNQALQIQYKDTKLKLTQQFRHRLNSILKTQLNARNVIKAINTYAIPILTYSFGIINWSKSDLKALQRTINTTLTKYRKHHPRSCLQRLTLSRKDGGRGLIDISNLHSKQITTLRTYFLTKSESSFLHKAIVYNDNKLTPLNLQDKLTQNNEKQTDDKIKLAEWASKSLHGRHLHDLSQPNVDKLASNAWLVHGELFPETEGFMLAIQDQVVETRNYQRYIIKNLASDVCRKCNSNPETIQHITGACKVIAQTDYKHRHDQVANIIHQSLAYQQNLINFTQPYYKYNPDTVLENSKCKLYFDRAILTDRTIHYNRPDITLIDKNNKIGYLIDIAVPNTHNIQSTIAEKLTKYTELKTEITRLWHLQKVIIVPIVLSTTGVIPKQLHQSIKTINLHSNIYKLLQKAVILNTCRIVRKFLQSEPENSITHQISLSTAVSNCHAVTQPTLRNTLPDVHLA

SEQ ID NO: 16816 - protein, 851 aa, Calephelis nemesis
MTTNMQDDTTNANESPNPDILKEFWSKIWENPVQHNKQAFWIQKEIDKNTTTQDMQFDYIPIDTFQKVLYKAHNWKAPGSDNIHTYWYKKFTYVQSFIHNFLNKFMEDPNTIPPYVTSGITFIIPKDHNDQLNPAKYRPITCLQTLYKILTGCITDMIYEHIDKNNLLAEQQKGCRRFSQGCKEQVIIDSVILNRVQKSKSHLYSMYIDYKKAYDSVPHSWLLHVLEIYKIHPKIITLMRATMLNWTTILKLNTSTSTMETEPIKIQRGIFQGDALSPLWFCLALNPLSNILNSTEAGHLLQYPDNNTGNSTNENINHLFYMDDIKLYADNEYQLNHLASLAEQFTNDIRMEFGIDKCKTNSIRAGQSHQHHYTLETGDIIEPLSKQEIYKYLGYNQALQIQYKYTKLKLTQQFRHRLNSILKTQLNARNVIKAINTYAIPILTYSFGIINWSKSDLKALQRTINTTLTKYRKHHPRSCLQRLTLSRKDGGRGLIDISNLHSKQITTLRTYFLTKSESSFLHKAIVYNDNKLTPLNLQDKITQNNEKQTDDKIKLAEWASKSLHGRHLHDLSQPNVDKLASNAWLVHGELFPETEGFMLAIQDQVVETRNYQRYIIKNLASDVCRKCNSNPETIQHITGACKVIAQTDYKHRHDQVANIIHQSLAYQQNLINFTQPYYKYNPDTVLENSKCKLYFDRAILTDRTIHYNRPDITLIDKNNKIGYLIDIAVPNTHNIQSTIAEKLSKYTELKTEITRLWHLQKVIIVPIVLSTTGVIPKQLHQSIKTINLHSNIYKLLQKAVILNTCRIVRKFLQSEPENSITHQISLSTAVSNCHAVTQPTLRNTLPDVHLA

SEQ ID NO: 16817 - protein, 1186 aa, Aurina azines
MRWTNDHNEAIIRSYLRITHLDTNRTAYRKLLHRDFIDKFPTLVHLSEQRIADQRRAIINNKYISSIRLNEIKREVSEELNINQTINYNNDIQITDFNNVNDIHLLNSIELTPLDENLPKTHLEIGSERDTEIDVTFQEAFQYYINTEPTSRPYIPKQNTSKKLANIIDYLNRVTLTEVITADTDFRTLQTAIYCAAWTAAKINGSKITITPTEPSSCNKKVYKPNWQKRLEKRINNLRAKIGKVTQFINGSRSKNLMKQVNNIIKQYKIHSIHEEPNTQLTHTLDTLKQKLSLLSGRLRRYKACTLRKQQNKQFTNNEKIFYRNLRQTTTNTQKNDNVNNLRSTPNADHLQKFWAGIWEDNITHNTRADWIHTETTNSNSIQLMKFENIPIDIFKKVLRNLHNWKAPGSDNIHSYWYKKFTSIHNYLHFHLNQFIQKPNLLPTYITSGVTYMIPKDRNDLTDPAKYRPITCLQTIYKIITSCIAELIYEHINSNNILAEQQKGCRKNSQGCKEQLLIDSVILNKAQKTKSNVFTMYIDYQKAFDSVPHSWLTQILELYKINPQIVTFLKTTMTNWTTRLKLSTSDRTIETGTIKIKRGIFQGDALSPLWFCLALNPLSNMLNSTAAGYSLNYTDERTDANTQITLLNHLLYMDDIKLYAENEDQLYQLANMTEIFTNDINMKFGIDKCKINSIRAGQNYQHHYTVQTGELINSLDAHESYKYLGYDQSRQIHHKDIKYILKQEFQHRLNSLLKTQLNSRNTVKSINTFAISVLTYSFGIIKWTKSDLKALQRTINKSMTKFRKHHPRSCLQRLTLPRKQGGRGLIDIANLHNSQITNLRNYFFNKMKSSSLHTAIVQNDKKYTPLNLQDNNPQHNEVVTDNNTKLTEWATKSLHGRHRQDLCQPNVDMQASNAWLSRGDLFPETEGFMLAIQDQVIETKNYQRYIIKSLSSDKCRKCNSCPETIQHITGACKSIAQTDYKHRHDQVANIIHQQIAHQQKLITQLQPYYKYKPETVLENSTSKLYFDRAILTDRTIHYNRPDITLINKTSKTGFLIDIAIPNTHNIQTTIAEKLSKYSELKDELIRLWHLHKVTIVPIVLSTTGVIPNQLHISLKTLNLPSYIYCLLQKAAILNTCRLVRKFLQSEQDIHSNHQTLSSTPITNTIIHAPQIHSCKFDQLQPGVHLA

SEQ ID NO: 16818 - protein, 1445 aa, Dyscophellus porcius
MSRGGRTLADLSYTIPVTNGALVSTNYAMRLRSRQIPQAGTRKGESRPGPSGPGCPTYSGEGNASHQAAQSCTAVAESSSSPGDDTRSLFSSIPSTRPTYMTRRTSTLPSVTTLDDVVQDVELDSQPAPTLSKPNKRMRWTNDMNQFILRTYLRLTALDTDTKTYLEPLHLQFIEKYPNMAVGRQRVGDQRRAIIRNKLLPQATIDSIYAEIRNELTRTNLAHDYTQQTCTYSSTNTRYQNFIPEPAQTQARTPEIHRTQTRMRWTNDHNEVIIRSYLRITRLDTNRTAYRKLLHQDFIQRFPSLSHISEQRIADQRRAIIRNKYITETRFYEIKSEVTEELSSNTQNTNQFTNSMDDKEITGLNNSTSKSTQLFYNIEATTLENNSTNMQLEGLNRDSVIDATFQEAFQYYIDVDPTSRVYVPKQNPSKKLAAVIDYLNKVTLAQLVTANTDFRTLQTAIYCAAWTAAKINGAKITIEPIQKCSGDKKNYKPIWQKRLQKRIEELRIKIGRVTQAINGNKSNNLVKQVNDIVKQYKIHSKHDEPNTQLTHILDTLKQKLAVITGRLRRYKACSLRKQQNRQFNTNEKMFYRNIRQNTSNTQGTENGLSYSPDPANLEKCWSGIWEDNATHNTQADWIHIETTNNEPTQLMKFENIPLDIFRKVLQNLHNWKAPGSDHIHSYWYKKFTSIHEYLLSYLNKFIQDPSSLPTYVTSGVTYMIPKDHNDLANPTKYRPITCLQTIYKILTSCISELIYDHVNRNNILAEQQKGCRKNSQGCKEQLLIDSVILNKVQKNKSDLFSMYIDYQKAYDSVPHSWLIKVLEIYKINPQIVTFLKTTMTNWTTRLKLFTSVKAIETGTIKIKRGIFQGDALSPLWFCLALNPLSNMLNSTAVGYPLDYTDEQTDNNSQKNVLSHLLYMDDIKLYAENEMQLNQLATLTETFTNDINMKFGIDKCKINSIRAGQNYSHHYTVSTGAIINALVPHEAYKYLGYHQSRQIHHKDIKCKLKQEFQHRLNSLLKTQLNSRNTIKAINTFAISVLTYSFGVIKWSKSDLKALQRTINVTMTKFRKHHPRSCVQRLTLPRKEGGRGLIDILNLHNSQIKNLRNYFFHKMKSSTLHKAIAQNDDKYTPLNLKDNTPQRIEIVTDNNTKRTEWAAKSLHGRHRQDLCQPNVDILASNAWLSRGDLFPETEGFMVAIQDQVIETRNYQRHIIKNLSSDTCRKCNSCPETIQHITSACKAIAQTDYKHRHDQVAYIIHQQIAHQLKLLANVQPYYKYKPEAVLENSKTKLYFDRAILTDRTIHHNRPDITVINKTDKIGFLIDIAIPNTHNLQTTIAEKLSKYSELKDELTRLWHLQKITIVPIVLSATGVIPNQLHQSLKTLNLPHYTYCLLQKAAVLNTCRLVRKFLQTDHDNTYTNSQALSATSIAHSTPHNGPIVSISTAT

SEQ ID NO: 16819 - protein, 1462 aa, Ptilodon capucinus
MEQNIRKYNLRSLPGGRRGAPGAGAGCLSLRDTGDEELSRRALVTQPITAGRRGLSRRAHGVEATAESISGDDTRSLFSSIPSTRPSYMTRRTSTLSSVTTLDGVVQDVELDSEPAPTSGILQTRRRWTTEMNQFILRTYLQLTALDTDTKTYLEPLHVKFIEKYPNMIVSRQRVGDQRRAIIRNKSLPQTTIDSIYAQVREELTELQTNHNSHTIQANSHTSTDILLTPTHTQTTNTTTNARSTRMRWTNEHNEAILRSYFQITQLDTNRTAYRRQLHQAFIQRFPELSHLSEQRIADQRRAIINNKYITDNRLETIRGEVAHELSLSTNHPITDDSNTNYIPTESVDNTNNDALQILNNVELPPENPPALLQLETHRDPEIDTTFQETFQYYKDIEPTSRTYIPKQKPSKKFATIVEYINKSILPNLIHSETDFATLQTAVYCAAWTAAKINGARITLTPVENTNYIKKTYTPKWQKRLERRLDDLRAKIGRLTHFINGNRNRQLTKYVEDIIKQYKIHSVHEEPNTQLTHTLDTLKQKLSVVSARLRRYKACTLRKQQNNQFNNNEKLFYRNIRQNTTNIQETTDAHNTSNTPEPEDLRNFWAGIWDDSATHNTQAEWIHTEMSNNTSTQSMNFENIPIETFNKVLRNLHNWKAPGSDNIHSYWYKKLTSIHNCLRIHLNNFILEPNTMPVYITAGITYMIAKDRNDPTNPAKYRPITCLQTIYKILTSCISELMYEHISSNNILAEQQKGCRKFSQGCKEQLIIDSVILNHVQKTKSNLFSMYIDYKKAYDSVPHSWLTQVLEIYKINPTIINFLKTAMTNWTTRLKLSTSTETIETNPIKIQKGIFQGDALSPLWFCLALNPLSNMINSTAVGYPLQYADADDQTNTQTHLVNHLLYMDDIKLYAENENHLYQLANLTELFTNDINMEFGIDKCKINSIMAGQNYQHYYTLTSGEQIDPLDAQETYKYLGYNQSRQIHHKDIKYKLKQVFQHRLNSLLKTHLNSRNTIKSINTFAIPVLTYSFGIINWTKSDLKSLQRTINTTMTKLRKHHPRSCMQRLTLPRKEGGRGLIDIGNLHNSQITNLRKYFFTKTDSSTLHKSIAQNDRKRTPLNLQDKTSQNNEKITDDKTKIADWTAKALHGRHRHDLCQPNVDKEASNAWLCRGELFPETEGFMLAIQDQVIETRNYQKYIIKKLASDICRKCSSSPETIQHITGACRAIVQTDYKHRHDQVANIIHQQLAHQHKLVTDKQPYYKYNPETVLENATTKLYFDRAILTDRTIHYNRPDITIINKTNKTGYLIDIAVPNTHNLQTTIAEKLSKYTELKDEITRLWHLQKVTIVPIVLSTTGVIPKQLHQSLSTLNLPPNLYLLLQKAAILNTCRIVRKFLQTEQDNTHSNTQQSTSAPITLSTNTQQPTTAPITLSTNTQQSTSAPITLYYSHSSEESTTQPLSLTPTT

SEQ ID NO: 16820 - protein, 1387 aa, Telemiades fides
MRLRNRVIPQAGTRKGESRPGPSSSGCPTYSGEGNVSHAATQSYAVVAENSPGDDTQSLFSSIPSTRPSYMTRRTTTLPSVTTSDSVVQDVNFDTEPAPTLGISSTRRRWTIDMNQFILRTYLRLTALETDTKAYLEPLHLQFIEKYPNMIVSRQRLGDQRRAIIRNKLLPQDMIDKIYDEVRQEMTQDRTRNTCLNISMPNISEALYQSFTPNSKQMQPTTPELHNTHNRMRWTNEHNEAIIRTYLRITHLDTNKTAYRKLLHRDFVQRFPELTHLSEQRIADQRRAIMNNKYISVSRLNDIRLEVSEELSTNQLNINQLHNCTNDNQIPVINNSESNDMHLDNIEITPLDIFSPQTRTLIDPEIDVNFQEAFQYYNNSDPTCRPYIPKQNPSKRLAKIVDYLNTVTLAGIVKDDLDFSTLQTAIYCAAWTAAKMNGAKITLKSIEKSNFNKSKYKPNWQRRLEKRVNDLRIKIGRVTQFMNGNRSTKLTKHVNDIVNQYKIHSIHEEPNTQIAHTLDTLKQKLYLISGRLRRYKACTLRKQQNKQFVNNEKIFYRNIKQNTNNIHENKNDSLSSSTVDPDALQKFWSGIWEDSVTHNSQADWIHSETRHNNHINLMKFENIPEDTFKNVLRNLHNWKAPGSDHIHNYWYKKFTSIHRCLHYHLNQFILDPNLMPIYITSGVSYMIPKDHNNLSDPTKYRPITCLQTIYKILTSCISELIYQHVDSNSILAEEQKGCRKNSQGCKEQLIIDSVILNKVQKTKSNLFSMYIDYQKAYDSVPHSWLTQVLDIYKIHPQIVKFLRFAMDNWTTCFKLSSPNRTMETGTIKIKRGIFQGDALSPLWFCLALNPLSKMLNSTSLGYALNYTDEQIDNKPQRILVNHLLYMDDIKLYAENENQLTQLTNLTEIFTNDIKMKFGIDKCKINSIRAGQNYQHDYTVRTGEIIGALEAQECYKYLGYNQSRQIQHKDIKNKLKQEFQHRLNSLIKTQLNSRNIVKSINTFAISVLTYSFGIIKWSISDLKALQRMINTTMTKFRKHHPRSCLQRLTLPRKEGGRGIIDILNLHNSQITNLRNYFYNKMKSSMVHAAIAQNDNKYTPLNMRDKTQQHNEVLTDNNTKRAEWASKYLHGRHRNDLCQPNVDLQASNSWLSRGDLFPETEGFMMAIQDQVIETRNYQRYIIKSLSSDTCRKCSSSPETIQHITGACKAITQTDYKHRHDQVANIIHQQIAHQHKHITKLQPYYKYKPETVLENSTSKLYFDRAILTDRTIHYNRPDITLINKQNQTGFLIDIAIPNTHNLQTTIAEKLSKYTELKDELVRLWHLKKVTIVPIVLSSTGVIPKQLYQSLKTLNLPINTFHLLQKAAILNTCRLVRKFLQTEQDNIPINP

SEQ ID NO: 16821 - protein, 1427 aa, Oileides vulpinus
MTNEALVSTKYAMRLRSRQIPQAGTREGESRPEPSGSGCPAYSGGGNVSHKATQSCTVVAESSLGDGTHSSVSSIPSTRPSYMTRRTSTLSSVTTLDSVVQDVDNDLEPTPTSSAPITRRRWTNDMNQFILRTYLRLTSLDTDTKTYLEPLHLQFIEKYPNMTVSRQRVGDQRRAIIRNKLLPQTIIDSIYNQVKKELTNTENTHNHTQLTQPSTHSSSIITHQNLTPDTIHAQTHNTPTRMRWTNEQNEAIIRSYLRITHLDTNRTTYRKTLHADFIQKFPTLAFLSEQRIADQRRAIINNKYISDTRLHEIKREVSEELRINQLDTNQFIYRNNDIHINDINNIDSNNIHNLNHIELNPLKDNPHHTQLESDTNIETQIDSTFSDAYQHHQNTHPTSRSYIPKQKPSRKLSKIIDYLNKITLTRIITAETDFRTLQTATYCAAWTAAKMNGCRLTLESTDESTHNKNKHKPVWQNRLEKRLDDIRTKIGRLTQFMNGNRSKKLTKHVNYIIEQYKIHSIHEEPNTQLTHTLDTLKQKLSLISGRLRRYKACTLRKQQNKQFINNEKIFYRNMRQNTSNNQNNHNTNITPNPDEVQNFWAGIWEDNVTHNTQAEWIHTETTNNNSIQLMKFENIPLDIFKKVLQNLHNWKAPGSDQIHSYWYKKFTTIHNKLHFYLNQFIQKPNSMPDYITAGVTYLIPKDRNDLTNPAKYRPITCLQTIYKILTTCISELIYQHLNSNDILTEQQKGCRKNSQGCKEQLVIDSVILSKAQKTKSNLFTMYIDYQKAYDSVPHSWLAQVLEIYKINPQLVTFLKTTMTNWTTQLKLPISDKTITTGTIKIRRGIFQGDALSPLWFCLALNPLSNMLNSTTTGYPLSYTDEQTESNTKTHLLNHLLYMDDIKLYAKNENQLYQLANLTEIFTNDIDMKFGIDKCKINSIINGQNYQHHYTLNTGDLIQALEANESYKYLGYNQSRQIHHKDIKLKLKQEFQHRLNSVLKTQLTSRNTIKAINTFTIPVLTYSFGIIKWSKSDLKSLQRIINTTMTKFRKHHPRSCLQRLTLPRKEGGRGLIDIPNLHNRQITHLRKYFFNKIESSSLHTAICKNDTKYTPLNLQDSTPQSNEILIDDNTKRTEWATKSLHGRHRHDLCQPNVDMQASNAWLSRGDLFPETEGFLMAIQDQVIETKNYQRYIIKNLTSDTCRKCNSCPETIQHITGACKAIAQTDYKHRHDQVAKIIHQQIAHQQKLITKFQPYYKYDPEIVLENSTTKLYFDRAILTDRTIHYNRPDITLINKTSKTGYLIDIAIPNTHNLQTTISEKLSKYTELKDEIIRLWHLQTVTIVPIVLSTTGVIPTQLHQSLKTLKLPPFTYCLLQKAAVLNTCRLVRKFLQIEQNDTHTVRTIPQTFSPTPLTQHPLHSSQRPSSSAAL

SEQ ID NO: 16822 - protein, 1402 aa, Trichoplusia ni
MEMSSKRVYDLRSLPGGRRGTSGADAGCHSMRTIGGEGLSRRASPDKNITAGRRVLSKRAHDVEVTADLSGDDTRSLFSSVPSTRPSYMTRSLSSSSVLDSVAQEVTFDHDLAPITSVSTKRRRWTSEMNEFILRTYLYLTLLDTDKRTYLEPLHLKFIEKFPSMQVSKQRVGDQRRAITRNKLLPQHIIDRIYDDVKQELQQTQSNIIASATHTPPHEHLTRISEMSSTQNTAQSRMRWTNEYNEAIMRAYYRVTALGTNETAYRKPMHHDFINRYPALAHLSEQRIADQRRAILNNKYISDIRLNVLKLEVSAELGINNNGTSNSVETINPPNYFDSNSQLAHYTVAELPLAPDLSQSSPTQTESITQALQESRNLEIDETFQQAILFYKNTDPTKRVYIPKQKPSKNLARITGYLNHIIIPEHVGVDTDFFTLQTVIYSAAWTAAKVNGSKIALEPSENLSGSRKEHKPKWQKRMERKINNLRSKIGRVTQFVNGNRSRKIVTHFNNIIKHYKTHTIHEEPNTQAAHVLDTLKQKLSVVSGRLQRYTACTLRKQQNLQFTNNEKSFYRNVRKTTSNFQQNTVSNNPDLESLQNFWSKIWENPAVHNDQANWIQTEAANTNKNTPDMVFENIRPEIFHKVLTRLHNWKAPGSDYIHSYWYKKFTSVHCYLCNFINRFIQDPSLIPSYMTAGTTYMLPKDSSDLTNPAKYRPITCLQTLYKIVTSCLAEVIYDHVDANNILAEQQKGCRKFSQGCKEQLIIDSIVLNKVHKTKSDLYSMYIDYKKAYDSVPHSWLVKVLQLYKIHPKIIVFLENLMSNWTTVVRLTTATGTIVTNPIKIQRGIFQGDALSPLWFCLALNPLSNLLNSTGFGIPLTHTEATQTVKIELNHLLYMDDIKLYAKSESELEELAKLTEQFTSDIKMEFGIDKCKINSIKAGQNYQHHYTLANLELIEPLEAHDTYKYLGYSQASQIKYKETKCKLKQQFQHRLNVILRTNLNSRNTIKAINTFAIPVLTYSFGVINWTKSDLKELQRKINTSLTKFRKNHPRSCLQRLTLPRKEGGRGLIDILNLHSRQITTLRQYFFAKAESSMLHKLIVCNDKQLTPLNLKDPLEQKNEKQLDNKTKILEWNQKSLHGRHRQDLCQVNVDKEASNAWLSRGELFPETEGFIIAIQDQVIETRNYRRYIIKNLVNDRCRKCNSASETIQHITGACKSIAQTDYKHRHDQVANVIHQKLAYQYKFVDSIVPYYKYNPETVLENSTTKLYFDRAILTDRTIHFNRPDITLINKANKTGYLIDIAVPNTHNLQSTIADKLAKYTELRDEITRIWHLQKVTIVPIVLSTTGVIPCQLHQSLKTLNLVPNTYHLLQKAVILNTCRLVRKFLQCESDSSQHNTNTQSAIH

SEQ ID NO: 16823 - protein, 1402 aa, Trichoplusia ni
MEMSSKRVYDLRSLPGGRRGTSGADAGCHSMRTIGGEGLSRRASPEKNITAGRRVLSKRAHDVEVTADLSGDDTRSLFSSVPSTRPSYMTRSLSSSSVLDSVAQEVTFDHDLAPITSVSTKRRRWTSEMNEFILRTYLYLTLLDTDKRTYLEPLHLKFIEKFPSMQVSKQRVGDQRRAITRNKLLPQHIIDRIYDDVKQELQQTQSNIIASATHTPPHEHLTRIPEMSSTQNTTQSRMRWTNEYNEAIMRAYYRVTALGTNETAYRKPMHHDFINRYPALAHLSEQRIADQRRAILNNKYISDIRLNLLKLEVSAELGINNNGTSNSVETINPPNYFDSNSQLAHYTVAELPLAPDLSQSSPTQTESITQALQDSRNLEIDETFQQAILFYKNTDPTKRVYIPKQKPSKNLARITGYLNHIIIPEHVGVDTDFFTLQTVIYSAAWTAAKVNGSKIALEPSENLSDSRKEHKPKWQKRMERKINNLRSKIGRVTQFVNGNRSRKIVTHFNNIIKHYKTHTIHEEPNTQAAHVLDTLKQKLSVVSGRLQRYTACTLRKQQNLQFTNNEKSFYRNVRKTTSNFQQNTVSNNPDLESLQNFWSKIWENPALHNDQANWIQTEAANTNKNTPDMVFENIRPEIFHKVLTRLHNWKAPGSDYIHSYWYKKFTSVHCYLCNFINRFIQDPSLIPSYMTAGTTYMLPKDSSDLTNPAKYRPITCLQTLYKIVTSCLAEAIYDHVDANNILAEQQKGCRKFSQGCKEQLIIDSIVLNKVHKTKSDLYSMYIDYKKAYDSVPHSWLVKVLQLYKIHPKIIVFLENLMSNWTTVVRLTTATGTMVTNPIKIQRGIFQGDALSPLWFCLALNPLSNLLNSTGFGIPLTHTEATQTVKIELNHLLYMDDIKLYAKSESELEELAKLTEQFTSDIKMEFGIDKCKINSIKAGQNYQHHYTLANLELIEPLEAHDTYKYLGYSQASQIKYKETKCKLKQQFQHRLNVILRTNLNSRNTIKAINTFTIPVLTYSFGVINWTKSDLKELQRKINTSLTKFRKNHPRSCLQRLTLPRKEGGRGLIDILNLHSRQITTLRQYFFAKAESSMLHKLIVCNDKQLTPLNLKDPLEQKNEKQLDNKTKILEWNQKSLHGRHRQDLCQVNVDKEASNAWLSRGELFPETEGFIIAIQDQVIETRNYRRYIIKNLVNDRCRKCNSASETIQHITGACKSIAQTDYKHRHDQVANVIHQKLAYQYKFVDSIVPYYKYNPDTVLENSTTKLYFDRAILTDRTIHFNRPDITLINKANKTGYLIDIAVPNTHNLQSTIADKLAKYTELRDEITRIWHLQKVTIVPIVLSTTGVIPCQLYQSLKTLNLVPNTYHLLQKAVILNTCRLVRKFLQCESDSSQHNTNTQSAIH

SEQ ID NO: 16824 - protein, 1447 aa, Melanis pixe
MSEHLDHTPCMGDTLNKNLTASRLPSSNQSFPPQKMMMIMPNVNKYNLRSLPGGRRDAPGAGAGCFSMRDTGDEASSRRAPVTQHVTADRRELNRRAHGDNATAEYLGDDNSSLFSSIPSTRPSYMTRRTSTITTSTLDGVVQTVNPDVEFAPTSGATGTRKRWTMEMNTFILRNYLRLTALNTDTKNYLESLHLKFIEKYPEMEASRQRVGDQRRTIIRRKLLPQNVIDQIYDEVKNELELLQTNITTFNETNQNNTQANTIEITTINNSHARMRWTNEQNETIMQSYYRITHLEKNKTVYRKALYEAFINAYPSLTHLSEQRIADQRRAIVCNKYISDIRLNEIKAQISEELSQYPVQDTCLTNITQNTYAIDDTVPTFLDSIDSNNTENLQDIHQHPERNSNIDETFKTAIQYFKDTNPTKRAYIPKQKPSKKFAKIVQYLNQITLPETVNIETDFNSLQTTIYCAAWTAAKVNGAKIYLELSNQSRDKQKDKRPHWHRRLERRIQDLRAKIGKLTQFKNGIRSRRLERHIENIIQQYKIHSLYEEPNTQLSHTLDTLKQKLAVTSGRLQRYRACTLRKQQNYQFSNNEKQFYKQIKQTTTNIQDNTHSSNQLPDPEHLKEVWTEIWQQPIQHNNQASWIQTEMESYTNTQQMQFNHIPIDTFHKVLHNSHNWKAPGSDNIHTYWYKKFTYIQGFIHNFLNKFIEDPSIIPAYLTSGITFMIPKDYNDLTNPRKYRPITCLQTLYKILTGCISDIIYHHIENNNLLAPQQKGCRRFSQGCKEQLIIDSVILNQVHKSKSDLYSMYIDYKKAYDSVPHSWLLQVLDIYKIHPTIVTLLKVVMSNWTTRLKLTNSIQSIETEPIKIKRGIFQGDALSPLWFCLALNPLSNILNSTAVGYHLTYIDNSQSTAQEQINHLLYMDDIKLYADNEHHLNQLANLTEQFTNDIKMEFGIDKCKINSIKGGRNYQHHYSLQTGDQIESLNEHETYKYLGYNQALQIQYKETKLKLTQLFRHRLNAILKTQLNSRNLIKAVNAFAIPILTYSFGIINWTKTDLKALQRTINTRLTKFRKHHPRSCLQRLTLSRKEGGRGLIDIFNLHSRQITTLRTYFFHKSESSKLHKAVAYSDKKLTPLNLQDKTAQNNEKVIDDKTKLTEWASKSLHGRHLYDLRQPNVDKLASNAWLSQGELFPETEGFMLAIQDQVIETRNYRKHIIKNLASDTCRKCNSTPETIQHITSACKTIAQTDYKYRHDQVANIIHQKLAQQHNLVTTMQPYYKYIPQTVLENTTTKLYFDRAILTDRTIHYNRPDITLIDKITKTGYLIDIAIPNTHNIQSTIAEKLSKYTELKDEITRLWHLQKVTIVPIVLSTTGVIPNQLQHSIKTLDLPPKIYITLQKAVILNTCRLVRKFLQTDQESNGNTSYTPAMTQSRLPDDHTDINSPLITN

SEQ ID NO: 16825 - protein, 1277 aa, Mamestra brassicae
MQISRQRVGDQRRAIIRNKLLPQKTIDEIHNEVKEELNQLQNKHQYPVTFINQTQQLLTSTQTNQIHPTTPETPITQQRTNTQLRWTNEQNEAIMRSYYRVTDLGRNETAYRKPLYDNFIHSFPSLAHLSEQRIADQRRAIINNKYIETDKLNSLRSEIAAELEQNYTSETTIDNSNNYNNTDIQLRDNNDLYNVAPPPVLQTHNTETNITEELLSNLQTCLERVPLIDDTFQQAFQFYVETSPVNRIYIPKQKPSKKLARIINYLNKIILPEKVNKDTDFDTIQTVIYSAAWTAAKVNGAKISLQARVINQDQIKEYIPNWQRRLERKLNNLRAKIGRMTQFINGNRSKKVIKHVNSIIEQYKIHTIHEEPNTQATHTLDTLKQKLSVVTGRLQRYKACTQRKQQNTLFSHNEKLFYRNISQATTNVQENHINDRDNVTPEPNLLKHFWASIWEQPIEHNDQADWIQTELSHNNANIQAMTFEYITPQIFHKVLSRLHNWKAPGSDHIHSYWYKKFTAIHCYLHNYINIFIQEPNKIPSYITSGTTFMIPKDRSDLSNPAKYRPITCLQTLYKIITSCISELIYQHIDANNILAEQQKGCRKFSQGCKEQLIIDSVILKKIQKTKSDLFTMYIDYKKAYDSVPHSWLVKVLEIYKIHPTLITFLKVMMSTWTTVLRLTTPTKTVDTSPIKIQRGIFQGDALSPLWFCLALNPLSNILNATSLGIPLKSTDTIADSEQNDSQTSSLNHLLYMDDIKLYGKSESQLNELANLTENFTNDIKMEFGIDKCKINSVRAGQNYKHQYTLKTGEQIEPLDEQDTYKYLGYTQSRQIHSKDTKQKLKQKFQHRLNTILKTQLYSRNIIKAINTFAIPVLTYSFGVINWTKTDLKFLQRKINTTMTKFRKHHPRSCQQRLTLPRKEGGRGLMDVSNLHNRQITSLRQYFFTKSASSILHKLIAQHDQHLTPLNLKDKNQQNNEKVTDDKSKILEWTQKSLHGRHRQHLCQTNVDKEASNAWLNRGELFPETEGFMLAIQDQVIETRNYRKCIIKNLTTDICRKCNSSPETIQHITGACKSIAQTDYKHRHDQVANIIHQKLAHQFKLLDSVVPYYKYNPETVLENATTKLYFDRAILTDRTIHFNRPDITVINKINKTGYLIDIAVPNTHNLQTTIAEKLSKYIELKDEITRLWHLQKVTIVPIVLSTTGVIPKQLQQSLNSLKLPSSTYQLLQKAVILNTCRLVRKFLQCEPDSPHQNIYTNTPPSIIQSTTCSPIPIDEHLA

SEQ ID NO: 16826 - protein, 1442 aa, Mamestra brassicae
MEMINRRKYNLRSLPGDRRGASGADAGCHSMQTIGGEALSRRTLTENSVTAGRCELDRRVHNVEATADSTGDDTISLFSSIPSTRPSYMTRRTTRSSTTSTLDSVVQDVHLDTDFTPTTSAKSTRRRWTPEMNKFILRTYLQLTALDTDRRTYVEPLHLKFIEKYPNMHVSRQRVGDQRRAIIRSKLLPQKTIDEIHKEVKEELNQLQNNHQYPQLLTSTQTTQIYPTTSKTPITQQRINTRMKWTNEQNEAIMRSYYRVTDLGRNETAYRKPLYDDFINTFPSLAHLSEQRIADQRRAIINNKYIETGKLNALRLEIAEELGQNNINLSNHTSETIENSYNNNNTDSLLTDNVDLYTTEEPPPNVRTHNTETNFTEEPLSNSQTSLERVPLIDDTFQQAFQFYVATSPINRTYIPKQKPSKNLSKIINYLNKIIFPETVNKDTDFHTIQTVIYSAAWTAAKVNGAKISLQAREINHGQKKEYIPNWQRRLERKLNDLRSKIGRMTQYINGNRSKKVIKHVKSIIEQYKTHTIHEEPNTQATHILDTLKQKLSVVTGRLQRYKACTQRKQQNTLFTHNEKLFYRNISQTTTNFQENHTNDRANGTPETNTFKNFWASIWEQPIEHNAQADWIQTELTHNHTNVQAMTFEYIPPQIFHKVLSRLHNWKAPGSDHIHSYWYKKFTAIHGYLHNYINIFIQEPETIPSYITSGTTFMIPKDHNDLSNPAKYRPITCLQTLYKIITSCISELIYKHIDTNNILAEQQKGCRKFSQGCKEQLIIDSVILRKNQKTKSDLFTMYIDYKKAYDSVPHSWLVKVLEIYKIHPTLITFLKIMMSTWTTVLRLTTPTETIDTSPIKIQRGIFQGDALSPLWFCLALNPLSNILNTTSLGIPLKSTETIPNNEQTDTQTSMLNHLLYMDDIKLYAKTESQLNELANLTEQFTNDIKMEFGIDKCKINSVRAGQTYKHQYTLDTGEQIEPLDEQDTYKYLGYTQSRQIHYKDTKQKLKQKFQHRLNTILKTQLDSRNTIKAINTFAIPVLTYSFGIINWTKTDLKTLQRKINTTMTKFRKHHPRSCQQRLTLPRKEGGRGLIDVSNLHNRQITSLRQYFFAKSTSSILHKLIAQNDQHFTPLNLKDKNEQKNEKVTDDKTKILEWTQKSLHGRHRQDICQINVDKEASNAWLNRGELFPETEGFMLAIQDQVIETKNYRKFIIKNLTTDTCRKCNSSPETIQHITGACKSIAQTDYKHRHDQVANIIHQKLAHQFKLIDSVVPYYKYNPETVLENANTKLYFDRAILTDRTIHFNRPDITVVNKTNRTAYLIDIAVPNTHNLQTTIAEKLSKYIGLKDEIARLWHLQKVTIVPIVLSTTGVIPKQLYQSLNSLNLPSSTYQLLQKAVILNTCRLVRKFLQCESDNPHQNIHTNTPPSIIQPTASTLIPIDEHLA

SEQ ID NO: 16827 - protein, 1442 aa, Mamestra brassicae
MEMINRRKYNLRSLPGDRRGASGADAGCHSMQTIGGEALSRRTLTENSVTAGRCELDRRVHNVEATADSTGDDTISLFSSIPSTRPSYMTRRTTRSSTTSTLDSVVQDVHLDTDFTPTTSAKSTRRRWTPEMNKFILRTYLQLTALDTDRRTYVEPLHLKFIEKYPNMHVSRQRVGDQRRAIIRSKLLPQKTIDEIHKEVKEELNQLQNNHQYPQLLTSTQTTQIYPTTSKTPITQQRMNTRMKWTNEQNEAIMRSYYRVTDLGRNETAYRKPLYDDFINTFPSLAHLSEQRIADQRRAIINNKYIETGQLNALRLEIAEELGQNNINLSNHTSETIENAYNNNNTDSLLTDNVDLYTTEEPPPNVRTHNTETNFTEELLSNSQTSLERVPLIDDTFQQAFQFYVATSPINRTYIPKQKPSKNLSKIINYLNKIFFPETVNKDTDFHTIQTVIYSAAWTAAKVNGAKISLQASEINHGQKKEYIPNWQRRLERKLNDLRSKIGRMTQYINGNRSKKVIKHVKSIIEQYKTHTIHEEPNTQATHILDTLKQKLSVITGRLQRYKACTQRKQQNTLFTHNEKLFYRNISQTTTNFQENHTNYSANGTPETNTFKNFWASIWEQPIEHNAQADWIQTELTHNHTNVQAMTFEYIPPQIFHKVLSRLHNWKAPGSDHIHSYWYKKFTAIHGYLHNYINIFIQEPETIPSYITSGTTFMIPKDHNDLSNPAKYRPITCLQTLYKIITSCISELIYQHIDTNNILAEQQKGCRKFSQGCKEQLIIDSVILRKNQKTKSDLFTMYIDYKKAYDSVPHSWLVTVLEIYKIHPTLITFLKIMMSTWTTVLRLTTPTETIDTSPIKIQRGIFQGDALSPLWFCLALNPLSNILNTTSLGIPLKSTETIPNNEQTDTQTSMLNHLLYMDDIKLYAKTESQLNELANLTEQFTNDIKMEFGIDKCKINSVRAGQTYKHQYTLDTGEQIEPLDEQDTYKYLGYTQSRQIHYKDTKQKLKQKFQHRLNTILKTQLDSRNTIKAINTFAIPVLTFSFGIINWTKTDLKTLQRKINTTMTKFRKHHPRSCQQRLTLPRKEGGRGLIDVSNLHNRQITSLRQYFFAKSTSSILHKLIAQNDQHFTPLNLKDKNEQKNEKVTDDKTKILEWTQKSLHGRHRQDICQINVDKEASNAWLKRGELFPETEGFMLAIQDQVIETKNYRKFIIKNLTTDTCRKCNSSPETIQHITGACKSIAQTDYKHRHDQVANIIHQKLAHQFKLIDSVVPYYKYNPETVLENANTKLYFDRAILTDRTIHFNRPDITVVNKTNKTAYLIDIAVPNTHNLQTTIAEKLSKYIGLKDEIARLWHLQKVTIVPIVLSTTGVIPKQLYQSLNSLNLPSSTYQLLQKAVILNTCRLVRKFLQCESDNPHQNIHTNTPPSIIQPTASTLIPIDEHLA

SEQ ID NO: 16828 - protein, 1431 aa, Mamestra configurata
MEMNYRRYNLRSLSGERWGASGADAGCHSLRTIGGEALSRRTLTENSVTAGRCELNRRVHNVEATADSTGDDTSSLFSSIPSTRPSYMTRRTTRSSTTSTLDSVVQDVQLDTDLAPTTSIKSTRRRWTPEMNKFILRTYLQLTALDTDRRTYLEPLHLKFIEKYPNMQISRQRVGDQRRAIIRSKLLPQKTIDEIHNEVKEELNQLQNNHQYPVMFINQTQQLLTSTQTNQIHPTTSETPITQQRTNTRLRWTNEQNEAIMRSYYRVTDLGRNETAYRKPLYDNFILSFPSLAHLSEQRIADQRRAIINNKYIETDKLNSLRLEIAAELDKNYINLSNYTSETTIGNSNDTDTQLTDNNDLYNVEPTPMLQTHNTETNITEELLSNLQTCLERVPLIDDTFEQALQFYVETSPVNRIYIPKQKPSKKLARIINYLNKIILPEKVNKDTDFDTIQTVIYSAAWTAAKVNGAKISLQARVINQHQKKEYIPNWQRRLEQKLNNLRSKIGRMTQFINGNRSKKVMKHVNSIIEQYKIHTIHEEPNTQATHTLDTLKQKLSVVTGRLQRYKACTQRKQQNTLFSHNEKLFYRNISQATTNVHENHINDRDNVTPEPNLLKHFWASIWEQPIEHNDQADWIQTELSHNNANIQAMTFEYITPQIFHKVLSRLHNWKAPGSDHIHSYWYKKFTAIHGYLHNYINIFIQEPKKIPPYITSGTTFMIPKDRSDLSNPAKYRPITCLQTLYKIITSCISELIYQHIDANNILAEQQKGCRKFSQGCKEQLIIDSVILKKIQKTKSDLFTMYIDYKKAYDSVPHSWLVKVLEIYKIHPTLITFLKVMMSTWTTVLRLTTPTETVDTSPIKIQRGIFQGDALSPLWFCLALNPLSNILNATSLGIPLKSTDTIADSEQNDSQTSSLNHLLYMDDIKLYGKSESQLNELANLTENFTNDIKMEFGIDKCKINSVRAGQNYKHQYTLETGEQIEPLDEQDTYKYLGYTQSRQIHSKDTKQKLKQKFQHRLNTILKTQLYSRNTIKAINTFAIPVLTYSFGVINWTKTDLKSLQRKINTTMTKFRKHHPRSCQQRLTLPRKEGGRGLIDVSNLHNRQITSLRQYFFTKSASSILHKLIAQHDQHLTPLNLKDKNQQNNEKVTDDKTKILEWTQKSLHGRHRQNLCQTNVDKEASNAWLNRGELFPETEGFMLAIQDQVIETRNYRKFIIKNLTTDICRKCNSSPETIQHITGACKSIAQTDYKHRHDQVANIIHQKLAHQFKLIDSVVPYYKYNPETVLENASTKLYFDRAILTDRTIHFNRPDITVINKINKTGYLIDIAVPNTHNLQTTIAEKLSKYIELKDEITRLWHLQKVTIVPIVLSTTGVIPKQLQQSLNSLNLPSSTYQLLQKAVILNTCRLVRKFLQCEPDSPHQNIYTNTPSSII

SEQ ID NO: 16829 - protein, 1442 aa, Mamestra brassicae
MEMINRRKYNLRSLPGDRRGASGADAGCHSMQTIGGEALSRRTLTENSVTAGRCELDRRVHNVEATADSTGDDTISLFSSIPSTRPSYMTRRTTRSSTTSTLDSVVQDVHLDTDFTPTTSAKSTRRRWTPEMNKFILRTYLQLTALDTDRRTYVEPLHLKFIEKYPNMHVSRQRVGDQRRAIIRSKLLPQKTIDEIHKEVKEELNQLQNNHQYPQLLTSTQTTQIYPTTSKTPITQQRINTRMKWTNEQNEAIMRSYYRVTDLGRNETAYRKPLYDDFINTFPSLAHLSEQRIADQRRAIINNKYIETGKLNALRLEIAEELGQNNINLSNHTSETIENSYNNNNTDSLLTDNVDLYTTEEPPPNVRTHNTETNFTEEPLSNSQTSLERVPLIDDTFQQAFQFYVATSPINRTYIPKQKPSKNLSKIINYLNKIIFPETVNKDTDFHTIQTVIYSAAWTAAKVNGAKISLQAREINHGQKKEYIPNWQRRLERKLNDLRSKIGRMTQYINGNRSKKVIKHVKSIIEQYKTHTIHEEPNTQATHILDTLKQKLSVVTGRLQRYKACTQRKQQNTLFTHNEKLFYRNISQTTTNFQENHTNDRANGTPETNTFKNFWASIWEQPIEHNAQADWIQTELTHNHTNVQAMTFEYIPPQIFHKVLSRLHNWKAPGSDHIHSYWYKKFTAIHGYLHNYINIFIQEPETIPSYITSGTTFMIPKDHNDLSNPAKYRPITCLQTLYKIITSCISELIYKHIDTNNILAEQQKGCRKFSQGCKEQLIIDSVILRKNQKTKSDLFTMYIDYKKAYDSVPHSWLVKVLEIYKIHPTLITFLKIMMSTWTTVLRLTTPTETIDTSPIKIQRGIFQGDALSPLWFCLALNPLSNILNTTSLGIPLKSTETIPNNEQTDTQTSMLNHLLYMDDIKLYAKTESQLNELANLTEQFTNDIKMEFGIDKCKINSVRAGQTYKHQYTLDTGEQIEPLDEQDTYKYLGYTQSRQIHYKDTKQKLKQKFQHRLNTILKTQLDSRNTIKAINTFAIPVLTYSFGIINWTKTDLKTLQRKINTTMTKFRKHHPRSCQQRLTLPRKEGGRGLIDVSNLHNRQITSLRQYFFAKSTSSILHKLIAQNDQHFTPLNLKDKNEQKNEKVTDDKTKILEWTQKSLHGRHRQDICQINVDKEASNAWLNRGELFPETEGFMLAIQDQVIETKNYRKFIIKNLTTDTCRKCNSSPETIQHITGACKSIAQTDYKHRHDQVANIIHQKLAHQFKLIDSVVPYYKYNPETVLENANTKLYFDRAILTDRTIHFNRPDITVVNKTNKTAYLIDIAVPNTHNLQTTIAEKLSKYIGLKDEIARLWHLQKVTIVPIVLSTTGVIPKQLYQSLNSLNLPSSTYQLLQKAVILNTCRLVRKFLQCESDNPHQNIHTNTPPSIIQPTASTLIPIDEHLA

SEQ ID NO: 16830 - protein, 1442 aa, Mamestra brassicae
MEMINRRKYNLRSLPGDRRGASGADAGCHSMQTIGGEALSRRTLTENSVTAGRCELDRRVHNVEATADSTGDDTISLFSSIPSTRPSYMTRRTTRSSTTSTLDSVVQDVHLDTDFTPTTSAKSTRRRWTPEMNKFILRTYLQLTALDTDRRTYVEPLHLKFIEKYPNMHVSRQRVGDQRRAIIHSKLLPQKTIDEIHKEVKEELNQLQNNHQYPQLLTSTQTTQIYPTTSKTPITQQRINTRMKWTNEQNEAIMRSYYRVTDLGRNETAYRKPLYDDFINTFPSLAHLSEQRIADQRRAIINNKYIETGKLNALRLEIAEELGQNNINLSNHTSETIENSYNNNNTDSLLTDNVDLYTTEEPPPNVRTHNTETNFTEEPLSNSQTSLERVPLIDDTFQQAFQFYVATSPINRTYIPKQKPSKNLSKIINYLNKIIFPETVNKDTDFHTIQTVIYSAAWTAAKVNGAKISLQAREINHGQKKEYIPNWQRRLERKLNDLRSKIGRMTQYINGNRSKKVIKHVKSIIEQYKTHTIHEEPNTQATHILDTLKQKLSVVAGRLQRYKACTQRKQQNTLFTHNEKLFYRNISQTTTNFQENHTNDRANGTPETNTFKNFWASIWEQPIEHNAQADWIQTELTHNHTNVQAMTFEYIPPQIFHKVLSRLHNWKAPGSDHIHSYWYKKFTAIHGYLHNYINIFIQEPETIPSYITSGTTFMIPKDHNDLSNPAKYRPITCLQTLYKIITSCISELIYKHIDTNNILAEQQKGCRKFSQGCKEQLIIDSVILRKNQKTKSDLFTMYIDYKKAYDSVPHSWLVKVLEIYKIHPTLITFLKIMMSTWTTVLRLTTPTETIDTSPIKIQRGIFQGDALSPLWFCLALNPLSNILNTTSLGIPLKSTETIPNNEQTDTQTSMLNHLLYMDDIKLYAKTESQLNELANLTEQFTNDIKMEFGIDKCKINSVRAGQTYKHQYTLDTGEQIEPLDEQDTYKYLGYTQSRQIHYKDTKQKLKQKFQHRLNTILKTQLDSRNTIKAINTFAIPVLTYSFGIINWTKTDLKTLQRKINTTMTKFRKHHPRSCQQRLTLPRKEGGRGLIDVSNLHNRQITSLRQYFFAKSTSSILHKLIAQNDQHFTPLNLKDKNEQKNEKVTDDKTKILEWTQKSLHGRHRQDICQINVDKEASNAWLNRGELFPETEGFMLAIQDQVIETKNYRKFIIKNLTTDTCRKCNSSPETIQHITGACKSIAQTDYKHRHDQVANIIHQKLAHQFKLIDSVVPYYKYNPETVLENANTKLYFDRAILTDRTIHFNRPDITVVNKTNKTAYLIDIAVPNTHNLQTTIAEKLSKYIGLKDEIARLWHLQKVTIVPIVLSTTGVIPKQLYQSLNSLNLPSSTYQLLQKAVILNTCRLVRKFLQCESDNPHQNIHTNTPPSIIQPTASTLIPIDEHLA

SEQ ID NO: 16831 - protein, 1252 aa, Calephelis perditalis
MIGDQRRAIIRNKLLPQQEIDQIYDEVSKELNNLRNRSQNQDLHREVTAEVIESSCIMTQNKDLNLEVNQRPQKTKTQTRLKWSNEQNEFLIGLYFQITQLETNKTAYRKVLHKAFIQAFPSLDYLSEQRIADQRRAVIKNKYISDDRIEAIKQQIFEELSLNSSAHLINLPTNIQDLSSDVIHNQCVSSITSNPTEEASSFELQVDSNIPITERDILTDQTFQQAFDYYKGTDPTSRAYIPKQKTSIKLAQVVHYLNYAILPEIVNKDTDFDTLQTILYCAAWTAAKVNGAKLTLDVTERSPVNRKDYQPRWERRLEQRITVLRKNIGKLTQFINGNRNKNLGHHVNFLLQQYRTHSVHEEPNTQYTHILDTLKQKLSVTSGRLRRYKACALRKLQNNQFVNNEKQFYRHMKQTATNTQNIGNSENEFPPADTLFRFWASIWEQPVQHNINADWIHKETVTLNSRVQEMVFDHINVHRFKEIINKLHNWKAPGSDNIHSYWYKKFTSVHCCLYNHIDNFIQNPHSIPSYVTAGITYMIPKDTDRSNPAKYRPITCLQTLYKIITSCISDLIYTHINDNKILAEQQKGCRKFSQGCKEQLIIDSVILKQVHKMKSNLYTMYIDYKKAYDSVPHSWLVKTLEIYKIHPQIINFLKIIMSNWTTKLKVTSSNKTIETDPIRIQRGIFQGDSLSPLWFCLALNPLSNVLNNSELGYQLKCKDMHRQINTVDKINHLLYMDDIKLYAETENHLIQLANLTEKFSADIRMEFGIDKCKINSMKAGKKFKHHYILDTGEQVESLEEQETYKYLGYHQALQISYKETKQKLKQQFQHRLNTILKTQLNSRNTVKAINTFAIPVLTYSFGVINWSKTDLKNLQRKVNTTLTKFRKHHPRSCLQRLTLPRKEGGRGIIDIFNLHNKQITTLRNYFFSKLQCSTLHSAVAQSDYKFTPLNLRNNTVQDNEQLTDDKTKLAEWSGKSLHGRHYHDLRHPTVDKEASNAWLSLGDLFPETEGFIMAIQDQIVETKNYQRYITKTRASSSDMCRRCNSSPETIQHITGACKTITQTDYKHRHDQVANIIHQKLAYQYNLTTTQQPYYKYKPEAVLENTATRLYFDRAILTDRTIHFNRPDITLINKTNKTGYLIDIAVPNTHNLQSTISEKLTKYSELKDEITRLWHLQKVTIVPIVLSTTGVIPKQLHQSIRTLNLPPKIFQKLQKAAILNTCRIVRKFLQTEAESSATITITPTQTEAHYTTN

SEQ ID NO: 16832 - protein, 1361 aa, Laspeyria flexula
MRTIGDAELNRRRTPIDKTATADYLGDDSRSLFSSIPSTRPSYMTRRTSTLSTSTSKSVVQDVNLDSQFAPTPDTNSSLMRRRWTPEMNEFIMRTYLHLTALNTDTKNYLEPLHIKFLEKFPNMQVSRQRIGDQRRAIIRNKLLPQDTIDQIHNEVKSELSQLQLSSSQHTQNNTEPCLTNYNLMQTQHNTQKTHNTTQTRMRWTTEQNETIIRSYFRITNLGTNETAYRPQLHAEFINRFPTLSHLSEQRIADQRRAIINNNYITNDRLKAIKMEVREELGINNNNISNPTTNDNTILNTDEFNNEYIENFFMDINDTSQELEQNTNTNPERLPQIDETFQQALQFYKDSEPTNRAYIPKQKPSRKLANIINYLNTIILPEHTDMNTDFNTLQTVVYCAAWTAAKVNGAKLTLQSRITLQQTRKEYKPNWQRRLENKLEDLRTKIGRLTQFNNGNRSRNVIKHTNKIMEQYKSHTVHEEPNTQIIHTLDTLKQKLAVTTGRLQRYKACTLRKQQNTQFTHNEKLFYRNIKQTTTNTTRSSTNDDVSNIPTAETLQNFWAGIWTDPVEHNDNAEWIHTHISHNNSRINRMEFEYIPIDTFQTVLRKLHNWKSPGSDQIHSYWYKKFTAVHSYLHNYINTFIHDPTKIPTYLTLGRTYMISKDCNDLSNPAKYRPITCLQTLYKIITACISSLIYEHINTNNILAEQQKGCRKFSQGCKEQLVIDSVILKQVQRERSDLFSMYIDYKKAYDSVPHSWLVKVLEIYKIHPSITHFLETIMTRWSTILTLTTPTLTIETNTIKIQRGIFQGDTLSPLWFCLALNPLSEILNSTALGYSLKNTESPNNKLNHLLYMDDIKLYAETESQLNELATLTEQFTNDIKMEFGIDKCKINSVKAGQNYRHEYTLDSGTHIKSLEEQDAYKYLGYNQSLQIHHKEIKLQLTQQFQHRLNTILKTQLNSRNTIKAINTFVIPLLTYSFGIINWTKTELKKLQRKINTTMTKSRKNHPRSCLQRLTLPRIEGGRGLIDILNLHNKQITTLRQYFYAKTESSTLHKSIVQSDNKLTPLNLKDRTRQNNETHIDDITKIAEWAQKSLHGRHRQDLCQLNVDKEASNAWLNRGELFPETEGFMIAIQDQVIETKNYRKFIIKNLATDSCRKCNSSAETIQHITGACKSIAQTDYKHRHDQVAKVIHQKLAQQYKLIDTSTPYYNYNPETVLENNTTKLYFDRAILTDRTIHYNRPDITLVNKINKTGFLIDIAVPNTHNLQTTIAEKLTKYIELKDEISRLWHLEKVMIVPIVMSTTGVIPKQLHQSLKTLNIQPKTYYLLQKAVILNTCRIVRKFLQCTPDNTVDTSTATTTQPS

SEQ ID NO: 16833 - protein, 1390 aa, Laspeyria flexula
MEMNKKVYSLRPLPGGRRGTPGANAGCLSMRTIGDAELNRRRTPIDKTATADYLGDDSRSLFSSIPSTRPSYMTRRTSTLSTSTSKSVVQDVNLDSQFAPTPDTNSSLMRRRWTPEMNEFIMRTYLHLTALNTDTKNYLEPLHIKFLEKFPNMQVSRQRIGDQRRAIIRNKLLPQDTIDQIHNEVKSELSQLQLSSSQHTQNNTEPCLTNYNLMQTQHNTQKTHNTTQTRMRWTTEQNETIIRSYFRITNLGTNETAYRPQLHAEFINRFPTLSHLSEQRIADQRRAIINNNYITNDRLKAIKMEVREELGINNNNISNPTTNDNTILNTDEFNNEYIKNFFMDINDTSQELEQNTNTNPERLPQIDETFQQALQFYKDSEPTNRAYIPKQKPSRKLANIINYLNTIILPEHTDMNTDFNTLQTVVYCAAWTAAKVNGAKLTLQSRITLQQTRKEYKPNWQRRLENKLEDLRTKIGRLTQFNNGNRSRNVIKHTNKIMEQYKSHTVHEEPNTQIIHTLDTLKQKLAVTTGRLQRYKACTLRKQQNTQFTHNEKLFYRNIKQTTTNTTRSSTNDDVSNIPTAETLQNFWAGIWTDPVEHNDNAEWIHTHISHNNSRINRMEFEYIPIDTFQTVLRKLHNWKSPGSDQIHSYWYKKFTAVHSYLHNYINTFIHDPTKIPTYLTLGRTYMISKDCNDLSNPAKYRPITCLQTLYKIITACISSLIYEHINTNNILAEQQKGCRKFSQGCKEQLVIDSVILKQVQRERSDLFSMYIDYKKAYDSVPHSWLVKVLEIYKIHPSITHFLETIMTRWSTILTLTTPTLTIETNTIKIQRGIFQGDTLSPLWFCLALNPLSEILNSTALGYSLKNTESPNNKLNHLLYMDDIKLYAETESQLNELATLTEQFTNDIKMEFGIDKCKINSVKAGQNYRHEYTLDSGTHIKSLEEQDAYKYLGYNQSLQIHHKEIKLQLTQQFQHRLNTILKTQLNSRNTIKAINTFVIPLLTYSFGIINWTKTELKKLQRKINTTMTKSRKNHPRSCLQRLTLPRIEGGRGLIDILNLHNKQITTLRQYFYAKTESSTLHKSIVQSDNKLTPLNLKDRTRQNNETHIDDITKIAEWAQKSLHGRHRQDLCQLNVDKEASNAWLNRGELFPETEGFMIAIQDQVIETKNYRKFIIKNLATDSCRKCNSSAETIQHITGACKSIAQTDYKHRHDQVAKVIHQKLAQQYKLIDTSTPYYNYNPETVLENNTTKLYFDRAILTDRTIHYNRPDITLVNKINKTGFLIDIAVPNTHNLQTTIAEKLTKYIELKDEISRLWHLEKVMIVPIVMSTTGVIPKQLHQSLKTLNIQPKTYYLLQKAVILNTCRIVRKFLQCTPDNTVDTSTATTTQPS

SEQ ID NO: 16834 - protein, 1394 aa, Laspeyria flexula
MEMSKKVYNLRPLPGGRRGTPGADAGCLSMRTIGDAELNRRRAPIDKSVTADYLGDDSSSLFSSIPSTRPSYMTRRTPTLSTSTSNSVVQDVNLDSQFAPTSDNNSSLMRRRWTPEMNKFIMRTYLQLTALNTDTKNYLEPLHLKFIEKFPDMQVSRQRIGDQRRAIIRNKLLPQDTIDQIHNEIKTELSQLPLSSSLSRSQQTQNNTEPCLTTLNLMQTQYNTQRTQNTTQTRMRWTTEQNETIIRSYYRITNLGTNETAYRPQLHADFINRFPTLSHLSEQRIADQRRAIINNNYISKDRLNTIKLEVKEELGITNNNLTNIITDASNDPNTNEHNNEIFEPLLPDMNDIRQELEQNQSANSERLTQIDETFQQSLQYYKDSEPTNRAYIPKQKPSKKLANIVNYLNTIILPENTDVNTDFNTLQTVVYCAAWTAAKVNGAKLKLQNRESHQQQRKEYKPNWQRRLEKKLEDIRTKIGRLTQFSNGNRSRNVIRHANKIMEQYKSHTVHEEPNTQVIHTLDTLKQKLAVTTGRLQRYKACTLRKQQNIQFTHNEKLFYRNIKSTTTNTPRSSTNNDVHDTPTADTLQNFWAGIWTDPIEHNDDAEWIHTHISHNNSRINRMEFEHIPIDTFQTVLRKLHNWKSPGSDQIHSYWYKKFTAVHSYLHNYINTFIHDPTKIPTYLTLGRTYMISKDCNDLSNPAKYRPITCLQTLYKIITACISSLIYEHINTNNILAEQQKGCRKFSQGCKEQLVIDSVILKQVQRERSDLFSMYIDYKKAYDSVPHSWLVKVLEIYKIHPSITHFLETIMTKWSTILTLTTPTLTIETNTIKIQRGIFQGDTLSPLWFCLALNPLSEILNSTALGYSLKNTESPNNKLNHLLYMDDIKLYAETESQLNELATLTEQFTNDIKMEFGIDKCKINSVKAGQNYRHEYTLDSGTHIKSLEEQDAYKYLGYNQSLQIHHKEIKLQLTQQFQHRLNTILKTQLNSRNTIKAINTFVIPLLTYSFGIINWTKTELKKLQRKINTTMTKSRKNHPRSCLQRLTLPRIEGGRGLIDILNLHNKQITTLRQYFYAKTESSTLHKSIVQSDNKLTPLNLKDRTRQNNETHIDDITKIAEWAQKSLHGRHRQDLCQLNVDKEASNAWLNRGELFPETEGFMIAIQDQVIETKNYRKFIIKNLATDSCRKCNSSAETIQHITGACKSIAQTDYKHRHDQVAKVIHQKLAQQYKLIDTSTPYYNYNPETVLENNTTKLYFDRAILTDRTIHYNRPDITLVNKINKTGFLIDIAVPNTHNLQTTIAEKLTKYIELKDEISRLWHLEKVMIVPIVMSTTGVIPKQLHQSLKTLNIQPKTYYLLQKAVILNTCRIVRKFLQCTPDNTVDTSTATTTQPS

SEQ ID NO: 16835 - protein, 1417 aa, Autographa gamma
MEMSKRVYDLRSLPGGRRGTSGADAGCHSMRTIGGERLSRRASPDKHTTAGRRVLSKRAHDVEATAELSGDDTISLFSSIPSTRPSYMTRSLSTSSILESVVQEVTLDHDLAPTTSSSNTRRRWTPEMNEFILRTYLQLTLIDTDTKTYLEPLHLKFTEKFPNMQVSRQRVGDQRRAIIRNKLLPQEIIDKIYNEVKEELQQIQANLHTPSHTLALGHLTQTHGSEMSNTQNTTQTRMRWTNEYNEAIMRAYYRITSLGTNETAYRKPLHQDFINRYPALAHLSEQRIADQRRAILNNKYISDDRLNMLKNEISTELGLNSNNTGNDPGNLINTLNLSNNENNSSFQANSTPTNLSFRPNSPIQPFNNILLDLSHTEHNTPTPQGTRNPEIDETFQQALLFFKNTSPTDRVFIPKQKSSKNLSRIVSYLNQVIIPENVNIDTDFFTLQTVIYSAAWTTAKVNGTKIALEPSENLRDIRKERKPNWQKRLERRINDLRSKIARVSQFINGNRTRKVTTYFNRIVNQYKTHTIHDEPNTQAIHTLDTLKQKLFVLSGRLKRYNACTLRKQQNFQFNHNEKLFYRNIKRTTSNIQENRLNDNGPNSPDPQALQNFWSRIWENPIGHNEQADWIQAEAANTNTQNMVFENVSPQIFHKVLSHLHNWKAPGSDYIHSYWYKKFTSVHCYLCNFINIFIKDPSLIPAYVTAGTTYLIPKDCNDLSNPAKYRPITCLQTLYKIVTSCLSELIYEHVDANDILAEQQKGCRKFSQGCKEQLIIDSVVLNKTHKSKSDLFSMYIDYKKAYDSVPHSWLVKVLEIYKIHPTIVAFLKSIMSNWTTVLRLSTATGTLETDTIKIQRGIFQGDALSPLWFCLALNPLSNILNATTLGVPLTYTEETQTEVVKLNHLLYMDDIKLYAKSESELNELAYLTEQFTNDIKMEFGIDKCKINSIRAGQNYQHHYTLSTLEHIEPLNEHDTYKYLGYSQASQIQYKETKCKLKQQFQHRLNVILRTNLYSRNTVKAINTFAVPVLTYSFGIIKWTKSDLKDLQRKVNTTLTKFRKNHPRSCLQRLTLPRKEGGRGLIDISNLHNRQITTLRQYFYAKTESSILHKLIMKNDNQLTPLNLKDPLEQKNEKQIDMKTKILEWSQKSLHGRHRHDLCQVNVDKEASNAWLSRGELFPETEGFMIAIQDQVIETRNYRKYIIKNLANDVCRKCNSAPETIQHITGACKSIAQTDYKHRHDQVANIIHQKLAYQYKLVDSIVPYYKYNPETVLENSTVKLYFDRAILTDRTVHFNRPDITLIDKINKTGYLIDIAVPNTHNLQTTIAEKMSKYTELRDEITRIWHLQKVTIVPIVLSTTGVIPCQLHQSLISLNLTPNTYHLLQKAAILNTCRIVRKFLQCEPDNSQPSNIRPQVSFSP

SEQ ID NO: 16836 - protein, 1417 aa, Autographa gamma
MEMSKRVYDLRSLPGGRRGTSGADAGCHSMRTIGGERLSRRASPDKHTTAGRRVLSKRAHDVEATAELSGDDTVSLFSSIPSTRPSYMTRSLSTSSILESVVQEVTLDHDLAPTKSSSNTRRRWTTEMNEFILRTYLQLTLIDTDTKTYLEPLHLKFTEKFPNMQVSRQRVGDQRRAIIRNKLLPQDIIDKIYNEVKEELQQIQANLHTPSHTLAHGHLTQIHGSEMSNTQNTTQTRMRWTNEYNEAIMRAYYRITSLGTNETAYRKPLHQDFINRYPALVHLSEQRIADQRRAILNNKYVSDDRLNILKNEISAELGLNINNTGNFSRNVINTLNLSNNESNSHIQANNTPTNLLLTPNSPTEPFNNMLLNLSHTDHSTPTSQVTRNPVIDETFQQAFLFYKNTSPTERVYIPKQKSSKNLSSTVSYVNQVIIPENVSIDTDFSTLQTVIYSAAWTTAKVNGTKIALEPLENLRDIRNERKPNWQNRLERKLNDLRCKIGRVNQFINGNRSRKVISHFNSISNQYKTHTIHEEPNTQAIHILDTLKQKLFVVSGRLKRYNACTLRKQQNYQFNNNEKLFYRNIKRTTSNIQENRSNDNEPNNPDPQALQNFWARIWENPIGHNEQADWIQAEAANTNTQNMVFENVSPQVFHKVISRLHNWKAPGSDYIHSYWYKKFTSVHCYLCNFINSFIQDPSLIPAYITAGTTYLIPKDSNDLSNPAKYRPITCLQTLYKIVTSCLSEIIYEHVDANNILAEQQKGCRKFSQGCKEQLIIDSVVLNKTHKNKSDLFSMYIDYKKAYDSVPHSWLVKVLEIYKIHPTIVAFLKSIMSNWTTVLRLSMANGTLETDTIKIQRGIFQGDALSPLWFCLALNPLSNILNATTLGIPLTYTEETLTEVVKLNHLLYMDDIKLYANSESELNELAYLTEQFTNDIKMEFGIDKCKINSIRAGQNYQHQYTLSTLEHIEPLNEHDTYKYLGYSQSSRIQYKETKYKLKQQFQHRLNVILRTNLYSRNTIKAINTFAIPVLTYSFGIIKWTKSDLKDLQRKINTTLTKFRKNHPRSCLQRLTLPRKEGGRGLIDISNLHNRQITTLRQYFFAKTESSILHKLIMKNDKQLTPLNLKDPLEQKNEKQIDIKTKILEWSQKSLHGRHRQDLCQVNVDKEASNAWLSRGELFPETEGFMIAIQDQVIETRNYRKFIIKNLANDVCRKCNSAPETIQHITGACKSIAQTDYKHRHDQVANIIHQKLAYQYKLVDSIVPYYKYNPETVIENSTVKLYFDRAILTDRTVHFNRPDITLIDKTNKTGYLIDIAVPNTHNLQTTIAEKMSKYTELRDEITRIWHLQKVTIVPIVLSTTGVIPCQLHQSLISLHLSPNTYHLLQKAAILNTCRIVRKFLQCEPDNSQSSNIRPQVSFSQ

SEQ ID NO: 16837 - protein, 1417 aa, Autographa gamma
MEMSKRVYDLRSLPGGRRGTSGADAGCHSMRTIGGERLSRRASPDKRTTAGRRVLSKRAHDVEATAELSGDDTVSLFSSIPSTRPSYMTRSLSTSSILESVVQEVTLDHDLAPTKSSSNMRRRWTPEMNEFILRTYLQLTLIDTDTKTYLEPLHLKFTEKFPNMQVSRQRVGDQRRAIIRNKLLPQDIIDKIYNEVKEELQQIQANLHTPSHTLAHGHLTQIHRSEMSNTQNTTQTRMRWTNEYNEAIMRAYYRITSLGTNETAYRKPLHQDFINRYPALAHLSEQRIADQRRAILNNKYVSDDRLNILKNEISAELGLNINNTGNFSSNVINTLNLSNNESNSHIQANNTPTNLLLTPNSPTEPFNNMLLNLSHTDHSTPTSQVTRNPVIDETFQQAFLFYKNTSPTERVYIPKQKSSKNLSRTVSYVNQVIIPENVSIDTDFSTLQTVIYSAAWTTAKVNGTKIALEPLENLRDIRNERKPNWQNRLERKLNDLRCKIGRVNQFINGNRSRKVISHFNSISNQYKTHTIHEEPNTQATHILDTLKQKLFVVSGRLKRYNACTLRKQQNYQFNNNEKLFYRNIKRTTSNIQENRSNDNEPNNPDPQALQNFWARIWENPIGHNEQADWIQAEAANTNTQNMVYENVSPQVFHKVISRLHNWKAPGSDYIHSYWYKKFTSVHCYICNFINSFIQDPSLIPAYITAGTTYLIPKDSNDLSNPAKYRPITCLQTLYKIVTSCLSEIIYEHVDANNILAEQQKGCRKFSQGCKEQLIIDSVVLNKTHKNKSDLFSMYIDYKKAYDSVPHSWLVKVLEIYKIHPTIVDFLKSIMSNWTTVLRLSTATGALETDTIKIQRGIFQGDALSPLWFCLALNPLSNILNATTLGIPLTYTEETLTEVVKLNHLLYMDDIKLYANSESELNELAYLTEQFTNDIKMEFGIDKCKINSIRAGQNYQHQYTLSTLEHIEPLNEHDTYKYLGYSQSSRIQYKETKYKLKQQFQHRLNVILRTNLYSRNTIKAINTFAIPVLTYSFGIIKWTKSDLKDLQRKINTTLTKFRKNHPRSCLQRLTLPRKEGGRGLIDISNLHNRQITTLRQYFFAKTESSILHKLIMKNDKQLTPLNLKDPLEQKNEKQIDIKTKILEWSQKSLHGRHRQDLCQVNVDKEASNAWLSRGELFPETEGFMIAIQDQVIETRNYRKFIIKNLANDVCRKCNSAPETIQHITGACKSIAQTDYKHRHDQVANIIHQKLAYQYKLVDSIVPYYKYNPETVIENSTVKLYFDRAILTDRTVHFNRPDITLIDKTNKTGYLIDIAVPNTHNLQTTIAEKMSKYTELRDEITRIWHLQKVTIVPIVLSTTGVIPCQLHQSLISLNLSPNTYHLLQKAAILNTCRIVRKFLQCEPDNSQSSNIRPQVNFSQ

SEQ ID NO: 16838 - protein, 1404 aa, Trichoplusia ni
MEMSKRVYDLRSLPGGRRGTSGADAGCHSMRTIGGEGLSRRASPDKNITAGRRVLSKRAHDVEVTADLIGDDTESLFSSVPSTRPSYITRSLSSSSVPDSVVQEVTSDHDLAPTTSVSSTRRRWTSEMNEFILRTYYYLTSLDTDRKTYLEPLHLKFIEQFPNMQVSKQRIGDQRRAIIRNKLLSQDVIDRIYNNVKEDLHETQININTLSSHTAEAHITQNPEGRSTPNTTQVRMRWTNEYNEAIMRAYYRVTALGTNETAYRKPMHQDFINRYPALEHLSEQRIADQRRAILNNKYISDTRLNMLKLEVSVELGLNNNDTNNCPNQVVNTQNCNNPNSGIVHAIMEDFPLVANCPQPGRSHTESNTQALQETRNLEIDQMFQEAFCFYKNTDPTERVFIPRQKPSKNLARITSYINRVILPDNVNADTDFLTLQALIYSAAWTTAKANGSKIALEQSENLRGITRENKPKWQKRMERKINNLRSKIGRVTQFINGNRSRKVTKHFSNIIKQYKTHTIHEEPNTQAIHVLDTLKQKLFVVTGRLKRYTACNLRKQQNLQFTNNEKHFYRNIRKTTSNTQQNIANSNERNKPDPETLQNFWSGIWENPARHNDQADWIKTEAANAIENTQAMVFENITPEIFNKVLIRLHNWKAPGSDYIHSYWYKKFTSIHGYLCNFINKFIQNPNLIPKYITVGTTYMLPKDSNDLANPAKYRPITCLQTLYKIVASCLAEVIYEHVEANSILAEQQKGCRRFSQGCKEQLIIDSVILNKIHKTKSDLYSMYIDYKKAYDSVPHSWLVKVLQLYKIHPKIIDFLESLMSQWTTVLKLTTENGSIETNPIKIQRGIFQGDTLSPLWFCLALNPLSNILNSTGVGTTLTHNEGTQTLKIYLNHLMYMDDIKLYAKSENELDELAKLTEQFSNDIQMEFGIDKCKINSVKAGQNYQHHYTLTTLEQIEPLEEHDTYKYLGYSQASRIEYKKTKSKLKQQFQHRLNAILRTNLYSRNTIKAINTFAIPVLTYSFGIINWTQSDLKDIQRKVNTTLTKFRKNHPRSCLQRLTLPRKEGGRGLIDVSNLHSRQITTLRQYFYAKAESSMLHKLIISNDKQLTPLNLKDPLQQKSEKLLDDKTKILEWSQKSLHGRHRHDLCQVNVDKEASNAWLSRGDLFPETEGFIIAIQDQVIETRNYRKYIIKNLANDRCRKCNSASETIQHITGACKSIAQTDYKHRHDQVANIIHQKLAYQYKFVDSIVPYYKYNPETVLENSNTKLYYDRAILTDRTIHFNRPDITLINKANKTGYLIDVAVPNTHNLQSTIADKLSKYTELREEISRIWHLQKVTIVPIVLSATGVIPCQLHQSFTTLNLNPNTYHLLQKAVILNTCRIVRKFLQCESDTPQHNTYTTAVV

SEQ ID NO: 16839 - protein, 1334 aa, Archon apollinus
MTRRLSTLSSATTFDGVVQDVNSDSELAPTSGVTRTRRRWTPEMNMFILRTYLQLTALDTDTNTYLEPLHLKFIEKFPDMQVSRQRVGDQRRAIIRNKLLPQNVTDEIYTEVQEELSHLQASLPSINETRHQSLEIPRSQRQARMRWTNEKNESIMRSYYRITQLESNRINYRQLIHAAFIKDFPSLAHISEQRIADQRRAIIHNKYITDNRLKEIKQQVAEELSTEPHNLNSITNEIDNTQDINADNNNDIQFLQSIELPLPNSQQSERDSLIDEMFQKTFQYFIGTDPTSRTYIPKQKPSKKLAKIVHYLNVVSLPETVNTETDFNTLQTAIYSAAWTAAKVNGAKITLECFERSHPPQKDCRPNWQRRLERKLKDLRSKIGRLTQFINGNRNRYLEKHVKNIVEQYKIHTLHEEPNTQLTHTLDTLKQKLAVISGRLKRYKSCTLRKLQNNQFKNNEKQFYRKTKQATANTQKNINSSNPDSKDLHTFWAGIWEQPVHHNTTADWIRSETTKYSTTQEMIYEHIPIDMFKKVLRNLHNWKAPGSDLIHSYWYKKFTTIHGFLHNFINEFIEDPNTIPSYMTLGTTYMIPKDRTDLTNPAKYRPITCLQTLYKILTSCVAELIYKHIDDNNILAEQQKGCRKFSQGCKEQLIIDSVILKQAQKNKSDLFTMYIDYKKAYDSVPHTWLLQVLEIYKIHPKIITLLKTTMTNWTTRLKLTTLTAETDPIKIRRGIFQGDALSPLWFCLALNPLSNILNRTTVGYHLQYNNTDRQTDIKEKINHLLYMDDIKLYADNENNLYQIAYLTEQFSNDIKMELGIDKCRINSIRAGHYYQHHYTLETGGQIEPLDEKETYKYLGYNQSRQIQHKDIKQKLKQQFRHRLNIILKTQLYARNTVKAINTFAIPLLTYSFGIINWSKSDLKALQRTINTTMTKFRKHHPRSCLQRLTLPRNEGGRGIIDIVNLHNKQISSLRQYFFNKSETSTLHKAIVQNDRKLTPLNMQDGTTQSNETLTDDKTKLAEWAGKSLHGRHLHDLRQPNVDKETSNAWLSRGDLFPETEGFMVAIQDQVIETRNYQKYITKTLLSDTCRKCNSCPETIQHITGACKAIAQTDYKHRHDQIANIIHQKLAHQQNLITDLHPYYKYKPESVLENFTTKLYFDRAILTDRTIHYNRPDITLINKTNKTGYLIDIAVPNTHNLQTTIAEKLSKYTELKDEITRLWHLQKVTIVPIVLSTTGVIPKQLHQSIETLNLPSNTYNLLQKAAILNTCRIVRKFLQTEQEFSITNSTAQIATETTRQPTTQSTIYTSAQPTIQLTTQPIIQPPFQPTPQSNT

SEQ ID NO: 16840 - protein, 1390 aa, Hesperia comma
MENRQSSKYNLRSLPGGRRGAPGAGAGCFSMRDTGDEALSRRAPVTQDATAGRCGLSRRARDVEVTAGVSTGEDTVSLFSSIPSTRPSYMTRSRSTQSCVSSLEGVVQDVNFDAEPTPTPGAPVKRKRWTPEMNEFILRTYLKLTALDTDTKNYLEPLYLKFIEKFPTMQVSHQRVGDQRRAIIRNKLLPQNTIDKIFNQVKEEITVTQPETLTPEIQHTTDTQNRTQTRTRFTWLNQHNEAIMKIYYRITNLETNRTMYRKTLHEEFIKLFPTLSHFSEQRIADQRRAIVKNKYISEAKIEEIKKEISEELLLNGGEAVQTNNTNTDNSYNYETDDVLNSIECNLESEPTEQRQIEREPHIDEAFYEALQFYRLTEATQRSYIPKQKSSKNFARIVSYINEVLIPENVTEDIDFNTLQLILYCAAWTAAKSNGTKLTLEPSTTKTSDRKDRRPNWQKRLERKLEDLRAKIGRVTQFMNGNRNTKITNQVKHITEQYKIHSIHEEPNIHLTHILDTLKQKLSVIAGRLKRYKACTLRKTQNNQFKNNEKQFYRNIRQAATNLQENNSNKVNNAPNPEDLHRCWATIWEQPVEHNSEAKWIKDEISVNESVTEPMQFEHISFETFKNVISNLHNWKAPGSDFIHSYWYKKFTSTHTYLHKFINEFILSPGTVPKYITAGTTYMIPKDNNDLANPEKYRPITCLQTMYKIITSCISQLLYKHIQDNDILAEQQKGCRKFSQGCKEQLIIDSVVLKQVQKTKSDLYTMYIDYKKAYDSVPHSWLVKILEIYKVHSNIITFLKTIMTNWTTRLKLTTPTDVIETSPISIQRGIFQGDALSPLWFCLALNPLSRLLNSTSIGYPLYHKTDGQTQKNTLNHLLYMDDIKLYAASENHLHQLTKLTEKFTDDIKMIFSIDKCKINSIKAGKMYQHHHTLNTGLQIQPLDEHEVYKYLGYNQSQQIQVLKTQLNSRNTIKAINSYTIPILTYSFGIIKWTKTDLKNLQRMINTTMTKYRKHHPRACLQRLTLPRKEGGRGLIDISNLHNRQISTLRKYFFNRMDTSELHKSIVINDMKATPLNLHDQTQQTNELLTDKKVKIAEWTKKSLHGRHRQDLCQPNVDKEASNAWLHRGELFPETEGFIMAIQDQVIETRNYQKHIIQKTTIDRCRKCNSSPETIQHITGACKSIAQTDYKYRHDQVANIIHQKLAQQYNFINTLQPYYKYAPETVLENATTKLYYDRAILTDRTIHYNRPDLTLINKTNKTGYLIDIAVPNTHNLQSTIVEKLTKYTELKDEIIRIWQLRTVTIVPIVISTTGVIPKQLHQSLKTLNLPPNTFNIIQKAVILNTCRLVRKFLQTDHQSTDTHVEPPDTTDITNSELSRPQNHTQESNISSS

SEQ ID NO: 16841 - protein, 766 aa, Endotricha flammealis
MTFEHVTPDIFAKVLQKLHNWKAPGSDYIHSYWYKKLTNTHVYILNFINDFIHNPNLMPLYITAGTTVMIPKDSNDPSNPAKYRPITCLQTLYKIVTSCIAELIYNHVDANNILAEQQKGCRKFCQGCKEQLIIDSVVLNKVKKAKADLHTMYIDYKKAYDSVPHSWLIQILQIYKVHPQIVTFLKTSMTNWTTRLKLMSPTSTIETTDIKIQRGIFQGDALSPLWFCLAINPLSNILNSTPHGYHTDRPTNGQVILNHLLYMDDIKLYAESENQLNQLTTLVEQFTKDIKMEFGLDKCRINSIKAGQYHQEHYMLETGEYIEPLGEEETYKYLGYRQARNIQDKDTKQKLTQQFRHRLNIILRSQLSSRNTIKAINTFAIPILTYSFGIINWTKSELKNLQRTINTSMTKHRKHHPRACMQRQTLPRKEGGRGLIDITNLHNSQITNLRQYFFGKTEYSTLHKSIVQSDHKLTPLNLHDNTLQKNESIIDKKTKHDEWARKSLHGRHHQDLCHQNVDKEASNAWLNRGELFPETEGFMIAIQDQVIETRNYQKFIMKNTTIDVCRKCNSSPETIQHITGACKSIAQTDYKHRHDQVANIIHQRLALQHNFITATQPYYKYEPDTVLENDSTKLHFDRAILTDRTVHYNRPDITIINKIDKTGFLIDIAIPNTHNLQSTIAEKLTKYIDLKDEIMRLWKLQKVTIIPIVLSTTGVIPKQLHQSLQTLNMPRHIFKLAQKAVILNTCRIVRKFLQVQPDSSTLPTHM

SEQ ID NO: 16842 - protein, 1318 aa, Endotricha flammealis
MTRSRTLSTVSSLDAVVQDVDLDCEPAPTSRESRTRKRWTPEMNKFIMRTYLILTGLDTDTKAYLEPLHLKFVEKFPDMLVSRQRVGDQRRAIVRRKLLPQTEIDRIYEEVKETLRTQYPTNIQVNPTAHSNPAISETEPCFSNTRQPCTHPNAISNTHLRSTQNNTRMKWTNEHNETIIRIYYRITQLETNKTAYRKRLHEEFINTFPSLNHLSEQRIADQRRVIINNKYISDSRLNAIKLEVSDLLGLDANNTEINSSIDYLRDLNNETVNNYDSQAQLLNNINLEEPIITTNPVEIEWQTQIVEIFHQAYDHYKNTSAINRAYIPKQKSSKKLAHIIEYIDKDVLPSYINKDTDFDHLQTAIYCAAWTAAKTNGAKITLNTADTNTTRPHRQEYKPNWQKRLERRLEELRKHIARLTHFINGNRSRRQTKQVQKIMQQYKIHSIHEEPNTQLTHTLDTLKQKLSVLSGRLQRYKTCTVRKQQNTQFINNEKLFYRNLKQASSSNGQNQNTENGPIYPAPEELHSFWAGIWEKPVEHNSDAEWIQTEANNNNIATQPMKFEYVTPRKLHNWKAPGSDYIHSYWYKKFTTTHVYILNFINDFIHDPNLMPLYITAGTTVMIPKDSNDSSNPAKYRPITCLQTLYKIMTSCIAELIYKHINDNNILAEQQKGCRKFCQGCKEQLIIDSVVLNKVKKAKADLHTMYIDYKKAYDSVPHPWLIQILQIYKVHPQIVTFLKTSMTNWTTRLKLTSPTGIIETSDIKIQRGIFQGDALSPLWFCLALNPLSNILNSTSHGYHTDGPTNGQVILNHLLYMDDIKLYAESEDQLEQLTILVEQFTKDVKMEFGLDKCRINSIKAGKYHQEHYMLETGEYIQPLGEEETYKYLGYRQARNIQQKDTKQKLTQQFRHRLNIILRSQLCSKNTIKSINTFAIPVLTYSFGIINWTKLELKNLQRTINTSMTKQRKHHPRACIQRQTLPRKEGGRGLIDITNLHNSQITNLRQYFFGKTEYSTLHKSIVQNDHKLTPLNLHDNTLQKNETIIDKKTKHDEWARKSLHGRHHQDLCHQNVDKEASNAWLNRGELFPETEGFMIAIQDQVIETRNYQKFIMKNTTADVCRKCNSSAETIQHITGACKSIAQTDYKHRHDQVANIIHQRLALQHNFITSTQPYYKYQPDTVLEDDSTKLYFDRAILTDRTVHYNRPDITIINKTDKSGFLIDIAIPNTHNLQSTIAEKLTKYIDLKDEIMRLWKLQKVTIVPIVLSTTGVIPKQLHQSLETLNIPQHIFKIAQKAVILNTCRLVRKFLQVQPDSSASPTHI

SEQ ID NO: 16843 - protein, 1413 aa, Endotricha flammealis
MEPSKRKYDLRSLPGGRRGTPGAGAGCLSIRITGDEALSRRAPVTQNTTADRRELNRRAHDDEATAEISGDDTNSLFSSIPSTRPSYMTRRTSTLSSFSTRESVVQDVTPDDELAPTSRESRTRKRWTPEMNKFIMRTYLILTGLDTDTKTYLEPLHLKFVENFPDMSVSRQRVGDQRRAIVRRKLLPQKEIDQIYEEVKETLRIQYPTNVQVDLTPHPNSSISDTQPYNPGTQHTRLNPNAISNIHLRPTQNNPRMKWTNEHNETIIRIYYRITQLETNKTAYRKRLHQEFIKAFPSLNHLSEQRIADQRRVIINNKYINDDRLNIIKQEVSALLGLDSNNTENNSSIQFLNDLNNETVNNYDSQAHLLNNINLEEPIITPNPIQIEWQSQIVETFHQAFDHYKNTSAINRTYIPKQKSSRKLAQIIEHIDRVVLPNYINRDTNFDQLQTAIYCAAWTAAKVNGTKINLNTTDTNTTRPHRQEYKPNWQKRLERRLEELRKHIARLTHFINGNRSRKQTEQVHKIIQQYKIHSTHEEPNTQLTHTLDTLKQKLSVLSGRLQRYKTCTDRKQQNTQFTNNEKLFYRNLKQASSNNVENDNTETDPTYPATEDLHSFWAGIWEKPVEHNTDAEWIQTEANNSNISTQPMTFEHVTPDIFAKVLQKLHNWKAPGSDYIHSYWYKKLTNTHVYILNFINDFIHNPNLMPLYITAGTTVMIPKDSNDPSNPAKYRPITCLQTLYKIVTSCIAELIYNHVDANNILAEQQKGCRKFCQGCKEQLIIDSVVLNKVKKAKADLHTMYIDYKKAYDSVPHSWLIQILQIYKVHPQIVTFLKTSMTNWTTRLKLMSPTSTIETTDIKIQRGIFQGDALSPLWFCLAINPLSNILNSTPHGYHTDRPTNGQVILNHLLYMDDIKLYAESENQLNQLTTLVEQFTKDIKMEFGLDKCRINSIKAGQYHQEHYMLETGEYIEPLGEEETYKYLGYRQARNIQDKDTKQKLTQQFRHRLNIILRSQLSSRNTIKAINTFAIPILTYSFGIINWTKSELKNLQRTINTSMTKHRKHHPRACMQRQTLPRKEGGRGLIDITNLHNSQITNLRQYFFGKTEYSTLHKSIVQSDHKLTPLNLHDNTLQKNESIIDKKTKHDEWARKSLHGRHHQDLCHQNVDKEASNAWLNRGELFPETEGFMIAIQDQVIETRNYQKFIMKNTTIDVCRKCNSSPETIQHITGACKSIAQTDYKHRHDQVANIIHQRLALQHNFITATQPYYKYEPDTVLENDSTKLYFDRAILTDRTVHYNRPDITIINKIDKTGFLIDIAIPNTHNLQSTIAEKLTKYIDLKDEIMRLWKLQKVTIIPIVLSTTGVIPKQLHQSLQTLNMPRHIFKLAQKAVILNTCRIVRKFLQVQPDSSTLPAHM

SEQ ID NO: 16844 - protein, 766 aa, Endotricha flammealis
MTFEHVTPDIFAKVLQKLHNWKAPGSDYIRSYWYKKLTNTHVYILNFINDFIHNPNLMPLYITAGTTVMIPKDSNDPSNPAKYRPITCLQTLYKIVTSCIAELIYNHVDANNILAEQQKGCRKFCQGCKEQLIIDSVVLNKVKKAKADLHTMYIDYKKAYDSVPHSWLIQILQIYKVHPQIVTFLKTSMTNWTTRLKLMSPTSTIETTDIKIQRGIFQGDALSPLWFCLAINPLSNILNSTPHGYHTDRPTNGQVILNHLLYMDDIKLYAESENQLNQLTTLVEQFTKDIKMEFGLDKCRINSIKAGQYHQEHYMLETGEYIEPLGEEETYKYLGYRQARNIQDKDTKQKLTQQFRHRLNIILRSQLSSRNTIKAINTFAIPILTYSFGIINWTKSELKNLQRTINTSMTKHRKHHPRACMQRQTLPRKEGGRGLIDITNLHNSQITNLRQYFFGKTEYSTLHKSTVQSDHKLTPLNLHDNTLQKNESIIDKKTKHDEWARKSLHGRHHQDLCHQNVDKEASNAWLNRGELFPETEGFMIAIQDQVIETRNYQKFIMKNTTIDVCRKCNSSAETIQHITGACKSIAQTDYKHRHDQVANIIHQRLALQHNFITATQPYYKYEPDTVLENDSTKLYFDRAILTDRTVHYNRPDITIINKIDKTGFLIDIAIPNTHNLQSTIAEKLTKYIDLKDEIMRLWKLQKVTIIPIVLSTTGVIPKQLHQSLQTLNMPRHIFKLAQKAVILNTCRIVRKFLQVQPDSSTLPTHM

SEQ ID NO: 16845 - protein, 1413 aa, Endotricha flammealis
MEPSKRKYDLRSLPGGRRGTPGAGAGCLSIRITGDEALSRRAPVTQNTTADRRELNRRAHDDEATAEISGDDTNSLFSSIPSTRPSYMTRRTSTLSSFSTRESVVQDVIPDDELAPTSRESRTRKRWTPEMNKFIMRTYLILTGLDTDTKTYLEPLHLKFVENFPDMSVSRQRVGDQRRAIVRRKLLPQKEIDQIYEEVKETLRIQYPTNVQVDLTPHPNSSISDTQPYNPGTQHTRLNPNAISNIHLRPTQNNPRMKWTNEHNETIIRIYYRITQLETNKTAYRKRLHQEFINAFPSLNHLSEQRIADQRRVIINNKYINDDRLNIIKQEVSALLGLDSNNTENNSSIQFLNDLNNETVNNYDSQAHLLNNINLEEPIITPNPIQIEWQSQIVETFHQAFDHYKNTSAINRTYIPKQKSSRKLAQIIEHIDRVVLPNYINRDTNFDQLQTAIYCAAWTAAKVNGTKINLNTTDTNTTRPHRQEYKPNWQKRLERRLEELRKHIARLTHFINGNRSRKQTEQVHKIIQQYKIHSTHEEPNTQLTHTLDTLKQKLSVLSGRLQRYKTCTDRKQQNTQFTNNEKLFYRNLKQASSNNVENDNTETDPTYPATEDLHSFWAGIWEKPVEHNTDAEWIQTEANNSNISTQPMTFEHVTPDIFAKVLQKLHNWKAPGSDYIHSYWYKKLTNTHVYILNFINDFIHNPNLMPLYITAGTTVMIPKDSNDPSNPAKYRPITCLQTLYKIVTSCIAELIYNHVDANNILAEQQKGCRKFCQGCKEQLIIDSVVLNKVKKAKADLHTMYIDYKKAYDSVPHSWLIQILQIYKVHPQIVTFLKTSMTNWTTRLKLMSPTSTIETTDIKIQRGIFQGDALSPLWFCLAINPLSNILNSTPHGYHTDRPTNGQVILNHLLYMDDIKLYAESENQLNQLTTLVEQFTKDIKMEFGLDKCRINSIKAGQYHQEHYMLETGEYIEPLGEEETYKYLGYRQARNIQDKDTKQKLTQQFRHRLNIILRSQLSSRNTIKAINTFAIPILTYSFGIINWTKSELKNLQRTINTSMTKHRKHHPRACMQRQTLPRKEGGRGLIDITNLHNSQITNLRQYFFGKTEYSTLHKSIVQSDHKLTPLNLHDNTLQKNESIIDKKTKHDEWARKSLHGRHHQDLCHQNVDKEASNAWLNRGELFPETEGFMIAIQDQVIETRNYQKFIMKNTTIDVCRKCNSSAETIQHITGACKSIAQTDYKHRHDQVANIIHQRLALQHNFITATQPYYKYEPDTVLENDSTKLYFDRAILTDRTVHYNRPDITIINKIDKTGFLIDIAIPNTHNLQSTIAEKLTKYIDLKDEIMRLWKLQKVTIIPIVLSTTGVIPKQLHQSLQTLNMPRHIFKLAQKAVILNTCRIVRKFLQVQPDSSTLPTHM

SEQ ID NO: 16846 - protein, 1415 aa, Pheosia gnoma
MEQNNRKYHLRPLPGGRRGAPGAGAGCLSSRDTGDEELSRRALVTQHATAGRRELSRRARGVEATAESSSGDDTRSLFSSIPSTRPSYMTRRTSTLSSATTLDGVVQEVNLDSEPAPTSGISRSRRRWTNEMNQFILRTYLQLTILDNDTKTYLEPLHLKFIEKYPHMTVSRQRVGDQRRAIVRNRLLSQPIIDSIYDQVRQEITNLHTSHQTQHTHPHSQTQLATTAGMPNLTSQVLRITSKPHNTHTRMRWTNEHNEAIIRLYFRITHIETNRTAYRKLLHQHFIQQFPALAHLSEQRIADQRRAIINNKYITDHRLNEIKREVSDELLLNINQLNNNSNDTSNTYASNTANTDIQDLNNIQFSPSADLVNAQPETERNPQIDIAFQQTFQYYKDTSPIARIYIPKQKPSRKFSKIVDYLNKVTLPETVNCDTDFNTLQTVVYCAAWTAAKINGARISIEPIENTSNNKKEHKPNWQRRLEKRLDDLRAKIGRLTQFINGNRSRYLTKHVNDIITKYKIHSVHEDPNTQLTHTLDTLKQKLSVVSGRLHRYKACTLRKQQNSHFANNEKLFYRNLRQNTTNIQENRNTNNINITPDPEDLQKFWAGIWEDNTTHNTQAEWINTEITNNTSVQTMNFENIPIDTFKKVLKNLHNWKAPGSDNIHSYWYKKFTSIHNYLHKFINNFIQEPATLPTYITSGITYMIPKDRNDTTNPAKYRPITCLQTLYKIITSCISELIYQHTSNHNILAEQQKFSQLLIDSVILNQVQKAKSNLFTMYIDYQKAYDSVPHSWLRQVLDIYKIHPKISTFLKTAMTNWTTRLRLYTPTTTIETNSVKIQRGIFQGDALSPLWFCLALNPLSNMLNSTTIGYPLKYTDSDEQTPTQTNLLNHLLYMDDIKLYAKDENDLYQLANLTELFTTDINMKFGIDKCKINSIRDGQNYQHHYTLGTGEQIDPLDTHETYKYLGYHQSRQIHHKNIKCKLKQEFQHRLNSLLKTQLNSRNIVKSINTYAIPVLTYSFGIINWTKSDLKTLQRTIHTTLTKSRKHHPRSCLQRLTLPRKEGGRGLIDLCNLHNSQITNLRQYFFNKMEASTLHKSIVQNDRHRTPLNLQDKTVQKNEKLTDNNTKIAEWTAKSLHGRHRHDLSQPNVDSQASNAWLCRGELFPETEGFMLAIQDQVIETRNYRKYIIKNLTSDICRKCSSAPETIQHITGACKAIVQTDYKHRHDQVANIIHQQLAYQHKLVTSLQPYYKYSPETVLEDPTTKLYFDRAILTDRTIHYNRPDITLINKTNKTGYLIDIAVPNTHNLQTTIAEKLSKYTELKDEITRLWHLQKVTIVPIVLSTTGVIPKQLHQSINTLSLPPNIYFLLQKAAILNTCRTVRKFLQTEQDNIHTATQQTTSTHSHTSPDVLQIPI

SEQ ID NO: 16847 - protein, 789 aa, Pheosia gnoma
MNFENIPIDTFKKVLKNLHNWKAPGSDNIHSYWYKKFTSIHNYLHKFINNFIQEPATLPTYITSGITYMIPKDRNDTTNPAKYRPITCLQTLYKIITSCISELIYQHTSNHNILAEQQKGCKKFSQGCKEQLLIDSVILNQVQKAKSNLFTMYIDYQKAYDSVPHSWLRQVLDIYKIHPKISTFLKTAMTNWTTRLRLYTPTTTIETNSVKIQRGIFQGDALSPLWFCLALNPLSNMLNSTTIGYPLKYTDSDEQTPTQTNLLNHLLYMDDIKLYAKDENDLYQLANLTELFTTAINMKFGIDKCKINSIRDGQNYQHHYTLGTGEQIDPLDTHETYKYLGYHQSRQIHHKNIKCKLKQEFQHRLNSLLKTQLNSRNIVKSINTYAIPVLTYSFGIINWTKSDLKTLQRTIHTTLTKSRKHHPRSCLQRLTLPRKEGGRGLIDLCNLHNSQITNLRQYFFNKMEASTLHKSIVQNDRHRTPLNLQDKTVQKNEKLTDNNTKIAEWTAKSLHGRHRHDLSQPNVDSQASNAWLCHGELFPETEGFMLAIQDQVIETRNYRKYIIKNLTSDICRKCSSAPETIQHITGACKAIVQTDYKHRHDQVANIIHQQLAYQHKLVTSLQPYYKYSPETVLEDPTTKLYFDRAILTDRTIHYNRPDITLINKTNKTGYLIDIAVPNTHNLQTTIAEKLSKYTELKDEITRLWHLQKVTIVPIVLSTTGVIPKQLHQSINTLSLPPNIYFLLQKAAILNTCRTVRKFLQTEQDNIHTATQQTTSTHSHTSPDVLQIPI

SEQ ID NO: 16848 - protein, 837 aa, Boloria selene
MSTTNITDNSMINHSNDNLTPELLQDYWKRIWSHPIQHNTQAEWIKAETTNHSTKIQNMKFECISLEKLQEIIKKSHNWKSPGSDNIHSYWYKKFTTIHIHLHKYINIFIQDPNSMPSYLTSGKTYMISKDHNDLSNPSKYRPITCLQTFYKILTSIISEIMYEHVNSNNILTEQQKGCRKFSHGCKEQLIIDSIILKQVQKRKSNLFSMYIDYKKAYDSVPHSWLVKVLEIYKIHPIIINFLKAIMTKWTTTLIINTLTFVETEPIKIQRGLFQGDSLSPLWFCIAINPLSNLLNSTQLGYTLYETENSEQIHLQKYTLNHLLYMDDVKLYAENEGELNSLACLTEQFSNDIRMEFGIEKCRINSIKAGQNYQHNYTLESGEQIQALNEEDTYKYLGYNQSLQIHHKQTKQKLTQQFQHRLNMILKTQLNSKNTIKAINTFVIPLLTYSFGVINWTKTELKNLQRKINTSMTKSRKHHPRSCLQRLTLPRGEGGRGLIDITNLHNRQVTNLRQYFFDKTESSTLHKLIVQNDNKLTPLNLKDKVDQINQILVDDKYKIAEWARKSLHGRHHQDLCQLNVDKQASNAWLTGGQLFPETEGFIIAIQDQVIETRNYRKHIIKNLTVDTCRKCSSSPETIQHITGACKSIAQTDYKHRHDQVAKIIHQKLAHKYKLIDIFTPYYKYSPQTVLENTTSKLYFDRAILTDRTIYYNRPDITFINKITKTGYLIDIAVPNTHNLQNTIAEKLSKYTELKDEITRIWHLQKVSIVPIVISTTGVIPKQLHQSINSLNLHPKTYYLLQKAIILNTCRLVRKFLQTDNDNPYLIPQISNITTLSP

SEQ ID NO: 16849 - protein, 1404 aa, Spodoptera exigua
MEMSKRVYNLRSLPGGRRGASGADAGCHSMGTIGGEELSKRAPTDKIVTAGRCELSRRAHNVEATADSYGDDTISLFSSIPSTRPSYMTRSKDSLSTTSTLDSVVRDVNLDKELAPTSSVIYKRRRWTPEMNMFILRTYFQITLLEKDKTTYLEPLHLKFLEKFPDMQVSRQRIGDQRRAIISNKLLSQETIDNIRNEVEKELEQLQLVHINQQRENTSNQIQSTFIHSQTHLTNTHTHSIQNKTQTRMRWTNEQNEGIMRSYYRVTDLGRNETVYRKRMYEDFVSNFPSLAYLSEQRIADQRRAIVNNKYINEEKLNLIKTQVAEELLLHNLHNNRDVFTDTIDINNTTRQINNNEIPSTEHSTPNAQIPNNPDLSNQEIDLVRNSLIDDSFQQALEHFKTTSPINRAYIPKQKPSKNLAKIVNYINEKILPENIDQNTDFKTFQTIIYCAAWTAAKVNGAKMTHEPRGEVPASKTGYKPKWQRRLERKLKDLRIKIGRMTQFLNGNRSRKLLKHVNKIINIYKTHTIHEAPNTQPLQILDTLKQKLSVVKGRLERYKACTLRKHQNIQFSHNEKLFYRNMRQATTNNNQYNTSHNDENNTPDPETLYHFWANIWERPVCHNSQAEWIQPDLLNNTQSMAFEQVPIAVFHRVLSKLHNWKAPGSDHIHSYWYKKFTTIHCHLYNFINSFIQDPKLIPSYLTSGTTFMIPKDHCDLSNPAKYRPITCLQTLYKIITSCISELIYEYIDANNILAEQQKGCRRYSQGCKEQLIIDSVVLKTVQKSKSDIFTMYVDYKKAYDSVPHSWLIKVLDIYKIHPSLTTFLKAVMGTWTTVLRLTTPTETIDTSPIKIQRGIFQGDALSPLWFCLALNPLSKLLNTSAVGIPLNSTTDRQYHILNHLMYMDDIKLFATTENQLKELVDLTEKFTNDIKMEFGIDKCKINSIRAGQNYQHTHILSTGEQIESLDEHGTYKYLGYIQSTQIHHKHIKQTLTQNFQHRLNSILKTQLYARNTIKAINTFAIPVLTYSFGIINWTKTDLKNLQRKLNTTMTRFRKHHPRSCLQRLTLPRKEGGRGLIDILNLHNKQITALRTYFFAKSESSTLHKLIAQKDKHLTPLNLNDIRKQGTETVIDDRTKCLEWTQKSLHGRHRQDLCQPNVDKEASNAWLNRGELFPETEGFMLAIQDQVIETKNYRKHIIKNLPNDTCRKCNSSPETIQHITGACKSLAQTDYKHRHDQVANIIHQKLAHQYKLVKTVVPYYKYNPETVLENDTTKLYYDRAIFTDRTIHYNRPDITLINKRNKTGFLIDIAVPNTHNVQTTIAEKLSKYTELKDEITRLWRLQKVFIIPIVISSTGIIPKQLYQSLTSLNLPTNTYYLLQKAVILNTCRLVRKFLQCESENTVSLH

SEQ ID NO: 16850 - protein, 1422 aa, Spodoptera frugiperda
MEMDRRVYNLRSLPGGRRGASGADAGCHSMRTIGGVELSKRAPTKKHATAGRCELTRRAHSEDATADSTDDDTISLFSSIPSTRPSYMTRSKTSLSTTSTLDSVARDVDLDRDLAPTTSANNKRRRWTPEMNIFILRTYFQLTQLDTDKTTYLEPLHLKFLEKFPDMQVSRQRIGDQRRAIINNKLLAQETIDTIRKEVEKELDQLQFSHLNQQTENTINQSQPMFTHSQLHPTTHLDTHSIHNNTQTRMRWTNEQNEGIMRSYYRVTELGRNETVYRRRMYDDFVSHFPSLAHLSEQRIADQRRAIVNNKYISEEKLNLLKAQVAEELSLLNHNSHNTRNTFTDDNISIYNPITQVTNNTDIHSMEEPTPDTQTSNNPDLSTILDIISSSQINLERNSLIDSTFQQAFEHFKTTSPTNRSYIPKQKPSKNLAIIINYINKNILTENVDKDTDFNTFQTIIYCAAWTAAKVNGARISLEPRERARAPKTEYKPKWQRRLEQKLKDLRTKIGRLTQFLNGNRSRKLRKYVNKIMRIYKTHTIHEQPNTQPLHTLDTLKQKLSVVKGRLERYEACTLRKQQNIQFSHNEKLFYRNIRQATTNNNPHNNTRNNENNAPDPETLHHFWANIWEKPICHNPQAEWIQSDLSNNTEPMAFEQVPIAVFHKVLSKLHNWKAPGSDYIHSYWYKKFTSIHSHLYNFINAFIQDPKTIPSYLMSGTTFMIPKDHSDMSNPAKYRPITCLQTLYKIITSCISELIYEHIDANNILAEQQKGCRKSSQGCKEQLIIDSVVLRNVQKSKSDLFTMYIDYKKAYDSVPHSWLVKILDIYKIHTSITAFLKTVMTSWTTVLRLTTPTETIDTRPIKIQRGIFQGDALSPLWFCLALNPLSKLLNTTALGIRLHSPTDGTDHILNHLMYMDDIKLFAETENQLKELADLTEKFTNDIKMEFGIDKCKINSVRAGQNYQHTHILSTGELIEPLDEQGSYKYLGYVQSTQIHHKLIKQKLKQQFQHRVNAVLKTQLHARNTIKAINTFAIPVLTYSFGIINWTKTDLKNLQRKLNTTMTKFRKHHPRSCLQRLTLPRKEGGRGLIDILNLHNKQITALRTYFFAKAESSTLHKQIAQKDKHLTPLNLNDRTKQKNETVTDDRTKCLEWTQKSLHGRHRQDLCQPNVDKEASNAWLNRGELFPETEGFMLAIQDQVIETRNYRKHIIKNLPNDTCRKCNSSPETIQHITGACKSIAQTDYKHRHDQVANIIHQKLAQQFKLVDSVVPYYKYNPNTVLENNTTKLYYDRAIFTDRTIHYNRPDITLINKINKTGFLIDIAVPNTHNLQSTIAEKLSKYTELKDEITRLWRLQKVIIVPIVISSTGVIPKQLHQSLTSLNLPPSTYCLLQKAVILNTCRLVRKFLQCDSDNIVQTPNNPQPH

SEQ ID NO: 16851 - protein, 1422 aa, Spodoptera frugiperda
MEMNRRVYDLRSLPGGRRGASGADAGCHSMRTIGGVELSKRAPTKKHATAGRCELTRRAHSEDATADSTDDDTISLFSSIPSTRPSYMTRSKTSLSTTSTLDSVARDVDLDRDLAPTTSAHNKRRRWTPEMNIFILRTYFQLTQLDTDKTTYLEPLHLKFLEKFPDMQVSRQRIGDQRRAIINNKLLSQETIDTIRKEVEKELDQLQLSHLNQRTENTINQSQPMFTHSQLHPTTHLDTHSIHNKTQTRMRWTNEQNEGIMRSYYRVTELGRNETVYRRRMYDDFVSHFPSLAHLSEQRIADQRRAIVNNKYISEEKLNLLKAQVAEELSLLNHNSHNTRNTFTDDNISIYNPITQVTNNTDIHSMEEPTPDTQTSNNPDLSTILDIISSSQINLERNSLIDSTFQQAFEHFKTTSPTNRSYIPKQKPSKNLAIIINYINKNILTENVDKDTDFNTFQTIIYCAAWTAAKVNGARISLEPRERARAPKTEYKPKWQRRLEQKLKDLRTKIGRLTQFLNGNRSRKLRKYVNKIMRIYKTHTIHEQPNTQPLHTLDTLKQKLSVVKGRLERYKACTLRKQQNIQFSHNEKLFYRNIRQATTNNNPHNNTRNNENNAPDPETLHHFWANIWEKPICHNPQAEWIQSDLSNNTEPMAFEQVPIAVFHKVLSKLHNWKAPGSDYIHSYWYKKFTAIHSHLYNFINAFIQDPKTIPSYLMSGTTFMIPKDHSDMSNPAKYRPITCLQTLYKIITSCISELIYEHIDANNILAEQQKGCRKSSQGCKEQLIIDSVVLRNVQKSKSDLFTMYIDYKKAYDSVPHSWLVKILDIYKIHTSITAFLKTVMTSWTTVLRLTTPTETIDTRPIKIQRGIFQGDALSPLWFCLALNPLSKLLNTTALGIPLHSPTDGTDHILNHLMYMDDIKLFAETENQLKELADLTEKFTNDIKMEFGIDKCKINSVRAGQNYQHTHILSTGELIEPLDEQGSYKYLGYVQSTQIHHKLIKQKLKQQFQHRVNAVLKTQLHARNTIKAINTFAIPVLTYSFGIINWTKTDLKNLQRKLNTTMTKFRKHHPRSCLQRLTLPRKEGGRGLIDILNLHNKQITAMRTYFFAKAESSTLHKQIAQKDKHLTPLNLNDRTKQKNETVTDDRTKCLEWTQKSLHGRHRQDLCQPNVDKEASNAWLNRGELFPETEGFMLAIQDQVIETRNYRKHIIKNLPNDACRKCNSSPETIQHITGACKSIAQTDYKHRHDQVANIIHQKLAQQFKLVDSVVPYYKYNPNTVLENNTTKLYYDRAIFTDRTIHYNRPDITLINKINKTGFLIDIAVPNTHNLQSTIAEKLSKYTELKDEITRLWRLQKVIIVPIVISSTGVIPKQLHQSLTSLNLPPSTYCLLQKAVILNTCRLVRKFLQCDSDNIVQTPNNPQPH

SEQ ID NO: 16852 - protein, 1422 aa, Spodoptera frugiperda
MEMDRRVYNLRSLPGGRRGASGADAGCHSMRTIGGVELSKRAPTKKHATAGRCELTRRAHSEDATADSTDDDTISLFSSIPSTRPSYMTRSKTSLSTTSTLDSVARDVDLDRDLAPTTSANNKRRRWTPEMNIFILRTYFQLTQLDTDKTTYLEPLHLKFLEKFPDMQVSRQRIGDQRRAIINNKLLSQETIDTIRKEVEKELDQLQLSHLNQQTENTINQSQPMFTHSQLHPTTHLDTHSIHNNTQTRMRWTNEQNEGIMRSYYRVTELGRNETVYRRRMYDDFVSHFPSLAHLSEQRIADQRRAIVNNKYISEEKLNLLKAQVAEELSLLNHNSHNTRNTFTDDNISIYNPITQVTNNTDIHSMEEPTPDTQTSNNPDLSTILDIISSSQINLERNSLIDSTFQQAFEHFKTTSPTNRSYIPKQKPSKNLAIIINYINKNILTENFDKDTDFNTFQTIIYCAAWTAAKVNGARISLEPRERARAPKTEYKPKWQRRLEQKLKDLRTKIGRLTQFLNGNRSRKLRKCVNKIMRIYKTHTIHEQPNTQPLHTLDTLKQKLSVVKGRLERYKACTLRKQQNIQFSHNEKLFYRNIRQATTNNNPHNNTRNNENNAPDPETLHHFWANIWEKPICHNPQAEWIQSDLSNNTEPMAFEQVPIAVFHKVLSKLHNWKAPGSDYIHSYWYKKFTAIHSHLYNFINAFIQDPKTIPSYLMSGTTFMIPKDHSDMSNPAKYRPITCLQTLYKIITSCISELIYEHIDANNILAEQQKGCRKSSQGCKEQLIIDSVVLRNVQKSKSDLFTMYIDYKKAYDSVPHSWLVKILDIYKIHTSITAFLKTVMTSWTTVLRLTTPTETIDTRPIKIQRGIFQGDALSPLWFCLALNPLSKLLNTTALGIRLHSPTDGTDHILNHLMYMDDIKLFAETENQLKELADLTEKFTNDIKMEFGIDKCKINSVRAGQNYQHTHILSTGELIEPLDEQGSYKYLGYVQSTQIHHKLIKQKLKQQFQHRVNAVLKTQLHARNTIKAINTFAIPVLTYSFGIINWTKTDLKNLQQKLNTTMTKFRKHHPRSCLQRLTLPRKEGGRGLIDILNLHNKQITALRTYFFAKAESSTLHKQIAQKDKHLTPLNLNDRTKQKNETVTDDRTKCLEWTQKSLHGRHRQDLCQPNVDKEASNAWLNRGELFPETEGFMLAIQDQVIETRNYRKHIIKNLPNDTCRKCNSSPETIQHITGACKSIAQTDYKHRHDQVANIIHQKLAQQFKLVDSVVPYYKYNPNTVLENNTTKLYYDRAIFTDRTIHYNRPNITLINKINKTGFLIDIAVPNTHNLQSTIAEKLSKYTELKDEITRLWRLQKVIIVPIVISSTGVIPKQLHQSLTSLNLPPSTYCLLQKAVILNTCRLVRKFLQCDSDNIVQTPNNPQPH

SEQ ID NO: 16853 - protein, 1441 aa, Parnara guttata
MMEHSRSKYNLRSLPGGRRGAPGAGAGCFSMRDTGGEALSRRAPVTQVATAGRRELSRRARDVDATADTSGEDTNSLFSSIPSTRPSYMTRATSTLSTVSSLDNVVPEVNDDINSAPISSASRTRRRWTLEMNEFILRTYLQLTALDTDTKTYLEPLHLKFTENFPNMQVSRQRVGDQRRAIVRNKLLAQSTIDRIVHEVKLELNNLQDSIHNSNTLSQSQVLSHTGTKQNLQTQSVTSQLATQSHPRMRWTNEHNEEIMRSYYRITQLETNKTVYRKQLHDDFISKFPSLAHVSEQRIADQRRAIINNKYISDDRLNILKRETREDITQNNINPDNGTIDNQNSYTEIIHNTNQNFLNSLVINLPEENQAPTLNTERQLEIDEIFEQALQYYTGTDPTNRSYIPKQKTSRKFAKIVDYLNKIIIPENINTNTDFITLQTVIYSAAWTAAKLNGAKLNLKPLGKDTHSPKEYKPNWQKRLERRLEDLRAKIGRLTQFINGNRNNKMSKIVNKILEQYKIHSVHEEPNTQLTHTLDTLKQKLSVVTGRLHRYKKCTLRKQQNNQFNNNEKLFYRNIKQSTSNTQENNIANNVKMPDPTNLQNFWAGIWEQPVQHNSEADWITKEMTNNIANTQPMQFNQISIDTLKKVINKLHNWKAPGSDYIHSFWYKKFSSTHYYLHKFINNFIQDPYIMPSYITIGTTYMILKDNNDSTNPAKYRPITCLQTLYKIITSCISELMYQHLDANNILAEQQKGCRKFSQGCKEQLIIDSVVLKQVQKTKSNLYTMYIDYKKAYDSVPHSWLLQVLEIYGIHPQLIKFLKITMGNWKTRLKLTNSTETIETNPIKIQRGIFQGDALSPLWFCLALNPLSNLLNSSTLGYPLKYLETDEQTDFQKTSSSHLLYMDDIKLYGNSEEELNVLANITEQFTSDIKMEFGIDKCKINSVRAGQVYRHSYILETGDQIEALEEQQTYKYLGYNQSCQVQHKETKNNLKLQFRHRLNTIFKSELNSKNTVKAINTYAIPILTYSFGVINWTKSELKNLQRTINTTLTKFRKHHPRSCLQRLTLPRKEGGRGIIDIKNLHNRQITTLRQYFFNKAESSILHKSIAYNDTKFTPLNLQDKSTQNNENLTDDKTKIAEWTQKTLHGRHRHDLCQPNVDKDASNAWLNRGDLFPETEGFIMAIQDQVIETKNYQKYIIKNLIQDTCRKCNSSSETIQHITGACKAIAQTDYKHRHDQVANIIHQKLAHQHKLIDSIQPYYKYTPNTVLENTATKLYFDRALLTDRTVHYNRPDITLINKTNRTGYLIDIAVPNTHNLQTTIAEKLTKYIELKEEISRLWHLQKVVIVPIVISTTGVVPKQLHQSLTTLNIPSKTYYLMQKAVILNTCRLVRKFLQTENENYRSHIQSNPPTLLQPIQPQTEQNTAESSQSNTFIINTPDVHLA

SEQ ID NO: 16854 - protein, 908 aa, Endotricha flammealis
MTRRIHKIIEQYKIHTIHEEPNTQLAHTLDTLKQKLAVLSGRLNRYKTCTQRKRQNNKFSSNEKQFYRSIREAATNTQDSNPNDNINNRPDVNDLQDFWSGIWQQPILHNNQADWITEETNHNQRTQPMNYDQISTDTFNKVINKLHNWKAPGSDFIHSYWYKKLTNTHSYLLNFINKFMENPTTLPTYLTSGTTYMIPKDRNDLTNPAKYRPITCLQTLYKIITSCVAEIMYKHINDNDILAEQQKGCRKFSQGCKEQLIIDSVILRKVQKTRSNLFSMYIDYKKAYDSVPHSWLIKILEIYKIHPKIIEFLEITMTNWTTRLRLLTPTDTIETNIIKIQRGIFQGDALSPLWFCLALNPLSHQLNSTLSGYSLQYTETDERTDIEENIVSHLLYMDDIKIYADSEEKLNQLAHLTEQFSEDIRMEFGIDKCKINSIKAGRNYQHNYTLETGDQIEALEEKQTYKYLGYNQSRLIQYKDTKQKLKQQFKHRLNTILKTQLNSRNIVKAINTFAIPILTYSFGIISWSKSDLKSLQRLINTTMTKHRKHHPRSCLQRLTLPRKEGGRGIIDITNLHNKQITTLRQYFLNRTESSILHKAITRNDNKLTPLNLQDATVQNNEKLTDNKTKIKEWTDKQLHGRHRHDLCQPNVDKDASNAWLNRGELFPETEGFMIAIQDQVIETRNYQKYIIKNIASDRCRKCNSAPETIQHITGACKTIVQTDYKHRHDQVANIIHQKLAFKNKLIESIQPYYKYNPDSVLENTTTKLYFDRAILTDRTVHYNRPDITLVDKINRTGFLIDIAVPNTHNLQSTIAEKLTKYIDLKEEITRLWRLQKVTIVPVVVSTTAVIPKQLHESLRTLDLPPNTYNLIQKAIVLNTCRIVRKFLQTDRQTDDHNQPLTQTTSSPI

SEQ ID NO: 16855 - protein, 1438 aa, Signeta flammeata
MMEHSKSRYNLRPLPGGRRGAPGAGAGCFSLRTTGGEALSRRAPVTQTATAGRRELSRRARGVDATADSPGDDTNSLFSSIPSTRPSYMTRSTSTLSTISSLDSVVQDVNLDVESVPTSSVSHTRRRWTLDMNKFILRTYLQLTNLDTDTNRYLESLHLKFTEKFPDMQVSRQRVGDQRRTIIRNKLLPQSTIDQIYNEVKEELNNLQDSIHNYNPLSLAQVASNTETQQETQLSTSQHPHSRMRWTNEQNEAIMRSYFRITHLETNKTAYRKQLHEDFIQKFPSLADLSEQRVADQRRAIVNNKYIKDDRLDAIKREITEKLTHNNTSSNNNTNNTQNPNTDSPINTDQNFLNLIDLNMPEETQSPTLPINFQRQSHIDETFEQAVQYYRDTDPTNRNFIPKQKTSIKLAKIVDYLNTIIIPENINIDTDFITLQTVIYSAAWTAAKLNGAKVKLGPLEKDRPNNREFKPNWQKRLERRLEDLRVKIGRLTQFINGNRNKKINTYVNKILEQYKIHSLHEEPNTQLTHTLDTLKQKLSVLSGRLHRYKNCTLRKQQNNQFNNNEKQFYRNIKLSSSNTQENNTANNVSTPDPTDLQNFWAGIWEHSVQHNSQADWIIKETTDNITNIQPMNFDHIPVETFKKVINKLHNWKAPGSDYIHSYWYKKFTSAHCYLHNYINDFIQAPSIIPSYITIGTTYMIPKDHNDRTNPAKYRPITCLQTLYKIITSCISELMYQHLDENNILTEQQKGCRKFSQGCKEQLIIDSVILKQVQKTKSDLYTMYIDYKKAYDSVPHSWLLQVLEIYKIHPQIVTFLKTTMTNSTTRLRLTTSTKTIETNPIKIQRGIFQGDALSPLWFCLALNPLSNLLNSSTLGYPLKYWETDEQTDCQKFTLSHLLYMDDIKLYGNSEEELNQLANLTEQFTNDIKMEFGIDKCKINSIKAGRTYEHHYTLETGDLIDALDEQQTYKYLGYNQSHQIQYKDTKQKLTLQFRHRLNTILKTQLNSKNTVKAINTFAIPILTYSFGIINWTKSDLKNLQRTINTTMTKSRKHHPRSCVQRVTLSRKEGGRGIIDIINLHNRQIVTLRQYFSKKGESSTLHKSIAYNDTKLTPLNLKDKSTQNNEKLTDDKTKIAEWLQKSLHGRHRHDLCQPNVDKDASNAWLNHGELFPETEGFLMAIQDQVIETRNYQKYIIKQLTRDICRKCNSSSETIQHITGACKTIAQTDYKHRHDQVANIIHQKLAHQHNLIDSIQPYYKYIPNSVLENTKTKLYFDRALLTDRTVHYNRPDITLIHKTNKTGYLIDIAIPNTHNLQTTIAEKLSKYIELKEEITRLWHLQKVIIVPIVISTTGVIPKQLHQSLKTLDLPPKTYHLMQKAVILNTCRLVRKFLQTDLETHNSHIQPSTSILSQPPQLNTEQTILHTIQPNIPLNNTPDVHLA

SEQ ID NO: 16856 - protein, 908 aa, Endotricha flammealis
MTRRIHKIIEQYKIHTIHEEPNTQLTHTLDTLKQKLAVLSGRLNRYKTCTQRKRQNNKFSSNEKQFYRSIREAATNTQDSNPNDNINNRPDVNDLQDFWSGIWQQPILHNNQADWITEEINHNQRTQSMNYNQISTDTFNKVINKLHNWKAPGSDFIHSYWYKKLTNTHSYLFNFINKFMENPTTLPTYLTSGTTYMIPKDRSDLTNPAKYRPITCLQTLYKIITSCIAEIMYKHINDNDILAEQQKGCRKFSQGCKEQLIIDSVILRKVQKTRSNLFSMYIDYKKAYDSVPHSWLIKILEIYKIHPKIIEFLEITMTNWTTRLRLLTPTDTIETNIIKIQRGIFQGDALSPLWFCLALNPLSHQLNSTLSGYSLQYTETDERTDIEENIVSHLLYMDDIKIYADSEEKLNQLAHLTEQFSEDIRMEFGIDKCKINSIKAGRNYQHNYTLETGDQIEALEEKQTYKYLGYNQSRLIQYKDTKQKLKQQFKHRLNTILKTQLNSRNIVKAINTFAIPILTYSFGIISWSKSDLKSLQRLINTTMTKHRKHHPRSCLQRLTLPRKEGGRGIIDITNLHNKQITTLRQYFLNRTESSILHKAITRNDNKLTPLNLQDATVQNNEKLTDNKTKIKEWTDKQLHGRHRHDLCQPNVDKEASNAWLNRGELFPETEGFMIAIQDQVIETRNYQKYIIKNIASNRCRKCNSAPETIQHITRACKTIVQTDYKHRHDQVANIIHQKLAFKNKLIESIQPYYKYNPDSVLENTTTKPYFDRAILTDRTVHYNRPDITLVDKINRTGFLIDIAVPNTHNLQSTIAEKLTKYIELKEEITRLWRLQKVTIVPVVVSTTAVVPKQLHESLRTLDLPPNTYNLIQKAIVLNTCRIVRKFLQTDRQTDDHNQPLTQTTSSPI

SEQ ID NO: 16857 - protein, 908 aa, Endotricha flammealis
MTRRIHKIIEQYKIHTIHEEPNTQLTHTLDTLKQKLAVLSGRLNRYKTCTQRKRQNNKFSSNEKQFYRSIREAATNTQDSNPNDNINNRPDVNDLQDFWSGIWQQPILHNNQADWITEEINHNQRTQSMNYNQISTDTFNKVINKLHNWKAPGSDFIHSYWYKKLTNTHSYLFNFINKFMENPTTLPTYLTSGTTYMIPKDRSDLTNPAKYRPITCLQTLYKIITSCIAEIMYKHINDNDILAEQQKGCRKFSQGCKEQLIIDSVILRKVQKTRSNLFSMYIDYKKAYDSVPHSWLIKILEIYKIHPKIIEFLEITMTNWTTRLRLLTPTDTIETNIIKIQRGIFQGDALSPLWFCLALNPLSHQLNSTLSGYSLQYTETDERTDIEENIVSHLLYMDDIKIYADSEEKLNQLAHLTEQFSEDIRMEFGIDKCKINSIKAGRNYQHNYTLETGDQIEALEEKQTYKYLGYNQSRLIQYKDTKQKLKQQFKHRLNTILKTQLNSRNIVKAINTFAIPILTYSFGIISWSKSDLKSLQRLINTTMTKHRKHHPRSCLQRLTLPRKEGGRGIIDITNLHNKQITTLRQYFLNRTESSILHKAITRNDNKLTPLNLQDATVQNNEKLTDNKTKIKEWTDKQLHGRHRHDLCQPNVDKEASNAWLNRGELFPETEGFMIAIQDQVIETRNYQKYIIKNIASNRCRKCNSAPETIQHITRACKTIVQTDYKHRHDQVANIIHQKLAFKNKLIESIQPYYKYNPDSVLENTTTKLYFDRAILTDRTVHYNRPDITLVDKINRTGFLIDIAVPNTHNLQSTIAEKLTKYIELKEEITRLWRLQKVTIVPVVVSTTAVVPKQLHESLRTLDLPPNTYNLIQKAIVLNTCRIVRKFLQTDRQTDDHNQPLTQTTSSPI

SEQ ID NO: 16858 - protein, 780 aa, Limenitis camilla
MTYEQIPPEIFEKVIGNLHNWKAPGSDYLHSFWYKKFTSIHTHLHKYINQFITNPNTMPHYLTSGITYMIPKDRNDLTNPAKYRPITCLQTLYKIITSCISELIYQHVDANNILAEQQKGCRKFSQGCKEQLIIDAVVLKKVQKTKSDLFSLYIDYKKAYDTVPHSWLLKILEIYKIHPSIILFLKSIMFNWKTVLRLTNKNNTTQTRPVKIQRGIFQGDALSPLWFCLALNPLSNMLNSSSLGFPLGNSKTDTQTDIQHNILNHLLYMDDIKLYGKSEDQLNQLAKIVEKFTNDIKMEFGIDKCKINSSKAGQNYQHQFTLQSGKLIEPLSEGETYKYLGYNQSLQIQHKEIKKNLKLQFQHRLNSILKTQLYSRNTIKAINTFAIPVLTYSFGVINWTQTDLKNLQRKINTTLTKFRKNHPRSCLQRLTLPRKEGGRGLIDILNLHNRQITTLRKYFFDKSETSKLHRLIIYNDQQLTPLNLKNSTTQRNENLIDNKTKLIDWSQKSLHGRHHHDLCQDNVDKEASNAWLNRGDLFPETEGFMIAIQDQVIETRNYRKHIIKNLTNDNCRKCNSAAETIQHITGACKAIAQTDYKHRHDQVANIIHQKLAFLYKVTDITVPYYKYTPQTVLENATTKLYFDRALLTDRTIHFNRPDITLVNKIEKTGYLIDIAVCNTHNLQTTIAEKITKYNDLKHEITRLWHLKKVTVVPVVISTTGVIPRQLHQSLRTLNLARNSYHLLQKAAILNTCRIVRKFLECEADNTPNIVMPHPSSSTYT

SEQ ID NO: 16859 - protein, 1447 aa, Carposina sasakii
MSLIPRLDYPFRTNYSQPKNPMEQNRRYSLRPLPGGRRGASGAGAGCYSRRDTGGEALSRRAPVTQHVTAGRRGLSRRARDVEVTADTSDDETTSLFSSIPSTRPSYMTRSKSSVSTVSSLDAVVQDVNLDTEPAPTSRTTTRRRWTPEMNMFILRTYLKLTYLDTDTSNYVEPLHLKFIEKYPEMQVSGQRIGDQRRAIMRQKLLPQNIIDQIYTEVQEDLTSVQASTIQTTINPSQSQDINTQPKSRTRTRMKWTTEQNEGIMRSYYRVTMLDTNRTTYRKLLRKDFLKYFPNLSHLSEQRISDQQRAIVNNKYINNSRLNAIRQEIEQELHSHNSNESNHISITNTQNQNPLNTGPNIDLQFLTSIPLSAPDSLEKEPNNQPTHTECKPHIDETFELAFQHYKDTDPLNRIYIPKQKTSKKFSNIVHYLNTVLIPNKVNIETCFSTLQTVIYSAAWTAAKINGAKIELDSRVQRSSCKKRDYKPNWQKRLERRIGKLRSKIGRVTQYMNGNRNQNIARLVNSIIEQYRTHSIHEEPNTQLSHTLDTLKQKLSVLAGRLNRYKTCTERKQQNNQFANNEKLFYRNIRQATTNLQQHNTTHDINSTPDPRDLQNFWASLWEQPIQHNSQADWITKETTNNSETTTPMQFQYITENTFKNVISRLHNWKSPGSDCIHSYWYKKFTAIHPYLYNFINDFIHDPSTMPPYITSGTTYMIPKDHNDLTNPAKYRPITCLQTLYKIITSCISEVIYKHLNDNSILAEQQKGCKKASQGCKEQLVIDSVILKQVQKTKSNLYTMYIDYKKAYDSVPHSWLLQVLEIYKVHPIIISFLQATMKNWTTKLMLNTSTETIETGQIKIQRGIFQGDALSPLWFCLSLNPLSNLLNATPFGYPLKYTETNEQTNTQQNVLNHLLYMDDIKLYSIDEEQLNKLANITEQFTKDIKMEFGIDKCKINSIKAGQTYQHNYILETGEQIEAIDEQQTYKYLGYNQARQIQYKETKQHLQQQFRYRLNTILKTQLYAKNTIKAINTYAIPVLTYSFGIINWTKSDLKLLQTLINTTMTKFRKHHPRSCLQRLTLPRKDGGRGIIDITNLHNRQISCLRQYFFMKMDSSEIHKSIVYNDVKLTPLNLYDKSEQINEKLTDDKAKIAEWAVKSLHGRHLHDLCQPNVDKEASNAWLGRGELFPETEGFIMAIQDQVVETRNYQKYIIKNVLTDTCRKCNSSPETIQHITGACKTIAQTDYKHRHDQIANIVHQKIAYQYKFVATIQPYYKYNPNPVLENTTTKLYFDRAILTDRTIHYNRPDITLINKTNRTGYLIDIAVPNTHNIQSTIAEKLTKYIELKDEITRIWHLRKVTIVPIVISTTGVIPKQLHQSLKTLNLPPNTYHLMQKAAILNTCRLVRKFLQTDQDTITQVLQTPTTHLHSLSLQPNLASTALTDPAGVHLA

SEQ ID NO: 16860 - protein, 1412 aa, Endotricha flammealis
MEPSKRKYDLRSLPGGRRGTPGAGAGCLSIRITGDEALSRRTPVTQDATADRRELSRRTHGDEATAESISGDDTISLFSSIPSTRPSYMTRSRTLSTVSSLDAVVQDVNLDCEPAPTSSQPGKRKRWTTEMNKFILRTYLQLTAVDTDTRTYLEPLHVKFMEKYPDMDVGRQRIGDQRRAIVRNRLLPKDVIDQIHKEVQEEFNLLKAQTQNNGSLTQSHSNNTIETQNIGSQPINKNTGARMKWTNEHNEAIMRSYYRITHLETNRTAYRKPLREDFIKTFPALSHLSEQRIADQRRAIVNNKYISEHRLDALKTEITKLLELNSNNQTLTTTNIENDNETYTHNDVSLELNNILLEQTEDTLNTHIHTEYTDQERQPQIDETFEQALRHFQGTNPTSRTHIPKQKQSKKFARIVNYLNETTIPEIVNNSTDFETLQTVIYCAAWTAAKINGSKITLEPIERSRLNQREYKPNWQRRLERKIEDLRTKIGRITQFINGRTNINMTRRIHKIIEQYKIHTIHEEPNTQLAHTLDTLKQKLAVLSGRLNRYKTCTQRKRQNNKFSSNEKQFYRSIREAATNTQDSNPNDNINNRPDVNDLQDFWSGIWQQPILHNNQADWITEETNHNQRTQPMNYDQISTDTFNKVINKLHNWKAPGSDFIHSYWYKKLTNTHSYLLNFINKFMENPTTLPTYLTSGTTYMIPKDRNDLTNPAKYRPITCLQTLYKIITSCVAEIMYKHINDNDILAEQQKGCRKFSQGCKEQLIIDSVILRKVQKTRSNLFSMYIDYKKAYDSVPHSWLIKILEIYKIHPKIIEFLEITMTNWTTRLRLLTPTDTIETNIIKIQRGIFQGDALSPLWFCLALNPLSHQLNSTLSGYSLQYTETDERTDIEENIVSHLLYMDDIKIYADSEEKLNQLAHLTEQFSEDIRMEFGIDKCKINSIKAGRNYQHNYTLETGDQIEALEEKQTYKYLGYNQSRLIQYKDTKQKLKQQFKHRLNTILKTQLNSRNIVKAINTFAIPILTYSFGIISWSKSDLKSLQRLINTTMTKHRKHHPRSCLQRLTLPRKEGGRGIIDITNLHNKQITTLRQYFLNRTESSILHKAITRNDNKLTPLNLQDATVQNNEKLTDNKTKIKEWTDKQLHGRHRHDLCQPNVDKDASNAWLNRGELFPETEGFMIAIQDQVIETRNYQKYIIKNIASDRCRKCNSAPETIQHITGACKTIVQTDYKHRHDQVANIIHQKLAFKNKLIESIQPYYKYNPDSVLENTTTKLYFDRAILTDRTVHYNRPDITLVDKINRTGFLIDIAVPNTHNLQSTIAEKLTKYIDLKEEITRLWRLQKVTIVPVVVSTTAVIPKQLHESLRTLDLPPNTYNLIQKAIVLNTCRIVRKFLQTDRQTDDHNQPLTQTTSSPI

SEQ ID NO: 16861 - protein, 1423 aa, Toxidia parvulus
MMEQSNSRYNFRPLPGGRRGAPGAGAGCFSIRTTGGEALSRRAPVTQVATAGRRELSRRAHGVDATADSPGDDTNSLFSSIPSTRPSYMTRSKSTLSTISSLDTVVQDVNLDEESVPTSSVSRTRRRWTLDMNKFILRTYLQLTNLDTDTNRYLESLHVKFTEKFPDMQVSRQRVGDQRRTIIRNKLLPQSTIDQIYNEVKEELKNLQDSIHNYHPLPQAQVTPHTEIQQNSETQPTSSHFTTQTHLRMRWTNEQNEAIMRSYFRITHLETNKTAYRKQLHLDFIQQFPSLAYLSEQRIADQRRAIVNNKYIKDDRLEAIKREITQELTHKNTNPDTQNVNTDLTTNTDLNFLNSIDLNMPEEPLSPTLPINFQRQSQIDETFEQTLQYYIDTDPTNRNFIPKQKTSIKLAKIVDYLNTIIIPENINNDTDFITLQTVIYSAAWTAAKLNGAKIKLGPSEKDRPNNREFKPNWQKRLERRLGDLRVKIGRLTQFINGNRNKKINSCVNKILEQYKIHSVHEEPNTQFTHTLDTLKQKLSVLAGRLHRYKKCTLRKQQNNQFNNNEKQFYRNIKQSSSNTQENNAANNVNTPDPTDLQNFWAGIWEQPIQHNSEADWIIKETTDNITNIQPMNFDQIPVETFKKVINKLHNWKAPGSDYIHSYWYKKFTSTHCYLHKYINNFIQEPNLIPSYITIGTTYMIPKDHNDRTNPAKYRPITCLQTLYKIITSCISELMYQHLDENNILTEQQKGCRKFSQGCKEQLIIDSVILNQVQKTKSDLYTMYIDYRKAYDSVPHSWLLQVLEIYKIHPQIISFLATTMTNSTCRLRLTTSTETIETNPIKIQRGIFQGDALSPLWFCLALNPLSNLLNSTTLGYPLKYSETDEQTDSRKFTLSHLLYMDDIKLYGNSEEELNQLANLTEQFTNDIKMEFGIDKSKINSIKAGQTYRHHYTLESGDLIDALDEQQTYKYLGYNQSRQIHYKDTKQKLTLQFRHRLNTILKTQLNSKNTVKAINTFAIPILTYSFGIINWTKSDLKTLQRTINTTMTKFRKHHPRSCLQRLTLSRKEGGRGIVDILNLHNRQIATLRQYFSKKGESSTLHKSIAYNDTKLTPLNLQDKSTQKNEKLTDDKTKIAEWLQKSLHGRHRHDLCQPNVDKDASNAWLNRGELFPETEGFIMAIQDQVIETKNYQKYIIKQSTRDICRKCNSCPETIQHITGACKTIAQTDYKHRHDQVANIIHQKLAHQHNLIDSIQPYYKYTPNSVLENITTKLYYDRALLTDRTVHCNRPDITLIHKTNKTGYLIDIAIPNTHNLQTTIAEKLSKYIELKEEITRLWHLQKVIIVPIVISTTGVVPKQLHQSLKTLDLPPKTYHLMQKAVILNTCRLVRKFLQTDLEAHNSHIQSTLSILSQPPPSSQTEQTTHIT

SEQ ID NO: 16862 - protein, 1415 aa, Limenitis camilla
MVQTRSMTNRPQVPGGPSCSTGSDGSGSETEPRGAKNLRVARYTRQTTQVTTNMDSDQLSETSSMTLSSFNSYESPTSSPLLFSTSSNSSINSPVHVDVVEEAPATEPTPTTGTNRVRKRWSEEMNRFIWRTYLIATKLNTSRLYLDQLHQEFSQEYPYMQATRQRLGDQCRAIVRNKLLSQETLNEIKIEVTSFLQHTHVENKTQKQSHSTMISHTQTHNNYREEIDRNGSNNWAQSTIRTRMTWTDEYNEEIMRSYFRTTQLGTNMTAYRKLMYDDFISRYPSLAHLSEQRIADQRRLIVNNKYLSIERLNILKQEISQELLLNNTNNFNCNHTLRNISTINYTDTHTLDHSEQTQTNTDFIHTEELENYTETITKRQQNIDETFQQAFKFFKETNPIDRSYIPKQKPSKNLSKIINYLNDIILPENVNEGTDFLTLQTTIYCAAWTSAKVNGAKITLPQPTKNITGQKSENIPKWQKRLKNKLENLRIKIGRLTQFINGCRSRKIIKYVNKIVEQYKTHTVHEEPNSHVSHTLDTLKQKLSVVSGRLHRYKACSLRKQQNIQFSHNEKGFYRNIRQATTNSQNHCNDKDTSNCPDSETLHSFWTGVWEEPIQHNSEAEWIETEKSLNTNIETMTYEQIPPEIFEKVIGNLHNWKAPGSDYLHSFWYKKFTSIHTHLHKYINQFITNPNTMPHYLTSGITYMIPKDRNDLTNPAKYRPITCLQTLYKIITSCISELIYQHVDANNILAEQQKGCRKFSQGCKEQLIIDAVVLKKVQKTKSDLFSLYIDYKKAYDTVPHSWLLKILEIYKIHPSIILFLKSIMFNWKTVLRLTNKNNTTQTRPVKIQRGIFQGDALSPLWFCLALNPLSNMLNSSSLGFPLGNSKTDTQTDIQHNILNHLLYMDDIKLYGKSEDQLNQLAKIVEKFTNDIKMEFGIDKCKINSSKAGQNYQHQFTLQSGKLIEPLSEGETYKYLGYNQSLQIQHKEIKKNLKLQFQHRLNSILKTQLYSRNTIKAINTFAIPVLTYSFGVINWTQTDLKNLQRKINTTLTKFRKNHPRSCLQRLTLPRKEGGRGLIDILNLHNRQITTLRKYFFDKSETSKLHRLIIYNDQQLTPLNLKNSTTQRNENLIDNKTKLIDWSQKSLHGRHHHDLCQDNVDKEASNAWLNRGDLFPETEGFMIAIQDQVIETRNYRKHIIKNLTNDNCRKCNSAAETIQHITGACKAIAQTDYKHRHDQVANIIHQKLAFLYKVTDITVPYYKYTPQTVLENATTKLYFDRALLTDRTIHFNRPDITLVNKIEKTGYLIDIAVCNTHNLQTTIAEKITKYNDLKHEITRLWHLKKVTVVPVVISTTGVIPRQLHQSLRTLNLARNSYHLLQKAAILNTCRIVRKFLECEADNTPNIVMPHPSSSTYT

SEQ ID NO: 16863 - protein, 1406 aa, Vanessa cardui
MEQSNNNRYNLRSLLGGRRGAPGAGAGCYSSRDTGGAALSRRAPATQHATAGRRELNKRAHDEDATAESSGDDTRSLFSFIPSTRPSYMTRRASTLSSVTTVDGVVRDVNLDSELAPTSAATRTRRRWTPEMNIFILRTYLQLTALETDTKNYLEPLHLKFIEKYPDMQISRQRVGDQRRAIVRNKLLPQNIIDRIHDEVKEDLKHLQTQTNPPVSLTQETHYSQTRMRWTNEQNEGLIRSYYRITHLETNRTNYRQQLHENFIATFPSLSHLSEQRIADQRRAIIVNKYICDNRLNEIKQQVAAELSINTKDNNTNTNEQRTEQITYSTQNTNLDSSDLSFLNNKELDFSKDFIPDRHQLDRDSLIDETFLQAFRFFKDTDPTNRSYIPKQKPSKKLAKIVHYLNEIVLPEKVNVDADFNTLQTVIYCGAWTAAKVNGAKISLEPYQRSRSAQNDHKPYWQRRLERRLENLRTKIARITHFINGNRNRHLERQVKNIVEQYKIHSVHEEPNTQLTQTLDTLKQKLAVIAGRLRRYKDCSLRKQQNSLFFNNEKQFYRNLKQTTTNNHDNNSNLDYTPDPQDLHKFWAEIWEQPVCHNHEADWIESEIRKNNAATSEMVFEHIPIETYKKVLQNLHNWKAPGSDFIHSYWYKKFTNIHGYLHNHLNKFIEDPSTIPSYTTLGTTYMIPKDRSNLSNPAKYRPITCLQTLYKILTSCLSELIYKHINENNILAEQQKGCRKYSQGCKEQLIIDSVILQRVQKSKSDLFTMYIDYKKAYDSVPHSWLLQILEIYKIHPKIINILKASMTNWATQLKLTTATTTIETNTIQIQRGLFQGDALSPLWFCLALNPLSNILNDSAIGYNLTCTEDTNGRTDNAENINHLLYMDDIKLYANSEHRLNELANITEQFSDDIKMDFGIDKCRINSFKSGHYYPHPYSLKSGEQIQPLDEGETYKYLGYNQSRQILHTDTKVKLKQQFRHRLNAILKTQLYSRNTVKAINTFAIPILTYSFGIINWSLSDLKALQRTINTTMTKFRKHHPRSCLQRLTLPRTEGGRGLIDITNLHNKQITSLRQYFFNKAESSPLHKAIVKNDRKFTPLNLIDNTSQKNEKLTDDKTKHAEWAGKSLHGRHYHDLNQPNVDKKASNAWLSHGDLFPETEGFIIAIQDQVIETKNYQKHITKTLHSDTCRKCNSCPETIQHITGACKTIAQTDYKHRHDQIANIIHQKLAHQQNLIASIQPYYKYIPESVLENSTSKLYFDRAILTDRTIHYNRPDITLINKNNKTGYLIDIAVPNTHNLQTSIAEKLTKYTELKDEITRLWHLQKVIIVPIVISTTGVIPKQLHKSIKTLNLPPNTYALLQKAAILNTCRIVRKFLQTENENPIESTSQPTPQTTSLTSNPVVHLA

SEQ ID NO: 16864 - protein, 1408 aa, Endotricha flammealis
MEPSKRKYDLRSLPGGRRGTPGAGAGCLSIRITGDEALSRRTPVTQDATADRRELSRRTHGDEATAESISGDDTISLFSSIPSTRPSYMTRSRTLSTVSSLDAVVQDVNLDCEPAPTSSQPGKRKRWTTEMNKFILRTYLQLTAVDTDTRTYLEPLHVKFMEKYPDMDVGRQRIGDQRRAIVRNRLLPKDVIDQIHKEVQEEFNILKAQTQNNGSLTQSHSNNTIETQNIGSQPINKNTGARMKWTNEHNEAIMRSYYRITHLETNRTAYRKPLREDFIKTFPALSHLSEQRIADQRRAIVNNKYISEHRLDALKTEITKLLELNSNNRTLTTTNIENDNETYTHNEVSLELNNILLEQTEDTLNTHIHTEYTDQERQPQIDETFEQALRHFQGTNPTSRTHIPKQKQSKKFARIVNYLNETTIPEIVNNSTDFETLQTVIYCAAWTAAKINGSKITLEPIERSRLNQREYKPNWQRRLERKIEDLRTKIGRITQFINGRTNINMTRRIHKIIEQYKIHTIHEEPNTQLAHTLDTLKQKLAVLSGRLNRYKTCTQRKRQNNKFSSNEKQFYRSIREAATNTQDSNPNDNINNKPDVKDLQDFWSGIWQQPILHNNQADWITEETNHNQRTQPMNYDQISTDTFNKVINKLHNWKAPGSDFIHSYWYKKLTNTHSYLLNFINKFMENPTTLPTYLTSGTTYMIPKDRNDLTNPAKYRPITCLQTLYKIITSCIAEIMYKHINDNDILAEQQKGCRKFSQGCKEQLIIDSVILRKVQKTRSNLFSMYIDYKKAYDSVPHSWLIKILEIYKIHPKIIEFLGITMTNWTTRLRLLTPTDTIETNIIKIQRGIFQGDALSPLWFCLALNPLSHQLNSTLSGYSLQYTETDERTDIEENIVSHLLYMDDIKIYADSVEKLNQLAHLTEQFSEDIRMEFGIDKCKINSIKAGRNYQHNYTLETGDQIEALEEKQTYKYLGYNQSRLIQYKDTKQKLKQQFKHRLNTILKTQLNSRNIVKAINTFAIPILTYSFGIISWSKSDLKSLQRLINTTMTKHRKHHPRSCLQRLTLPRKEGGRGIIDITNLHNKQITTLRQYFLNRTESSILHKAITRNDNKLTPLNLQDATVQNNEKLTDNKTKIKEWTDKQLHGRHRHDLCQPNVDKDASNAWLNRGELFPETEGFMIAIQDQVIETRNYQKYIIKNITSDRCRKCNSAPETIQHITGACKTIVQTDYKHRHDQVANIIHQKLAFKNKLIESIQPYYKYNPDSVLENTTTKLYFDRAILTDRTVHYNRPDITLVDKINRTGFLIDIAVPNTHNLQSTIAEKLTKYIELKEEITRLWRLQKVTIVPVVVSTTAVIPKQLHESLRTLDLPPNTYNLIQKAIVLNTCRIVRKFLQTDRQTDDHNQPLTQTT

SEQ ID NO: 16865 - protein, 1412 aa, Endotricha flammealis
MEPSKRKYDLRSLPGGRRGTPGAGAGCLSIRITGDEALSRRTPVTQDATADRRELSRRTHGDEATAESISGDDTISLFSSIPSTRPSYMTRSRTLSTVSSLDAVVQDVNLDCEPAPTSSQPGKRKRWTTEMNKFILRTYLQLTAVDTDTRTYLEPLHVKFMEKYPDMDVGRQRIGDQRRAIVRNRLLPKDVIDQIHKEVQEEFNLLKAQTQNNGSLTQSHSNNTIETQNIGSQPINKNTGARMKWTNEHNEAIMRSYYRITHLETNRTAYRKPLREDFIKTFSALSHLSEQRIADQRRAIVNNKYISEHRLDALKTEITKLLELNSNNQTLTTTNIENDNETYTHNDVSLELNNILLEQTEDTLNTHIHTEYTDQERQPQIDETFEQALRHFQGTNPTSRTHIPKQKQSKKFARIVNYLNETTIPEIVNNSTDFETLQTVIYCAAWTAAKINGSKITLEPIERSRLNQREYKPNWQRRLERKIEDLRTKIGRITQFINGRTNINMTRRIHKIIEQYKIHTIHEEPNTQLAHTLDTLKQKLAVLSGRLNRYKTCTQRKRQNNKFSSNEKQFYRSIREAATNTQDSNPNDNINNRPDVNDLQDFWSGIWQQPILHNNQADWITEETNHNQRTQPMNYDQISTDTFNKVINKLQNWKAPGSDFIHSYWYKKLTNTHSYLLNFINKFMENPTTLPTYLTSGTTYMIPKDRNDLTNPAKYRPITCLQTLYKIITSCIAEIMYKHINDNDILAEQQKGCRKFSQGCKEQLIIDSVILRKVQKTRSNLFSMYIDYKKAYDSVPHSWLIKILEIYKIHPKIIEFLEITMTNWTTRLRLLTPTDNTETNIIKIQRGIFQGDALSPLWFCLALNPLSHQLNSTLSGYSLQYTETDERTDIEENIVSHLLYMDDIKIYADSEEKLNQLAHLTEQFSEDIRMEFGIDKCKINSIKAGRNYQHNYTLETGDQIEALEEKQTYKYLGYNQSRLIQYKDTKQKLKQQFKHRLNTILKTQVNSRNIVKAINTFAIPILTYSFGIISWSKSDLKSLQRLINTTMTKHRKHHPRSCLQRLTLPRKEGGRGIIDITNLHNKQITTLRQYFLNRTESSILHKAITRNDNKLTPLNLQDARVQNNEKLTDNKTKIKEWTDKQLHRRHRHDLCQPNVDKDASNAWLNRGELFPETEGFMIAIQDQVIETRNYQKYIIKNIASDRCRKCNSAPETIQHITGACKTIVQTDYKHRHDQVANIIHQKLAFKNKLIESIQPYYKYNPDSVLENTTTKLYFDRAILTDRTVHYNRPDITLVDKINRTGFLIDIAVINTHNLQSTIAEKLTKYIELKEEITRLWRLQKVTIVPVVVSTTAVIPKQLHESLRTLDLPPNTYNLIQKAIVLNTCRIVRKFLQTDRQTDDHNQPLTQTTSSPI

SEQ ID NO: 16866 - protein, 807 aa, Tuta absoluta
MIFEHIPIDTFQKVLRNLHNWKAPGSDNIHSYWYKKFTSINGYLHNYLNMFIEDPSLIPSYITVGTTFMISKDRNEPSNPAKYRPITCLQTLYKILTACISELIYKHVDDNNILAEQQKGCRKFSQGCKEQLVIDSVILKQVQKTKSDLYSMYIDYRKAYDSVPHSWLLEILNIYKIHPKIINLLKTTMENWITKLKLTTPTKTIETEPIKIQRGIFQGDALSPLWFCLALNPLSNILNSTPLGYQLTYTENERQTDRRQTINHLLYMDDIKLYADNEEQLYQLANLTELFTCDIKMEFGIDKCKINSIRTGQSYKHNYTLESGENIESLDEQETYKYLGYQQSLQIHYKETKEKLKQLFRHRLNSILKTQLYSRNTFKAINTYAIPILTYSFGIINWTKTDLKALQRTINTTLTKFRKHHPRACLQRLTLPRKEGGRGLIDITNLHNRQIITLRKYFFNKTESSTLHKAITQNDHKTTPLNLSDNTPQNNELLIDDKNKSAEWARKSLHGRHHHDLNHTNVDKEASNAWLTQGDLFPETEGFIIAIQDQVIETKNYQKHITKTLTSDTCRKCNSCPETIQHITSACKSIAQTDYKHRHDQVANVIHQKLAYQKDLIKSIQPYYKYNPESVLENSTTKLYFDRAILTDRTIHYNRPDITLIDKTTKTGYLIDIAVPNTHNLQTTIAEKLSKYVELKDEITRIWHLQKVTIVPIVLSSTGVIPRQLHQSLKTLSLPPNTYHLLQKAVILNTCRIVRKFLQIEQGIRPMAQAVTLTTSQSTPSQDIQNTPTTSSDSQNILNSRPDMHLA

SEQ ID NO: 16867 - protein, 1436 aa, Tuta absoluta
MEHSNRKYNLRPLPGGRRGASGAGAGCYSLRDTGDEELSRRTPVTQYATAGRRELSRRAHDEDATAESSGDDTRSLFSSIPSTRPSYMTRRTSTLSTSSTLAGVVQEVNSDLELAPTSSATTTRRRWTPEMNMFILRTYLQLTELDTDTKTYLEPLHLKFIERYPDMEASRQRIGDQRRAIIRNKLLPKSTIDQIYKDVKEELDNFRKSVPNQNNTHASISSYSNSTHSQPFTSSTLLNTHPSQNTTRMRWTTEYNETIMRAYYKLTHLGTNRTTYRKPQHDAFVATFPSLSHVTEQRVSDQLRAIINNKYISDDRLHIIKQQVADELSLDISTSNGDNNNEIFVSEEPNLERTETTFLNDIELIIPDEPITNQQTIKRDLRIDETFKQTYEYFKNTDPTARCFIPKQKTSKKLAAIVDYLNKVTLPENVNLETDFNTLQTNIYCAAWTDAKINGAKINLEPIDRSRPAQKVNKPHWERRLERRLEDLRTKISRLTHFINGTRSLQLTRQVDEIIEQYKVHSVHEEQNTQLTHTLDTLKQKLAVITGRLRRYKACTLRKQQNNTFKNNERQFYRNLRQDTTNTQDSSIPNHTDDIPDPEDLRTFWAGIWEQPVQHNTDAEWIQIETEHHNTTTQMIFEHIPIDTFQKVLRNLHNWKAPGSDNIHSYWYKKFTSINGYLHNYLNMFIEDPSLIPSYITVGTTFMISKDRNEPSNPAKYRPITCLQTLYKILTACISELIYKHVDDNNILAEQQKGCRKFSQGCKEQLVIDSVILKQVQKTKSDLYSMYIDYRKAYDSVPHSWLLEILNIYKIHPKIINLLKTTMENWITKLKLTTSTKTIETEPIKIQRGIFQGDALSPLWFCLALNPLSNILNSTPLGYQLTYAENESQTDRRQTINHLLYMDDIKLYADNEEQLYQLANLTELFTCDIKMEFGIDKCKINSIRTGQSYKHNYTLESGENIESLDEQETYKYLGYQQSLQIHYKETKEKLKQLFRHRLNSILKTQLYSRNTFKAINTYAIPILTYSFGIINWTKTDLKALQRTINTTLTKFRKHHPRSCLQRLTLPRKEGGRGLIDITNLHNRQIITLRKYFFNKTESSTLHKAITQNDHKTTPLNLSDNTPQNNELLIDDKTKTAEWARKSLHGRHHHDLNHTNVDKEASNAWLTHGGLFPETEGFIIAIQDQVIETKNYQKHITKTLTSDTCRKCNSCPETIQHITSACKSIAQTDYKHRHDQVANVIHQKLAYQKDLIKSIQPYYKYNPESVLENSTTNAILTDRTIHYNRPDITLIDKTTKTGYLIDIAVPNTHNLQTTIAEKLSKYVELKDEITRIWHLQKVTIVPIVLSSTGVIPRQLHQSLKTLNLPPNTYHLLQKAVILNTCRIVRKFLQIEQGIRPIAQAVTLTTSQSTSSQDIQNTPTAPSDPQNNLNSRPDMHLA

SEQ ID NO: 16868 - protein, 1025 aa, Parapoynx stratiotata
MQYFKDTNPTNRNYIPRQKSSIKLLKIVNYINEKILPENVSSETDFNTLQTTIYCAAWTVAKVNGAKLSLESTVRPRFSERNDKPNWQKRLERRLEDLRVKIGRLTQYINGNTNINLERQVNNILIQYSIHSVHEEPNTNLSHTLDTLKQKLAVISGRLNRYKACTLRKQQNNQFNNNEKQFYRNIRQSSKNLQENTHNSEHTPHTEDLHSFWAGIWEVPDQHNTEAEWIKTELDMNNSTPDMSFEHIPIDIFNKVVTNLHNWKAPGSDFIHSYWYKKFTYIHGHLLKYLNQFIEDPTTIPTYITLGTTYMIPKDRNDPKNPAKYRPITCLQTLYKILTSCLSELIYKYIDENNILTEQQKGCRKFSQGCKEQLIIDSVILNQVKKNKSDLFTMYIDYKKAYDSVPHSWLVKVLEIYKIHPKIVAFLKTVMLNWTTRLKLSTPSATIETEPIKIRKGIFQGDALSPLWFCLAINPLSNMLNRTNVGYHLQKNYLDRTTDTTNVMNHLLYMDDIKLYAETEDNLNILANRTEQFTCDIKMEFGIDKCKINSVKSGKTFQHYYNLGTGEQIESLDEQDTYKYLGYNQSRQIQQKETKYKLTLQYRHRLNTILKTQLSSRNTIKAINTFAIPLLTYSFGTINWTKSDLKNLQRNINTTMTKYRKHHPRTCLQRLTLPRKEGGRGLIDIVNLHNKQISNLRQYFFDKSKSSNLHKAIVENDKKLTPLNLYDSAKQNNEILIDNKTKHAEWAKKSLHGRHHHDLSQSNVDKEASNAWLSSGELFPETEGFMLAIQDQIIETKNYQKHITKTLNSDTCRKCNSCPETIQHITSACKAIAQTDYKHRHDQVANIIHQKLAYREKLINSMQPYYKYNPETVLENVSAKLYFDRAILTDRTVHCNRPDITLINKTNKTGFLIDIAVPNTHNLQSTIAEKLSKYTELKDEITRIWHLQKVIIVPIVLSATGVIPKQLHQSLNSLDLPAHSYKLLQKAVILNTCRIVRKFLKNEQDLTPVQNTQTHTNPEPDVHLA

SEQ ID NO: 16869 - protein, 1394 aa, Parapoynx stratiotata
MEKNTNNYNLRSLPGGRRGASGAGAGCLSMRDTGGAALSRRARATQQVTAGRRGLSRRAHDVEATAASSGEDTESLFSSIPSTRPSYMTRRTLTLSSTNTADSVVQEVLPDLEFAPTVGTTRTRKRWTPEMNKFILRTYLQLTALDTDTKAYLEPLHLKFTEKFPDMEVSRQRVGDQRRTIVRNKLLPQCIIDQIYNEVKDELTTIHNNISATNLSHEQIANTTSTQTRMRWHNEQNEFLILAYYRITQLETNKTCYRKPLHEAFTNNFPSLAHLTEQRIADQRKAIIQNKYICDERLREIKQQVIQETSIYDNNLSTTPDRDTQNTNSDLDRDTQFLNHIESNIFEESVPHSKPFLRNQHIDITFSEAMQYFKDTNPTNRNYIPRQKSSIKLLKIVNYINEKILPENVSSETDFNTLQTTIYCAAWTVAKVNGAKLSLESTVRPRVSERNDKPNWQKRLERRLEDLRVKIGRLTQYINGNTNINLERQVNNILIQYSIHSVHEEPNTNLSHTLDTLKQKLAVISGRLNRYKACTLRKQQNNQFNNNEKQFYRNIRQSSKNLQENTHNSEHTPHTEDLHSFWAGIWEVPDQHNTEAEWIKTELDMNNSTPDMSFEHIPIDIFNKVVTNLHNWKAPGSDFIHSYWYKKFTYIHGHLLKYLNQFIEDPTTIPTYITLGTTYMIPKDRNDPKNPAKYRPITCLQTLYKILTSCLSELIYKHIDENNILTEQQKGCRKFSQGCKEQLIIDSVILNQVKKNKSDLFTMYIDYKKAYDSVPHSWLVKVLEIYKIHPKIVAFLKTVMLNWTTRLKLSTPSATIETEPIKIQKGIFQGDALSPLWFCLAINPLSNMLNRTNVGYHLQKNYLDRTTDTTNVINHLLYMDDIKLYAETEDNLNILANRTEQFTCDIKMEFGIDKCKINSVKSGKTFQHYYNLGTGEQIESLDEQDTYKYLGYNQSRQIQQKETKYKLTLQYRHRLNTILKTQLSSRNTIKAINTFAIPLLTYSFGTINWTKSDLKNLQRNINTTMTKYRKHHPRTCLQRLTLPRNEGGRGLIDIVNLHNKQISNLRQYFFDKSKSSNLHKAIVENDKKLTPLNLYDSAKQNNEILIDNKTKHAEWAKKSLHGRHHHDLSQSNVDKEASNAWLSSGELFPETEGFMLAIQDQIIETKNYQKHITKTLNSDTCRKCNSCPETIQHITSACKAIAQTDYKHRHDQVANIIHQKLAYREKLINSMQPYYKYNPETVLENVSAKLYFDRAILTDRTVHCNRPDITLINKTNKTGFLIDIAVPNTHNLQSTVAEKLSKYTELKDEITRIWHLQKVIIVPIVLSATGVIPKQLHQSLNSLDLPAHSYKLLQKAVILNTCRIVRKFLKNEQDLTPVQNTQTHTNPEPDVHLA

SEQ ID NO: 16870 - protein, 790 aa, Parapoynx stratiotata
MNNSTPDMSFEHIPIDIFNKVVTNLHNWKAPGSDFIHSYWYKKFTYIHGHLLKYLNQFIEDPTTIPTYITLGTTYMIPKDRNDPKNPAKYRPITCLQTLYKILTSCLSELIYKHIDENNILTEQQKGCRKFSQGCKEQLIIDSVILNQVKKNKSDLFTMYIDYKKAYDSVPHSWLVKVLEIYKIHPKIVAFLKTVMLNWTTRLKLSTPSATIETEPIKIRKGIFQGDALSPLWFCLAINPLSNMLNRTNVGYHLQKNYLDRTTDTTNVINHLLYMDDIKLYAETEDNLNILANRTEQFTCDIKMEFGIDKCKINSVKSGKTFQHYYNLGTGEQIESLDEQDTYKYLGYNQSRQIQQKETKYKLTLQYRHRLNTILKTQLSSRNTIKATNTFAIPLLTYSFDTINWTKSDLKNLQRNINTTMTKYRKHHPRTCLQRLTLPRKEGGRGLIDIVNLHNKQISNLRQYFFDKSKSSNLHEAIVENDKKLTPLNLYDSAKQNNEILIDNKTKHAEWAKKSLHGRHHHDLSQSNVDKEASNAWLSSGELFPETEGFMLAIQDQIIETKNYQKHITKTLNSDTCRKCNSCPETIQHITSACKAIAQTDYKHRHDQVANIIHQKLAYREKLINSMQPYYKYNPETVLENVSAKLYFDRAILTDRTVHCNRPDITLINKTNKTGFLIDIAVPNTHNLQSTIAEKLSKYTELKDEITRIWHLQKVIIVPIVLSATGVIPKQLHQSLNSLDLPAHSYKLLQKAVILNTCRIVRKFLKNEQDLTPVQNTQTHTNPEPDVHLA

SEQ ID NO: 16871 - protein, 801 aa, Pachythone gigas
MHFDHIEIDMFKKVLLNLHNWKAPGSDKIHSYWYKKFTNIHCYLYNHIDNFIQNPNSMPPYITEGITYMIPKDSSDRRNPAKYRPITCLQTLYKIITSCISEIIYIHINTNKILAEQQKGCRKYSQGCKEQLIIDSVVLKQVQKKKSNLYTMYIDYKKAYDSIPHSWLLQVLEIYKINPQIITFLKTIMGNWTTRLKVTTPTNTIETESIKIKRGIFQGDALSPLWFCMALNPLSNILNNTAIGYHLQRKDTDGQTDVRDTINHLLYMDDIKLYADTENHLFQLATLTEKYSNDIKMEFGIDKCKINSVKAGQNYQHHFTLETGKRIEPMNEQETYKYLGYNQLLQICHKDTKDKLKQQFQHRLNTILKTQLNSRNLIKAINTFAISILTYSFGIINWSKSDLKNIQRKINTTLTKFRKHHPRSCLQRLTLPRKEGGRGIIDITNLHNRQITILRKYFFSKVHNSDLHNTIVQNDSKLTPLNLKDNITQNNEKLTDNKTKISEWSLKSLHGRHRHDLSQINVDKEASNAWLRCGELFPETEGFIMAIQDQVIETKNYQKHIIKSITSDTCRKCNSCPETIQHITGACKAITQTDYKHRHDQIANIIHQKLAHKYKFITTQQPYYKYNPETVLENTTTKLYYDRAILTDRTIHYNRPDITLINKNEKTGYLIDIAVPNTHNLQTTIAEKLSKYTELRDEITRLWHLQKVTIVPIVLSSTGVIPKQLHQSINTLDLPPNIYKQLQKAAILNTCRIVRKFLQIDTETSSPQIVIPTQPNTNTITHHTTETTDTLLHADNRQFPL

SEQ ID NO: 16872 - protein, 1133 aa, Parapoynx stratiotata
MRWHNEQNEFLILAYYRITQLETNKTCYRKPLHEAFTNNFPSLAHLTEQRIADQRRAIIQNKYICDERLREIKQQVIQETSIYDNNLSTTPDRDTQNTNSDLDRDTQFLNHIESNIFEESLPHSQPFLRNEHIDITFSEAMQYFKDTNPTNRNYIPRQKSSIKLLKIVNYINEKILPENVSSETDFNTLQTTIYCAAWTVAKVNGAKLSLESTVRPRVSERNDKPNWQKRLERRLEDLRVKIGRLTQYIKGNTNINLERQVNNILIQYSIHSVHEEPNTNLSHTLDTLKQKLAVISGRLNRYKACTLRKQQNNQFNNNEKQFYRNIRQSSKNLQENTHNSEHTPHTEDLHSFWAGIWEVPDQHNTEAEWIKTELDINNSTPDMSFEHIPIDIFNKVVTNLHNWKAPGSDFIHSYWYKKFTYIHGHLLKYLNQFIEDPTTIPTYITLGTTYMIPKDRNDPKNPAKYRPITCLQTLYKILTSCLSELIYKHIDENNILTEQQKGCRKFSQGCKEQLIIDSVILNQVKKNKSDLFTMYIDYKKAYDSVPHSWLVKVLEIYKIHPKILAFLKSVMLNWTTRLKLSTPSATIETEPIKIQKGIFQGDALSPLWFCLAINPLSNMLNRTNVGYHLQKNYLDRTTDTTNVINHLLYMDDIKLYAETEDNLNVLANRTEQFTCDIKMEFGIDKCKINSVKSGKTFQHYYNLGTGEQIESLDEQDTYKYLGYNQSRQIQQKETKYKLTLQYRHRLNTILKTQLSSRNTIKAINTFAIPLLTYSFGTINWTKSDLKNLQRIINTTMTKYRKHHPRTCLQRLTLPRKEGGRGLIDIVNLHNKQISNLRQYFFDKSKSSNLYKAIVENDKKLTPLNLYDSAKQNNGILIDNKTKHAEWAKKSLHGRHHHDLSQSNVDKEASNAWLSSGELFPETEGFMLAIQDQIIETKNYQKHITKTLNSDTCRKCNSCPETIQHITSACKAIAQTDYKHRHDQVANIIHQKLAYREKLINSMQPYYKYNPETVLENVSAKLYFDRAILTDRTVHCNRPDITLINKTNKTGFLIDIAVPNTHNLQSTIAEKLSKYTELKDEITRIWHLQKVIIVPIVLSATGVIPKQLHQSLNSLDLPAHSYKLLQKAVILNTL

SEQ ID NO: 16873 - protein, 1210 aa, Tuta absoluta
MTRRTSTLSTSSTLAGVVQEVNSDLELAPTSSATTTRRRWTPEMNMFILRTYLQLTELDTDTKTYLEPLHLKFIERYPDMEASRQRIGDQRRAIIRNKLLPKSTIDQIYKDVKEELDNFRKSVPNLNNTHASISSYSNSTHSQPFTSSILLNTHPSQNTTRMRWTTEYNETIMRAYYKLTHLGTNRTTYRKPLHDAFVATFPSLSHVTEQRVSDQLRAIINNKYISDDRLHIIKQQVADELSLDISTSNGDNNNEIFVSEEPNQERTETTFLNDIELIIPDEPITNQQTIKRDLRIDETFKQTYEYFKNTDPTARCFIPKQKTSKKLAAIVDYLNKVTLPENVNLETDFNTLQTNIYCAAWTAAKINGAKINLEPIDRSRPAQNVNKPHWERRLERRLEDLRTKISRLTHFINGTRSLQLTRQVDEIIEQYKVHSVHEEQNTQLTHTLDTLKQKLAVITGRLRRYKACTLRKQQNNKFKNNESQFYRNLRQDTTNTQDSSIPNHTDDIPDPEDLRTFWAGIWEQPVQHNTDAEWIQIETEHHNTTTQMIFEHIPIDTFQKVLRNLHNWKAPGSDNIHSYWYKKFTSINGYLHNYLNMFIEDPSLIPSYITVGTTFMISKDRNEPSNPAKYRPITCLQTLYKILTACISELIYKHVDDNNILAEQQKGCRKFSQGCKEQLVIDSVILKQVQKTKSDLYSMYIDYRKAYDSVPHSWLLEILNIYKIHPKIINLLKTTMENWITKLKLTTSTKTIETEPIKIQRGIFQGDALSPLWFCLALNPLSNILNSTPLGYQLTYAENERQTDRRQTINHLLYMDDIKLYADNEEQLYQLANLTELFTCDIKMEFGIDKCKINSIRTGQSYKHNYTLESGENIESLDEQETYKYLGYQQSLQIHYKETKEKLKQLFRHRLNSILKTQLYSRNTFKAINTYAIPILTYSFGIINWTKTDLKALHRTINTTLTKFRKHHPRSCLQRLTLPRKEGGRGLIDITNLHNRQIITLRKYFFNKTESSTLHKAITQNDHKTTPLNLSDNTPQNNELLIDDKTKTAEWARKSLHGRHHHDLNHTNVDKEASNAWLTHGGLFPETEGFIIAIQDQVIETKNYQKHITKTLTSDTCRKCNSCPETIQHITSACKSIAQTDYKHRHDQVANVIHQKLAYQKDLIKSIQPYYKYNPESVLENSTTKLYFDRAILASQARGRHLHGKHRLRS

SEQ ID NO: 16874 - protein, 1420 aa, Autographa pulchrina
MEMSKRVYDLRSLPGGRRGTSGADAGCHSMRTIGGERLSRRASPDKNTTAGRRVLSKRAHDVEATAEFSGDDTCSLFSSIPSTRPSYMTRSLSSSSSVLDSVVQEVTFDHDLAPTTSVSHTRRRWTSEMNEFILRTYLYLTLLDTDTKTYLEPLHLKFIEKFPNMQVSKQRIGDQRRAVVRNKLLPQETIDKIYNEVKEELDQTQRNINTTSIHTPALGNLSILQSSETSNNQGTSQVRMRWTNEYNEAIMRAYYRVTSLGTNETAYRKPMHQDFISKYPALAHLSEQRIADQRRAILNNKYISDARLNSLKLEVSVELGLNNNNTSNDHHEDTNTLNCNSNNNNTNIQVVRTFTEELPFAVNLSQFSNNGPINPSRIEPNTLTPQETRNPEIDVTFKQAFEFYKNTSPTDRVYIPKQKPSKNLARIISYMNQVVIPENISVDTDFFTLQTVIYSAAWTTAKINGTKLALEPTDNLRDIRKESMPNWQKRMERKMNELRSKIGRVTQFINGNRSRKVTNHFNNIIKQYKTHTIHEEPNTQAIHTLDTLKQKLFVVSGRLQRYKACTLRKQQNFQFSHNEKHFYRNIRKTTSNIQQNSVSSNDNNSPDPETLHNFWSRIWENPVSHNDHAGWILTEEANTNENTQAMAFENITPAIFHKVLNRLHNWKAPGSDYIHSYWYKKFTSVHCLLCNFINSFIQDPNLIPAYITVGTTYMLPKDCNDLADPAKYRPITCLQTLYKIVTSCLSELIYEHVDANDILAEQQKGCRKFSQGCKEQLIIDSVILNKIHKTKSDLYSMYIDYKKAYDSVPHSWLVKVLQLYKIHPKIIVFLETLMSHWTTVLRLTTTNGTIDSNPIKIQRGIFQGDALSPLWFCLALNPLSNILNSTGLGTPLTHTVESHTEKNILSHLLYMDDIKLYAQSESELYKLAKVTEQFTIDIKMEFGIDKCKINSIKAGRNHQHQYTLATLEHIEPLGEHETYKYLGYSQASQIQYKETKYKLKQQFQHRLNVILRTNLYSRNIVKAVNTFAIPVLTYSFGVINWTKSDLKDIQRKINTTLTKFRKHHPRSCLQRLTLPRKEGGRGLIDISNLHSRQVTTLRQYFFAKAESSTLHKLVVCNDRQLTPLNLKDPLEQKNEKQTDDKTKILEWSQKSLHGRHRQDLCQINVDKDASNAWLSRGELFPETEGFMVAIQDQVIETRNYRKYIIKNLANDKCRKCNSAPETIQHITGACKSIAQTDYKHRHDQVANIIHQKLAHQYKFVDSIVPYYKYSPETVLENHTTKLYFDRAILTDRTIHFNRPDITLINKTNKTGYLIDIAVPNTHNLQTTIAEKLSKYTELRDEITRIWHLQKVIIVPIVLSTTGVIPCQLHQSFCTLNLAPNTFHLLQKAVILNTCRIVRKFLQCEPETSQPTNTLTIFSAA

SEQ ID NO: 16875 - protein, 899 aa, Drepana arcuata
MEQYKNHSVHEEPNTQLAHVLDTLKQKLSVTSSRLRRYTACTLRKQQNTQFAHNEKQFYRNLKETSKSTHTNRDNNVNETPDKIDFQNFWSQIWEEPSQHNTQADWIGREVSSMSQVETMTFEHIEPEVFHKVIQNLHNWKSPGSDYIHSFWYKKFTTVHQILLKHINDFIKDPSTIPPYLTAGITFMIPKDPNDPSNPAKYRPITCLQTLYKIMTSCISELIYEHIDTNCILAEQQKGCRKKCQGCKEQLIIDSVILKKVQKTKSNLFSMYIDYKKAYDSVPHSWLLNILEIYKIHPKIIALLRSMMSQWNTRLRITTSNSTIETNPIQINKGIFQGDALSPLWFCLALNPLSNILNSRTLGFPLQYKTTDGQTQQNIVNHLLYMDDIKLYAESESQLHELAQLTEQFTNDVKMEFGLDKCKINSIRSGRSYQLQHTLQSGEQIESLDEREVYKYLGYNQSLLINYKDIKQKLIQQLKHRLNTILKSQLYAKNTVKAINTFAIPILTYSFGVINWSRSELQALQRTINTTLTKHRKHHPRACLQRQTLPRKEGGRGLIDIINLHNKQITTLRQYFYDRRETSILHNSIVENDQKSSPLNLSDSSTQNNETHIDNKTKITEWTQKSLHGRHRQDLCQPNVDKEASNAWLSRGKLFPETEGFMIAIQDQVIETRNYQKYIIKNLASDSCRKCSSAPETIQHITGACKTIAQSDYKHRHDQVANIIHQKLAHQYNLINSLVPYYKYTPNTVLENVTTKLYFDRAILTDRTIHYNRPDITLINKSNKTGYLIDIAVPNTHNLQNTIAEKLSKYTELKEEVARLWHLQKVTIVPIVISTTGVVPKQLHQSLTTLNLHQNTYHLLQKAAILNTCRLVRKFLQTEQDQSTQHTHPITSNLTGRNT

SEQ ID NO: 16876 - protein, 1408 aa, Drepana arcuata
MEQNKKVYDLRSLPGGRRGAPGADAGCLSSRDIGGGALSRRAPASQYVTAGRRELSRRARDVETTADPMGDDTSSLFSSIPSTRPSYVTRSTSTLSTTSTLDSVVQDVNLDMNLAPTQSTSNRRRRWTPDMNKFILRTYLQLTALDTDTKTYLEPLHLKFIEKYPDVEVSRQRLGDQRRAIVRNKLLSQSTIDQIYNDVKEELDHLQTQTVTQTQTHFQNIQNTQTQQTPPNIRNTTENTPQTRIKWTNEHNETIMRSFYQITNLDTNRTAYRKLLHENFICAFPALAHLSIQRIADQKRAIINNKYIDDDRLNIIKQQVSEQLELNHQNHERSLENSIEDQQAPVDNDEEFLNNILIDLPEEPSSNSQTELARQHSIDETFQQALEFYKITEPTSRTYIPKQKPSKRLSKIVDYINNTILPENVNKEIDFRTLQTIIYCAAWTAAKTNGARITLQLTHQTSKINIEYKPRWQKRLELKVEDLRTKIARVTQFINGNRSRKLTKHVDNIMEQYKNHSVHEEPNTQLAHVLDTLKQKLSVTSSRLRRYTACTLRKQQNTQFAHNEKQFYRNLKETSKSTHTNRDNNVNETPDKIDFQNFWSQIWEEPSQHNTQADWIGREVSSMSQVETMTFEHIETEVFHKVIQNLHNWKSPGSDYIHSFWYKKFTTVHQILLKHINDFIKDPSTIPPYLTAGITFMIPKDPNDPSNPAKYRPITCLQTLYKIMTSCISELIYEHIDTNCILAEQQKGCRKKCQGCKEQLIIDSVILKKVQKTKSNLFSMYIDYKKAYDSVPHSWLLNILEIYKVHPKIIALLRSMMSHWNTRLRITTSNSTIETNPIQINKGIFQGDALSPLWFCLALNPLSNILNSRTLGFPLQYKTTDGQTQQNIVNHLLYMDDIKLYAESESQLHELAQLTEQFTNDVRMEFGLDKCKINSIRSGRSYQLQHTLQSGEQIESLDEREVYKYLGYNQSLLINYKDIKQKLIQQLKHRLNTTLKSQLYAKNTVKAINTFAIPILTYSFGVINWSRSELKALQRTINTTLTKHRKHHPRACLQRQTLPRKEGGRGLIDIINLHNKQITTLRQYFYDRRETSILHNSIVENDQKSSPLNLSDSSTQNNETHIDNKTKITEWTQKSLHGRHRQDLCQPNVDKEASNAWLSRGELFPETEGFMIAIQDQVIETRNYQKYIIKNLASDSCRKCSSAPETIQHITGACKTIAQSDYKHRHDQVANIIHQKLAHQYNLINSLVPYYKYTPNTVLENVTTKLYFDRAILTDRTIHYNRPDITLINKSNKTGYLIDIAVPNTHNLQNTIAEKLSKYTELKEEVARLWHLQKVTIVPIVISTTGVVPKQLHQSLTTLNLHQNTYHLLQKAAILNTCRLVRKFLQTEQDQSTQHTHPITSNLTGRNT

SEQ ID NO: 16877 - protein, 1408 aa, Drepana arcuata
MEQNKKVYDLRSLPGGRRGAPGADAGCLSSRDIGGGALSRRAPASQYVTAGRRELSRRARDVETTADPMGDDTSSLFSSIPSTRPSYMTRSTSTLSTTSTLDSVVQDVNLDMNLAPTQSTSNRRRRWTPDMNKFILRTYLQLTALDTDTKTYLEPLHLKFIEKYPDVEVSRQRLGDQRRAIVRNKLLSQSTIDQIYNDVKEELDHLQTQTVTQTQTHFQNIQNTQTQETPPNIRNTTENTPQTRIKWTNEHNETIMRSFYQITNLDTNRTAYRKLLHENFICAFPALAHLSIQRIADQKRAIINNKYIYDDRLNIIKQQVSEQLELNHQNHERSLENPIEDQQAPVDNDEEFLNNILIDLPEQPSSNSQTELARQHSIDETFQQALEFYKITEPTSRTYIPKQKPSKRLAKIIDYINNTILPENVNKEIDFRTLQTIIYCAAWTAAKTNGARITLQLTHQTSKINIEYKPRWQKRLELKVEDLRTKIARVTQFINGNRSRKLTKHVNNIMEQYKNHSVHEEPNTQLAHVLDTLKQKLSVTSSRLRRYTACTLRKQQNTQFAHNEKQFYRNLKETSKSTHTNRDNNVNETPDKIDFQNFWSQIWEEPSQHNTQADWIGREVSNMSQVETMTFEHIEPEVFHKVIQNLHNWKSPGSDYIHSFWYKKFTTVHQILLKHINDFIKDPSTIPPYLTAGITFMIPKDPNDPSNPAKYRPITCLQTLYKIMTSCISELIYEHIDTNCILAEQQKGCRKKCQGCKEQLIIDSVILKKVQKTKSNLFSMYIDYKKAYDSVPHSWLLNILEIYKIHPKIIALLRSMMSQWNTRLRITTSNSTIETNPIQINKGIFQGDALSPLWFCLALNPLSNILNSRTLGFPLQYKTTDGQTQQNIVNHLLYMDDIKLYAESESQLHELAQLTEQFTNDVRMEFGLDKCKINSIRSGRSYQLQHTLQSGEQIESLDEREVYKYLGYNQSLLINYKDIKQKLIQQLKHRLNTTLKSQLYAKNTVKAINTFAIPILTYSFGVINWSRSELKALQRTINTTLTKHRKHPPRACLQRQTLPRKEGGRGLIDIINLHNKQITTLRQYFYDRRETSILHNSIVENDQKPSPLNLSDSSTQNNETHIDNKTKITEWTQKSLHGRHRQDLCQPNVDKEASNAWLSRGELFPETEGFMIAIQDQVIETRNYQKYIIKNLASDSCRKCSSAPETIQHITGACKTIAQSDYKHRHDQVANIIHQKLAHQYNLINSLVPYYKYTPNTVLENVTTKLYFDRAILTDRTIHYNRPDITLINKSNKTGYLIDIAVPNTHNLQNTIAEKLSKYTELKEEVARLWHLQKVTIVPIVISTTGVVPKQLHQSLTTLNLHQNTYHLLQKAAILNTCRLVRKFLQTEQDQSTQHTHPITSNLTGRNT

SEQ ID NO: 16878 - protein, 1439 aa, Ochropleura plecta
MEMSNKKIYNLRSLPGERRGASGADAGCHSMRTIGGEELSKRAPTEKNVTAGRSDLNRRAHYVEATADSTGDDTISLFSSIPSTRPSYMTRRKASLSTTSTLDSVVRDVIPDSEIAPTTSASTKRRRWTPEMNMFILRTYFQLTLLDTDKRTYLEPLHLKFVEKFPDMQVSRQRIGDQRRAIINNKLLPQKAIDDIRKEVEKELDQLQSNHFTLQTQHTLDCNQQICTPTQIPPTTIEAHSTQNKTQTRMRWTSEQNEAIMRSYYRVTDLGTNETVYRKRMYDDFVSNFPSLAHLSEQRIADQRRAIINNKYISNDKLNSLKAEVAKELGPQTLNSHNNRDRFAGTINRNITNSQLTNRTEINSVEELTLNSQTSDNFELHTATDALPNPQINPERDVLIDDTFQQAFDFFKETNPTNRIYIPKQKPSKNLARIISYLNKITLLENINNDTDFNTLQTIIYCSAWTAAKVNGARITLEPRESIRVPKTEYKPKWQRRLEQKIKDLRTKIGRMTQFMNGNSSRKLRKHVNKIIKQYKTHTIHEEPNTKAAHTLDTLKQKLCVVKGRLERYKACTLRKQQNTQFIHNEKLFYRNIRQTTTNIQHNIPHDSENTTPDPETVKQFWANIWEQPVCHNSQADWIQSELSNNNSNIQPMVFEHISPEIFHKVLSKLHNWKAPGSDHIHSYWYKKFTAIHCYLYNFINAFIQDPTSIPSFITSGTTFMIPKDHNDLSNPAKYRPITCLQTLYKIITSCISELIYQHIDTNNILAEQQKGCRKFSQGCKEQLIIDSVVLKKVQKTKSDLFTMYIDYKKAYDSVPHSWLMQVLEIYKIHPSIIAFLKIAMTTWTTVLRLTTPTKTIDTSPIKIQRGIFQGDALSPLWFCLALNPLSKILNSTSLGIPLNSNVDGQEETHGSILNHLMYMDDIKLFAKSQIQLEELANLTEKFTDDIKMEFGIDKCKINSVIAGQNYQHQYTLATGEQIEPLNEQETYKYLGYIQSSQIHYKDIKQKLKQQFQHRLNTILKTQLHSRNTIKAINTFAIPVLTYSFGIVNWTKTDLKNLQRKVNTTMTKFRKHHPRSCVQRLTLPRKEGGRGLIDILNLHNRQITTLRQYFFAKTETSTLHKLIAQNDKHLTPLNLKDTTEQRNERVTDDKMKCLEWTQKSLHGRHRQDLCQPNVDKEASNAWLNRGELFPETEGFMLAIQDQIIETKNLRKHIIKNLPNDTCRKCNSSAETIQHITGACKSIAQTDYKHRHDQVANVIHQKLAHQYNLIDTVVPYYKYTPEIVLENTTTKLYFDRALFTDRTIHYNRPDITLINKINNTGFLIDIAVPNTHNLQTTIAEKLSKYTELKDEITRLWRLQKVTIVPIVISTTGVIPKQLHQSLSSLNLPATTYHLLQKAVILNTCRLVRKFLQCEIDNISQSAHNRVESISIPAPTDEHLA

SEQ ID NO: 16879 - protein, 1159 aa, Ochropleura plecta
MYDDFVSNFPSLAHLSEQRIADQRRAIINNKYISNDKLNSLKAEVAKELGPQTLNSHNNRDRFAGTINRNITNSQLTNRTEINSVEELTLNSQTSDNFELHTATDALPNPQINPERDVLIDDTFQQALDFFKETNPTNRIYIPKQKPSKNLARIISYLNKITLLENINNDTDFNTLQTIIYCSAWTAAKVNGARITLEPRESIRVPKTEYKPKWQRRLEQKIKDLRTKIGRMTQFMNGNSSRKLRKHVNKIIKQYKTHTIHEEPNTKAAHTLDTLKQKLCVVKGRLERYKACTLRKQQNTQFIHNEKLFYRNIRQTTTNIQHNIPHDSENTTPDPETVKQFWANIWEQPVCHNSQADWIQSELSNNNSNIQPMVFEHISPEIFHKVLSKLHNWKAPGSDHIHSYWYKKFTAIHCYLYNFINAFIQDPTSIPSFITSGTTFMIPKDHNDLSNPAKYRPITCLQTLYKIITSCISELIYHHIDTNNILAEQQKGCRKFSQGCKEQLIIDSVVLKKVQKTKSDLFTMYIDYKKAYDSVPHSWLMQVLEIYKIHPSIIAFLKIAMTTWTTVLRLTTPTKTIDTSPIKIQRGIFQGDALSPLWFCLALNPLSKILNSTSLGIPLNSNVDGQEETHGSILNHLMYMDDIKLFAKSQIQLEELANLTEKFTDDIKMEFGIDKCKINSVIAGQNYQHQYTLATGEQIEPLNEQETYKYLGYIQSSQIHYKDIKQKLKQQFQHRLNTILKTQLHSRNTIKAINTFAIPVLTYSFGIVNWTKTDLKNLQRKVNTTMTKFRKHHPRSCVQRLTLPRKEGGRGLIDILNLHNRQITTLRQYFFAKTETSTLHKLIAQNDKHLTPLNLKDTTEQRNERVTDDKMKCLEWTQKSLHGRHRQDLCQPNVDKEASNAWLNRGELFPETEGFMLAIQDQIIETKNFRKHIIKNLPNDTCRKCNSSAETIQHITGACKSIAQTDYKHRHDQVANVIHQKLAHQYNLIDTVVPYYKYNPEIVLENTTTKLYFDRALFTDRTIHYNRPDITLINKINNTGFLIDIAVPNTHNLQTTIAEKLSKYTELKDEITRLWRLQKVTIVPIVISTTGVIPKQLHQSLSSLNLPATTYHLLQKAVILNTCRLVRKFLQCEIDNISQSAHNRVESISIPAPTDEHLA

SEQ ID NO: 16880 - protein, 810 aa, Leucinodes orbonalis
MPFDQIPIDTYRKVLKNVHSWKAPGSDYIHSYWYKKFTSIHGLLHNHLNKFLEDPSTIPTFITHGTTYMIPKDYNDPNNPAKYRPITCLQTLYKILTSCISELIYKHITENNILAEQQKGCRKFSQGCKEQLIIDSVILKRVQKTKSNLFTMYIDYKKAYDSVPHSWLLQILEIYKIHPKIITLLKTTMTNWTTRLKLITPTETIETDPIKIQRGIFQGDALSPLWFCLAINPLSNLLNSETVGHHLQYLPTDNNRYTGLKENITHLLYMDDIKLYADDEEQLNRLTNLTEQFTNDIRMEFGIDKCRINSVIAGQNYQHHYTLRTGEQIEPLDEQDTYKYLGYNQSRQIQHKESKQTLKQQFRHRLNTILKTQLYSRNTTKAINTFAIPVLTYSFGILNWTKSDLKSLQRIINTTMTKFRKHHPRSCLQRLTLPRKEGGRGLIDITNLHNRQIITLRQYFFNKSETSTLHNAIVKNDLKFTPLNMQDSSEQNNEKLINDKTKLDEWARKSLHGRHRHDLNHTNVDKAASNAWLSRGELFPETEGFIMAIQDQVIETRNYQKHIIKSIQSDTCRKCNSCSETIQHITGACKTIAQTDYKHRHDQVANIIHQKLAYQQKLITSIKPYYKYNPESVIENSTTKLYFDRAILTDRTIHYNRPDITLIDKSNKTGFLIDIAVPNTHNLQNTIAEKLNKYIELKDEITRLWHLEKVTIVPIVLSTTGVIPKQLHQSLKTLNLTPNTYYLLQKAVILNTCRIVRKFLQIESASPQPNTHRPAQNISHLSHDLLGTQTISQSTQRQISFYNQMIPSRP

SEQ ID NO: 16881 - protein, 991 aa, Leucinodes orbonalis
MDLKISLEPSEISRRTQKEHRPHWQSRLERKIEDLRTKIGRITHFINGSRNQNLQKHVNNIVQQYKIHSVHEEPNTQLTHTLDTLKQKLAVVSGRLRRYKACTLRKQQNNQFINNEKQFYRSIRQTTTNIHNIHEINNRNKHPDPKDLHNFWTGIWEQPVKHNVQADWIQNETFKHNATIDMPFDQIPIDTYRKVLKNVHSWKAPGSDYIHSYWYKKFTSIHGLLHNHLNKFLEDPSTIPTFITHGTTYMIPKDYNDPNNPAKYRPITCLQTLYKILTSCISELIYKHITENNILAEQQKGCRKFSQGCKEQLIIDSVILKRVQKTKSNLFTMYIDYKKAYDSVPHSWLLQILEIYKIHPKIITLLKTTMTNWTTRLKLITPTETIETDPIKIQRGIFQGDALSPLWFCLAINPLSNLLNSETVGHHLQYLPTDNNRYTGLKENITHLLYMDDIKLYADDEEQLNRLTNLTEQFTNDIRMEFGIDKCRINSVIAGQNYQHHYTLRTGEQIEPLDEQDTYKYLGYNQSRQIQHKESKQTLKQQFRHRLNTILKTQLYSRNTTKAINTFAIPVLTYSFGILNWTKSDLKSLQRIINTTMTKFRKHHPRSCLQRLTLPRKEGGRGLIDITNLHNRQIITLRQYFFNKSETSTLHNAIVKNDLKFTPLNMQDSSEQNNEKLINDKTKLDEWARKSLHGRHRHDLNHTNVDKAASNAWLSRGELFPETEGFIMAIQDQVIETRNYQKHIIKSIQSDTCRKCNSCSETIQHITGACKTIAQTDYKHRHDQVANIIHQKLAYQQKLITSIKPYYKYNPESVIENSTTKLYFDRAILTDRTIHYNRPDITLIDKSNKTGFLIDIAVPNTHNLQNTIAEKLNKYIELKDEITRLWHLEKVTIVPIVLSTTGVIPKQLHQSLKTLNLTPNTYYLLQKAVILNTCRIVRKFLQIESASPQPNTHRPAQNISHLSHDLLGTQTISQSTQRQISFYNQMIPSRP

SEQ ID NO: 16882 - protein, 1333 aa, Leucinodes orbonalis
MTRRTSTLSSTSTLDSVVQEVNPDCELAPTPSAPQTRRRWTPTMNTFILRTYFQLTSLDTDRKTYLEPLHLKFIEKFPNMKVSRQRVGDQRRAIIRNKLLPQQAIDQIYNEVREELNHLQTSLSSFTQALQQPSQTLQTQTRMRWTNEQNETIMRIYYRITELETNKTNWRQQLHAAFKTAFPSLEQLSEQRVADQKRAIICNKYISENRLNEIRNEVSKEIGINHNNDDSNIQNSFNEDIHTEFLNKIQLNSSEESPTNPPQQAQQRNLLIDETFQRAYEYFKDTDPTKRNFIPKQKSSKKLATIVDYLNKITLPENTNLETDFKTLHVIVYSAAWTVAKINGSKISLEPSEISRRTQKEHRPHWQSRLERKIEDLRTKIGRITHFINGSRNQNLQKHVNNIVQQYKIHSVHEEPNTQLTHTLDTLKQKLAVVSGRLRRYKACTLRKQQNNQFINNEKQFYRSIRQTTTNIHNIHEINNRNKHPDPKDLHNFWTGIWEQPVKHNVQADWIQNETFKHNATIDMPFDQIPIDTYRKVLKNVHSWKAPGSDYIHSYWYKKFTSIHGLLHNHLNKFLEDPSTIPTFITHGTTYMIPKDYNDPNNPAKYRPITCLQTLYKILTSCISELIYKHITENNILAEQQKGCRKFSQGCKEQLIIDSVILKRVQKTKSNLFTMYIDYKKAYDSVPHSWLLQILEIYKIHPKIITLLKTTMTNWTTRLKLITPTETIETDPIKIQRGIFQGDALSPLWFCLAINPLSNLLNSETVGHHLQYLPTDNNRYTGLKENITHLLYMDDIKLYADDEEQLNRLTNLTEQFTNDIRMEFGIDKCRINSVIAGQNYQHHYTLRTGEQIEPLDEQDTYKYLGYNQSRQIQHKESKQTLKQQFRHRLNTILKTQLYSRNTTKAINTFAIPVLTYSFGILNWTKSDLKSLQRIINTTMTKFRKHHPRSCLQRLTLPRKEGGRGLIDITNLHNRQIITLRQYFFNKSETSTLHNAIVKNDLKFTPLNMQDSSEQNNEKLINDKTKLDEWARKSLHGRHRHDLNHTNVDKAASNAWLSRGELFPETEGFIMAIQDQVIETRNYQKHIIKSIQSDTCRKCNSCSETIQHITGACKTIAQTDYKHRHDQVANIIHQKLAYQQKLITSIKPYYKYNPESVIENSTTKLYFDRAILTDRTIHYNRPDITLIDKSNKTGFLIDIAVPNTHNLQNTIAEKLNKYIELKDEITRLWHLEKVTIVPIVLSTTGVIPKQLHQSLKTLNLTPNTYYLLQKAVILNTCRIVRKFLQIESASPQPNTHRPAQNISHLSHDLLGTQTISQSTQRQISFYNQMIPSRP

SEQ ID NO: 16883 - protein, 1413 aa, Helicoverpa armigera
MEMSKERRYNLRSLPGERRGASGADAGCHSMRTIGGEALSRRTLTENKVTAGRSELSRRAHGVDATADSSGEDTISLFSSIPSARPSYMTRRTSTLSTSTLASVVQDVNLDSDLAPTASSTTTRKRWTHEILRTYLLLTSLDTDTRTYLEPLHLKFTEKFPDMQVSRQRVGDQRRAIIRNKLIPQQLIEQIYKEVEQELNQLQSNHTLAYTDQSHIQPTPTQLTQIQPSTHGTDNTQRQTRTRMRWTNEQNEAIMRSYYRVTDLGRNETAHRRPMYLDFINTCPSLSHLSEQRIADQRRAIVNNKYIKSDRLDSIKMEVAEELRHNIYNSFNSIRETTLVDETVNTQSANILDISPTIESPPNITPNTIENNPEDIDTMQNPQLNPERDQTIDNTFQQAFQFYKESNPVNRTYIPKQKPSITLAKIINYLNRIIIPENVNADTDFHTLQTVIYCAAWTAAKVNGSKIELQPKETESSIRRQYKPRWQKRLERKRNDLRSKIGRMTQYINGNRSNRLIKRVNAIVKQYKIHTIHEEPNTQIIHTLDTLKQKLAVVTGRLKRYSACTQRKQQNFQFMHNEKLFYRNLKHTTSNSHENHQTSEGRNNVDPDTLQSFWAGIWERPVEHNIQAEWIQTEITNTNTNVQEMVFEHVSPDIFQKVLARLHNWKAPGSDNVHSYWYKKFTAVHGCLHNHINKFIQNPDTTPPYITLGTTYMIPKDSNDLSNPAKYRPITCLQTLYKIITSCISELLYQHITENNILAEQQKGCKRFSQGCKEQLLIDSVVLKKVLKAKSDLFSMYIDYKKAYDSVPHTWLIQVLEIYKVHPILIHFLKTTMTTWTTVLRLTTTTETLHTDPIRIQRGIFQGDALSPLWFCLALNPLSNILNSTSLGTPLYSKADDRNHHLTQNNVLNHLMYMDDIKLYAATENQLHQLANLTEQFTNDIKMEFGIDKCKINSVKVGQNYQHHYTLETGSQIEPLNEHDTYKYLGYAQSRQINYKDTKHKLQKQFQHRLNTILRTQLYSRNTIKAINTFAIPVLTYSFGVINWNKTDLKNLQRKINTTLTKFRKHHPRSCLQRLTLPRKEGGRGLIDILNLHNKQITTLRQYFYTKSESSTLHKLITQNDLRFTPLNLNDTNTQRNEKITDDKTKVLEWTQKSLHGRHRLDLCQENVDKDASNAWLRRGELFPETEGFMIAIQDQVIETRNYRKYIIKNLTNDNCRKCNSSPETIQHITGACKSIAQTDYKHRHDQVANVIHQKLAHQYKLIDSIIPYYKYNPETVLENSSTKLYFDRAILTDRTIHFNRPDVTLIDKTNKTGYLIDIAVPNTHNLQNTIAEKISKYTELKEEIARLWHLQKVVIVPIVLSTTGVIPTQLHQSLNSLNLPPNTYHLLQKAVILNTCRLVRKFLQCEADNTNP

SEQ ID NO: 16884 - protein, 1213 aa, Racta chiria
MQVSPQRVGDQRRAIIRNKLLPQNVIDQIFNQVKEEISSKQIYTTGIQQTIVADNLGQTRTRMTWLNHHNEAIMKIYYRITSLETNRTMYRKTLHEEFVKIFPALSHINEQRIADQRRAIVKYKYFSENKLEEIKKEIAEELSTDNTSSRHEPNTDNSNLEAGFLSSIELELQNEHTEQREPERQTYIDETFRDAYQFYKFTDATHRTYIPRQKSSTNLAKIVSYINEILLPEYVTADTDFNTLQLVVYCAAWSAAKINGTKLCLDLSKAPCSDKKDRKPNWQRRLERKLEGLRSKIGKVTQFMKGNRNTKITNQVKNIMEQYKIHSVHEEPNTQLTHTLDTLKQKLSVVSGRLRRYTACTRRKDQNNQFYNNEKQFYRNIRNATTNVQEKRISEENLTPKPEDLRGFWAGIWEQPVNHNDKATWIKEEIIYRDSVIQPMRYEHISIDTLKEVISNLHNWKAPGSDYIHSYWYKKFTSTHTYLHSYINKFIEDPETVPKYITAGTTYMIPKDINDLNNPEKYRPITCLQTIYKIITSCLSHLLYKHIQENNILAEQQKGCRKYSYGCKEQLIIDSVILKQVQKSKSDLYTMYIDYQKAYDSVPHSWLLRSLEIYKVHPNIIKFLKTIMTNWTTRLKLTTSTEIIETSPISIQRGIFQGDALSPLWFCLALNPLSRLLNSTSLGYPLCYTTDGQTDGQTQKYTLNHLLYMDDIKLYAASENQLYELTKLTEEFTDDIKMIFSIDKCKINSIKAGEMYQHQYTLNTGLQIQPLDEQEVYRYLGYNQSLQIQFKDTKLKLKQNFRHRLNTVLKTQLNSRNMIKAINSYAIPILTYSFGVIKWTKSDLKNLQRIINTTMTKFRKHHPRACVQRLTLPRKEGGRGLIDISNLHSRQLTTLRQYFFNRMDTSELHKSVVINDIKATPLNLKDKTSQGNERLTDNKTKIADWAKKSLHGRHHQDLCQPNVDKEASNAWLHRGELFPETEGFLMAIQDQVIETRNYQKYIIKNVVSDRCRMCNSSSETIQHITGACKSIAQTDYKYRHDQVANIIHQKLAQQYNFIKSLLPYYKYNPEPVLENSTSKLYFDRAILTDKTIHYNRPDLTLIDKKNKIGYLIDIAVPNTHNMQNTIAEKFSKYTELKDEITRIWQLNKVIIVPIVISSTGVIPKQLHQSLKTLNLPPNTYIKLQKAAILNTCRLVRKFLQTNQDINFTHNLTT

SEQ ID NO: 16885 - protein, 1444 aa, Helicoverpa zea
MSNERRYNIRSLPGERRGASGAGAGCHSMRTIGGEALSRRALTENTATAGRSELSRRAHCVDATADSTGEDTISLFSSIPSTRPSYMTRRTSTLSSSTLASVVQDVNPDTELASTTGASTKRRKWTDEMNSFILRTYLMLTALDSDTRTYLEPLHLKFIEKFPDMQVSRQRVGDQRRAILRNKLLPQNIVDQIYTEVKEELHQMQTNHIQHTQTSVDHPLELTPAQTLEAPRTLPERQNTQTRTQTRMRWTSEQNEAVMRSYFRVTNLGINETAHRKPMYLDFINSCPSLAHVSEQRVADQRRAIVNNKYISNDRLNAIKLEVAEELRRSNQNPPNRIIIETNIIDHFHNSDNTYTQPANPVIDTNTTTEIAHTEHTEIIPNPQPDSERDQSIDNTFQQAYEFYKATSPVDRIYIPKQKPSKKLAKIINYLNTITIPETVNAETEFHNLQTVIYCAAWTAAKVNGAKITLQPKAVDPGTRQIYKPKWQKRLERKLNDLRSKIGKITQFIKGNRSRKVIKHANKIMKQYKIHTVHEEPNTQAIHTLDTLHQKLSVVTGRLKRYKACTQRKQQNTQFTNNEKLFYRNIRQATSNVHEIHQIGDERNNLDPEAVHNFWTRIWEEPIQHNADTDWIQNELNNNNTNIQPMAFEHISPQVFLKVLSKLHNWKAPGSDHIHSYWYKKFTSVHGYLHTHINSFIQHPESIPAYITAGTTFMIPKDLNDLANPAKYRPITCLQTLYKIITSCITELIYQHIDANNILAEQQKGCRRFSQGCKEQLIIDSIILKKTQKTKSDLFSMYIDYQKAYDSVPHSWLVQILEIYKIHPTLVSFLRTTMTTWSTVLKLNIAGETLHTDPIKIQRGIFQGDALSPLWFCLALNPLSNILNSTSLGIPLNNTHDNVAHPHNSVLSHLMYMDDIKLYAKTESELHHLANLTEQFSNDIKMQFGIDKCKINSVRAGQNYQHYYSLGNGAQIEPLNEQETYKYLGYAQSRQIHFKDTKNKLKQQFQHRLNAILKTQLYSRNTIKAINTYAIPVLTYSFGIINWTKTDLKSLQRKINTTLTKFRKHHPRACLQRQTLPRKEGGRGLIDILNLHNRQIATLRQYFFSKTASSTLHKLITQNDKHFTPLNLTDTNSQKNEEVIDDKTKLLEWSQKSLHGRHRHDLCQTNVDKEASNAWLNRGELFPETEGFMIAIQDQIIETKNFRKHIIKNLTNDTCRKCHSAPETIQHITGACKSIAQTDYKHRHDQVANVIHQNLAHQYKLIDSVVPYYKYNPETVLENPTTKLYFDRAILTDRTVHFNRPDITLIDKVNRTGFLIDIAIPNTHNLQTTIAEKLSKYTELKDEISRLWHLQKVTIVPIVLSTTGVIPKQLHQSLTSLNLPPYTYHLLQKAVILNTCRLVRKFLQCEIDTTNIYTNTHTHPVTQSIRLNRNSPSITTNPTDDYLA

SEQ ID NO: 16886 - protein, 812 aa, Parnassius apollo
MRKFWAEIWERPVEHNTHANWIQTETRNSNLNIQEMSFEHIPIETFKKVINKLHNWKAPGSDFIHNYWYKKFTSIHSYLYNHLNEFIVHPITMPAYMTVVITYMIPKDHNDHNNPAKYRPITCFQTVYKILTSCVSELIYKHINDNSILAEQQKGCRKFSQGCKEQLIIDSVILKQVQKEKSDLFSMYIDYKKAYDSVPHSWLIEVLKMYKIHPKLIILLTSLMSLWKTILTTPTKMIETNPIKIQRGIFQGDALSPLWFCLAINPLSKLLNSSAVGYPLHYTDNNNIRININHLLYMDDIKLYADIENHLNQLAYLTEQFTNDIKMEFGIDKCKINSITAGHNYQHHFTLETGDKIEPLDENEAYKYLGYNQSRQIHYKYTKEKLKQQFRHRINTILKTQLNSRNTIKAINTFAVPVLTYSFGIINWAKSDLKALQRIINTTLTKFRKHHPRSCLQRLTLPRKEGGRGIIDILNLHNKQITTLRQYFFNKSESSTLYKVIVQNDSKLTPLNLKENTTQKSEKLTDDKTKITEWADKSLHGRHRHDISQNNVDKEASNAWLIHGELFPETEGFMIAIQDQVIETRNYQKHIIKILTSDTCRKCNNCPETIQHITGACKAIAQTDYKHRHDQVANIIHQKLAHQHNVINSIEPYYKYNPESVLENPKTKIYFDRAIFTDRTIHCNRPDITLINKTNKTGYLIDIAVPNTHNLQTTIAEKLSKYAELKDEITRLWHLQKVVIVPIVLSTTGVIPKQLHQSVKTLNLPPNTYKLLQKAVILNTCRIVRKFLQTEEQTIPPILRQIAPQPNTQVTE

SEQ ID NO: 16887 - protein, 1404 aa, Curetis bulis
MSSKGNEYNLRPLPGGRRGASGANARCYSMRSIGDVELSRRTSIKKNITAGRRKLNKRALGEEVTADTLDEDTVSLFSSIPSTCPSYMTRRAATLSTTSTSESVVQDVNFDSELAPTSGSSSKRRQWTTEMNEFIMRTFLQLTALGTDTKSYLEPLHTKFLEKYPDMQVSRQRVGDQRRAIIRNKLLSQETIDKINNEVAESLNQFPTISQTTQHCTHDLTAQHITHIQDAEITSRNTTKTRMRWTNDQNEMIMRAYYRVTNLGSNETAYRKRMYEEFISSYPSLAHLSEQRVADQRRAIINNQYISNSRLNILKQEVSRELELNSPVTIENPTASIFITDNISEFDNALSQISSPNRPEPIIENPPIANLISTRQPQIDETFEQAFQFYKNTTPINRTYIPKQKPSKKLAKIINYINEIILPENTNNNTDFFTLQTVIYCAAWTTAKVNGSKISLQTEDNSQGKQTQHKPKWQKRLELKVEDLRVKIGRLTQFINGNRNRKLIKHVNKIIEQYKTHTIHEETNTQTAHTLDTLKQKLSVVSGRLQRYKACTLRKKQNSQFTHNEKLFYRDLREATTNIHQNITNDTSSSGPSPETLQNFWATIWENPIQHNDEADWIEEQDYSQIQTMTFEHVPTDTFQKVLRCLHNWKSPGSDFIHSYWYKKFTAVHNNLHNFINRFIDDPSTVPSYLTLGKTYLIPKDRSDLSNPAKYRPITCLQTLYKIITSCLSELIYQHIDANNILAEQQKGCRKSSQGCKEQLIIDSVILKKVQKSKSDLFSMYIDYKKAYDSVPHSWLGKVLQIYKIHPTIITFLKTIMTKWTTILRLTTGTDTIETRPIQVQRGIFQGDALSPLWFCLALNPLSDILNSTSLGYPLKSAETDEQHTVLSHLLYMDDIKLFAETKNQLNYLANLTEKFTTDIKMEFGIDKCRINSIRAGQNYQHQYTLGTGEQIEPLDDQETYKYLGYQQSLFIHHKETKQKLTQQFQHRLNAIMRTQLNSRNIFKSINTFVIPLLTYSFGIIHWTKTELKNLQRKINTTLRSFRKHHPRSCLQRLTLPRKEGGRGLIDIYNLHNKQIKIMRQYFSHKANLSIVHKLIAEHDKKFTPLNLKDQTEQNSEILVDDKTKLSEWIQKSLHGRHRQDLCQQNVDKEASNAWLHRGDLFPETEGFMIAIQDQVIETKNYRKFIIKNLASDICRKCNSSPETIQHITGACKSIVQTDYKHRHDQVANVIHQKLAHQFKFLDSVVPYYKYKPQTVLENSTAKLYFDRAILTDRTIHYNRPDITIINKITKIGYLVDIAVPNTHNLQNTIAEKLTKYIELKDEITRLWHLQKVVIVPIVLSTTGVIPKQLHQSLQTLNLPKNTYQLLQKAVILNTCRIVRKFLQVELENTLTPIQPPTHITPPS

SEQ ID NO: 16888 - protein, 1387 aa, Zera sp.
MPWWTFNSLALRGYTMKSTNNIKNIDTSPNYTTRSRTYNLRSLNRKNLPKDDPQIINVSGTYPNSPTSSLFQSPRSSPKSYEDPTTSRSSTVTPMSMDVVQEATAANPVPAMDIKSSRKKWSNEMNIFILRAYFEVTKMETDIRNYLTPLHNKFIDKFPEMQVSRQRLGDQRRAIVRNRLISLEKINHIRNEVEAQLKLIGTSSHIHEHITQNTNRMRWSNEINEFIVRSYFQITSLESNMTGYRQLLKQAVVTKYPNLTHLSEQRISDQHRAIINNKMISLNRLQEIQDEIAIEVNRVERENSQQPLNTNIETLENTENIGNVIENRQNSGNTDINFHEAYTIPLNSTEIENTFKKSLTLFNMTDPTQRPYIPAQKPSRKLWTLTHFFNTTLLPKYLMNCTEFRDVEKVIYCAAYTVCISNDAKIKLNTECKPKHEQQQPKWQRRLQSRVENLRIMIGRLTEYLKGNRSEKLTRHVEKIKEHYKIHAKYDQENTEITQVMDTLKQKLNLVSNRLRRYKQTALRQTQNIQFNSNEKYFYRSLNTLQSNNTKSIDTPSSDELHTYWSNIWGNVKNHTEGDWIKQDKQLMKDISEMQFEQIDLQLLKYVISKTHNWKAPGSDKIHNYWFKKFTSTHSHLLTHINNFIRKPDTLPPYITKGVTYMLPKDKIDTKNPAKYRPITCLQNLYKIITACITELINKHIETNGILAEQQKGCRKFSQGCKEQLIIDSVILKEAQRKKSDLHTMYIDYKKAYDSVPHSWLLQVLEIYKIHPKLITLLKTAMAHWTTQLKLITSIDTIETDTIKIQRGLFQGDTLSPLWFCLAMNPLSNLLKSAAVGYTLKCKDTNSENETCINHLFYMDDIKLYAVEEKHLYQLAEITEKFSTDIKMEFGIDKCRINSIKAGQNYQHSYMLETGEKIEPLGEEETYKYLGYNQSRQIHHKTTKIKLQQQFRHRLNAILKTQLNSRNTVKAINTFAVPVLTYSFGIINWSKSELKTVQRTVNTTMTKFRKHHPRSCVQRLTLPRKEGGKGLIDIVNLHNKQISTLRHYFLNKAESSLLHNVVVKTDKKLTPLNLANRMPQNNEKYIENKTKFAEWARKSLHGRHYHDLSQSNVDKKASNAWLCRGELFPETEGFIMAIQDQVVETKNYQKYITKTLHSDTCRKCSSSPETIQHITGACKAIAQTDYKHRHDQIANIIHQKLAHQSNLITHLQPYYKYTPDSVLENSTSKLYFDRAILTDRTIHYNRPDITLINKCNKTGYLIDIAIPNTHNLQNTIAEKLSKYTELKDEITRLWKLQKVTVVPIVLSSTGVIPIQLHQSIKTLNLPQYTYHLLQKAAILNTCRIVRKFLQKDNENPKSNIEQQAQIDTLFTEQNLPSINTTPDMHLA

SEQ ID NO: 16889 - protein, 1442 aa, Piruna pirus
MRLRSGNQLPQAGTGATRNGESRLEPPSSSCPTYSGGDNVSQSSAQFGTVADDRQYKSPSVHRLPSSNIFPSISRGAPVLQDATERRGLSRRARDVEITAESTSGEDTISLITSIPSTRPSYMTRSTSTQSSVSSLDGVVQDVNFDSEPVPISSVPPKRKRWTSEMNKFILRTYLELTALDTDTKNYLEPLYLKFTEQFPNMQVGRQRVGDQRRAIIRNKLLPIATINEIFNQVKEKLLTSTQSQSHIKTNNTQHQQTQRSNNLTQNRTRMMWQDIHNEAIMKAFYRLTNLETNKTMYRKSLHEDFIKTFPTLSHISEQRVADQRRAIVKNKYFSDEKLEEIKRNIADELQINQSNGSNENISSTDNIDSEVNTNTRVDFLHNIRVNSPVNSNEHIEQTVTERQKHIDETFQVAYKFYKDTEPTNRTYIPKQKPSRNFARIVNYINEITLPENISIDTDFNTLQTLIYCAAWTAVKINGAKLTLETSKTTRPNTRDYRPNWQSRLERRIENLRSKIGRVSQFINGNRNRKISNHVKNIMEQYQIHSVHEEPNTDLTHTLDTLKQKLSVISGRLRRYKACTLRKQQNKQFISNEKYFYRNIKYATTNTQNNNTDTVNRVPNPEDLRKFWATIWEHPVKHNSEAEWIKNEMICNNNIIRQMEFDYIPVDTLKAVINKLHNWKTPGSDYIHSYWYKKLTSTHTHLHKFINEFIQNPETVPSYITIGTTFMIPKDSSECTNPEKYRPITCLQTLYKIITSGISQLLYHHVLENNILAEQQKGCRKFSQGCKEQLIIDSVVLKKVQKTKSDLYSIYIDYKKAYDSVPHSWLLQILEMYKVNPKIIFFLKTVMTKWSTQLKLTTQTDTIETRPISIKRGIFQGDALSPLWFCLALNPLSKLLNSTSLGFPLCNKAEDQTQGNTLNHLLYMDDIKLYAASENELCKLIEQTEEFTSDIKMSFSIDKTKLNSIKAGKIYKHHYTLNTGDQIQALDEQEVYKYLGYNQSRQIQFKDTKLKLKQDFRHRVNTILKTQLNSRNTIKAINTYAIPVLTYSFGVINWTKSDLKNLQRIVNTTMTKFRKHHPRSYLQRLTLPRKEGGRGLIDISNLHNSQISTLRRYFFTKMETSPLHKSVVINDIKSTPLNLHDKTTQPNELITDNNTKIAEWAKKSLHGRHRQDLCQPNVDKEASNAWLNRGELFPETEGFLISIQDQVIETRNYQKYIMKKIVSDNCRKCQSSSETIQHITGACKTIAQTDYKYRHDQVVNVIHQKLAYLYNLINSVQPYYKYTPQPVLENSTNKLYFDRAILTDRTIHFNRPDITLIDKINKIGYLIDVAVPNTHNLQSTITEKLSKYAELRDEVIRIWRLRKVTIIPIVISTTGVIPKQLHQSLRTLNMPPNTYNIIQKAVVLNTCRLVRKFLQTDQDHIITHIPPSAIIPPSSQSTQAGR

SEQ ID NO: 16890 - protein, 1444 aa, Piruna aea
MRLRSGNQLPQAGTGATRNGESRLERPSSSCPTYSGGDNVSQSSAQFRTVAGDRQNESPSVHRLPSSNNFPSVSSGAPVLEDATGRRGLSRRARDVEITAESTSGEDTISLLTSIPSTRPSYMTRSTSTQSSVSSLDGVVQDVNFDSEPAPISSAPPKRKRWTSEMNKFILRTYLELTALDTDTKNYLEPLYLKFIEKFPNMQVGRQRVGDQRRAIIRNKLLPITTINEIFDQVKDKLTSTQSQTLIQTNNNIQQQTQRSDTLTQTRTRMIWQDIHNEAIMKAYYRLTTLETNKIMYRKRLHEDFIKTFPTLSHISEQRVADQRRAIVKNKYFSDEKLEEIKQSIAEELQINQNNCSNENISNTDNIDSEVNTNNTSADFLHNIQVNSPVHSNEHLEQTVTERQKHIDETFQEAYKFYKYTEPTNRTYIPKQKPSKKFARIVNYINEIILPENISINTDFNTLQTIIYCAAWTAVKINGAKLTQEVSKNTRPKTRDRRPNWQRRLERRLEDLRTNIGRVSQFINGNRNRKISNHVKNIMEQYKIHSVHEEPNTHLTHTLDTLKQKLSVISGRLRRYKACTLRKQQNNQFISNEKYFYRSIKQATTNTQNNNSHTVNLVPNPEDLRKFWAGIWEQPVKHNSEAEWIKKEMISNNNTIQPMEFEYVPVETLKAVINKLHNWKTPGSDYIHSYWYKKLTFTHTYLHKFINEFIQNPETVPTYITLGTTFMIPKDSNEMTNPEKYRPITCLQTLYKIITSCISQLLYHHVLENKILAEEQKGCRKYSQGCKEQLIIDSVVLKNVQKTKSDLYTIYIDYKKAYDSVPHSWLVQILDMYKVHPKIIFFLKTVMTKWTTQLKLSTQTDTIETSPISIQRGIFQGDALSPLWFCLALNPLSMLLNSTPFGYPLYNKTDEQTQENTLNHLLYMDDIKLYAASENQLYKLIEITEEFTRDVKMSFSIDKTKLNSMKAGKIYQHNYTLTTGDQIQALDEQEVYKYLGYNQSRQIHFKDTKLKLKQDFRHRVNAILKTQLNSRNTIKALNTYAIPVLTYSFGIINWTKSDLKNLQRIVNTTMTKFRKHHPRSCLQRLTLPRKEGGRGLIDITNLHNSQISTLRHYFFTKMKTSPLHKSIVINDIKSTPLNLQDKTTQPNELLTDNKTKIAEWAKKSLHGRHRQDLCQTNVDKEASNAWLDRGELFPETEGFLMAIQDQIIETRNYQKYIMKKIASDNCRRCHSSSETIQHITGACKTIAQTDYKYRHDQVVNVIHQKLACLYNLINSVQPYYKYNPQPVLENSTNKLYFDRAILTDRTIHFNRPDITLIDKINKIGYLIDVAVPNTHNLQSTITEKLSKYAELRDEVIRIWRLRKVTIVPIVISTTGVIPKQLHQSLRTLNMPPNTYNIIQKAVVLNTCRLVRKFLQTDPDQDHIITHIPPSAIIPPNSQSTQADT

SEQ ID NO: 16891 - protein, 1423 aa, Morvina fissimacula
MEQSKHRYNLRSLLGGRRGAPGAGAGCFSSRDTGGEALSRRTPVTQNVTAGRCELSRRTHGVEATAEIPGDDTNSLFSSIPSTRPSYMTKRTPTLSSTITAEGVVQDVNFDSELVPTSTASQRRRRWTPEMNMFILRTYLQLTALDTDTRTYLEPLHLTFVEKFPEMQVSRQRLGDQRRAIVRNKLLPQNTIDQIFNEVKEELELLQVSLLPTSDTQPRAFKTSNLQRQTRMKWTTEQNETIIRLYYEITQLETNKTAYRQPLHKAFISAFPSLAHLSEQRIADQRRAILSNKYISVTRLNEIKQKVATELPSGWNTLNNDTNTIHATNSTQNNNTENADIQFMNSIKLNLPEEPSDNQTQLEREPIIDETFQQTFQYFKDTSPTSRIYIPKQKPSRKLSHIVHYLNEITLPEQVNIETDFNSLQTAIYCAAWTAAKVNGAKISLEPCTRARPVQNNCIPYWQRRLERRLENLRTKIGRITHFINGSKNRNLEKHVNNIVEQYKIHSVHEEPNMCLTQTLDTLKQKLAVISGRLRRYKECTLRKDQNKQFRNNEKQFYRHLRKTTLNVQESINSSNVNGSPDPEDLHKFWAGIWEQPVKHNSQADWIQTETAKHSTTTPEMSFDHIPIDIYIKVLQNIHNWKAPGSDFIHGYWYKKFTYIQGYLHNYLNAFIENPNALPHYLTLGTTYMIPKHHDEPTNPAKYRPITCLQTLYKILTSCISELIYKHVDDNKILSEQQKGCRKFSQGCKEQLVIDSVILKEVQRTKSDLFTMYIDYKKAYDSVPHSWLIQVLEIYKIHPKIITLLKTSMTNWTTRLKLTTPTTILETDPIKIKRGLFQGDALSPLWFCLAINPLSNKLQSTAVGYKLQCKDTNRQTDISENVNHLFYMDDIKLYADTDKHLHKLAEITEKFSNDIKMEFGIDKCRINSIKVGNNYQHHYVLKTGEIIEPLDEKETYKYLGYNQSQQIQYKDTKLKLKQQFSHRLNAILKTKLYSRNTIKAINTFAIPVLTYSFGIVRWSKSELKALQRTINTTLTKFRKHHPRSCIQRLTLPREEGGRGLIDIENLHNKQISTLRQYFFNKCESSSLHNAVVKIDHKLTPLNLQDNATQSNEKVTDNKTKTAEWAGKSLHGRHHHDLSQPNVDKKASNAWLSRGELFPETEGFIMAIQDQVIETKNYQKYITKIIHSDICRKCNSCPETIQHITGACKAIAQTDYKHRHDQLASIIHQKLAHQQNLVTSIQPYYKYVPQSVLENSTSKIYFDRAILTDRTIHYNRPDITLINKANKTGYLIDIAVPNTHNLQSTIAEKLSKYTELKDEIVRLWHLQKVTIVPIVISTTGVIPNQLHQSIKTLNLTPNTYNLLQKAAILNTCRIVRKFLQIEHDVPIVNSIQPTTQTPIRSASVTLLATQNQSNPNLEPDMHLA

SEQ ID NO: 16892 - protein, 1322 aa, Morvina fissimacula
MTKRTPTLSSTITADGVVQDVNFDSELVPTSTTSQKRRRWTPEMNMFILRNYLQLTALDTDTRSYLEPLHLTFIEKFPEMQVSRQRLGDQRRAIIRNKLLPQNTIDQIYNEVKNELNLQQASLIPPSDTQTQAYKIPNLQRQTRMKWTTEQNETLIRLYYQITQLETNRTTYRQPLHKAFVSAFPSLAHLSEQRIADQRRAIISNKYLSETRLNEIKQQVAAELSTITNNYTNTVQVTKNIQDLNTDNTEIQIINSIRLDITEETSNSKKLERDPAIDKIFRQTFQHFKDTSPTSRNYIPKQKPSKKLAKIVHYLNEVTLPEHVDIDTDFNTLQTTIYCAAWTAAKVNGAKLSLETYSRSRPATNNYSPNWQRRLERKLEVLRTKISRLTHFINGNTNKKLEKHVNSIIQQYKIHSVHEEPNTQLIQTLDTLKQKLAVVSGRLRRYKECTLRKQQNNQFNCNEKQFYRNLKKTSINVQENINSNNLNSFPDPGELHKFWAGIWELPIEHNDQADWIQTEIAKNNTTTPEMSFNHIPIDIYIKVLQNLHNWKAPGSDFIHSYWYKKFTSVQGYLHNYLNDFIENPNIIPHYFTLGTTYMIPKHHDDLLNPAKYRPITCLQTLYKIFTSCISELIYKHIDDNKILTEQQKGCRKFSQGCKEQLVIDSVILKEVQRKKSDLYTMYIDYKKAYDSVPHSWLIQILEIYKIHPKIISLLKTTMANWTTQLKLTNATTSIVTDSIKIRRGLFQGDALSPLWFCLAINPLSSKLQTTAVGCKLQCRDTNGQTDTIQNLNHLFYMDDIKLYADTDTHLQQLAEITEKFSNDIKMEFGIDKCRINSMKAGQNYQHYYTLETGEKIEPLNEEETYKYLGYNQSQQIQYKDTKLKIKLQLRHRLNTILKTQLYSRNTIKAVNTFAIPVLTYSVGIIKWSKSELKALQRTINTTLTKFRKHHPRSCLQRLTLPRKEGGRGLIDITNLHNKQISTLRQYFFSKSESSALHKAVVKSDHKLTPLNLQDYEFQNNEKLTDDKTKIAEWAGKSLHGRHYHDLSQPNVDKKASNAWLNRGDLFPETEGFIMAIQDQVIETRNYQKYITKTLRSDTCRKCNNCPETIQHITGACKAIAQTDYKHRHDQIANIIHQKLAYQHNLITSIQPYYKYTPQSVLENDTTKMYFDRAILTDRTIHFNRPDITLINKTIKTGYLIDIAVPNTHNLQSTIAEKVSKYTELKDEITRLWHLQKVIIVPIVLSTTGVIPNQLHQSLRTLNLTPNTYNLLQKAAILNTCRIVRKFLQNHTTSHITTIQPSTDTLLTTQNYNPNPDPDTYLA

SEQ ID NO: 16893 - protein, 1313 aa, Grais stigmaticus
MEQSKHKYNLRSLLGGRRGAPGAGAGCFSMRDTGGEALSRRVPVTQQVTAGRRELSRRAHDVDATADIEGDDTQSLFSSIPSTRPSYMTRRTSTLSSATTADGVVQDVNTHSEFVPTSTISQMRRRWTPEMNMFILRTYLQLTALDADTKTYLEPLHLTFVEKFPEMQVSRQRVGDQRRAIVRNKLLPQNTIDQIYNEVKEELSHLHANSLHNIDTQPQPSKTQNSHRQTRMRWTNEQNETIIRLYFLITNLETNKTTYRQSLHKAFIDAFPSLAHLSEQRIADQRRAIISNKYISDNRLNEIKQQVTAELSSSLNRLNNNTNTIQATTNTQDTNNDNNDMQFIDSIELNLPEENPAQLERNLVIDETFRKSFQHFKGTSPTNRVYIPKQKPSKKLAKIVHYLNEITLPEQVNINTDFSTLQTAIYCAAWTAAKINGAKISLEPSTISRPANNDYRPHWQRRLERRLENLRTKISRVTHFINGNRNKKLTKHVDSIVEQYRNHSVHEEPNTQLIQTLDTLKQKLAVISGRLRRYKECTLRKQQNNQFNNNEKIFYRNIRKTTTNLEENINSSNLNNSPNPEDLHKFWAGIWEQPVTHNNQADWVQTETAKNNITTPEMSFDHIPIDIYKKVLQSLHNWKAPGSDFIHSYWYKKFTNIQGYLHNYLNDFIENPNTIPHYLTLGTTYMIPKQQDNLLDPAKYRPITCLQTMYKILTSCISELIYKHIDDNKILTEQQKGCRKFSQGCKEQLIIDSVILKEVQRKKTDLFTMYIDYKKAYDSVPHSWLIQVLEIYKIHPKIITLLKTTMTNWTTRLKLTTPTIAIETDPIKIQRGLFQGDALSPLWFCLAINPLSSKLQTTGVGYKLQCRNTNRQTDIIENINHLFYMDDIKLYADKDIHLHQLANITEKFSNDIGMEFGIDKCRINSIKSGRNYQHHYTLETGEKIEPLGEEETYKYLGYNQSRQIQYKETKIKLKQQFSHRLNTILKTQLYSRNTIKAINTFAIPVLTYSFGIINWSKSELKSLQRKVNTTLTKFRKHHPRSCLQRLTLPRKEGGRGLIDIINLHNKQISTLRQYFFNKSEFSSLHKAIARSDHKLTPLNLQDHTTQNNENLTDDKAKIAEWSGKSLHGRHYHDLSQPNVDKKASNAWLSRGELFPETEGFIMAIQDQVIETRNYQKYITKTLRSDACRKCNSCPETIQHITGACKAIAQTDYKHRHDQIANIIHQKLAHQQNFITRIQPYYKYVPESVLENATSKIYFDRAILTDRTIHYNRPDITLINKTKKTGYTAIELIIQVKNTYGTAMGMVLHADLHR

SEQ ID NO: 16894 - protein, 1406 aa, Luehdorfia japonica
MEHNVRKYDLRPLPGGRRGASGAGAGCLSMRTIGGEELSRRALVDQQVTAEHRELNRRAPDVEVTAESEEDASSLFASIPSTRPSYMTRRSTTTSSVSMLNDVVHDVIPDEVSAPTASIKCKRRRWTAEMNKFILRHYLLLTALESYKVPYLEPLHLKFIETYPDMQVSRQRIGDQRRAIVRNKLLPQDTINQIYKEVENELHQLNTTHQLQNTLSLTPNRSDLLFSQTVNTQHRMKWTKEHNETIMKAYYRVTHLEMNRTAYRKLLHQEFINKFPSLAHLGEQRIADQRRAIIKNKYITEDRLNIIKQHVAQELSLNNNVHSSSKNQSQISQSIIILPTTTNPDIHEYLPSPLNSQYDHIHTDTAQILRPPNHVRNQEADEIFQKAYQFYKHTEPTNRTFIPKQKSSRNLATTVDYINKVILPENINSYTDFNTLQTIIYSAAWTAAKVNGAKITLEPIAEPKNRQKEYKPNWQRRLEKRINDLRQKIGRLTQVINGNRATNLRKQVNKILDQHKIHSVHEEPNTQFTHTLDTLKQKLSVTCSRLKRYKACTLRKSQNNQFSNNEKVFYRNIRQSTTSSEQNTVETVTNNTPNQHTLKRFWSQIWEETTQHNKQADWILTETNNIQAQEMSYDNISIDTFKRVLSNSHNWKAPGSDHIHSYWYKKFTYLHPYLYNFINDFIQDPSKVPSYITSGTTIMLLKDPKEPLNPANYRPITCLQTLYKIITSCVTELIYKHVDTNNILTEQQKGCRKLSQGCKEQLIIDSVILNKVQKTKSNLFTMYIDYKKAYDSVPHSWLIQILDIYKIHPKIITFLKSVMTSWNTQLRITTPTDIIYTEPIKIQRGIFQGDALSPLWFCLALNPLSNMLNSTGLGYSLQYSDGNSEQLIDTELHKINHLLYMDDIKLYAETEDQLNKLAGLTEKFTSDIKMEFGIDKCKINSTILGQTHKHHYSLEIGQQIVSLDDRETYKYLGYDQSQKIHYKDIKLKLKQQFKHRLNAILRSQLYARNTVKAINTYAIPILTYSFGIINYSKSDLKTLQRIINTKMTIFRKHHPRSCIQRLTLPRREGGRGLIDIMNLHNRQISTLRQYFFRKIASSPLHKAIVQNDCKLTPLNLKTATPQSNEMITENNAKHLAWAQKSLHGRHHNDLCQNNVDKDASNAWLNRGELFPETEGFMLAIQDQVIETRNYQKYIMKQQVSDICRKCNSSPETIQHITGACKAIVQTDYKHRHDQVANIIHQKLAHQYNFVSLIQPYYKYNPETVLENNNTKLYFDRAILTDRTVHYNRPDITLIDKNSKTGYLIDIAVPNTHNLQTTISEKLSKYTELKDEITRMWHLHKVTIVPIVLSTTGVIPKQLHQSLKTLNLPPKIYTLLQKAVILNTCRLVRKFLIIDNPVSIPFPPILS

SEQ ID NO: 16895 - protein, 1428 aa, Ephestia elutella
MEVLTLLLKHHRAPIPFPDQRSQLSSPTIHLYPYLNMEKDNFRKYNLRPLPGGRRGAPRAGDGCFSPRDTGGEELSRRAPVIQDTTAGRRELSRRARDVETTADISGDDTDSLFSSIPSTRPSYMTRRTATLSTTSTLDSVVQEVILDSELAPTDSAPNTRRKWSPEMNTFILRTYLQLTALDTDTRTYLEPLHLKFIEKFPDMSVSRQRIGDQRRAIIRRKLLPQITIDQIYSEVREELNTTQHNILLQPSSHIHVHNLTNTQGSLTPAQLRMRWTNEQNEAIIRIYFRITHLDSNRTSYRKTLHENFISIFPSLSHLSEQRIADQRRLIINNKYISDDRLEIIKHEVAEELAEANTNTTSLVNVTEPDNEVQPLDESNILITENPPISHLDSDRHQDIDDIFTAVYDHYKNTNPTERNYIPKQKTSKRLSIIVDYINTKILPKYINKDTDFNTVQTVIYCAAWTAAKMNGTKLRLNETEIIHNRQYRPRWQRRLENRLNDLRSKIGKVTHFINGNRSRKLTTEVNKIVEQYKIHSTHEPLNTQLSHTLDTLKQKLSVISGRLQRYTTCTLRKKQNKQFQNNEKHFYRNMKKTTLNTQETTDTGIPPSKTDLEDFWAGIWQRPMEHNIQADWIQTEMNHNNTNTEPMTYDNISIEIFEKVLSNLHNWKAPGSDFIHSYWYKKFTSIHYYLLNFINDFIQDPKLMPLYITTGSTIMIPKDNNDLQNPAKYRPITCLQTLYKIITSCIAELMYTHVNNNSILAEQQKGCRKYCQGCKEQLVIDSVVLTKVQKTKSNLFTTYIDYKKAYDSVPHSWLVQVLEIYKIHPIVINFLKSTMTTWTTRLKLTIGTETIESDTIKIQRGIFQGDALSPLWFCLALNPLSSILNSSSLGYPLPHTNITTDGQTNTALNHLLYMDDIKLYANTENHLNQLINIVEQFSNDIKMEFGLDKCNINSVKQGKNYQHNYTMQSGQQIEPLDEHATYKYLGFNQALQIQHKETKYKLTQQFRHRLNAILRSHLYAKNTVKAINTYAIPLLTYSFGVIYWSKSELKNLQRIINTTMTKHRKHHPRSCIQRLVLPRKEGGRGLIDIVNLHNTQIKNLRQYFFSRIESSNLHKAIACNDKKFTPLNLRDQTTQSNELLTDNKTKISEWAQKSLHGRHRSDLCHPHVDKEASNAWLSRGELFPETEGFMLAIQDQVIETRNYQNYIIKNTISDTCRRCNSLPETIQHITGACKSIAQTDYKHRHDQVANIIHQNLALQYNFIETIQPYYKYIPQTVLENNTTKLYFDRAILTDRTIHYNRPDITVINKADKSAFLIDIAVPNTHNLQNTIAEKLSKYIELKDEIRRIWHLQKVTIVPIVLSSTGVIPKQLHQSLQTLNLSPHTYNLLQKAVILNTCRLVRKFLQSDTDSSINTSITQPSIGEVCLR

SEQ ID NO: 16896 - protein, 1387 aa, Noctua pronuba
MVTAGRSKLNRRAHYVDATADSTGGDTISLFSSVPSTRPSYMTRRKASLSTTSTLDSVVQDVILDNELEPTTSAPSKRRRWTPEMNMFILRTYFQLTLLDTDKRTYLEPLHLKFIEKFPDMQVSRQRIGDQRRAIINNKLLPQKAIDNIRNEVEKELDQLQLNHFTLQTQNALDCTQPIFTSSQMPLSTIEAHSTQNKTQTRMRWTSEQNEAIMRSYYRVTDLGTNETAYRKRMYDDFVNNFPSLAHLSEQRIADQRRAIINNKYISNDKLKSLKADVAEELGLRTLNAHITSMNNTNTQVTNDTEINSMEEPTSNTQTSDNIELNTITDILPNPQINPERDSLIDDTFQQALEFFKETSPTNRIYIPKQKPSKNLARIISYLNKIILPENVDKDTDFNTLQTVIYCSAWTVAKVNGARITFEPRESTRVPKTEYKPKWQRRLEQKVKDLRTKIGRMTQFMNGNSSRKLRKHVNKIIKQYRTHTIHEEPNTKAAHTLDTLKQKLCVVKGRLERYKACSLRKQQNTKFNYNEKLFYRNIRQTTTNIQQHTPLANENNTPDPETLKQFWASIWEQPVCHNSQADWIQSEVSNNNSNIQPMAFEHISPEIFHKVLSRLHNWKAPGSDHIHSYWYKKFTAIHCYLYNFINTFIKDPKSIPSFVMSGTTFMIPKDQNDLSNPAKYRPITCLQTLYKIITSCISELIYEHIEANNILAEQQKGCRKFSQGCKEQLIIDSVVLRKVQKSKSDLFTMYIDYKKAYDSVPHSWLVQVLEIYKIHPSVIAFLKTAMTTWTTVLRLTTPTETKDTNPIKIQRGIFQGDALSPLWFCLALNPLSKILNSTSLGIPLNSIVDGQEEIHGSTLNHLMYMDDIKLFAKSEDQLNELANLTEKFTNDIKMEFGIDKCKINSVKAGQNYQHQYTLETGEQIEPLDEHDTYKYLGYIQSSQIHYKDIKQKLKQQFQHRLNTILKTQLYSRNTIKAINTFAIPVLTYSFGIINWTKTDLKNLQRKVNTTMTKFRKHHPRSCVQRLTLPRKEGGRGLIDILNLHNRQITTLRQYFFAKTESSTLHKLIAQNYQRLTPLNLKDTTEQKNERVTDDKTKFLEWTQKSLHGRHRQDLCQPNVDKEASNAWLNRGELFPETEGFMLAIQDQVIETKNYRKHIIKNLPNDTCRKCNSSSETIQHITGACKSIAQTDYKHRHDQVANVIHQKLAQQYKLVDTVVPYYKYNPETVLENTTTKLYFDRALFTDRTIHYNRPDITLINKVNNTGFLIDIAVPNTHNLQTTIAEKLSKYTELKDEITRLWRLQKVIIVPIVISSTGVIPKQLHQSLSSLNLPPNTYHLLQKAVILNTCRLVRKFLQCESDNIIQSAHNRVESNISIPALNPTDEHLA

SEQ ID NO: 16897 - protein, 1320 aa, Ephestia elutella
MTRHKTASTSSSMLESVVQEVIPDLEIAPIESFSTMRRRWTSEMNKFILRTYLLLTSLDTDTRVYLEPLHLKFMERFPDVQVSRQRIGDQRRAIMRRKLLPQTDIDKIYDEVKNELQTLQSNIHSQTLSSIPPSTSPSSIPPSISPSPQTITNPPLNFPVTNTQCSQSRMRWTPEHNEAIMRAFYRITHLGTNQSAYRKPLHESFINMFPALSHISEQRISDQRRLIVNNKYISDDRLKTIEKEVANELALNERDHVNVDEISNDINDIQLSDINLINTQATEPTPIITTTHLDTRPDIDALFQQAYDFYKDTLPTDRTYIPRQKSSKKLSIVVDYINKVILPKTVNKDSNFETLQTVIYCAAWTAAKANGTKINLQTKVQSQNTFKPYKPNWQRRLENRIEDIRRKIAKVTQYNNGNRSTRLVQEVNIITQQYQVHSTHEPPNTNISHTLDTLKQKLAVLSSRLQRYNTCTLRKQQNTEFKNNEKQFYRNIRQATTNTQQRLNQNQPHASPNSDEFHQFWAQIWEQPTQHNSTAEWIRTETNKSNRSTEPMNFDHIAPDIFAKVLNRTHNWKAPGSDYIHSYWYKKFTYIHPYLLNFINDFIQDPNIVPTYVTIGTTAMIPKDNNDLQNPAKYRPITCLQTLYKIITSCISEIMYTHLQNNNILAEQQKGCRKMCQGCKEQLTIDSVILKQAHKSKSNLFIMYIDYQKAYDSVPHSWLLEVLEIYKIHPKIISFLKTVMSNWSTQLKLPPTVTPNDSEESSAPIKIQRGIFQGDALSPLWFCLALNPLSNLLNATSLGYPLEYKETDRQTNNEIHLSHLLYMDDIKLYADSEDKLDGLAKIVETFTNDIKMQFGLDKCRINSYKDGQNYQHRYTLDSGQQIEPLDEHSTYKYLGFHQSLQINHKDIKAKLTQQFRHRLNVLLKSHLYARNTVKAINTYAIPVLTYSFGIIYWTKTELKSLQRIINTTLTKQRKHHPRSCMQRLTLPRKEGGRGLIDVNNLHNKQITTLRKYFHSRQDSSTLHRAIVFGDHKYTPLNMHDIRTQKNEDIVDNKTKIAEWAAKSLHGRHYQDLCQTNVDKEASNAWLSRGELFPETEGFILAIQDQVIETKNYQKYIMKQNVSDLCRKCNSVPETIQHITGACKSIAQTDYKHRHDQVANIVHQNLALQFKFIESLKPYYKYNPETVLENSTTKIYFDRAILTDRTIHYNRPDITLVNKTEKTAYLIDIAVPNTHNLQSTIAEKLSKYTELKDEIARLWHLQKVTIIPIVLSSTGVIPKQLHSSLKSLNLAPHTYTLMQKAVILNTCRLVRKFLQTDATHN

SEQ ID NO: 16898 - protein, 769 aa, Ephestia elutella
MNFDHIAPDIFAKVLNRTHNWKAPGSDYIHSYWYKKFTYIHPYLLNFINDFIQDPNIVPTYVTIGTTAMIPKDNNDLQNPAKYRPITCLQTLYKIITSCISEIMYTHLQNNNILAEQQKGCRKMCQGCKEQLTIDSVILKQAHKSKSNLFTMYIDYQKAYDSVPHSWLLEVLEIYKIHPKIISFLKTVMSNWSTQLKLPPTITPNDSEESSAPIKIQRGIFQGDALSPLWFCLALNPLSNLLNATSLGYPLEYKETDRQTNNEIHLSHLLYMDDIKLYADSEDKLDGLAKIVETFTNDIKMQFGLDKCRINSYKDGQNYQHRYTLDSGQQIEPLDEHSTYKYLGFHQSLQINHKDIKAKLTQQFRHRLNVLLKSHLYARNTVKAINTYAIPVLTYSFGIIYWTKTELKSLQRIINTTLTKQRKHHPRSCMQRLTLPRKEGGRGLIDVNNLHNKQITTLRKYFHSRQDSSTLLRAIVFGDHKYTPLNMHDIRTQKNEDIVDNKTKIAEWAAKSLHGRHYQDLCQTNVDKEASNAWLSRGELFPETEGFILAIQDQVIETKNYQKYIMKQNVSDLCRKCNSVPETIQHITGACKSIAQTDYKHRHDQVANIVHQNLALQFKFIESLKPYYKYNPETVLENSTTKIYFDRAILTDRTIHYNRPDITLVNKTEKTAYLIDIAVPNTHNLQSTIAEKLSKYTELKDEIARLWHLQKVTIIPIVLSSTGVIPKQLHSSLKSLNLAPHTYTLMQKAVILNTCRLVRKFLQTDATHH

SEQ ID NO: 16899 - protein, 1408 aa, Ephestia elutella
MKKENLRKYNLRPLPGGRRGAPRAGDGCFSSRDTGGEELSRRAPVTQDTTAGRRGLSRRARDVDATAEISEDDSISLFSSIPSACPSYMTRHKTASTSSSMLESVVQEVIPDLEIAPIESFSTMRRRWTSEMNKFILRTYLLLTSLDTDTRVYLEPLHLKFMERFPDVQVSRQRIGDQRRAIMRRKLLPQTDIDKIYDEVKNELQTLQSNIHSQTLSSIPPSTSPSSIPPSISPSPQTITNPPLNFPVTSTQCSQSRMRWTPEHNEAIMRAFYRITHLGTNQSAYRKPLHESFINMFPALSHISEQRISDQRRLIVNNKYISDDRLNTIEKEVANELALNERDHVNVDEISNDINDIQLSDINLINTQATEPTPIITTTHLDTRPDIDALFQQAYDFYKDTLPTDRTYIPRQKSSKKLSIVVDYINKVILPKTVNKDSNFETLQTVIYCAAWTAAKANGTKINLQTKVQSQNTFKPYKPNWQRRLENRIEDIRRKIAKVTQYNNGNRSTRLVQEVNIITQQYQVHSTHEPPNTNISHTLDTLKQKLAVLSSRLQRYNTCTLRKQQNTEFKNNEKQFYRNIRQATTNTQQRLNQNQPHASPNSDEFHQFWAQIWEQPTQHNSTAEWIRTETNKSNRSTEPMNFDHIAPDIFAKVLNRTHNWKAPGSDYIHSYWYKKFTYIHPYLLNFINDFIQDPNIVPTYVTIGTTAMIPKDNNDLQNPAKYRPITCLQTLYKIITSCISEIMYTHLQNNNILAEQQKGCRKMCQGCKEQLTIDSVILKQAHKSKSNLFTMYIDYQKAYDSVPHSWLLEVLEIYKIHQKIIYFLKTVMSNWSTQLKLPPSITPNDSEESSAPIKIQRGIFQGDALSPLWFCLALNPLSNLLNATSLGYPLEYKETDRQTNNEIHLSHLLYMDDIKLYADSEDKLDGLAKIVETFTNDIKMQFGLDKCRINSYKDGQNYQHRYTLDSGQQIEPLDEHSTYKYLGFHQSLQINHKDIKAKLTQQFRHRLNVLLKSHLYARNTVKAINTYAIPVLTYSFGIIYWTKTELKSLQRIINTTLTKQRKHHPRSCMQRLTLPRKEGGRGLIDVNNLHNKQITTLRKYFHSRQDSSTLHRAIVFGDHKYTPLNMHDIRTQKNEDIVDNKTKIAEWAAKSLHRRHYQDLCQTNVDKEASNAWLSRGELFPETEGFILAIQDQVIETKNYQKYIMKQNVSDLCRKCNSVPETIQHITGACKSIAQTDYKHRHDQVANIVHQNLALQFKFIEFLKPYYKYNPETVLENSTTKIYFDRAILTDRTIHYNRPDITLVNKTEKTAYLIDIAVPNTHNLQSTIAEKLSKYTELKDEIARLWHLQKVTIIPIVLSSTGVIPKQLHSSLKSLNLAPHTYTLMQKAVILNTCRLVRKFLQTDATHH

SEQ ID NO: 16900 - protein, 1391 aa, Thymelicus sylvestris
MEKSQSRYNLRPLPGGRRGAPGAGAGCFSMRDTGVAALSRRAPVTKDATAGRRGLNRRARDVETTAESSTGEDTLSLISSIPSTRPSYMTRSTATLSSASSLDGVVQDVNLDIDPEPTPSAPLKRKRWTPEMNKFILRTYLILTALDTDTKNYLEPLYLKFIEKYPNMQVGRQRVGDQRRAIIRNNLLTQNEIDAIFNQAREEITITQSQTINRNDLTQTRSRMSWLNHHNEAIMKIYYRITNLETNRTMYRKTLYEEFIKMFPTMSHISEQRVADQRRAIVKNRYLSDSKLEEIRNEITAELLSNINNNTNDDTNNLDNTRTENTDSHEEDVINNVGLDLQNEANEHRISKKQLHIDKTFQEAYQFFRFTEPTNRTYIPRQKSSIHLSKIVNYINEIILPEYITDDSDFNTLQTVVYCAAWTAAKINGTKLTLEISKSSRTYKKDHRPNWQRRLEKKLEDLRSKIGRLTQYVNGNRNRKIVYQINKIMAQYKIHSVHEEPNTHPTHILDTLKQKLAVVAGRLKRYKACTVRKEQNNKFTNNEKQFYRNIRQETTNTHNNNINNPTPNPEDLQNFWAAIWEQPVQHNNESEWIKTEIINSDLLTQPMKFEHIHIDTLKEVIDNLHNWKAPGSDYIHSYWYKKFTFTLKFLHKFINDFIQNPERVPSYITSGTTFMISKDTKDNTNPEKYRPITCLQTLYKIITSCISKLLYEHVQKNNILAEQQKGCRKFAQGCKEQLIIDSVILKQVQKTKSDLFSMYIDYKKAYDSVPHSWLVQILKIYKVHPIIISFLETIMANWTTRLKLTTSTETTESRPIAIQRGIFQGDALSPLWFCLALNPLSKLLDSTSLGYPLSFETDGQTQKYTLSHLLYMDDIKLYAKSENQLQQLAKVTEVFTDDIKMVFSVDKCKINSIRAGKTYQHHHTLHSGDQIQPLEENEVYKYLGYNQGRQIQFRDTKYNLRKNFQHRLNSILKTQLNSRNTVKAINSYAIPILTYSFGIINWTKSDLKNIQRTINTTMTRFRKHHPRSCIQRLTLPRKEGGRGLIDIINLHNQQITTLRKYFFSRMDTSPLHKAIVLNDSKSTPLNLQDKTTQTNEQLIDNITKIADWTKKSLHGRHRQDLCQPNVDKEASNAWLNRGELFPETEGFLLAIQDQVIETRNYQKYIIKNPISDNCRKCNSSPETIQHITGACKTIAQTDYKYRHDQAANVIHQKLAHRYKFINSIQPYYKYKPEAVLDNSTTKIYFDRAILTDRTIHYNRPDITLINKTDKTGYLIDIAVPNTHNLQNSIAEKLTKYTELKDEITRIWQLEKVTIIPIVISTTGVIPQQLHLSLKSLNLPPNTYCILQKAVILNTCRLVRKFLQTDTTLIQHSSALSLPQDHAQEGDLSCRT

SEQ ID NO: 16901 - protein, 1406 aa, Thymelicus lineola
MGETNEAHKTTSTLSELIIPNPNIIMENKQSSRYNLRSLPGGRRGAPGAGAGCFRMRDTGDAALSRRAPVTQDATADRRGLNRRARDVEATAESSTGEDTLSLFSSIPSTRPSYMTRSKTTSSSVSSLDGVVQDVNLDIEPEPTQSAPLKRKRWTPEMNKFILRTYLILTALDTDTKNYLEPLYLKFIEKFPNMQVGRQRVGDQRRAIIRNKLLPQNEIDNIFHQVKEEVTNTESQTITTNNLTKTRTRIAWLNHHNEAIMKIYYRITNLETNKTMYRKTLHEEFVKMFPTMSHINEQRVADQRRAIVKYRYLSDSKLEEIKKDTSEELLLNIDNINNDHRNNLHSTRTDNTDSHGEDVLNNIESIPQNESIEYRGTERQLHIDETFQETYNYFRFTEPTNRTYIPKQKTSKNLSKIVNYINEIILPEYITYNTDFNTLQTVVYCAAWTAAKINGTKLRLDVSKATRTLKKDYRPNWQRRLEKKLEDLRAKIGKVTQYVKGNRNKKIVYQINKIMEQYKIHSTHEEPNTNPTHILDTLKQKLLVTAGRLKRYKACTVRKQQNNQFTNNERQFYRNIRQQTTNTQNNNINNPTPNPADLQNFWADIWEQPVQHNNESEWIKAEIRNSDLRIQPMKFEHISIDNLKEVIDNLHNWKAPGSDYIHCYWYKKFTFILKYLHKFINDFIQNPESLPTYITSGTTFMISKDTNDPTNPEKYRPITCLQTLYKIITSCISKLLYEHVQKNNILAEQQKGCRKFAQGCKEQLIIDSVILKQVQKNKSDLFTMYIDYKKAYDSVPHTWLVQILQIYKVHPKIVSFLETVMANWTTRLKVTTSTDTTESRPIAIQRGIFQGDALSPLWFCLALNPLSKLLDSTSLGYPLCFETDGQTQKNILSHLLYMDDIKLYAKSENQLQQLAEITEQFTSDIKMVFSIDKCKINSIKAGKIYQHNHTLHSGDQIQPLQENEVYKYLGYNQGRQIQYRDTKNKLRQNFQHRLNSILKTQLNSRNTVKAINSYAIPILTYSFGVINWTKSDLKNIQRTINTSMTRFRKHHPRSCLQRLTLPRKEGGRGLIDISNLHNQQIKTLRQYFFKRMETSSLHKSVALNDNKLTPLNLLDKTTQNNEQLTDNISKITDWTKKSLHGRHRQDLCQPNVDKEASNAWLNRGELFPETEGFLMAIQDQVIECRNYQKYIIKNLTSDNCRKCNSSPETIQHITGACKTIAQTDYKYRHDQAANVIHQKLAHRYKFINSVQPYYKYKPEAVLENSTTKLYFDRAILTDRTIHYNRPDITLIDKTTKTGYLIDIAVPNTHNLQNTIAEKLTKYTELKDEITRIWRLQNVTIVPIVLSTTGVIPRQLHISLKTLDLPANTYYLLQKAVILNTCRLVRKFLQTDETTNMPPLTTRQSSL

SEQ ID NO: 16902 - protein, 1361 aa, Thymelicus sylvestris
MRDTGVAALSRRAPVTKDATAGRRGLNRRARDVETTAESSTGEDTLSLISSIPSTRPSYMTRSTATLSSASSLDGVVQDVNLDIDPEPTPSAPLKRKRWTPEMNKFILRTYLILTALDTDTKNYLEPLYLKFIEKYPNMQVGRQRVGDQRRAIIRNNLLTQNEIDAIFNQAREEITITQSQTINRNDLTQTRSRMSWLNHHNEAIMKIYYRITNLETNRTMYRKTLYEEFIKMFPTMSHISEQRVADQRRAIVKNRYLSDSKLEEIRNEITAELLSNINNNTNDDTNNLDNTRTENTDSYEEDVINNVGLDLQNEANEHRISKKQLHIDKTFQEAYQFFRFTEPTNRTYIPRQKSSIHLSKIVNYINEIILPEYITDDSDFNTLQIVVYCAAWTAAKINGTKLTLEISKSSRTYKKDHRPNWQRRLEKKLEDLRSKIGRLTQYVNGNRNRKIVYQINKIMAQYKIHSVHEEPNTHPTHILDTLKQKLAVVAGRLKRYKACTVRKEQNNKFTNNEKQFYRNIRQETTNTHNNNINNPTPNPEDLQNFWAAIWEQPVQHNNESEWIKTEIINSDLLTQPMKFEHIHIDTLKEVIDNLHNWKAPGSDYIHSYWYKKFTFTLKYLHKFINDFIQNPERVPSYITSGTTFMISKDTKDNTNPEKYRPITCLQTLYKIITSCISKLLYEHVQNNILAEQQKGCRKFAQGCKEQLIIDSVILKQVQKTKSDLFSMYIDYKKAYDSVPHSWLVQILKIYKVHPIIISFLETIMANWTTRLKLTTSTETTESRPIAIQRGIFQGDALSPLWFCLALNPLSKLLDSTSLGYPLSFETDGQTQKYTLSHLLYMDDIKLYAKSENQLQQLAKVTEVFTDDIKMVFSVDKCKINSIRAGKTYQHHHTLHSGDQIQPLEENEVYKYLGYNQGRQIQFRDTKYNLRKNFQHRLNSILKTQLNSRNTVKAINSYAIPILTYSFGIINWTKSDLKNIQRTINTTMTRFRKHHPRSCIQRLTLPRKEGGRGLIDIINLHNQQITTLRKYFFSRMDTSPLHKAIVLNDSKSTPLNLQDKTTQTNEQLIDNITKIADWTKKSLHGRHRQDLCQPNVDKEASNAWLNRGELFPETEGFLLAIQDQVIETRNYQKYIIKNPISDNCRKCNSSPETIQHITGACKTIAQTDYKYRHDQAANVIHQKLAHRYKFINSIQPYYKYKPEAVLDNSTTKTYFDRAILTDRTIHYNRPDITLINKTDKTGYLIDIAVPNTHNLQNSIAEKLTKYTELKDEITRIWQLEKVTIIPIVISTTGVIPQQLHLSLKSLNLPPNTYCILQKAVILNTCRLVRKFLQTDTTLIQHSSALSLPQDHAQEGDLSCRT

SEQ ID NO: 16903 - protein, 903 aa, Atrytonopsis hianna
MSGSISNTCSFCNKSFNTSRGTKIHISKVHKNKASFPIDSSDISSSPHNNQPLHLHLNELKRNVPLVKRIPRGARISVADSLSTCLDNCVCNNTTKDWEKLFTFAYKTLNVTNNNNNTSLTQKIKNNCSENDSIITLSSIGSKFNSKFNLIRTVESKISDGDIKGAARLLFSNDSISADTPETLAALQSKHPQADSSTFFLDPPSLSQPCLVCNERDIIQAISSFKPGSAAGLDGISPQHLKDLTSPSLGDVAKRLLTSILKISNFMLSGKVNYEITPILYGAQLIALTKKDGGIRPIAIGCTFRRLVSKICARKILPKLKNNFEPIQLGFGSKGGCEAAVHALRSFLTQDPEFEVLIKIDVKNAFNSVNRDVFLNEVNKIIPETYPYLLDCYHQPSKLVYNKNEIHSSTGCQQGDPLGPAIFSLAINPIIQNLSSKLNIWYLDDGTLGGKADSVLSDLSKIIKEFENIGLQLNFNKCEIYVSSDFNDTSDVIKKIMNLAPDIKILNKSSLYLLGSPIFDDGVINFIRNSIVKFSSNSDNLLKINNHFAFIILKHCLFLPKFIYFLRCSQFWKFSNLLLDIDDIIKIQSEKILNLNLSGDSWTQASLPIRYGGLGIRKISNVALSAFLSSVHSTSTLVGNILHLNDKNYGVACLEDGMNAWKTAFPNFPSKLNLQRAWDDLVCKQIFNDLLNNKADIDRARLKAVSSWESGQWLHVLPSAPIGTLLDSDTLRLSAGLRLGVNVCTPHICSCGAEVDALGLHGLSCRKSAGRFSRHAALNDIIRRSLVTINIPAVLEPNGIFRTDGKRPDGMSMVPWTMGRALVWDATCVDTLAPSHIHGTKIKAGAAAEMAEKNKKIKYSNLGSGFFFKAFGVETLGPWGPDAHYLFKEIRKKLKDKTCDPRA

SEQ ID NO: 16904 - protein, 937 aa, Hesperia comma
MSCNTTCSFCNKSFSSSRGTKIHISKVHKNQTSSSTDSSNSQSSTSNLKPLHLLLGEFKRNVPLVKRIPRGARISVADSLSRCLESCVRNNTVKDWENLFTFAYKILNVNNIDNNTSLTQKIKNNCLDPVAYINQSNSYSKFNSKFNLTRTVESKISDGDIKGAARLLFSNDTISADTPETLVALQSKHPQADYSTFFLDPPSSSQPCLICDERDVNLAIASFKPGSAAGLDGISPQHLKDLTSPSLGDAAKRLLTSILKFSNFMLSGSVNNEILPILYGAHLIALTKKDGGIRPIAVGCTFRRLVSKICASKILVKLKNKFEPVQLGFGSKGGCEAAVHALRSFLTQDPNFEVMIKIDVKNAFNSINRDVFLSEVNKHIPETYPYLLDCYHHPSKLVYYKNEINSSSGCQQGDPLGPAIFSLAINPIIQNLQSKFNIWYLDDGTLAGKADSVLSDLHKIINEFESIGLQLNFNKCEIFVSSNVNDASDIIQKFVKLAPDITILNESSLYLLGSPIFDDGAINFIHNSVSKFSKYSDRLSKLNNHFSFIILKHCLFLPKFIYFLRCTQFWKFSNLLVDIDDLIKTDLEKILNLKFTEDSWTQAALPIRYGGLGVRKISSVALPAFLSSVHSTSTLVGNILHHNDQNYGVACLEDGMNEWRTTSLNFPTALHLQRAWDDLLCKHTFDYLLKNTQSDISRARLRAVSSWESGQWLQALPSASIGTLLDPDTLRISVCLRLGVKVCSPHTCSCGAVVDALGLHGLSCQKSAGRFSRHAALNDIIRRSLVTINVPSVLEPNGIFRKDGKRPDGMSIVPWTMGRPLVWDATCVDTLAPSHIHGTKVRAGAAAEAAEKSKHLKYDNISSAYYFFKAFGVETLGPWGPDAHYIFKAIKNKLKEKTSDPRAGSFLAQRISIAIQRGNAASVLGTAPQGPSLFNLF

SEQ ID NO: 16905 - protein, 939 aa, Ochlodes sylvanus
MSSNVDTTCSFCNKSFNSSRGKKIHISKVHKNKASVLLDSSNIQTSQFRHQNLYLHLEDLKRNVPLVKRIPRGARISVADSLSICLDNCVQKNTPQDWEKLFTFAYKTLNVTNEINKTSLTQKIKTNCLKTDTSFTFSNYDSKSNPKFNLIHTVESKISDGDIKGAARLLFSNDTISADTPETLAALQSKHPQADSSSFFLDPPSLSQPCLVCNERDIILAISSFKPGSAAGLDGISPQHLKDLTSPSLGDAAKRLLSSILKISNFMLSGNVNNEITPILYGARLIALTKKDGGVRPIAVGCTFRRLVSKICARKILPKLKSKFEPVQLGFGSKGGCEAAVHALRSFLTQDPNFEVLVKIDVKNAFNSIKRDIFLSEVYKNIPETYSYLLDCYHHPSKLVYNKNEINSSTGCQQGDPLGPAIFSLAINPIIQNLNSKFNVWYLDDGTLAGKADSVLSDISKIIKEFKSIGLQLNFNKCEIYVSSDVNNASDIIQKFMNLAPDIKILNKSSLYLLGSPIYDDGVINFIRNSIVKFSSYSDSLLKINNHFSFIILKYCLFLPKFVYFLRCSQFWKFSKLLLDVDNLIKIELEKILNLNFTDDSWTQASLPIRYGGLGIRKVSNVALSAFLSSIHSTSTLVGNILCHNDQNYGVACLEDGMNEWKTASLNLPSKLHSQRAWDDLLCKQTFNYLLNNNNSDVDKARLKAVSSWESGQWLHALPSASIGTLLDPETLRLSAGLRLGVKVCTPHICSCGADVDALGLHGLSCRKSAGRFSRHAALNDIIRRSLVTINIPCTLEPNGIFRKDGKRPDGMSIVPWTMGRPLVWDATCVDTLAPSHIHGTKIRAGAAAEAAENNKHLKYDNISNAYYFFKAFGVETLGPWGPDAHYLFGQIKNKIKHKTGDSRAGSFLAQRISIAIQRGNAASILGTAPQGPSFINLF

SEQ ID NO: 16906 - protein, 939 aa, Ochlodes sylvanus
MSSNVDTTCSFCNKSFNSSRGKKIHISKVHKNKASVLLDSSNIQTSQFRHQNLYLHLEDLKRNVPLVKRIPRGARISVADSLSICLDNCVQKNTPQDWEKLFTFAYKTLNVTNEINKTSLTQKIKTNCSKTDTSFTFSNYDSKSNPKFNLIHTVESKISDGDIKGAARLLFSNDTISADTPETLAALQSKHPQADSSSFFLDPPSLSQPCLVCNERDIILAISSFKPGSAAGLDGISPQHLKDLTSPSLGDAAKRLLSSILKISNFMLSGNVNNEITQILYGARLIALTKKDGGVRPIAVGCTFRRLVSKICARKILPKLKSKFEPVQLGFGSKGGCEAAVHALRSFLTQDPNFEVLVKSDVKNAFNSIKRDIFLSEVYKNIPETYSYLLDCYHHPSKLVYNKNEINSSTGCQQGDPLGPAIFSLAINPIIQNLNSKFNVWYLDDGTLAGKADSVLSDISKIIKEFKSIGLQLNFNKCEIYVSSDVNYASDIIQKFMNLAPDIKILNKSSLYLLGSPIYDDGVINFIRNSIVKFSSYSDSLLKINNHFSFIILKYCLFLPKFVYFLRCSQFWKFSKLLLDVDNLIKIELEKILNLNFTVDSWTQASLPIRYGGLGIRKVSNVALSAFLSSIHSTSTLVGNILCHNDQNYGVACLEDGMNEWKTASLNLPSKLHSQRAWDDLLCKQTFNYLLNNNKSDVDKARLKAVSSWESGQWLHALPSASIGTLLDPETLRLSAGLRLGVKVCTPHICSCGADVDALGLHGLSCRKSAGRFSRHAALNDIIRRSLVTINIPCTLEPNGIFRKDGKRPDGMSIVPWTMGRPLVWDATCVDTLAPSHIHGTKIRAGAAAEAAENNKHLKYDNISNAYYFFKAFGVETLGPWGPDAHYLFGQIKNKIKHKTGDSRAGSFLAQRISIAIQRGNAASILGTAPQGPSFINLF

SEQ ID NO: 16907 - protein, 939 aa, Ochlodes sylvanus
MSSNVDTTCSFCNKSFNSSRGKKIHISKVHKNKASVLLDSSNIQTSQFRHQNLYLHLEDLKRNVPLVKRIPRGARISVADSLSICLDNCVQKNTPQDWEKLFTFAYKTLNVTNEINKTSLTQKIKTNCSKTDTSFTFSNYDSKSNPKFNLIHTVESKISDGDIKGAARLLFSNDTISADTPETLAALQSKHPQADSSSFFLDPPSLSQPCLVCNERDIILAISSFKPGSAAGLDGISPQHLKDLTSPSLGDAAKRLLSSILKISNFMLSGNVNNEITPILYGARLIALTKKDGGVRPIAVGCTFRRLVSKICARKILPKLKSKFEPVQLGFGSKGGCEAAVHALRSFLTQDPNFEVLVKIDVKNAFNSIKRDIFLSEVYKNIPETYSYLLDCYHHPSKLVYNKNEINSSTGCQQGDPLGPAIFSLAINPIIQNLNSKFNVWYLDDGTLAGKADSVLSDISKIIKEFKSIGLQLNFNKCEIYVSSDVNNASDIIQKFMNLAPDIKILNKSSLYLLGSPIYDDGVINFIRNSIVKFSSYSDSLLKINNHFSFIILKYCLFLPKFVYFLRCSQFWKFSKLLLDVDNLIKIELEKILNLNFTDDSWTQASLPIRYGGLGIRKVSNVALSAFLSSIHSTSTLVGNILCHNDQNYGVACLEDGMNEWKTASLNLPSKLHSQRAWDDLLCKQTFNYLLNNSNSDVDKARLKAVSSWESGQWLHALPSASIGTLLDPETLRLSAGLRLGVKVCTPHICSCGADVDALGLHGLSCRKSAGRFSRHAALNDIIRRSLVTINIPCTLEPNGIFRKDGKRPDGMSIVPWTMGRPLVWDATCVDTLAPSHIHGTKIRAGAAAEAAENNKHLKYDNISNAYYFFKAFGVETLGPWGPDAHYLFGQIKNKIKHKTGDSRAGSFLAQRISIAIQRGNAASILGTAPQGPSFINLF

SEQ ID NO: 16908 - protein, 673 aa, Hesperia comma
MLSGSVNNEIIPILYGAHLIALTKKDGGIRPIAVGCTFRRLVSKICASKILVKLKNKFEPVQLGFGSKGGCEAAVHALRSFLTQDPNFEVMIKIDVKNAFNSINRDVFLSEVNKHIPETYPYLLDCYHHPSKLVYYKNEINSSSGCQQGDPLGPAIFSLAINPIIQNLQSKFNIWYLDDGTLAGNADSVLSDLYKIIKEFESIGLQLNFNKCEIFVSSNVNDASDIIQKFVKLAPDIKILNESSLYLLGSPIFDDGAINFIHNSVTKFSTYSDRLSKLNNHFSFIILKHCLFLPKFIYFLRCTQFWKFSNLLVDIDDLIKTDLEKILNLKFTEDSWTQAALPIRYGGLGVRKISSVALPAFLSSVHSTSTLVGNILHHNDQNYGVACLEDGMNEWRTTSLNFPSALHLQRAWDDLLCKHTFDYLLNNTQSDISRARLRAVSSWESGQWLQALPSASIGTLLDPDTLRISVCLRLGVKVCSPHTCSCGAVVDALGLHGLSCQKSAGRFSRHAALNDIIRRSLVTINVPSVLEPNGIFRKDGKRPDGMSIVPWTMGRPLVWDATCVDTLAPSHIHGTKVRVGAAAEAAEKSKHLKYDNISSAYYFFKAFGVETLGPWGPDAHYIFKVIKNKLKEKTSDPRAGSFLAQRISIAIQRGNAASVLGTAPQGPSLFNLF

SEQ ID NO: 16909 - protein, 939 aa, Ochlodes sylvanus
MSSNVDTTCSFCNKSFNSSRGKKIHISKVHKNKASVLLDSSNIQTSQFRHQNLYLHLEDLKRNVPLVKRIPRGARISVADSLSICLDNCVQKNTPQDWEKLFTFAYKTLNVTNEFNKTSLTQKIKTNCSKTDTSFTFSNCDSKSNPKFNLIHTVESKISDGDIKGAARLLFSNDTISADTPETLAALQSKHPQADSSSFFLDPPSLSQPCLVCNERDIILAISSFKPGSAAGLDGISPQHLKDLTSPSLGDAAKRLLSSILKISNFMLSGNVNNEITPILYGARLIALTKKDGGVRPIAVGCTFRRLVSKICARKILPKLKSKFEPVQLGFGSKGGCEAAVHALRSFLTQDPNFEVLVKIDVKNAFNSIKRDIFLSEVYKNIPETYSYLLDCYHHPSKLVYNKNEINSSTGCQQGDPLGPAIFSLAINPIIQNLNSKFNVWYLDDGTLAGKADSVLSDISKIIKEFECIGLQLNFNKCEIYVSSDVNNASDIIQKFMNLAPDIKILNKSSLYLLGSPIYDDGVINFIRNSIVKFSSYSDSLLKINNHFSFIILKYCLFLPKFVYFLRCSQFWKFSNLLLDVDNLIKIELEKILNLNFTDDSWTQASLPIRYGGLGIRKVSNVALSAFLSSIHSTSTLVGNILCHNDQNYGVACLEDGMNEWKTASLNLPSKLHSQRAWDDLLCKQTFNYLLNNNNSDVDKARLKAVSSWESGQWLHALPSASIGTLLDPETLRLSAGLRLGVKVCTPHICSCGADVDALGLHGLSCRKSAGRFSRHAALNDIIRRSLVTINIPCTLEPNGIFRKDGKRPDGMSIVPWTMGRPLVWDATCVDTLAPSHIHGTKIRAGAAAEAAENNKHLKYDNISNAYYFFKAFGVETLGPWGPDAHYLFGQIKNKIIHKTGDSRAGSFLAQRISIAIQRGNAASILGTAPQGPSFINLF

SEQ ID NO: 16910 - protein, 939 aa, Ochlodes sylvanus
MSSNVDTTCSFCNKSFNSSRGKKIHISKVHKNKASVLLDSSNIQTSQFRHQNLYLHLEDLKRNVPLVKRIPRGARVSVADSLSICLDNCVQKNTPQDWEKLFTFAYKTLNVTNEINKTSLTQKIKTNCSKTDTSFTFSNCDSKSNPKFNLIHTIESKISDGDIKGAARLLFSNDTISADTPETLAALQSKHPQADSSSFFLDPPSLSQPCLVCNERDIILAISSFKPGSAAGLDGISPQHLKDLTSPSLGDAAKRLLSSILKISNFMLSGNVNNEITPILYGARLIALTKKDGGVRPIAVGCTFRRLVSKICARKILPKLKSKFEPVQLGFGSKGGCEAAVHALRSFLTQDPNFEVLVKIDVKNAFNSIKRDIFLSEVYKNIPETYSYLLDCYHHPSKLVYNKNEINSSTGCQQGDPLGPAIFSLAINPIIQNLNSKFNVWYLDDGTLAGKADSVLSDISKIIKEFKCIGLQLNFNKCEIYVSSDVNNASDIIQKFVNLAPDIKILNKSSLYLLGSPIYDDGVINFIRNSIVKFSSYSDSLLKINNHFSFIILKYCLFLPKFVYFLRCSQFWKFSNVLLDVDNLIKIELEKILNLNFTDDSWTQASLPIRYGGLGIRKVSNVALSAFLSSIHSTSTLVGNILCHNDQNYGVACLEDGMNEWKTASLNLPSKLHSQRAWDDLLCKQTFNYLLNNNNSDVDKARLKAVSSWESGQWLHALPSASIGTLLDPETLRLSAGLRLGVKVCTPHICSCGADVDALGLHGLSCRKSAGRFSRHAALNDIIRRSLVTINIPCTLEPNGIFRKDGKRPDGMSIVPWTMGRPLVWDATCVDTLAPSHIHGTKIRAGAAAEAAENNKHLKYDNISNAYYFFKAFGVETLGPWGPDAHYLFGQIKNKIIHKTGDSRAGSFLAQRISIAIQRGNAASILGTAPQGPSFINFF

SEQ ID NO: 16911 - protein, 673 aa, Hesperia comma
MLSGSVNNEILPILYGAHLIALTKKDGGIRPIAVGCTFRRLVSKICASKILVKLKNKFEPVQLGFGSKGGCEAAVHALRSFLTQDPNFEVMIKIDVKNAFNSINRDVFLSEVNKHIPETYPYLLDCYHHPSKLVYYKNEINSSSGCQQGDPLGPAIFSLAINPIIQNLQSKFKIWYLDDGTLAGKADSVLSDLHKIINEFESIGLQLNFNKCEIFVSSNVNDASDIIQKFVKLAPDITILNESSLYLLGSPIFDDGAINFIHNSVSKFSKYSDRLSKLNNHFSFIILKHCLFLPKFIYFLRCTQFWKFSNLLVDIDDLIKTDLEKILNLKFTEDSWTQAALPIRYGGLGVRKISSVALPAFLSSVHSTSTLVGNILHHNDQNYGVACLEDGMNEWRTTSLNFPTALHLQRAWDDLLCKHTFDYLLKNTQSDISRARLRAVSSWESGQWLQALPSASIGTLLDPDTLRISVCLRLGVKVCSPHTCSCGAVVDALGLHGLSCQKSAGRFSRHAALNDIIRRSLVTINVPSVLEPNGIFRKDGKRPDGMSIVPWTMGRPLVWDATCVDTLAPSHIHGTKVRAGAAAEAAEKSKHLKYDNISSAYYFFKAFGVETLGPWGPDAHYIFKAIKNKLKEKTSDPRAGSFLAQRISIAIQRGNAASVLGTAPQGPSLFNLF

SEQ ID NO: 16912 - protein, 989 aa, Odontocolon sp.
MPGCERTFPTTRGGGVHEQRAHKDWYDEMMVGTIVNKKAQWNVEESSLLARHEARLTREGVRFMNQALLPLFPDRTLESIKGQRRYQRHKDSVARYLETMGEAEIAQDPQENEVPREPEQWGQMEVLKTRVIEEIAKLDPLEGATFQKEKLGVICRNIKEWPNERLAEELEDYLLEIYPKPQRRTGANRAKKTGGALTSRQARRADYARTQRAWKKNPCNCMRVILNDKEADETPTKEVMVPFWRNIMTQKSDQSPGIDRTQVKEGEALWKAIGPAEIKKAFPEITTSPGPDGVTARQLRAMPMNVLVAIFNLIMLCGKLPKHLLEAKTTLIPKKDGAREPGDFRPITVSSVITRAYNKVLANRFQKFADLDRRQRAFMPMDGCAENIFDLDLILRYHRQNFKPLYVASIDVAKAFDAVSHNTIRDTLISRGVPNHLTEYIMDSYKRSETRLACGGWVSEAITPSQGVKQGDPLSPIIFNLVMDGLLKRIPAEIGVEIDGTPYNAFAFADDLVFVASTALGLQTTLDTATDYLTQCGLTINTGKSFTVAVRNVPHIKKSVVDGSVRFWCYGREVPALRRTDEWKYLGVPFTPEGRSKGDECEKLKEALSKLTKAPLKPQQRLFGLRVMVLPGLYHLLTLGNTTLSRLKKVDSLVRASVRKWLNLPHDAVNSYFHTNVREGGLSIPSMRWLMPLRRFQRLQGLGRVDRIRSPFLNQQLEKTKRRMLDQGELLDTASKLEDRWAKMLHTSVDGRALRESKKVAQQHQWIVEGTRFLSGRDFVNAAKFRINAMPTRSRTARGRLKDRTCRAGCGTVETLDHVVQKCFRSHGPRVKRHDAIAAYVQRALGKTYEQVEKEPQFATPEGMRKPDLIAKKDNKALVVDAQVVGEHVGLDEAHTTKAAKYRPLTETIKRRYGVEEVEFTTVTISYRGVWSGVSANSLVQEGILQKRELKIISTRALIGGLACFRIFNKTTRRTGRTAYPGGQREGVG

SEQ ID NO: 16913 - protein, 1112 aa, Emesis brimo
MAGLRTGKHIVFLRVGALQKTNANLASGPAPRSAGNFETAKFNCGKNKRNNDRPVLPQETGSPINTSPEVVSGDSRVNRRAADWICSICGRSFSTKTGLGVHKRRAHPVEANAEAAPNVTKRRWCEEELAVLARTEARLLEEKGKCTNIDLLAELPGFDRTLEAIKGQRRSEKYKTLVQACRGEYKTNMGQAQACQPETNEIPSEPMNTSRNLETLSSPTAQPEVLPDAVSNDAPIADDSPALEISGQAAKCLEALLESVERRKARFGLGRRGARRLGRRAVAQTDKLSSRQRRRIEYARVQELYKKCRGQIAAEIINGQSREVKHGLGELEAFWRPVLEAVSTAPGPTPEALRVLGSGGQYGGADADMSRLWDPITTEEVKGCRFGYMTAPGPDGIRSDEWRQVPACHKAEIFNAWMVAGEVPEPLRQCRTIFVPKTDAPAGPGEYRPISIASVPLRHLHAILAKRLLSCSPPDMRQRGFIRADGTMENSAVLDAVLADSRKKLRELHVAVLDFSKAFDTVSHKALLELLGKRGLPKQFCDYVSRLYGSATTVLSVGADRSVPVSVGRGVRQGDPLSPILFNMVMDIVLASLPRSVGYTLEGERVSALAYADDLVLLAGSKAGMQDSINRVVSVGEMMGLKLNLGKSSVLSMVPDGHRKKHHYLTERTFRVGQRKLKQISCVERWRYLGVDFMSAGCEMLEHDIAVALSNIKKAPLKPQQRLEIVRSHLVPKFLHGFVLGRISDDRLRMLDIQIRGAVREWLRLPKDVPTGYFHAAVKDGGLGLPSLRAAIPNLILRRFGALATSTWPVASAAAKSVRIRNKLRWAGKQAQKFSKEDPRTHLQSVRHYWSDLLHASVDGLELRESGSTPESTRWLRERSEQCSGRDFVQFVHTHINSLPSRVRTSRGRRNDREEGIGCRAGCTTTETTTHIIQQCFRTHGGRIKRHDCVVGVIAKAMTDSGWTVEMEPQIRTSHGLRKPDIIAKREGKGVIVDAQVVSGQRSLDESHRNKRRKYGGDDELVGLVAGKLGLPARSVACTSCTISWRGVWSGASVRELKSLLGLKSSTLASIPPIVLRGSHMNWTRFNQMTWRMTGQTAVIGRSPLTETGACG

SEQ ID NO: 16914 - protein, 909 aa, Emesis ocypore
MNTGEETGNLLPSTAQPEVVLEASVSIATPVNESPVPVIPAEAAECLKRLLERAERRKACFGLSRRGTRLLGRKSKGNNAHKDFTSARNRRRVEYARVQDLYQKCRTQIAAEIIDGHSRAGKHGLEELEAFWRPVLEAVSTAPGPSPGALRSLKTGGPSQGEVPHYGAMTDLSRLWDPITLEEIKDCHFGYMTAPGPDGIRWDEWRQISACHKAEILNSWMVAGEVPEQLRQCRTIFVPKTDAPAGPGEYRPISIASVPLRHLHAILARRLMRCCPPDMRQRGFIRADGTMENSAVLDAVLADSRKKLRELHVAVLDFSKAFDTVSHKALLELLREKGLPEQFLKYVTRLYESATTVLTVGTARSAPILVGKGVRQGDPLSPILFNMAMDLVLAALPRSVGYMLENERVSALAYADDLVLLAGSKVGLQESIDCVNRVGEMMGLKLNLGKCSALSMVPDGHRKKHHYLTERTFRVGQRKIKQISCVERWRYLGVDFKSAGCEMLEHDIASALSNITKAPLKPQQRLELVRSHLVPKFLHGFVLGRISDDRLRMLDIQIRGAVRRWLRLPHDVPTAYFHAAVKDGGLGLPSLRTAIPNLILKRFGALASSGWPAARAAAKSNRIRNKLRWAAKQVQRFSKENPHTQVRSTRQYWSDSLHESVDGFELRESRKAQESTRWIREGSGQCSGRDFVQFVHTHINSLPSRIRTSRGQRKDRGRSIGCRAGCMATETTAHIIQQCFRTHGGRILRHNCVVDVVASAMTELGWVVEKEPQFKTSHGLRKPDIIAVREGKGVIVDAQVVSGQRSLDELHRNKRRKYGGDGELVGLVAGRLGTTIGGVSCTSCTISWRGVWSVASLREMKSLLGLKSQVFASITTKVLRGSHTNWTRFNQMTAIAGRSPGAETEACGN

SEQ ID NO: 16915 - protein, 878 aa, Melanis pixe
MFSFPEPSPVDDLSADESPAFKVSTEAAEQLDALLAGVEKRKVRLGLGRRAARRIGKKSEGALNGKMTSRKRRRIEYARVQEMFKTCRKQAAAEIIEGRCKTVKHSLGELETYWRPILEAVSTASGPTPEALRALERGVQYGGASVDPHRLWEPITLDEVKETMPVTTTAPGPDGIRVDEWRVVPARCKAEIFNSWMAVGEVPEPLRQCRTIFVPKTDAPGGPGEYRPITIASVPLRHFHAILAKRLLGCCPPDMRQRGFIRADGTLENSAVLDAILGDSRKRLREVHVAVLDFSKAFDTVSHKALFDVLRARGLPHHFCEYIARLYESASTVLAVNRDCSAPVAVGRGVRQGDPLSPILYNMVMDVILASLPKSVGYRLETERVSALAYADDLVLLAGSKVGMQESIDCVAKFGEMMGLKLNLAKSSVLSMVPDLHRKKHHYPTEQMFRVGRRKLKQVSCVEEWRYLGVEFKPAGCVTLECGIAEALSNITRAPLKPQQRLELVRAHLVPKFLHGLVLGRVSDDRLRALDVQIRGAVRKWLRLPNDVPTGYFHAAVKDGGLGLPSLRSAVPDLVLRRFGTLADSGWPVAVAAAKSDRIRNKLRWARKQVLKFSKENPRTHHPDVRRFWGDSLHASVDGLELRESGRTPESTRWIRERCMEYSGRDFVQFVHTHINTLPSRMRTSRGRRIGRESELMCRAGCMVTETTAHTIQQCHRTHGGRIERHNCVVRVIAKALTDTGWVVEMEPKIGTSHGLRKPDIIAAKDGRGVIVDAQVVSGQRSLDESHRTKRRKYGGDEELVGLVAGRLGLLKERVACTSCTISWRGVWSGASVKELKSLLGLKSSVIAGIPSLVLRGSHMNWTRFNQMTTVSGRPPDV

SEQ ID NO: 16916 - protein, 907 aa, Emesis saturata
MASDVGQTQACQPDDIPSVPMITSEEICDLLPTTAQPEVVLDAGSMIADPADDSPMPVIPAEAAECLKRLMEKAERRKASLGLNRRGMRLLGKHGKDKNARNGLTSARQRRRIEYARVQDLYQKCRGQIAAEIIDGHSRVGKHGLEELEAFWRPVLEAVSTAPGPSPDALRSLTTGGLYQGEAPHSGAMRDVSRLWDPITPEEVKDCHFGYMTAPGPDGIRWDEWRQVSVRHKAEILNAWMVAGEVPEPLRQCRTIFVPKTDAPAGPGEYRPISIASVPLRHLHAILARRLMRCCPPDMRQRGFICADGTMENSAVLDAVLADSRKRLKELHVAVLDFSKAFDTVSHKALLELLRKKGLPEQFLKYVARLYESATTVLSVGTARSDPISVGKGVRQGDPLSPLLFNMAMDLVLAALPRSVGYMLEGERVSALAYADDLVLLAGSKVGLQDSIDRVNRVSEMMGLKLNLGKSSVLSMVPDGHRKKHHYLTERTFRVGQRKLKQISCVERWRYLGVDFKSAGCEMLEHDITTALSNITKAPLKPQQRLELVRSHLVPKFLHGFVLGRISDDRLRMLDIQIRSAVRRWLRLPHDVPTAYFHANVKDGGLGLPSLRTAIPNLILRRFGALASSGWPAARAAAKSNRIRNKLRWATKQVQKFSKENPHTHERSTRRYWSDSLHESVDGFELRESGKAQESTRWIREGSGQCSGRDYVQFVHTHINSLPSRMRTSRGQRKDRGRSVDCRAGCMATETTAHIIQQCFRTHGGRILRHNHVVDVVATAMTELGWAVEKEPQFKTSHGLRKPDIIAAREGKGVIVDAQVVSGQRSLDELHRNKRRKYGGDGELVGLVAGRLGLPVGGVSCTSCTISWRGVWSVASLREMKSLLGLKSQVFANITTKVLRGSHTNWT

SEQ ID NO: 16917 - protein, 973 aa, Emesis spreta
MARTEARLTEVKGKCSNLDLLAELPGLERTLEAIKGQRRSTKYRNLVQECREGFKNMGQAQECQLSLVEPSGPENASGSSSTLPPAAAQLLVLPEIAPKDAPTADDSPAPRLSAEAAGCLEMLLEGVERRKARFGLSRRGARRLGKRNVARNDLESTRKRRRIEYARVQELYQKCRGQIAAEIIDGQSREVKHGLGELEAYWRPILEAVSTAPGPTPEALRVLGPGGQHGGSESDISRLWDPITTEEVKGCRFGYMTAPGPDGIRSDEWRQVPACHKAEIFNAWMVAGEVPEPLRQCRTIFVPKTDAPAGPGEYRPISIASVPLRHLHAILARRLLNCSPPDMRQRGFIRADGTLENSAVLDAVLADSRKKLRELHVAVLDFSKAFDTVSHKALLELLGARGLPRQFCNYVSKLYGSATTVLSVGADRGVPILVGRGVRQGDPLSPVLFNIVMDAVLASLPKSVGYMLETERVSALAYADDLVLLAGSKVGMQDSINCVTSVGEMMGLKLNLGKSAVLSMVPDGHRKKHHYLTERTFRVGLRKLRQVSCVERWRYLGVDFKAAGCEMLERDIAEALSNITKAPLKPQQRLEIVRGHLVPRFLHGFVLGRISDDRLRMLDIQIRGAVRKWLRLPKDVPTGYFHAAVKDGGLGLPSLRAAIPNLILRRFGALATSGWSVAKAAAKSVRIRNKLRWAGKQALKFSKEDPRTHSPSVRHFWGDSLHASVDGFELRESGSAPESTCWLRERSGQCSGRDFVQFVHTHINSLPSRVRASRGRRNDRGKDLGCRGGCASTETTTHIIQQCFRTHGGRIQRHNCVVGVVAKAMTDLGWSVEMEPRVMTSHGLRKPDIIAGKEGRGVIVDAQVVSGQRSLDESHRNKRRKYGSDGELVERVAGRLGVPVESVACTSCTISWRGIWSGASLRELKSLLGLKSPTLSSIPPLVLRGSHMNWTRFNQMTAVTRRSPEAISEACGY

SEQ ID NO: 16918 - protein, 890 aa, Emesis furor
MPPSSAQPEVLLEAAPNDAPSSNDSPVPELSAQAAECLDALLAGAERRKARFGLGRKGARRLGRRELAQIDKMSTRTRRRIEYARVQELYKKCRGQIAAEIIDGQSRVGKHSLRELESFWRPLLEAVSTAPGPTPEALRVLESGGQHGGSASDLSQLWEPITPEEVKESTFGNMTAPGPDGIRSDEWRLVPAGMKAEIFNAWMVAGEVPELLRQCRTIFVPKTDAPVGPGEYRPISIASVPLRHFHAILARRLLNCCPPDMRQRGFIRADGTMENSAVLDAVLADSRKKLRELHVAVLDFSKAFDTVSHKALLELLRARGLPERFCNYVSCLYESATTVLSVGTDRSTPVSVGRGVRQGDPLSPILFNMAMDIVLASLPRSVGYMLESERVSALAYADDLVLLAGSKAGMQDSIDRVARVGEMMGLKLNLGKSSVLSMVPDGHRKKHHYLTERTFRIGQRKLRQVSCVERWRYLGVDFKSAGCETLEADIAIALHNITRAPLKPQQRLEIVRGHLIPKFLHGFVLGRISDDRLRMLDVQIRGAVRTWLRLPKDVPTGYFHAAVKDGGLGIPSLRTAIPSLILRRFGALATSEWPVANAAAKSTRIRNKLRWASKQVQKFSKEDPRTHLPSVRHYWCDSLHTSVDGFELRESGSAPESTRWLRERSEQCSGRDFVQFVHTHINSLPSRVRTSRGRRNDREESIKCRAGCMATETTTHIIQQCWRTHGGRIHRHDCVVGVIAKAMTDSGWSVEMEPKLRTSHGLRKPDIIARKEGKGVIVDAQVVSGQRSLDELHRNKRRKYGSDEELVELVAGKLGLPVRSVTCTSCTISWRGIWSGASLRELKSLLGLKSSTLASIPSLVLRGSHMNWTRFNQMTAVTGWSSETASGACG

SEQ ID NO: 16919 - protein, 1057 aa, Apodemia virgulti
MRRNIDRPALPQEAGSPIFTPPEAVAGDSRVNRRSLEWTCPICERQFTTKTGLGVHKRRAHPVEANADAAPNVEKRRWSEEELAMLARTEAQLLEEKGKCTNIDLLAKLPGLNRTLEAIKGQRRSENYKSLVQACRGEFKITEGQTQACQPVDNVPSVPENTSRNSETVPPSAAQLEVQPAAAPDDAPPADDSPAPRLSTEAAACLERLLEGVERYKARQGLSRRGARRLGKRNDARNDFKSTRTRRRIEYARVQELYQKCRGQIAAEIIDGQCRVAKHSLGELEAFWRPVLETVSSATGPTPGALWTLRSGGQYGGPCAADMSRDPITPEEVKGSNFGYMTAPGPDGIRSDDWRRVPVRHKAEIFNAWMAAGEVPEPLRQCRTIFVPKTDAPAGPGEYRPISIASVPLRHLHAILARRLLDCCPPDMRQRGFIRADGTLENSAVLDAVLADSRKKLRELHVAVLDFSKAFDTVSHKALLELLGARGLPKQFCEYVARLYSTATTVLSAGADKSAPVVVGRGVRQGDPLSPVLFNMVMDIVLASLPRSVGYRLEGELVSALAYADDLVLLAGSKVGMQDSIDRVARVGEMMGLKLNHGKCAVLSMVPDGHRKKHHYLTERTFRVGHKKLRQISCVERWRYLGVDFKSAGCEVLEHDIAAALSNITKAPLKPQQRLEIVRGHLVPKFLHGFVLGRISDDRLRMLDIQIRGAVRRWLRLPHDVPTGYFHAAVKDGGLGLPSLRTAIPNLILRRFGALATSGWPAAIAAAKSARIRNKLRWAGKQVRKFSKEDPRTHLPSVRHFWSDSLHSSVDGFELRESGSTPESTSWLRERSGQCSGRDFVQFVHTHINSLPSRVRTSRGRRNDREEGIGCRAGCAVNETTTHIIQQCFRTHGGRIQRHNCVVDVVAKAMTDSGWTVEMEPKIRTSHGLRKPDIIARREGKGVIVDAEVVSGQRSLDEAHRNKRRKYGGDGELVELVAGRLRVPASSVACTSCTISWRGVWSGASVKELKSLLGLKSPTLCSITSLVLRGSHMNWTRFNQMTAVAGRSPEAAAGACG

SEQ ID NO: 16920 - protein, 907 aa, Melanis pixe
MRETSPGSNKDPTGPIPEACRALERRVQYGGPIEGRSRMQATTLDSNKDHGPIPEACRALERRVQYGGPNKGRSRLWRPVSPGELEATMSATVTSPGSNEVPTGPIPEACRALERRVQYGGPIEGPSRLREPIAPEEVEAAMPMATSSDTNKDHGPIPEACRALERRVQYGGPIEGLCRLWEPISPEEVKATMPAVATAPGPDGIRVGEWRVIPARYIAEMFNSWMAIGEVPEPLRQCRTIFVAKKDAPEGPGEYRPITIASVPLRHFHAVLAKRLLDCSPPDMRQRGFIRADGTLENSAVLDAVLGDSRKKLREVHIAVLDFSKAFDTVSHKALLEVLKVRGIPLPFRNYIARLYKSASTVLAVNRECSVPVVVGRGVRQGDPLSPILFNMVMDVILASLPKSVGYRLEQERVSALAYADDLVLLAGSKVGLQESIDCVAKFGEMMGLKLNLAKSSVLSMVPDLHRKKHHYPTEQLFRVGRRKLKQVSCVEEWRYLGVDFKPSGCKTFECGIAEALSNVTRAPLKPQQRLELVRTHVIPKFLHGLVLGRISDDRLRALDVQIRSVVRKWLRLPHDVPTGYFHAAVKDGGLGLPSLRSAVPDLVLRRFGTLADSGWPVAVAAAKSDRIKNKLRWAGKQMLKFSRPNPSTQLPEVRRYWGDSLHASVDGLELRESGRAPESTRWIAERCMQYSGRDYVQFVHTHINTLPSRMRTSRGRRIGRESELRCRAGCMVTETTAHTIQQCHRTHGGRIERHNLVANVIAKALTESGWVLEMEPKIITSHGLRKPDIIAAKDGRGVIVDAQIVSGQRSLDESHRNKRRKYGGDEELVGLVAGRLGLSRERIACTSCTISWRGVWSGASVKELKSLLGLKSSLLAGIPSIVLRGSHMNWTRFNRMTTVSGRPPDE

SEQ ID NO: 16921 - protein, 909 aa, Emesis angularis
MFTSEDTSSLFPSTAQPEVVLETAVSCATPVDESPVPVIPADAAECLKRLLERAERRKACFGLNRRGARLLGRNGKDKNAHKDFTSARSRRRIEYARVQDLYQKCRGQIAAEIIDGHSRVGKHGLEELEAFWRPVLEAVSTAPGPSPGALRSLMTGGPSQGEAQHFGTMMDLSRLWDPITPEEVKGCHFGYMTAPGPDGIRWDEWRQISASHKAEILNSWMVAGEVPEPLRQCRTIFVPKTDAPAGPGEYRPISIASVPLRHLHAILARRLMRCCPPDMRQRGFICADGTMENSAVLDAVLADSRRKLRELHVAVLDFSKAFDTVSHKALLELLRKKGLPEQFLKYVARLYESATTVLSVGTARSAPISVGKGVRQGDPLSPILFNMAMDLVLAALPRSVGYMLEGERVSALAYADDLVLLAGSKVGLQESIDCVNRVGEMMGLKLNLGKSSVLSMVPDGHRKKHHYLTERTFRVGQRKLKQISCVERWRYLGVDFKSAGCEMLEHDITAALSNITKAPLKPQQRLELVRSHLVPKFLHGFVLGRISDDRLRMLDIQIRGAVRRWLRLPHDVPTAYFHAAVKDGGLGLPSLRTAIPNLILRRFGALATSGWPAARAAAKSTRIRNKLRWATKQVQRFSKENPRTQVRSTRQYWSDSLHESVDGFELRESGKALESTRWIREGSGQCSGRDFVQFVHTHINSLPSRIRTSRGQRKDRGRSIGCRAGCMATETTAHIIQQCFRTHGGRILRHNCVVDVVASAMTELGWVVEKEPQFRTSHGLRKPDIIAVREGKGVIVDAQVVSGQRSLDELHRNKRRKYGGDGELVGLVAGRLGLPIGGVSCTSCTISWRGVWSVASLREMKSLLGIKSQVFAHITTKVLRGSHTNWTRFNQMTAVAGRSSGAGTEACGY

SEQ ID NO: 16922 - protein, 900 aa, Emesis lacrines
MNESRNSESVPPSAAQLEVLLESVPNDAPSTNDSPVPEISEPAAECLKALLEGAERRKACYGLGRKGARRLSKRLRARNDKMSTKQKRRIEYARVQELYRKCRGQIAAEIIDGQSRVGKHSLGELEAFWRPVLEAVSTAPGPSPEALRSIECGGQYRSLEISDMSRLWDPITPDEVKGCNFGYMTAPGPDGIRSDEWRQVPACHKAEIFNAWMVAGEVPEPLRQCRTIFVPKTDAPAGPGEYRPISIASVPLRHLHAILARRLLNCSPPDMRQRGFIRADGTMENSAVLDAVLADSRKKLRELHVAVLDFSKAFDTVSHKALLELLETKGLPKQFCDYVSRLYRSATTVLSVGTDRSEPVSVGRGVRQGDPLSPVLFNMVMDIVLASLPRSVGYRLEGELVSALAYADDLVLLAGSKVGMQESIDRVNSVGAMMGLKLNLGKSSVLSMVPDCHRKKHHYLTERTFRVGQKHLRQISCVERWRYLGVDFKSAGCEMLEHDIAIALSNIKKAPLKPQQRLELVRGHLIPRFLHGFVLGRISDDRLRMLDIQIRSAVRNWLRLPNDVPTGYFHADVKDGGLGLPSLRAAIPNLILRRFGALATSEWPAANAAAKSARIRNKLRWAGKQVLKFSKEDPRTHLPSVRHFWSDSLYTSVDGFELRESRNTLESTRWLRERSEQCSGRDFVQFVHTHINTLPSRVRTSRGRRNDREEGIRCRAGCMATETTTHIIQQCFRTHGGRIKRHDCVVGVVAKAMTDSGWTVEIEPKLKTSHGLRKPDIIAKREGKGVIVDAQVVSGQRSLDESHRNKRRKYGGDDELVGIVARRLGLSTESVACTSCTISWRGVWSGASLREMKSLLGLKRPTLASLPPIVLRGSHINWTRFNQMTATAGRLPADVTEACG

SEQ ID NO: 16923 - protein, 1059 aa, Apodemia ares
MKIKRNNDRPALPQEAGSPIRNSPEAVSGDSRVNRRSLDWTCPICERAFSTKTGLGVHKRRAHPVEANVEAAPEARKRRWCEEELALLASTEARLLEEEGKCTNIHLLAELPSLERTLEAIKGQRRSEKYKALVQACREEYVKNKGRAQACLLENRPSSPMNAGRNSVTMPPSAAQLEVQPETGPDDAPSADDSPAPRISAEAAMCLERLLEGVEKRKARFGLSRRGAKRLGRRNVERNDFMSTRKRRRIEYARVQELFKKCRGQIAAEIIEGQSREVKHGLGELEAFWRPVLEAVSTAPGPTPEVLRVLESGGQHGGPLADISRLWDPITPEEVKGSRFGYMTAPGPDGIRSDEWRLVPACYKAEMFNAWMVAGEVPEPLRQCRTIFVPKTDAPAGPGEYRPISIASVPLRHLHAILARRLLDCCPPDMRQRGFIRADGTMENSAVLDAVLADSRKKLRELHVAVLDFSKAFDTVSHKALLELLGARGLPKQFCDYVSRLYGSATTVLSVGADRSEPVTVGRGVRQGDPLSPVLFNMVMDIILASLPRSVGYRLEGEQVSALAYADDLVLLAGSKAGMQESIDRVASVGEMMGLKLNLGKSAVLSMVPDGHRKKHHYLTERTFRVGQRKLRQISCVERWRYLGVDFKSAGCEVLEHDIAVALSNITRAPLKPQQRLEIVRGHLVPKFLHGFVLGRISDDRLRMLDIQIRGSVRKWLRLPHDVPTGYFHAAIKDGGLGLPSLRAAIPDLVLRRFGALATSGWPAAKAAAKSARIRNKLRWAGKQVRKFSKEDPRTHLQSVRHFWSDSLHTSVDGFELRESGSTPESTRWLRERSEQCSGRDFVQFVHTHINSLPSRVRTSRGRRNDREEGIGCRAGCASTETATHIIQQCFRTHGGRIKRHDCVVGVVAKAMTDSGWTVEKEPKIMTSHGLKKPDIIARKEGRGVIVDAQVVSGRRSLDESHRNKRRKYGSNSELVGLVAGRLRVPVRSVSCTSCTISWRGVWSGASLRELKSLLGLKSSTLSSIPPIVLRGSHMNWTRFNQMTAVTGRSPEAVTGACG

SEQ ID NO: 16924 - protein, 1045 aa, Melanis pixe
MTAPALPQEAGSPVQNPSEDTPGGSRDDRWVPEWTCPVCDRVFSTKTGLGVHKRRAHPVEADAEAAREVKKRRWSEEELDLLARTEAKVWVEKGKCANIELIALLPGFGRTLEAIKGQRRGDKYKKLVLAYRAEYEQQLSVPPETIGETGESVTPEVGTPRISLPGHPLESLPEATPNDDLSAGASPVVEVSTEAAEQLEALLAGVERRKARFGLGRRAARRLGKSEGAPSGKISTRTKRRLEYARVQEMFKTCRRQAATEIIEGRCKTVKHSLEEMETYWRPILEAVSTASGPTPEALRALERRVQYGGTSGDTSRLWEPISLEEVKATMPVTATAPGPDGIRVEEWRVIPAQIKAEIMNSWLATGEVPEPLRQCRTVFVPKTDAPEGPGEYRPITIASVPLRHFHAILARRVLDCSPPDMRQRGFIRADGTLENSAVLDAVLGDSRKKLREVHVAVLDFSKAFDTVSHKALLEVLKVRGLPLPFCNYIARLYESASTVLAVNRDCSAPVAVGRGVRQGDPLSPVLYNMVMDVILASLPKSVGYRLEQERISALAYADDLVLLAGSKVGMQESIDCVVKFGETMGLKLNLSKSSVLSMVPDLHRKKHHYPTEQVFRVGRRKLKQVSCVEGWRYLGVDFKPSGCVTLECGIAEALSNITKAPLKPQQRLEVVRTHLIPKFLHGLVLGKISDDRLRALDVQIRGVVRRWFRLPHDVPTGYFHASVKDGGLGLPSLRSAVPDLVLRRFGTLANSGWPAAEAAAKSDRIRNKLRWAGKQVQKFSKINPGTQLPEVRRYWGDSLHASVDGLELRESGRAPESTRWIRERCMQYSGRDFVQFVHTHINALPSRMRTSRGRRMGRESELRCRAGCMVTETTAHTIQQCHRTHGGRIERHNCVAKVIAKALTESGWVVEMEPRIITSHGLRKPDIIAAKDGRGVIVDAQIVSGQRSLDESHRTKRRKYGGDEELVGLVAGKLGLPKERIASTSCTISWRGVWSGASVKELKSLLGLSSSLLAGIPALVLRGSHTNWTRFNRMTTVSGRPPDV

SEQ ID NO: 16925 - protein, 974 aa, Emesis glaucescens
MLMARTEARLTEVKGKCSNLDLLAELPGLERTLEAIKGQRRSVKYKTLVQECRESINIEGQAQACLPSLVEPSSPENASRSLKTLPPAAAQLEVLPEISPKDAPTADDSPAPRLSAEAAGCLDKLLEGVERRKARFGLSRRGARRLGGRNVARNDLKSSRKRRRIEYARVQELYQKCRGQIAAEIIDGQSREVKHGLGELEAYWRPILEAVSTAPGPTPEALRVLGSGGQHGGSVSDISRLWDPITTEEVKGCRFGYMTAPGPDGIRSDEWRQVPACHKAEMFNAWMVAGEVPEPLRQCRTIFVPKTDAPAGPGEYRPISIASVPLRHLHAILARRLLDCCPPDMRQRGFIRADGTLENSAVLDAVLADSRKKLRELHVAVLDFSKAFDTVSHKALLELLGARGLPRQFCNYVSKLYGSATTVLSVGADRGVPILVGRGVRQGDPLSPVLFNIVMDAVLASLPKSVGYMLETERVSALAYADDLVLLAGSKVGMQDSINCVTSGGEMMGLKLNLGKSAVLSMVPDGHRKKHHYLTERTFRVGLRKLRQVSCVERWRYLGVDFKAAGCEMLERDIAEALSNITKAPLKPQQRLEIVRGHLVPRFLHGFVLGRISDDRLRMLDIQIRGAVRKWLRLPNDVPTGYFHAAVKDGGLGLPSLRAAIPNLILRRFGALATSGWSVAKAAAKSVRIRNKLRWAGKQALKFSKEDPRTHSQSVRHYWGDSLHASVDGFELRESGSASESTCWLRERSGQCSGRDFVQFVHTHINSLPSRVRASRGRRNDRGKDLGCRAGCASTETTTHIIQQCFRTHGGRIQRHNCVVGVVAKAMTDLGWSVEMEPRVMTSHGLRKPDIIAGKEGRGVIVDAQVVSGQRSLDESHRNKRRKYGSDGELVERVAGRLGVPVESVACTSCTISWRGIWSGASLRELKSLLGLKSPTLSSIPPIVLRGSHMNWTRFNQMTAVAGRSPEAISEACG

SEQ ID NO: 16926 - protein, 908 aa, Emesis tenedia
MNTREEICDLLSATAQPEVVLDAGSVVVDPVDESPMPVIPAEAAECLKVLMERAERRKASLGLNRRGMRLFHKHGKNKTALNGLTSAKQRRRIEYARVQDLYQKCRGQIAAEIIDGHSRVGKHGLEELEAFWRPVLEAVSTAPGPSPDALRSVTTVALDQGEAPHSGAMRDVSRLWDPITPEEVKDCHFGYMTAPGPDGIRWDEWRQVSVRHKAEILNAWMAVGEVPEPLRQCRTIFVPKTDAPAGPGEYRPISIASVPLRHLHAILARRLMRCCPPDMRQRGFICADGTMENSAVLDAVLADSRRRLKELHVAVLDFSKAFDTVSHKALLELLREKGLPEQFLKYVARLYESATTVLSVGTARSAPISVGKGVRQGDPLSPLLFNMAMDLVLAALPRSVGYMLEGERVSALAYADDLVLLASSKVGLQDSIDRVNRVSEMMGLKLNLGKSSVLSMVPDGHRKKHHYLTERTFRVGQRKLKQISCVERWRYLGVDFKSAGCEMLEHDITSALSNITKAPLKPQQRLELVRSHLVPKFLHGFVLGRISDDRLRMLDIQIRSAVRCWLRLPHDVPTAYFHAHVKDGGLGLPSLRTAIPNLILRRFGALASSGWPAARAAAKSNRIRNKLRWATKQVQKFSKENPHTRERSTRLYWGDSLHESVDGFELRESGKAQESTRWIREGSGQCSGRDYVQFVHTHINSLPSRMRTSRGQRKDRGRSLDCRAGCMATETTAHIIQQCFRTHGGRILRHNHVVDVVASAMTEMGWAVEKEPQFRTSLGLRKPDIIAVREDKGVIVDAQVVSGQRSLDELHRNKRRKYGGDGELVGLVAGRLGLPVGGVSCTSCTISWRGVWSVASLREMKSLLGLKSHVFANITTKVLRGSHTSWTRFNQMTAVAGKSSGAGAEACG

SEQ ID NO: 16927 - protein, 1068 aa, Emesis heteroclita
MKKAKYRTSKRGNNVDRPVLPQETGSPIITSSEVAAGDSRVERRELDWTCAICERKFTTKTGLGVHKRRAHPVEANAEAAPNVRKRRWCDEELALLARTEARLWEEKGKCANIDLLAELPGLERTLEAIKGQRRSAKYKNLVQECRVEYVKNMGQTQARQPRTISTSDPENAGRSSITLPPSTAQPEVLPEASPSDAPATSDSPAPRISAGAAECLEKLLEGIERRKARFGLGRKGARRLGRRNVARMDELSTRMRRRIEYARVQELFKKCRGQAATEIINGQSRVGKHSLGELEAFWRPVLEAVSTAPGPTPEALRVLESGGQHGGSTSDMSQLWRPITPEEVRSCRFGYMTAPGPDGIRSDDWRQVSAAHKAEIFNAWLVAGEVPEPLRQCRTIFVPKTDAPAGPGEYRPISIASVPLRHLHAILARRLLDCCPPDMRQRGFIHADGTMENSAVLDAVLADSRKKLRELHVAVLDFSKAFDTVSHKALLELLRARGLPKQFCDYVSGLYGSATTVLSVGAEKSGPVLVGRGVRQGDPLSPILFNMVMDVVLASLPKSVGYMLEGERVSALAYADDLVLLAGSKVGMQDSIDRVARVGETMGLKLNLGKSSVLSMVPDGHRKKHHYLTERTFRVGQRRLRQISCVERWRYLGVDFKSAGCEVLEHDIAAALSNITRAPLKPQQRLEIVRSHLVPKFLHGLVLGRISDDRLRMLDIQIRGAVRSWLRLPNDVPTGYFHASVKDGGLGLPSLRAAIPNLILRRFGALATSAWPVANAAAKSVRIRNKLRWAGKQARKFSKEDPRTHIESVRHYWGDSLHASVDGFELRESGSAPESTRWLRERSEQCSGRDFVQFVHTHINSLPSRVRTSRGRRNDREGGIGCRAGCMSTETTTHIIQQCFRTHGGRIQRHDCVVGVVAKAMTDSGWTVEMEPKVRTSHGLRKPDIIAKREGKGVIVDAQVVSGQRSLDELHRIKRRKYGSDDELVELVAGRLGVPKQSVACTSCTISWRGVWSGASLRELKSLLGLKSSTLASIPPIVLRGSHMNWTRFNQMTAVTGRSPATTTEACG

SEQ ID NO: 16928 - protein, 818 aa, Emesis poeas
MSTRQKRRIEYARVQELFRKCRGQAAAEIIDGQSRVVKHGLGELEAFWRPILEAVSTAPGPTPEALRGLKLGGQYGGANADMSRLWDPITSDEVKGTKFGYMTAPGPDGIRADEWRQVPACHKAEIFNAWMVAGEVPEALRQCRTIFVPKTDAPAGPGEYRPISIASVPLRHLHAILARRLLDCCPPDMRQRGFIRADGTMENSAVLDAVLADSRSKLRELHVAVLDFSKAFDTVSHKALLELLGARGLPGQFCDYISRLYRSASTVLTVGMERSAPISVGRGVRQGDPLSPILFNMVMDVVLASLPRSVGYMLEGERVSALAYADDLVLLAGSKVGMQNSIDRVVKTGEMMGLKLNFGKSSVLSMVPDGHRKKHHYLTERTFRVGQRKLRQISCVERWRYLGVDFKPAGCEMLERDIAVALSNITKAPLKPQQRLEIVSGHLIPRFLHGFVLGRISDDRLRMLDVQIRGAVRKWLRLPNDVPTGYFHAAVKDGGLGVPSLRAAIPNLILRRFGALATSGWPVANAAAKSVRIRNKLRWAGKQVRKFSKEDPRTHTESVGHFWGDSLHNSVDGFELRESRNAPESTRWLRERSEQCSGRDFVQFVHTHINSLPSRVRTSRGRRNDREEGIRCRAGCTATETTTHIIQQCFRTHGGRIQRHDCVVDVVAKAMTDSGWILEKEPKIRTSLGLRKPDIIGRKDGRGVIVDAQVVSGQRSLDELHRNKRRKYGSDDELVELVAGRLGLPGGSVDCTSCTISWRGVWSGASVRELKTVVGLKSSILATIPSLVLRGSHINWTRFNQMTAVTGRSQTAASGACG

SEQ ID NO: 16929 - protein, 737 aa, Apodemia duryi
MSRLWDPITPEEVKGSNFGYMTAPGPDGIRSDDWRQVPVCLKAEIFNAWMAAGEVPEPLRQCRTIFVPKTDAPAGPGEYRPISIASVPLRHLHAILARRLLDCCPPDMRQRGFIRADGTLENSAVLDAVLADSRKKLRELHVAVLDFSKAFDTVSHKALLELLGARGLPKQFCEYIARLYSSATTVLSAGVDMSAPVVVGRGVRQGDPLSPILFNMVMDIVLASLPRSVGYRLEGELVSALAYADDLVLLAGSKVGMQDSIDRVARVGEMMGLKLNHGKCAVLSMVPDGHRKKHHYLTERTFRVGHKKLRQISCVERWRYLGVDFKSAGCEVLEHDIATALSNITKAPLKPQQRLEIVRGHLVPKFLHGFVLGRISDDRLRMLDIQIRGAVRRWLRLPHDVPTGYFHAAVKDGGLGLPSLRTAIPNLILRRFGALATSGWPAAIAAAKSVRIRNKLRWAGKQVRKFSKEDPRTRLPSVRHYWSDSLHSSVDGFELRESGNTPESTSWLRERSGQCSGRDFVQFVHTHINSLPSRVRTSRGRRNDREEGIGCRAGCAVNETTTHIIQQCFRTHGGRIQRHNCVVDVVAKAMTDSGWIVEMEPKIRTSHGLRKPDIIARREGKGVIVDAQVVSGQRSLDEAHRNKRRKYGSDGELVELVAGRLRVPASSVACTSCTISWRGVWSGASVKELKSLLGLKSPTLCSITSLVLRGSHMNWTRFNQMTAVAGRSPEAAAGACG

SEQ ID NO: 16930 - protein, 1058 aa, Theope publius
MGTINCIATSTNKRKRNCGRPVLPQEAGATVYFSPDAAPDSDQVSRQELVWVCPVCERAFTTKIGLGVHKRRAHPEDANAEAAPNVKKRRWGEEELDLLARTEARLLTEKGICTNVHLLAELPGLQRTLEAIKGQRRADKYKRLVQACLAELKERPISTENASRDLSVTSPVTALTEAFLPESSPNDAPSTDDSPAGNLSAEAAECLETLFKIVERREARLGLGGRTARRLGRRNVALSGRLSARKKRRIEYARVQELYKNCRGQVATEIIEGHCREVRHGLEELTAFWRPLLETVSSAPGPTPEALDAYKRRACSGGPMQDLSRLWEPITLDEVKGTSFGSQTAPGPDGIRIETWRTIPARCKAEIFNTWMRCGEVPEPLRRCRTIFVPKTDAPGSPGDYRPITIASVPLRHFHAILAKRLLNCSPPDMRQRGFIRADGTLENSAVLDAVLGDSRQKLRELHVAVLDFSKAFDTVSHKALLELLGARGLPKEFCNYIARLYDSATTVLSVQTDRSAPVAVGRGVRQGDPLSPILFNIAMDLILASLPKSVGYRLETERVSALAYADDLVLLAGSKVGMQESIDCVVRTGEMMGLKLNLGKCSVLSMVPDCHRKKHHYLTARTFKVGRRFLRQVACVEGWRYLGVDFRSAGCTTLECDFAAALSNIKKAPLKPQQRLEIVRSHLIPKFLHGLVLGRISDDRLRMLDVQIRSAVRSWLRLPNDVPIGYFHAGVKDGGLGLPSVRAVVPDLVVRRFGALATSEWPVANAAAKSARIRNKLRWANKQVLKFSKVNSRSHSSVKHFWGDLLHASVDGLELREAGRAPESTKWMRERCMEYSGRDFVQFVHTHINTLPSRIRCSRGRRNGRESELKCRAGCEVTETTAHTIQQCFRTHGGRVQRHNCVVNVIAKALTDTGWKLEMEPQIRTSHGLRKPDIIAAKEGRGVIVDAQVVSGQRSLDESHRTKRRKYGGDGELVELVAGRLGVLKECVQCTSCTISWRGVWSGASVRELKSLLGLKSSTLSSIPPLVLRGSHINWTRFNQMTAVTRRLSGAVPGACG

SEQ ID NO: 16931 - protein, 1025 aa, Eurybia lycisca
MKTLELRNADCPVLPQEAGGPVRHSPSNSRAGPSRPNRRGDKQKAVNVTNTAEHLCLICDRKFTTKTGLGVHKRRAHPVETNADAAPPMRKRRWTEEELSLLARAEAQLMMEKGKVSNADLLLKLPRIERTLEAVKGQRRAARYKGLVKACLAAYRRASSVSLATSRGSSLGTTPEALPEVVSEEAEVGHVAGDSSAVELSAEAARSLEALLSSVERRKARLGLGRKAARRIGKDAQMGPVSSRKRRRIEYAKVQELFKSCRGRIASEIIDGQKRPVRHSLEEMEAYWRPLMEAVSPAQGPAPEALQASLGLQHGGPSTDVSQLWAPVTRDEVRDSGPGSYTAPGPDGIRPDQWKAVPVAHKAEIFNSWMAAGEAPESLRQCRTIFVPKKDEPASPCDYRPISIASVPLWHLHAILARRLLQCCPPDMRQRGFIRADGALENTAVLDAVLGDSRKKLRELHVAVLDFSKAFDTVSHKALLDCLGARGLPKQFIDFIARTYRTSYTTLNVAGESSRPVKVEQGVRQGDPLSPILFNMVADVVLGTLPRTVGYRLEGELVSALAYADDLVLLASSKLGMQEAIDCVVEQSATLGLRLNNEKSSVLSMVPDGHRKKHHYLTERSFRVGRRKLRQVTCVEGWRYLGVDYGPAGCEVLEHDISNALNNISRAPLKPQQRLEVVRGHLIPKFIHGFVLGRITDDRLRMLDIQIRGAVRKWMRLPHDTPKGYFHASTKDGGLGVPSLRTMVPDFILRRYGALSSSSWMAAKAAARSDRIRTKLRWASRQVRKFSASTTEHHQQEVRRYWGDQLRAAVDGFELRESVRTPESTKWLRERSSQYSGRDFVQFVHVHINALPSRIRVSRGRRGGDESQVACRAGCAMRETTAHTIQQCFRTHGGRIERHNCVVKVVAEAMTALGWKVELEPHLRTSHGLRKPDIIAVRGCTGVIVDAQVVSGQRPLYELHRSKRRKYGCDAELVELVAGRLALPSAECVKCTSCTISWRGVWSGSSVKEMKDLLGLKSSFLAGIP

SEQ ID NO: 16932 - protein, 963 aa, Sarota myrtea
MLLARTEARLIVVKGGCTNVDLIAELPDFGRSLEAIKGQRRADKYKRLVQACRAEYLEDQIGLASASRDTGASTSAAARPSVEQDVASNDTRPADDSPIPELSDEANRCLDALLEGVKRRQASFGLGRRAMRRLGRGNVDAPMGNMSSRKRRRIEYARVQELFKVCRGQIAAEVIDGRCKAVKHSLGELDAFWRPVLEAVSTAPGPTPEALRALGSGGQYGGSGHDLSRLWEPITSDEVRATKFGSMTSPGPDGIRTDEWRAVPVHLKAELFNAWMAQGEVPEPLRQCKTIFVPKTETPGSPGEYRPISIASVPLRHFHAVLARRLLHCSPPDMRQRGFICADGTLENSAVLDAVLGDSRKYLREVHVAVLDFSKAFDTVSHKALLELLGARGLPEPFCKYIARLYETANTVFAVGTDRSGPVAVGRGVRQGDPLSPLLFNMAMDVVLASLPKSVGYMLEGERVSALAYADDLVLLAGSRVGMQESIDCVDKIGEMMGLKLNHGKCSVLSMVPDRHRKKLHYLTEPTFRVRRRKLKQISCVERWRYLGVDFKSAGCVMLEQDIATALSNIGKAPLKPQQRLELVRAHLVPKFLHGLVLGKISDDRLRMLDVQIRGAVRKWLRLPHDVPTGYFHAAVKDGGLGLPSLRAVIPDLVVRRYGTLAASEWPVARAAAKSNRIRTKLRWASKQALKFSVENPVTHSRSVKQFWCQQLHASTDGFELRESGGVPESTKWLRAWSGQVSGRDFVQFVHVHINTLPSRVRASRGRRNHGVELKCRAGCAVTETTAHTLQQCFRTHGGRIERHNCVVNVLVKALAEMGWSVEMEPRFMTSRGLRKPDIVAVKEGVAVIVDAQVVSGQRLLDDAHQTKCRKYGGDGELVGLVAGKLSIPKQRVQCTSATISWRGVWSVTSARELKSLLGLKSHTLASITSKVLRGSHMNWTRFNQMTSVSRQSLGEVTGACGL

SEQ ID NO: 16933 - protein, 1072 aa, Panulirus ornatus
MSGTNSSHVGTDDDRSPTCPHCGKTVASFRGRRVHERQAHASSFHQELATRHVISKARWSDEEVELLARAEAEMAAGPSLVAGQVLNQRLREIVPSRSVDSIKGLRRKASYKTRVQKLISNTNPLHEDDEGEVTDGEPTMRRVPAARVSTPRGSTSEDAPRTGMSVGADSSGETYIPPTVLTVPVVPRVPQQPQTIASFVAETGTYLDSLGPGPTTISWGEDILNGAIDHLRRGDSLAAIRGAAEHATHVVNSCRSSDDRPNRGGGNSRQRANSGRARQAEEVPLRGNKLRREQYRRVQRLYHDNRSLAAGQVLKGDWEVPPTSVGPDRLIPFWGALFSRPSEPDTRAITDYDPECGQLAEVVTVGEVAHHLKATRTSAPGPDGMSTRLLKSIPPRILAKTFNLWMATSTLPEPLKANRTVLIPKVPNPTEPKDYRPITISCVIVRLLHKILSSRITRLIKIDDAQKAFVPIDGCLEDLTILDAIAGRARAHAHGVHLAFLDMAKAFDSVYHNTIERAMSRKGIPAAVRAYIMSSYDRAFTHIEGSDDNADKVNMTRGVKQGDPLSPILFNLVIDEGITRVKETGVGVKLGDQRVSALAFADDLVLVAQTPTGLQKAIDVIAETLAGGGLQVNPGKCLTLSIEVDGKRKTWYVNQQRTFQVLGSAVGSMNAEDEYKYLGILVGSKGRRKSYGALLEEGLLNITRAPLKPQQRVALLVGHLVPKLNHRLVLGEVYKTQLARMDRQVRVAVCRWLRLAHDVPCAYFHSATGDGGLGIPDFVSTVRLNKQARFEKLLTSTDPVIHAAVREPAVMSKLQRWAGPARIAGRQAGNKTERLHAWRSNLVSTVDGAALAPSAAVPQVSRWVTSGNRFLSGSDYVKAVQVRIGALPTPARASRGRPEINGLCDTCRKPGTLGHIAQMCPHTHGGRVRRHDNICAYLAGRLRQRGYQVACEPRIPIAGSFRKPDIVASKSTEAWIIDAQVSGVHLALSTAHRHKCSYYGTAEVLQGVRDLTGKDTVHLTSATVNWRGAWCQESASALIGLGLTHRDLEVCSVKALTWTHSLYRMWSKSTGK

SEQ ID NO: 16934 - protein, 1071 aa, Panulirus ornatus
MSGTNSSHVGTDDDRSPTCPHCGRTFASFRGRRVHERQAHASSFHQELATRHVISKARWSDEEVELLARAEAVMAAGPSLVAGQGLNQRLREIVPSRSVDSIKGLRRKASYKTRVQELISSSNPLHEDDEGEVTDGEPTMRRVPAARGSIPRGNASEDAPRTGMSVGADSSGETIISPTVLTVPVVPRVPQQPQTIASFAAETVTYLDSLGPGPTTISWGEDILNEAIDHLRRGDSLAAIRRAAEHATHVVNSCRSSDDRPNRGGGNSRQRANSGRVRQAEEVPLRGNKLRREQYRRVQRLYHDNRSLAAGQVLKGDWEVPPTSVGPDRLIPFWGALFSRPSEPDTRAITDYDPESGQLAEVVTVGEVAHHLKATRTSAPGPDGMSTRLLKSIPPRILAKTFNLWMATSTLPEPLKANRTVLIPKVPNPTEPKDYRPITISCVIVRLLHKILSSRITRLIKIDDAQKAFVPIDGCLENLTILDAIAGRARAHAHGVHLAFLDMAKAFDSVYHNTIERAMSRKGIPAAVRAYIMSSYDRAFTHIEGSDDNAEKVNKTRGVKQGDPLSPILFNLVIDEGITRVKETGVGVKLGDQRVSALAFADDLVLVAQTPTGLQKAIDVMAETLAGGGLQVNPGKCRTLSMEVDGKRKTWYVNQQRTFQVLGSAVGSMNAEDEYKYLGILVGSKGRRKSYGALLEEGLLNITRAPLKPQQRVALLVGHLVPKLNHRLVLGEVYKTQLARMDRQVRVAVRRWLCLAHDVPCAYFHSATGDGGLGIPDFVSTVRLNKQARFEKLLTSTDPVIHAAVREPAVMSKLQRWAGPARIAGRQAGNKFERLNAWRSNLVSTVDGAALAPSAAVPQVSRWVTSGNRFMSGSDYVKAVQVRIGTLLTPGRASRGRPEINGLCDTCRKPGTLGHIAQMCPRTHGGRVRRHDNICAYLAGRLRQRGYQVVCEPRIPIAGSFRKPDIVASKGTEAWIIDAQVSGVHLALSTAHRHKCSYYGTPEVLQGVRDLTGKDTVHLTSATVNWRGAWCQESASALIGLGLTHRDLEVCSVKALTWTHSLYRMWSKSTG

SEQ ID NO: 16935 - protein, 1070 aa, Panulirus ornatus
MSGASNDHVGTADDRSPTCPHCGKTFASFRGRRVHERQAHAGSFHQELATRHVLSKARWSDEVELLARAEAGMAAGPLLVAGQGLNQRLRDIVPSRTIDAIKGLRRKASYKSRVQELTLNLNLIQETDEGEVLGGSPIRRRVPAITRSNTRNDTEGEAQRTGMYACAEPGGEMTTPPAVLSVPAIPRIPQPQQTITSFMAETVAYFDLLLLDPTRTSWGEDALNGALDHLRQGDSLAAARAAAKHASQMLSSCSQPQDRPNRGEGDSRQSTNQGRVRRAEGIPLRGNRLRREQYRQTQRLYRENRSLAAGQILKGDWEVPPTSVGPDRLIPFWGALFSRPSEPDERVITDYDLESEQLASVITIDEVAHHLKATRTSAPGPDGMTTRLLKSIPPRVLAKMFNLWLATSALPEPFKANRTVLIPKVPNPTEPKDYRPITISCTVVRLLHKILSSRISRLIKIDEAQKAFVPVDGCLENLTILDAIVGRARAHAHGVHLAFLDMAKAFDSVNHSTIERAMSRKEIPALVRSYIMSTYDRAFTKIEGSDEMAEKIYMTRGVKQGDPLSPMLFNLVIDEGIARVKDTGVGVKLGDRTVSALAFADDLVLVAQTPTGLQKAMDVMAETLAGGGLQVNPGKCRTLSMEVDGKRKTWYVNKNRTYQVLGSAVGSMSAEDDYKYLGILVGAGGRRKSYGALLEEGLRNITRAPLKPQQRIALLVEHLIPKLMHRLVLGEVYKTQLARMDRQVRVAVRRWLRLAHDVPCAFFHSTPGDGGLGIPDFVSTVRFNKQARFEKLLTSADPVIQAAVREPAVLSKLQRWSGPACIAGRQAGGKLERQHAWRANLINTVDGAALAPSTTVPQVSRWVNSGNRFLSGADYVKAVQVRIGALPTPARASRGRPEINGLCDTCQKPGTLGHIAQMCPRTHGGRVKRHDNICAFLAGRLRQRGFQVSCEPRIPIVGSFRKPDIVASKGTETYIIDTQVSGVHFPLSAAHTYKCSYYGTPEVLQGVREHTGKDTVHVTSATLSWRGAWCQESVSALRGLGLTYRDLEVCSVKALTWTHSLYRMWSKGTG

SEQ ID NO: 16936 - protein, 932 aa, Panulirus ornatus
MRRVPAARVSTPRGNTSEDAPRTGMSVGADSSGETFIPPTVLTVPAVPRVPQQPQTIASFVAETVTYLDSLGPGPATISWGEDILNDAIDHLRRGDSLAAIRGAAEHATHVVNSCRSPDDRPNRGGGNSRQRANSGRARQAEEVPLRGNKLRREQYRRAQRLYHDNRSLAAGQVLRGDWEVPPTSVGPDRLIPFWGALFSRPSEPDTRAITDYDPECGQLAKVVTVGEVAHHLKATRTSAPGPDGMSTRLLKSIPPRIFAKTFNLWMATSTLPEPLKANRTVLIPKVPNPTEPKDYRPITISCVIVRLLHKILSSRITRLIKIDDAQKAFVPIDGCLENLTILDAIAGRARAHAHGVHLAFLDMAKAFDSVYHNTIERAMSRKGIPAAVRAYIMSSYDRAFTHIEGSDDNADKVNMTRRVKQGDPLSPILFNLVIDEGITRVKETGVGVKLGDQRVSALAFADDLVLVAQTPTGLQKAIEVMAETLAGGGLQVNPGKCRTLSMEVDGKRKTWYVNQQRTFQVLGSAVGSMNAEDEYKYLGILVGSKGRRKSYGALLEEGLLNITRAPLEPQQRVELLVGHLVPKLNHRLVLGEVYKTQLARMDRQVRVAVRRWLRLAHDVPCAYFHSATGDGGLGIPDFVSTVRLNKQARFEKLLTSTDPVIHAAVREPAVMSKLLRWAGPACIAGRQAGNKTEHLHAWRSNSVSTVEGAALAPSAVVPQVSRWVTSGNRFLSGSDYVKAVQVRIGALPTPARASRGRPEINGLCDTCRKHGTLGHIAQMCPRTHGGRVRRHDNICAYLAGRLRQRGYQVVCEPRIPIAGSFRKPDIVASKGTEAWIIDAQVSGVHLALSTAHRHKCSYYGTPEVLQGVRDLTGKDTVHLTSATVNWRGAWCQESASALIGLGLTHRDLEVCSVKALTWTPSLYLMWSKSTG

SEQ ID NO: 16937 - protein, 906 aa, Panulirus ornatus
MYACAEPGGETTIPPAVLSVPAIPRIPQPQQMITSFMAETVAYFDFLLLDPTRTSWGEDALNVALDHLRQGDSLAAARAAAKHASEMLSSCSPPQDRPDRGEGGSRQSANQGRARRAEGTPLRGNLLRREQYRQTQRLYRENRSLAAGQILKGDWKVPPTSVGPDRLIPFWGALFSRPSEPDERVITDYDLDSEQMARVITIDEVAHHLKATRTSAPGPDGMKRLLKSIPPRVLAKMFNLWLATSALPEPFKANRTVLIPKVPNPTEPKDYRPITISCAVVRLLHKILSSRISSLIKIDEAQKAFVPVDGCLENLILDAIVGRARAHAHGVHLAFLDMAKAFDSVNHSTIERAMSRKGIPALVRSYIMSTYDRAFTKIEGSDGMSEKIYMTRGVKQGDPLSPMLFNLVIDEGITRVKETGVGVKLCDKTVSALAFADDLVLVAQTPTGLQKAMDVMAETLAGGGLQINQGKCRTLSMEVDGKRKTWYVNKNRTYQVLGSAVGSMSAEDDYKYLGILVGAGGRRKSYGALLEEGLRNITRAPLKPQQRIALLVEHLIPKLMHRLVLGEVYKTQLARMDRQVRVAVRRWLRLAHDVPCAFFHSTSGDGKLGIPDFVSTVRLNKQARFEKLLTSSDPVIQAAVREPAVLSKLQRWSGPACIAGRQAGSKTERQHVWRAILISTVDGAALAPSTTVPQVSRWVNSENRFLSGTDYVKAIQVRIGALPTPARASRGRPEINGLCDTCQKPGTLGHIAQMCPRTHGGRVKRHDNICAFLAGRLRQRGFQVSCEPRIPIVGFFRKPDIVASKGTETYIIDTQVSGVHFPLSAAHAYKCSYYGTPEVLQGVREYTGKDTVHVTSATLSWRGAWCQESVSALRGLGLTYRDLEVCSVKALTWTHSLHRMWSKSTG

SEQ ID NO: 16938 - protein, 936 aa, Panulirus ornatus
MDGVSTERRVPSTRRSNTRGGTLEEAPRTGMYASADPSGETILPTVLTVPAVPRVPQPQTIASFVTETVAYLDTLGPGPTSPSRGEDILNAALDHLRQGDILAAIRVAAEHATHVTSSCGSPEDRQNRGGGGSRQSANSGRVRRAEEVPLRGNRLRNEQYRKVQRLYRENRSLTAGLVLKGDWEVPPTSVGPERLNPFWGALFSRPSEPDERAITDCDQEYGQLAGVVTVGEEAHHLKAPRTSAPGPDGMSTRLLKSIPPRILAKMFNLWLATSTLPEPLKVNRTVLLPKVPNPTEPKDYRPITISCAIVRLLHKILSSRISSLVQIDEAQKAFVPIDGCLENLTILDAIVGRARAHAHGVHLAFLDMAKAFDSVNHSTIERAMSRKGIPAPVRAYVMSTYDLAFTHIEGSGEMSEKVYMTRGVKQGDPLSPILFNLVIDEGIARVKETGVGVTLGDQRVSALAFADDLVLVAQTPTGLQQAMNVMAETLAGGGLHVNPGKCLTLSMEVDGKRKTWYVNKNRTFQVLGSAVGSMSAEDEYKYLGVLVGAEGRRKSYGALLEEGLLNITRAPLKPQQRIELLVGHLVLKLMHRLVLGEVYKTQLARMDRQARVAVRRWLRLAHDVPCAYFHSAAGDGGLGIPDFVSTVRLNKQARFEKLLTSTDPVIHAAVREPAVLSKLQRWTGPACITGRQADNKPERLHVWRANLVSTVDGAGLAPSAAMPQVSRWVTSGNRFLSGSDYVKAVQVRIGALPTPARASRGRPEINGLCDTCQKPDTLGHIAQMCPRAHGGRVKRHDNISAYLAGRLRQRGYEVSCEPRIPIVGTFRKPDIVASKGTEAYAIDTQVSGVHFALSAAHQHKCSYYGTPEVLQGVRELTGEGTVHITTATLNWRGAWCQESASALTGIGLTYQDLEVCSVKALTWTHSLYRMWSKSTG

SEQ ID NO: 16939 - protein, 976 aa, Panulirus ornatus
MSGTSFSHVGADDDRSPTCPHCGKTFASFRSRRVHERQAHASSFHQELATRHVVSKARWSDEEVELLARAEAGMAAGPSLVAGQGLNQRLREIVPSRTVDAIKGLRRKASYKTKVQELISNTTPLHEDDEGEVMDGEPTMRRVPATGLSTPRGNTSEDAPRTGISVGADSSGETYIPPTVLTVPVVPRVPQQPQTIASFVAETVAYLDSLGPGPTSPSWGEDILNEVIDHLRRGDSLAAIRGAAEHATHVVSSCRSPDDRPNLGGGNSRQGENPGRVRQAEEVPLRGNRLRREQYRKVQRLYRENRSLAAGQVLKGDWEVPPTSVGPDRLNPFWEALFSRPSEPDTRTITDYDPECGQLAEVVTVDEVAHHLKATRTSAPGPDGMSTRLLKSIPPRILAKTFNLWMATSTLPEPLKANRTVLIPKVPNPTEPKDYRPITISCAIVRLLHKILSSRISSLIQIDDAQKAFVPIDGCLENLTILDAIVGRARGAHAHGVHLAFLDMAKAFDSVNHSTIERAMSRKGIPAAVRAYIMSSYDRAFTHIEGSDEMAGKVNMTRGVKQGDPLSPILFNLVIDEGITRVKETGVGVILGDQRVSALAFADDLVLVTQTPTGLQKAIDVMAETLAGGGLHVNPGKCRTVSMEVDGKRKTWYVNEQRTFQVLGSAVGSMNAEDEYKYLGVLVGSKGRRKSYGALLEEGLLNITRAPLKPQQRIAMLVGHLVPKLMHRLVLGEVYKTQLARMDRQVRMAVRRWLRLAHDVPCAYFHSATGDGGLGIPDFVSTVRLNKQARFEKLLTSTDPVIHAAVREPAVMSKLQRWAGPACIAGRQAGNKTERLHAWRSNLVSTVDGAALAPSAAVPQVSRWVTSGNRFLSGSDYVKAVQVRIGALPTPARASRGRPEINGLCDTCRKPGTLGHIAQMCPRTHGGRVRRHDNISAYLAGRLRQRGYQVVCEPRIPIAGSLESRTSWLPKVQRPG

SEQ ID NO: 16940 - protein, 976 aa, Panulirus ornatus
MSGTSFSHVGADDDRSPTCPHCGKTFASFRGRRVHERQAHASSFHQELATRHVVSKARWSDEEVELLARAEAGMAAGPSLVAGQGLNQRLREIVPSRTVDAIKGLRRKASYKTRVQELISNTAPLHEDDEGEVMDGEPTMRRVPATGLSTPRGNTSEDAPRTGISVGADSSGETYIPPTVLTVPVVPRVPQQPQTIASFVAETVAYLDSLGPGPTSPSWGEDILNEVIDHLRRGDSLAAIRGAAEHATHVVSSCRSPDDRPNLGGGNSRQGENPGRVRQAEEVPLRGNRLRREQYRKVQRLYRENRSLAAGQVLKGDWEVPPTSVGPDRLNPFWEALFSRPSEPDTRTITDYDPECGQLAEVVTVDEVAHHLKATRTSAPGPDGMSTRLLKSIPPRILAKTFNLWMATSTLPEPLKANRTVLIPKVPNPTEPKDYRPITISCAIVRLLHKILSSRISSLIQIDDAQKAFVPIDGCLENLTILDAIVGRARGAHAHGVHLAFLDMAKAFDSVNHSTIERAMSRKGIPAAVRAYIMSSYDRAFTHIEGSDEMAGKVNMTRGVKQGDPLSPILFNLVIDEGITRVKETGVGVILGDQRVSALAFADDLVLVAQTPTGLQKAIDVMAETLAGGGLHVNPGKCRTVSMEVDGKRKTWYVNEQRTFQVLGSAVGSMNAEDEYKYLGVLVGSKGRRKSYGALLEEGLLNITRAPLKPQQRIAMLVGHLVPKLMHRLVLGEVYKTQLARMDRQVRMAVRRWLRLAHDVPCAYFHSATGDGGLGIPDFVSTVRLNKQARFEKLLTSTDPVIHAAVREPAVMSKLQRWAGPACITGRQAGSKTERLHAWRSNLVSTVDGAALAPSAAVPQVSRWVTSGNRFLSGSDYVKAVQVRISALPTPARASRGLPEINGLCDTCRKPGTLGHIAQMCPRTHGGRVRRHDKISAYLAGRLRQRGYQVVCEPRIPIAGSLESRTSWLPKVQRPG

SEQ ID NO: 16941 - protein, 1071 aa, Panulirus ornatus
MSGASNDHVGTADDRSPTCPHCGKTFASFRGRRVHERQAHAGSFHQELATRHVLSKARWSDEEIELLARAEAGMAAGPLLVAGQGLNQRLRDIVPSRTIDAIKGLRRKASYKSRVQELTLNLNLIQETDEGEVLGGSPIRRRVPAITRSNTRNDTEGEAPRTGMYACAEPGGEMTIPPAVLSVPAIPRIPQPPQTITSFMAETVAYFDLLLLDPTRTSWGEDALNGALDHLRRGDSLAAARAAAKHASEMLSSCSQPQDRPNRGEGDSRQSTNQGRVRRAEGIPLRGNRLRREQYRQTQRLYRENRSLAAGQILKGDWEVPPTSVGPDRLIPFWGALFSRPSEPDERVITDCDQESEQLASVITIDEVAHHLKATRTSAPGPDGMTTRLLKSIPPRVLAKMFNLWLATSALPEPFKANRTVLIPKVPNPTEPKDYRPITISCAVVRLLHKILSSRISRLIKIDEAQKAFVPVDGCLENLTILDAIVGRARAHAHGVHLAFLDMAKAFDSVNHSTIERAMSRKGISALVRSYIMSTYDRAFTKIEGSDEMADKIYMTRGVKQGDPLSPMLFNLVIDEGIARVKDTGVGVKLGDRTVSALAFADDLVLVAQTPTGLQKAMDVMAETLAGGGLQVNPGKCRTLSMEVDGKRKTWYVNKNRTYQVLGSAVGSMSAEDDYKYLGILVGAGGRRKSYGALLEEGLRNITRAPLKPQQRIALLVEHLIPKLMHRLVLGEVYKTQLARMDRQVRVAVRRWLRLAHDVPCAFFHSAPGDGGLGIPDFVSTVRFNKQARFEKLLTSADPVIQAAVREPAVLSKLQRWSGPACIAGHQAGGKLERQHAWRANLINTVDGAALAPSTTVPQVSRWVNSGNRFLSGADYVKAVQVRIGALPTPARASRGRPEINGLCDTCQKPGTLGHIAQMCPRTHGGRVKRHDNICAFLAGRLRQRGFQVSCEPRIPIVGSFRKPDIVASKGTETYIIDTQVSGVHFPLSAAHTYKCSYYGTPEVLRGVREYTGKDTVHVTSATLSWRGVWCQESVSALRGLGLTYRDLEVCSVKALTWTHSLYRMWSKGTG

SEQ ID NO: 16942 - protein, 1071 aa, Panulirus ornatus
MSGASNDHVGTADDRSPTCPHCGKTFASFRGRRVHERQAHAGSFHQELATRHVLSKARWSDEEVELLARAEAGMAAGPSLVAGQGLNQRLREIVPSRTIDAIKGLRRKASYKSRVQELTLNLNLIQETDEGEVLGGSPIRRRVPAITRSNTRNDTEGEAPRTGMYACAEPGGEMTTPPAVLSVPAIPRIPQPQQTITSFMAETVAYFDLLLLDPTRTSWGEDALNGALDHLRQGDSLAAARAAAKHASEMLSSCSQPQDRPNRGEGDSRQSTNQGRVRRAEGIPLRGNRLRREQYRQTQRLYRENRSLAAGQILKGDWEVPPTSVGPDRLIPFWGALFSRPSEPDERVITDYDLESEQLASVITIDEVAHHLKATRTSAPGPDGMTTRLLKSIPPRVLAKMFNLWLATSALPEPFKANRTVLIPKVPNPTEPKDYRPIAISCAVVRLLHKILSSRISRLIKIDEAQKAFVPVDGCLENLTILDAIVGRARAHAHGVHLAFLDMAKAFDSVNHSTIERAMSRKGIPALVRSYIMSTYDRAFTKIEGSDEMAEKIYMTRGVKQGDPLSPMLFNLVIDEGITRVKETGVGVKLGDKTVSALAFADDLVLVAQTPTGLQKAMDVMAETLAGGGLQVNPGKCRTLSMEVDGKRKTWYVNKNRTYQVLGSAVGSMSAEDDYKYLGILVGAGGRRKSYGALLEEGLRNITRAPLKPQQRIALLVEHLIPKLMHRLVLGEVYKTQLARMDRQVRVAVPRWLRLAHDVPCAFFHSTPGDGGLGIPDFVSTVRLNKQARFEKLLTSADPVIQAAVREPAVLSKLQRWSGPACIAGRQAGSKLERQHAWRANLINTVDGAALAPSTTVPQVSRWVNSGNRFLSGADYVKAVQVRIGALPTPARASRGRPEINGLCDTCQKPGTLGHIAQMCPRTHGGRVKRHDNICAFLAGRLRQRGFQVSCEPRIPIVGSFRKPDIVASKGTETYIIDTQVSGVHFPPSAAHTYKCSYYGTPEVLQGVREHTGKDTVHVTSATLSWRGAWCQESVSALRGLGLTYRDLEVCSVKALTWTHSLYRMWSKGTG

SEQ ID NO: 16943 - protein, 1071 aa, Panulirus ornatus
MSGASNDHVGTADDRSPTCPHCGKTFASFRGRRVHERQAHAGSFHQELATRHVLSKARWSDEEIELLARAEAGMAAGPLLVAGQGLNQRLRDIVPSRTIDAIKGLRRKASYKSRVQELTLNLNLIQETDEGEVLGGSPIRRRVPAITRSNTRNDTEGEAPRTGMYACAEPGGEMTIPPAVLSVPAIPRIPQPPQTITSFMAETVAYFDLLLLDPTRTSWGEDALNGALDHLRRGDSLAAARAAAKHASEMLSSCSQPQDRPNRGEGDSRQSTNQGRVRRAEGIPLRGNRLRREQYRQTQRLYRENRSLAAGQILKGDWEVPPTSVGPDRLIPFWGALFSRPSEPDERVITDCDQESEQLASVITIDEVAHHLKATRTSAPGPDGMTTRLLKSIPPRVLAKMFNLWLATSALPEPFKANRTVLIPKVPNPTEPKDYRPITISCAVVRLLHKILSSRISRLIKIDEAQKAFVPVDGCLENLTILDAIVGRARAHAHGVHLAFLDMAKAFDSVNHSTIERAMSRKGISALVRSYIMSTYDRAFTKIEGSDEMADKIYMTRGVKQGDPLSPMLFNLVIDEGIARVKDTGVGVKLGDRTVSALAFADDLVLVAQTPTGLQKAMDVMAETLAGGGLQVNPGKCRTLSMEVDGKRKTWYVNKNRTYQVLGSAVGSMSAEDDYKYLGILVGAGGRRKSYGALLEEGLRNITRAPLKPQQRIALLVEHLIPKLMHRLVLGEVYKTQLARMDRQVRVAVRRWLRLAHDVPCAFFHSTPGDGGLGIPDFVSTVRFNKQARFEKLLTSADPVIQAAVREPAVLSKLQRWSGPACIAGRQAGGKLERQHAWRANLINTVDGAALAPSTTVPQVSRWVNSGNRFLSGADYVKAVQVRIGALPTPARASRGRPEINGLCDTCQKPGTLGHIAQMCPRTHGGRVKRHDNICAFLAGRLRQRGFQVSCEPRIPIVGSFRKPDIVASKGTETYIIDTQVSGVHFPLSAAHTYKCSYYGTPEVLQGVREHTGKDTVHVTSATLSWRGAWCQESVSALRGLGLTYRDLEVCSVKALTWTHSLYRMWSKGTG

SEQ ID NO: 16944 - protein, 1071 aa, Panulirus ornatus
MSGANSSHVGTDDDRSPTCPHCGRTFASFRGRRVHERQAHAGSSHQELATRHVVSKVRWSDEEVELLARAEAEMAAGPLLVAGQGLNQRLREIVPSRSVDSIKGLRRKASYKTRVQELILNLNPVHEDDEGEVTDGEPTMRRVPAAIGSTPRGSRSEDAPRTGMSVGADSSGETFIPPTVLTVPAVPRVPQQPQTIASFVAETVTYLDSLGPGPATISWGEDILNGAIDHLRRGDSLAAIRGAAEHATYVVNSCRSPDDRPNRAGGVSRQRAGSGRARQAEELPLRGNKLRREQYRRVQRLYHDNRSLAAGQVLKGDWEVPPTSVGPDRLIPFWGALFSRPSEPDTRAITDYDPESGQLAEVVTVGEVAHHLKATRTSAPGPDGMSTRLLKSIPPRILAKTFNLWMATSTLPEPLKANRTVLIPKVPNPTEPKDYRPITISCVIVRLLHKILSSRITRLIKIDDAQKAFVPIDGCLENLTILDAIAGRARAHAHGVHLAFLDMAKAFDSVYHNTIERAMSRKGIPAAVRAYIMSSYDRAFTHIEGSDDNAEKVNMTRGVKQGDPLSPILFNLVIDEGITRVKETGVGVKLGDQRVSALAFADDLVLVAQTPTGLQKAIDVMAETLAGGGLQVNPGKCRTLSMEVDGKRRTWYVNQQRTFQVLGSAVGSMSPEDEYKYLGILVGSKGRRKSYGALLEEGLLNITRAPLKPQQRVALLVGHLVPKLNHRLVLGEVYKTQLARMDRQVRVAVRRWLRLAHDVPCAYFHSATGDGGLGIPDFVSTVRLNKQARFEKLLTSTDPVIHAAVREPAVMSKLQRWAGPARIAGRQAGNKFERLNAWRSNLVSTVDGAALAPSAAVPQVSRWVISGNRFMSGSDYVKAIQVRIGALPTPARASRGRPEINGLCDTCHKPGTLGHIAQMCPRTHGGRVRRHDNICAYLAGRLRQRGYQVVCEPRIPIAGSFRKPDIVASKGTEAWIIDAQVSGVHLALSTAHRHKCSYYGTPEVLQGVRDLTGKDTVHLTSATVNWRGAWCQESASALIGLGLTHRDLEVCSVKALTWTHSLYRMWSKSTG

SEQ ID NO: 16945 - protein, 1071 aa, Panulirus ornatus
MSGANSSHVGADDDRSPTCPHCGRTFASFRGRRVHERQAHAGSFHQELATRHVVSKARWSDEEVELLARAEAEMAAGPLLVAGQGLNQRLREIVPSRSVDSIKGLRRKASYKTRVQELILNLNPVHEDDEGEVTDGEPTMRRVPAAIGSTPRGSRSEDAPRTGMSVGADSSGETFIPPTVLTVPAVPRVPQQPQTIASFVAETVTYLDSLGPGPATISWGEDILNGAIDHLRRGDSLAAIRGAAEHATYVVNSCRSPDDRPNRAGGVSRQRAGSGRARQAEELPLRGNKLRREQYRRVQRLYHDNRSLAAGQVLKGDWEVPPTSVGPDRLIPFWGALFSRPSEPDTRAITDYDPESGQLAEVVTVGEVAHHLKATRTSAPGPDGMSTRLLKSIPPRILAKTFNLWMATSTLPEPLKANRTVLIPKVPNPTEPKDYRPITISCVIVRLLHKILSSRITRLIKIDDAQKAFVPIDGCLENLTILDAIAGRARAHAHGVHLAFLDMAKAFDSVYHNTIERAMSRKGIPAAVRAYIMSSYDRAFTHIEGSDDNAEKVNMTRGVKQGDPLSPILFNLVIDEGITRVKETGVGVKLGDQRVSALAFADDLVLVAQTPTGLQKAIDVMAETLAGGGLQVNPGKCRTLSMEVDGKRRTWYVNQQRTFQVLGSAVGSMSPEDEYKYLGILVGSKGRRKSYGALLEEGLLNITRTPLKPQQRVALLVGHLVPKLNHRLVLGEVYKTQLARMDRQVRVAVRRWLRLAHDVPCAYFHSATGDGGLGIPDFVSTVRLNKQARFEKLLTSTDPVIHAAVREPAVMSKLQRWAGPARIAGRQAGNKFERLNAWRSNLVSTVDGAALAPSAAVPQVSRWVTSGNRFMSGSDYVKAIQVRIGALPTPARASRGRPEINGLCDTCHKPGTLGHIAQMCPRTHGGRVRRHDNICAYLAGRLRQRGYQVVCEPRIPIAGSFRKPDIVASKGTEAWIIDAQVSGVHLALSTAHRHKCSYYGTPEVLQGVRDLTGKDTVHLTSATVNWRGAWCQESASALIGLGLTHRDLEVCSVKALTWTHSLYRMWSKSTG

SEQ ID NO: 16946 - protein, 999 aa, Panulirus ornatus
MAAGPSLVAGQGLNQRLREIVPSRTVDAIKGLRRKASYKTKVQELISNTAPLHEDDEGEVMDGEPTMRRVPATGLSTPRGNTSEDAPRTGISVGADSSGETYIPPTVLTVPVVPRVPQQPQTIASFVAETVAYLDSLGPGPTSPSWGEDILNEVIDHLRRGDSLAAIRGAAEHATHVVSSCRSPDDRPNRGGGNSRQGENPGRVRQAKEVPLRGNRLRREQYRKVQRLYRENRSLAAGQVLKGDWEVPPTSVGPDRLNPFWEALFSRPSEPDTRTITDYDPECGQLAEVVTVDEVAHHLKATRTSAPGPDGMSTRLLKSIPPRILAKTFNLWMATSTLPEPLKANRTVLIPKVPNPTEPKDYRPITISCAIVRLLHKILSSRISSLIQIDDAQKAFVPIDGCLENLTILDAIVGRARGAHAHGVHLAFLDMAKAFDSVNHSTIERAMSRKGIPAAVRAYIMSSYDRAFTHIEGSDEMAGKVNMTHGVKQGDPLSPILFNLVIDEGITRVKETGVGVILGDQRVSALAFADDLVLVAQTPTGLQKAIDVMAETLAGGGLHVNPGKCRTLSMEVDGKRKTWYVNEQRTFQVLGSAVGSMNAEDEYKYLGVLVGSKGRRKSYGALLEEGLLNITRAPLKLQQRIAMLVGHLVPKLMHRLVLGEVYKTQLACMDRQVRMAVRRWLRLAHDMPCAYFHSATGDGGLGIPDFVSTVRLNKQARFEKLLTSTDPVIHAAVREPAVMSKLQRWAGPACIAGRQAGSKTERLHAWRSILVSTVDGAALAPSAAVPQVSRWVTSGNRFLSGSDYVKAVQVRIGALPTPARASRGRPEINGICDTCRKPGTLGHIAQMCPRTHGGRVRRHDNISAYLAGRLRQRGYQVVCEPRIPIAGSFRKPDIVASKGTEAWIIDTQVSGVHLALSTAHQHKCSYYSTPEVLQGVRDLTGKDTVHLTSATVNWRGAWCQESASALIGLGLTHRDLEVCSVKALTWTHSLYRMWSKSTG

SEQ ID NO: 16947 - protein, 822 aa, Panulirus ornatus
MVNSCRSPDDRPNRAGGNSRQRASSGRARQVEEVPLRGNKLRREQYRRVQRLYHDNRTLAAGQVLKGDWEVPPTSVGPDRLIPFWGALFSRPSEPDTRAITDYDPESGQLAEVVTVGEVAHHLKATRTSAPGPDGMSTRLLKSIPPRILAKTFNLWMATSTLPEPLKANRTVLIPKVPNPTEPKDYRPITISCVIVRLLHKILSSRITRLVKIDDAQKAFVPIDGCLENLTILDAIAGRARAHAHGVHLAFLDMAKAFDSVYHNTIERAMSRKGIPAAVRAYIMSSYDRAFTHIEGSDDNAEKVNMTRGVKQGDPLSPILLNLVIDEGITRVKETGVGVKLGDQRVSALAFADDLVLVAQTPTGLQKAVDVMAETLAGGGLQVNPGKCRTLSMEVDGKRKTWYVNQQRTFQVLGSAVGSMSPEDEYKYLGILVGSKGRRKSYGALLEEGLLNITRAPLKPQQRVALLVGHLVPKLNHRLVLGEVYKTQLARMDRQVRVAVRRWLRLAHDVPCAYFHSATGDGGLGIPDFVSTVRLNKQARFEKLLTSTDPVIHAAVREPAVMSKLQRWAGPARIAGRQAGNKFERLNAWRSNLVSTVDGAALAPSAAVPQVSRWVTSGNRFMSGSDYVKAVQVRIGALPTPTRASRGRPEINGLCDTCHKPGTLGHIAQMCPRTHGGRVRRHDNICAYLAGRLRQRGYQVVYEPRIPIAGSFRKPDIVASKGTEAWIIDAQVSGVHLALSTAHRHKCSYYGTPEVLQGVRDLTGKDTVHLTSATVNWRGAWCQESASALIGLGLTHRDLEVCSVKALTWTHSLYRMWSKSTG

SEQ ID NO: 16948 - protein, 1037 aa, Euura saliciscinereae
MESESGEATDSADPTDPSQPSTSNNAGDTREAEEAGTVCRFPGCGREFKTSRGRGQHECKAHPDWYDTKKLEVPNVKARWAQEEKALMAKREAQILLDSNRRIMNINQRLQQMFGERTIEGIKGHRRRSSYKRRVKKYLDELQERARALQGRDESESDAHSGPSESASPRGATQHGVADAGSEEIKRFLAQLRPLNGQEFQVQRLNDICRAIPETETAELLLDTALYLRELFPLPVNQGQEKKDEDRPPSNRRQARRAEYAKVQDLWRKDPSKCVKAILADQLEEQTSIDQETMVPFWTAVMGKNTGLAPTLEEPREELVGLWKPVTTEEIKGAFPPAKSAVGPDGITTRALKAVPSVILLRLFNIFMLCGKLPEHLYVSKTILIPKKKGAEDPGDFRPITVSSVLLRTFHKILANRLKTIRLDERQRGFRNTDGCSDNIFLTDMVLRYHRATHRKLFMASLDIAKAFDSVSFEALIAVMRAKGLPKGMIEYVEEVYESSSTTLVHGDWISDLIHPTCGVKQGDPLSPILFNFVIDEMLKRIPEEVGVSLDGFKTNVAAFADDMILMASSEVGLQHLLDNVSRFLYERGLMVNAGKCLTVAMKSVPKQKKTAIDANCKFKINGRELPALKRTDEWRYLGVPFTPEGRLCDRGLDRLSTNIEKISKAPLKPQQRLWAMRTILIPGVLYGLSMGTAHLGYLKKIDRNIRAAVRKWVNLPQDCPNAYIHANIKNGGLGIPLRRKSRLMALRQSMFITGEVPSQFIEEEYRKVLRRLTEARDTIATTKQLDERWAKLLHASVDGSALRNSHVVKHQHDWVKEGTRFLSGKDFVMSCKARINALPTKSRTTRGQHHDRACRGGCGIPETLNHILQHCHRTHGKRIQRHDAVANYIARALSNKEYRVQKEPIFQTQEGRRKPDIVAKLGKTVLLIDAQVMSEQTDLEKADGDKVEYYAGNESLLKVIKETFDADTVLTMGATLSSRGLWSQRSAEELIRRGVIRQKDLKVISSRVIIGGIAAWNHFNKTTEVKTWRRRRTGVG

SEQ ID NO: 16949 - protein, 989 aa, Lytechinus variegatus
MGSHGIMHLCFWLLIVHIAHSEAFTRFIIPQYVRNEWQQKNNELKERITPIHEDLNHRIQTPKEAADSFSRTVFDYFASQPDFVQENNSQEYVQHEPKTLADARKRKNSLRRKAFSREGTDEDRKNFRSAVKAVSFLKKRSDKRKAEKTAAYQEKRYRNDFWNFSKQVCNGDFNKTTPTVSFSKEIADEYYPRKYSQTEQIDFNRCNWFPYIDVNDSNHDFDLTPVTPKQVKSVLYAKKASSAPGPDGLMYGLLKNTPCVHHFLATLFSQLLLETHDPPESWSRCQVTLIHKGGDTNAPENFRMISLTSCVSKVFHQILANRLVDYLTTNNYIDHNVQKAFINGINGCVEHNQVLHEIMSHSKARKRTVHVTFFDLADAFGSVSHELISHSLRRFHVPNNLSVYICNLYGRLQGNVKGNKWSSETFMLKKGVFQGDPLSPIIFLSCFNPLIEYLGQMKDSLGYDLNDNRIITTPYADDFNLITNNKVQHQKIIDQLHSYTSSMGLKLKPSKCCSLSICGGTPKEIKFSIGTESIRSIREKPHKFLGSNICFSGKPSEVYDFVHKEITDRIQRVDELSLRPEFKVAIYSRYLLNSIRFLLTVHTLQKTHLDKLDVLTDKYLKIWLGIPSRGANIAMVHLPQGLNIPRLSDIYRQSQSTAFSRSRVKADSVVNEAIDSAIERESQWSRKQSTVVQCNETHRRVENAINVETSTWHTVKKTVKKIIEEDTVKYWSDRVEPLLVQGKFASLLLLENENLTWKSIMYNLPKRVLSFVVNACIDSLPSYTNLHTWGKRLNDKCIFCPGTTGTLHHILSNCPVFLERYEWRHNNILRFMLKAFLENFTNGKIYTDLEGHSIAGGTIPPHILTTTLRPDLVILREDQKEIIITELTIPFETNIDDAHQRKVTKYESIVRDIKEKGYMVSFYAVEVGTRGLVDRNNKHRLKKLLRTTTSNFQPTKFFHTLSKLAILSSFSIFYARKERTWGEVRHLDP

SEQ ID NO: 16950 - protein, 1294 aa, Ephestia elutella
MATDVVWEANANNPEPTEAVGKSTRRKWSLEMNSFIWRAYLQITKLETDLSPYLEKLHQQFRREFPMVDVSRQRLGDQRRAILRRQLIPQQIMQQIRQEVEEDIATNNTQTSVSAPVYEHVHTHIPSSQIQSTNKKTRMRWSNDLNENIMRIYYRVTLLETNTSAYREQLYAQFVIQYPELSHISEQRIADQRRAIIQNKYITENRLGEIKSDITKELETAQNLGFSQNNTPIVETPQQDQQHSELFEPSCPENTWSGNLEVDTGSLPLHSTNTPADPELILQQERESYTSSLSSEFQRKITQTFSETLNKFSDTIPTDRPFIPKQKSTRKLALITQYINYNILPDYLSPEIDFVTLHNLIYCSAFTASICNGTKIHNNYRRNNKERPKPAWEVRLEKKIAELRKDISRITQYINGNRSNNILYYINQIQIRYKTHSQYENPNNTPQEYLDTLKQKLAAMSSRLRRYKSCTLRKSQNTQFISNEKQFYRSLNKSQQSPVADLPTAESLQNFWSDIWKNPVQHNNNPDWSDIIKNDAEKIQEMQFESISFSAVEQVIAKTHNWKSPGSDNIHNYWYKKLTNTHTYIHRFINNFIETPETLPAFVTQGLTYMIPKEGIVPDPAKYRPITCLQTFYKILTACISKVIYNHIENNNILAEQQKGCRKNSQGCKEQLIIDNTTMKYAQSRKRSIHTMFIDYRKAFDSVPHSWLIDVLKNYKIDDSIIKFLEIVMKNWQTKLKVTTQICDVTTEPIPIQRGIFQGDSLSPLWFCLALNPLSTLLNNTNLGFKLIQNRSSIKLSHLMYMDDIKLFANSKEELLELAETTEKFSNDIHMMFGVDKCKINSIEKGRVESNTYTLSTGEIIEALDTNTYKYLGFHQSKTIVHKEAKVQLIKTFRNRISQILKTHLNSRNIVKAINTFAIPVLTYSFGIINWSRTDLLKLQSSLNVLLTQHRKHHPKSCIQRLTLPRSEGGRGLIDICNLHNKQISSLRRYFFNKSESSELHKYVSHLDKKFTPLNLSNSSTQLNESQTTMVQKKQAWQQKSLHGRHYNDLEQIHIDKRWSNTWLKRGELFPETEAFMLAIQDQVIHTRNYSKYIIKDCNLTTDLCRHCNSASETIQHITGACKSLVQSDYKHRHDQVASIIHQYLAFEQKLIDKKQPYYKYIPEKILENNLVKIYWDRTIITDKTIHFNRPDITIHDKINSTVYLIDIAIPNTHNLQTTYTEKMSKYKDLAIEIQTQWRVATVKIIPIIVSTTAVIPRTLHTSLQLINIPTYVIHTIQKAVILNTCRIARKFLQ

SEQ ID NO: 16951 - protein, 979 aa, Cloeon dipterum
MNAVPRIPKIPSNRSANECVARMNRILERELLDDISLERLINLVKCAALAVCGVLGIRVNEDPTEPREEAETTFVPRWVRKIEKRINGFRKDISHVQAFLRYRFSSGRRVIRNVKRILLTMQLSLSSPTTNKRLMGKCEYLKQRIAALGSRIRRFNESSKRRREEKMFRENRKQFFRKLEGQKQVEGQMPSKESLQEFWAGIWSEPKEHDEGSSWIGDVKEKCEDMTHMEKVVIGVDDVSRVIKKSHNWKAPGHDGVQNFWWKKFPATHIILQSRFSDFIDNPNSIPQFLTLGNTFMLYKSGESNQAKNYRPITCLPTLYKFFTSIIAGKIEAHVSALNIVAPEQNGCRKGSRGCKELLVVDSAVAAQVKKEKRDFSTCWIDYKKAFDSVPHSWLVEVLRLYKVDGAVITLLQTCMQSWRTQLIVGRGPNATRTDEIQIRRGIFQGDSLSPLWFILAMNPLSMLINDLKCGYKMSEGQAGLISHQLYLDDLKLYAGNKRQLKKMLEVVEKFSDTIKMEFGLDKCAAVHVRKGKVVEGAEVLELLNGEVIDSLEEGGSYKYLGMQQLLQINSNDVRKLVEKKVLARVRKVCKTYLSGRSKIAAINSWAIPVAVYSFGVLKWSKSSLQALDRKIRVTLTKFRLHHPRSSIQRLYIPRKEGGRGLLCLEVMCARQCEQLRHYFVQNRSEFVEVIQEKNLAFGALDLASVDLVEFPLMSLEDRKQEWRGKELHGRFLRVLESQNVDKEWSTEWLRTSGIFGETEGFILSIQDEVISTRGYQRHVMHQDVSDRCRLCRVQNESIQHVCGGCSVLAPREYLERHNNVAKVVHQALAKNLKLQEEEQPYYRCKPPQVMEAGGVRLLWDSEMVTDRAVEANRPDIVVIDQRKKEGLIIDIAVPLDANVERTVVEKKRKYQPLAVELKEIYNLRKITVAPVVISTNGVVLKDWKKLMETLPLTTNHLKLMQKAAVLGTANIVRKTLAL

SEQ ID NO: 16952 - protein, 1217 aa, Cloeon dipterum
MPRLRKRISPIEGDSLNDGANSVENEAPVVSSGPSNHLRGSGAAPRMSTAAPSASLGATASSGLVEPSALLTQAGRPRQRVKWTDELNENLLRAYYRATKVETQVEGFRVRLLQEWEKIYPSSNLSEQNVSGQYRIILSSKRISEGRIHELKAEIQQEMNLTGVTETVQTVSRRRRRGVKLGAQEATNVADEVAGLIGQNQHGDDAEEEEVVAGEENQIDLRLNVDFQNYRSRYENAVMNAVPRIPKIPSNRSANECVARMNRILERELLDDISLERLINLVKCAALAVCSVLGIRVNEDPTEPREEAETTFVPRWVRKIEKRINGFRKDISHVQAFLRYRFSSGRRVIRNVKRILLTMQLSLSSPTANRRLMGKCEYLKQRIAALGSRIRRFNESSKRRREEKMFRENRKQFFRKLEGQKQVEGEMPSKESLQEFWAGIWSEPKEHDEGSSWIGDVKEKCEDLTHMEKVVIGVDDVSRVIKKSHNWKAPGHDGVQNFWWKKFPATHRILQSRFSDFIDNPNSIPQFLTLGNTFMLYKSGESNQAKNYRPITCLPTLYKFFTSIIAGKIEAHVSALNIVAPEQNGCRKGSRGCKELLVVDSAVAAQVKKEKRDFSTCWIDYKKAFDSVPHSWLVEVLRLYKVDGAVITLLQTCMQSWRTQLIVGRGPNATRTDEIQIRRGIFQGDSLSPLWFILAMNPLSMLINDLKCGYKMSEGQAGLIPHQLYLDDLKLYAGNKRQLKKMLEVVEKFSDTIKMEFGLDKCAAVHVRKGKVVEGAEILELLNGEVIDSLEEGGSCKYLGMQQLLQINSNDVRKLVEKKVLARVRKVCKTYLSGRSKIAAINSWAIPVAVYSFGVLKWSKSSLQALDRKIRVTLTKFRLHHPRSSIQRLYIPRKEGGRGLLCLEVMCARQCEQLRHYFVQNRSEFVEVIQEKNLAFGALDLASVDLVEFPLMSLEDRKQEWRGKELHGRFLRVLESQNVDKEWSTEWLRTSGIFGETEGFILSIQDEVISTRGYQRHVMHQDVSDRCRLCRVQNESIQHVCGGCSVLAPREYLERHNNVAKVVHQALAKNLKLQEEEQPYYRCKPPQVMEAGGVRLLWDSEMVTDRAVEANRPDIVVIDQRKKEGLIIDIAVPLDANMERTVVEKKRKYQPLAVELKEIYNLRKITVVPVVISTNGVVLKDWKKLMETLPLTTNHLKLMQKAAVLGTANIVRKTLAL

SEQ ID NO: 16953 - protein, 1060 aa, Cloeon dipterum
MNLTGVTETVQTVSRRRRRGVNLGAQEATNVADEEAGLIGQNQQHGDDAEEEEVVAGEENQIDLRLNVDFQNYRSRYENAVMNAVPRIPKIPSNRSANECVARMNRILERELLDDISLERLINLVKCAALAVCGVLGIRVNEDPTELREEAETTFVPRWVRKIEKRINGFRKDISHVQAFLRYRFSSGRRVIRNVKRILLTMQLSLSSPTTNKRLMGKCEYLKQRIAALGSRIRRFNESSKRRREEKMFRENRKQFFRKLEAQKQVEGEMPSKESLQEFWAGIWSEPKEHDEGSSWIGDVKEKCEDMTHMEKVVIGVDDVSRVIKKSHNWKAPGHDGVQNFWWKKFPATHRILQSRFSDFIDNPNSIPQFLTLGNTFMLYKSGESNQAKNYRPITCLPTLYKFFTSIIAGKIEAHVSALNIVAPEQNGCRKGSRGCKELLVVDSAVAAQVKKEKRDFSTCWIDYKKAFDSVPHSWLVEVLRLYKVDGAVITLLQTCMQSWRTQLIVGRGPNATRTDEIQIRRGIFQGDSLSPLWFILAMNPLSMLINDLKCGYKMSEGQAGLIPHQLYLDDLKLYAGNKRQLKKMLEVVEKFSDTIKMEFGLDKCAAVHVRKGKVVEGAEVLELLNGEVIDSLEEGGSYKYLGMQQLLQINSNDVRKLVEKKVLARVRKVCKTYLSGRSKIAAINSWAIPVAVYSFGVLKWSKSSLQALDRKIRVTLTKFRLHHPRSSIQRLYIPRKEGGRGLLCLEVMCARQCEQLRHYFVQNRSEFVEVIQEKNLAFGALDLASVDLVESPLMSLEDRKQEWRGKELHGRFLRVLESQNVDKEWSTEWLRTSGIFGETEGFILSIQDEVISTRGYQRHVMHQDVSDRCRLCRVQNESIQHVCGGCSVLAPREYLERHNNVAKVVHQALAKNLKLQEEEQPYYRCKPPQVMEAGGVRLLWDSEMVTDRAVEANRPDIVVIDQRKKEGLIIDIAVPLDANVERTVVEKKRKYQPLAVELKEIYNLRKITVAPVVISTNGVVLKDWKKLMETLPLTTNHLKLMQKAAVLGTANIVRKTLAL

SEQ ID NO: 16954 - protein, 1219 aa, Ophraella communa
MVTSLTPNMKLRSNRSLGKKSLPGDRQGMSGADAGHDSMRDVGGRALRRRAPATQQTTAHPHHCVSQTTPRAAPAEGAAQEPQPALTQAGLPRQRMKWTTAINESIMRIFYRVTNLGREIIGYRHQLHAEFCKEYPHIQVSEQRIADQYRVILRNNLIPETRLNTIKSEIEREISHINNEQIAELLPQPDFEFQERQDQTDNHIHNDSNDALYQKLLTEMSAAIMQYNGTNPLCRPALAKINSSKKLGLMLDIMNNRILPSHISGANTLDALHLTVYCGATAVARTLEVKVTTNCQRTRTEFNLPPWERRINKKIEKLRKEIGQLTEYIKGIRTRQLQKRVEEILNRNQHDSRQDPPNYTAQQCLDTLKQNLSVFAGRLRRYKTSNDRKRDNLLFQRSENKFYRKLDSSHNKTDKEYPNREQVEEFWESQLSQPTSCNIAAGWISEEHEICQEYTPMQFEPFTIEEISEILKQSHNWKAPGLDRIQNYWLKKFWCMHHQLANLINDVLLNPEKMPSYLTEGITYLLPKDLQNTHDPAKFRPITCLPTLYKLITSCLTKRIYAHCEQNNIVAVQQKGCTKGAMGCKEQLIIDSVICNQVCINRRNLFAAYVDYKKAFDSVPHEWLTAILRLYRVNTHFVSYLEHIMLTWRTRIQLQVPSKDTIETNTIPIRRGIFQGDSLSALWFCLAMNPLSRRLNSTRYGVSIRHNNKEIEKINHLLYMDDLKLMSATRNQLEQMLKIVEEFSGDIGMQFGLDKCRILNIVKGKIQPGAFEMRTGESISAIETEQTYKYLGIKQALRIDHRTMKSELTNEFIRRFRQVLRTKLNSKNLVKALNTYACSALGYSFGIVEWSRTDIENLQRKARTLLTKAHKYHPRSAIERTMLPRNKGGRGLVDIGKQMDQQLLNLRSYFHKKAESSTLHRAICEADDSTPLRLKELEISVHHKTDREKFQAWLQKPLHGRHPNEVTQDNVDSIASNYWLTAGQMFPDTEGFLLAIQDQVIPTRNYLKYIIRDPSIENHHCRYGCQTSETIQHITGGCQAFAASEYKERHDSAAKILHQELAKKLELLHVEKLPYYKYKPDSVLENINFKLYWDRTILTDHTVAHNRPDIVIVDKTARRTTLIDIAIPNNNNLEQKHSEKIAKYRDLEVLIKRQWEMNSVQTIPIILSTTGVIPKNLVENIKGLGLSQHLYKPMQKAVLLATARAVRKYMGNAADHNVT

SEQ ID NO: 16955 - protein, 1126 aa, Listronotus oregonensis
MKWTVSMNETIMRIFFRVTQLGQETIGYRQQLHAEFCREYPHIQVTQQRVADQYRVILRNNLIPETRLNTIRSEIERELRGAENNNEQVDETEPQLQPAPEAQEQPNGLNQEDIDELFQKLTTEMRGAVLEYDGTNPLCRPPLPRLNSSKKLGIVLDIINNRILPDFVSDAHTLEHLHMLIYCAATAVARTLNVKIITRQRVGHSSSKARTPHWERRLKTKIDNLRKEIGQLTEFIGGVNTGRLQRRVKEIVSRSQYHSGQDPANITAQQCLDTLKQKLSVFAGRLRRYRASNNRKQDNALFERAERVFYRKLNSSSDETDSRYPSKEQIEEFWKGQLATPAPCNTDASWVNEEHQACQEYRQMQFVPFTTEEISCIIKGLHNWKAPGPDGVQNYWFKKFWCTHHQLAVLINDVLLNPQKMLLFLTHGVTYLLPKDQHNTLDPTKYRPITCLPTLYKVITSCLTQRIQAHCEQNDIIATQQRGCAKGAMGCKEQLIIDSVVCNQAYTGRRNLFAAYVDYKKAFDSVPHEWLAAILRIYKVDNYIVSFLENIMLTWRTKIQLQVPSSDNIETGTIPIRRGIFQGDSLSPLWFCLAMNPLSRRLNSTKYGFSIRNNNEDVIRLNHLLYMDDLKLMGATKNQLEQMLKIVEEFSGDIGMRFGLDKCRVLNIVRGKIQPGAFEMQDGQNIAAMEAEETYKYLGMKQAQRIDQRTMKDELTNEFIRRVRKVSKTNLNSKNLFKALNTYACSALTYSFGIVEWSKTDIDKLQRKIRTLLTKAHKHHPRSATERTTLPRYLGGRGLVDIGKQLDQQILNLRSYFHRLADSSPIHQAICGADDSTPLRLMDREMRRHHQTDQEKLQAWLEKPLHGRHPNEVTQENVDKFASNYWLTSGKMFPETEGFLLAIQDQVIPTKNYLKHIVRDPSIENDRCRYGCQTSETIQHITGGCQAFAASEYKERHDSAAKILHQQLAEKLKLLQTAKLPYYKYTPEPILENNEFKLYWDRTVLTDQTVAHNRPDIVLVDKVGRKTTLIDVAIPNNNNLREKYNEKIAKYRNLETQIRRQWGMNNVQTIPIILSTTGIIPKTLLQNIKGLGLGEHLYKAMQKAVLLATARTVRKFVGNTAEHNVT

SEQ ID NO: 16956 - protein, 1219 aa, Ophraella communa
MVTSLTPNMKLRSNRSLGKKSLPGDRQGMSGADAGHDSMRDVGGRALRRRAPATQQTTAHPHHCVSQTTPRAAPAEGAAQEPQPALTQAGLPRQRMKWTTAINESIMRIFYRVANLGREIIGYRHQLHAEFCKEYPHIQVSEQRIADQYRVILRNNLIPETRLNTIKSEIEREISHINNEQIAELLPQPDFEFQERQDQTDNHIHNDSNDALYQKLSTEMSAAIMEYNGTNPLCRPALPKINSSKKLGLMLDIMNNRILPSHISGANTLDALHLTVYCGATAVARTLEVKVTTNCQRTRTEFNLPPWERRINKKIEKLRKEIGQLTEYIKGIRTRQLQKRVEEILNRNQHHSRQNPPNYTAQQCLDTLKQNLSVFAGRLRRYKTSNDRKRDNLLFQRSENKFYRKLDSSHNKTDKEYPNREQVEEFWESQLSQPTSCNIAAGWISEEHEICQKYTPMQFEPFTIEEISEILKQSHNWKAPGLDRIQNYWLKKFWCMHHQLANLINDVLLNPEKMPSYLTEGITYLLPKDLQNTHDPAKFRPITCLPTLYKLITSCLTKRIYAHCEQNNIVAVQQKGCTKGAMGCKEQLIIDSVICNQVCINRRNLFAAYVDYKKAFDSVPHEWLTAILRLYRVNTHFVSYLEHIMLTWRTRIQLQVPSKDTIETNTIPIRRGIFQGDSLSALWFCLAMNPLSRRLNSTRYGVSIRHNNKEIEKINHLLYMDDLKLMSATRNQLEQMLKIVEEFSGDIGMQFGLDKCRILNIVKGKIQPGAFEMRTGESISAIETEQTYKYLGIKQALRIDHRTMKSELTNEFIRRFRQVLRTKLNSKNLVKALNTYTCSALGYSFGIVEWSRTDIENLQRKARTLLTKAHKYHPRSAIERTMLPRNKGGRGLVDIGKQMDQQLLNLRSYFHKKAESSTLHRAICEADDSTPLRLKELEISVHHKTDREKFQVWLQKPLHGRHPNEVTQDNVDSIASNYWLTAGQMFPDTEGFLLAIQDQVIPTRNYLKYIIRDPSIENHHCRYGCQTSETIQHITGGCQAFAASEYKERHDSAAKILHQELAKKLELLHVEKFPYYKYKPDSVLENINFKLYWDRTILTDHTVAHNRPDIVIVDKTARRTTLIDIAIPNNNNLEQKHSEKIAKYRDLEVLIKRQWEMNSVQTIPIILSTTGVIPKNLVENIKGLGLSQHLYKPMQKAVLLATARAVRKYMGNAADHNVT

SEQ ID NO: 16957 - protein, 752 aa, Ophraella communa
MEPLTITKDDVTRASKKVLNWKSPGVDNIQNFWIKKFTSTHEHLAKLFNQSITTPNSIPEFFTKGITYLIPKSNETKNPSKYRPITCLPTLYKILTSIITDKIEKHLMTNNIIHEEQKGCKRGNRGCKEQVIIDQIITKHAYQKHRNLYCAYIDYQKAFDSVPHTWLTHILRIYKINESLIQFLEHLMKTWRTTLNVHTQDGTITSDEINIRKGIFQGDSLSALWFCIGLNPLSSMLKDTNCGYRIQTHDLPINHLLYMDDLKLYAQTEQQLKNLLKTTEIFSDDIKMNFGIDKCKTCSIKKCKVQQHPGYDTEHDTIEGLHQDETYKYLGLQQNPLINHTNLREQIKTKFQIRLNKIFNTQLNARNKTTATNAYAIPLLIYTFGIIKWSDTELDDLNRMVRTTATKYRAHHLHSAVERFTIPREEGGRSFIDIKNMHYEQLKNLRSYFYTRTDSTLHQTVMRTDNSYTPLNLKNININIEEKITTNQQKMEIWKNKQLHGKHPYNITQAHIDKQASNFWLKSGQLFAETEGFMIAIQDKVINTRNYKRHILKQQIPSDKCRLCNEQTETIDHLTSACRILAPKQYTRRHDNVCKIIHSHLAVKHLLMDTYIPYFKYTPAPVMENSQYKLYWNRSIITDRTTMNNKPDITLIDKQNRNTYLIDIAVPNTHNLQAKHTEKIEKYLPLAEETRQMWHQNKTTIIPIIISATGVIPKSLHHSLQLLDIQPHIFRNIQKAVIMDTCSIVRQILNIP

SEQ ID NO: 16958 - protein, 1281 aa, Ophraella communa
MKQDKTYGTSVEILALSRILKLNFNIYTEAKRPTNNTFRTNNIPTKIETDESDRETCNLLFTGNLEQGHFETLKKIDNDEETNCRINQIEMEKITQECIITKKGKANIQRREVIGGKAKEESLTKHTQSKISPLDSEKTRNNQPIVKQNTRVKWTNEEYAEIIWCHLYTIETNGTANLNKTFELWKQRNSNSNRQLSANTLATQRRFILNNNKLTQAQIEDIRIKVKQSAQNLENNNHIEDQPTQHIEHVIPKSNNDSETNENTDTANTRTELTNSNEIELNTLKEQIRRKLENYEITVETISRPPLKKINETQQAKILIKMGNIVIKEIIDEQKEVYNHVTPINKLIYATAESIQDNLIPKSKENQRTRQVNNEQPWKKRIYRKIGLMRKDLSQLKECLNSNLNDTMKEKKAQLYRKYKIKNNKEHEKSMEKLKQLISAKTYRVQRYTERSNQYQHNMLFSNNTKKFYNNVLNKSIQNVNTPDSEELEKYWKNIWEKETSYNKQAEWIEDEYRRTSKIKRMQWEEITKAEIALALNTAANWKAPGTDGIPNFWLKRLTAVHIQLARAFNEMISGNQEIPNWLTKGKTHLIPKNEATAEARNYRPITCLNNIYKTLTKVIAERLYKHLQENQLFPQEQKGCSKNTYGCKDHLLTSKLIDKDCKNNRKNMALAWIDYVKAFDSVPHSWIIEALNIYRTSNQILSFLSRAMKTWKTDLNLTTTEKSMTIENIDIKTGIYQGDSLSALLFCVILFPLSSILNNSNTGYQCKNEKQKINHLLYIDDAKLIAKDEEELEEQLQLVKRFSDDVGLKFGIDKCAKATFIKGKIQTSENINLDDSTTIRSLEHHKTYKYLGIEEHDGVQHKKMKTKLKSEYYRRIRQIMKTELNAKNKITAISSLAVPVIQYSFGIIKWTKAEIRKVDSQTRKLLTMYGALHPRSDINRLYVSRKEGGRGMQNIENSHSIAIEGLNQYLKLKSNTDRYLRMVYRQQIKDYMDESDQEDTNNKKTVTEKVKAYKSHLKNKLKNNQLTTWKQKLMHGQILKETEKETINSTLTWQWLNHANLKSETEALVTACQEQAIATNYMKARILKTGNDPKCRLCRTQNETIHHVIAGCPILAKKAYLDRHNIVAAQLHWNICKNYKIEVEEKWYKHKPDPVINTPEVTIIWDTQVQTDREIKANKPDIIIKNKKQKTCLLIDVAIPADSNITEKEAEKRLKYKDLQIEIQRLWNMKTKVVPVVIGATGLISKATTEAIKEVPGNHNLPMMQRAVVLSTAHIVRKVL

SEQ ID NO: 16959 - protein, 1087 aa, Nesidiocoris tenuis
MSSKNNQPQSLCRPTGTQSSREGSLVRPRQGRPLAGSSSFSQPLPQASNVTADSFSSSQNSLFLCSTCSRSFGSSIGLGQHRRKAHPLEYNAALQDRPPRKRRYEDEELRLIAGAERDLVRERPEVSAHEIINHLALGFPERTREALRCQRKTQRYRQMLSAMMDVAEERLVRPVDDDAPSIGDSSQDQVGAPVEDENQHMIEPGPSGVDPSPEVESQILREVRRLAPLVAKHDGPSLAAIASEASHGKEGLEEAVADYVIRVFAGERRPRAGGRRRTGDAAPVVGNRQRKTNLRREAYQRTQGTWKRDPGLVAKEILDGEEGELPQSPDLAAFKAFWEPIMAAPSHSADAPVTSPAEHPNEALWGIMDKPFSAIEIQRNRVEVRTSSGPDGINAGKWNRAPRVVQVLVLNLLLLAGRCPERLTVARTVFIPKKGGVGPGSFRPISIASVVFRHFQKLLAARLAGADVVDDRQRAFRVADGTAENLAVLQTMLFHAKTRRRQLHLASLDVSKAFDSASHYAIRDCLVGVGAPPNFVRYVMELYENGGTRLQVKGELSDRIPIKRGVRQGDPLSPLLFNLVVDTALRGLPAEVGFSVSPEIRVGALAFADDVVLAASTGRGLQLSIDRFATQLGVCGLSVNPGKSSTISIVPVAKVKKTKIVEGDFRVGGEKLASRGIAETWRYLGVDFVGAAVGPSVKTDLKRGLERIGRAPLKPQQRLRLLTVYLLPRLNYGLTFGRTTKGKLKKADQAVRAAVRGWLQLPHDAPVGYFHAKVKEGGLGIPALETTIPTLRKNRLLALRSSTWDVARALLDVEFVKRQLDWCDRQLSEEQRRSSFHRTRLHGSVDGVELKQAAECSASTRWVAQSAEGIPGRDYVHYHAVRINALPTRVRTSRGRPAMDRSCRACAAPAETLAHVVQVCPRTHGGRVKRHDAVTRTVAGSLSNRGWSVECEKTYRLPGGIVLRPDLVATRPDGEKVFILDMQVVSGSSNLRAAHEAKIRKYDRVDLKSAVASQRGIEVGRVEVAAATLSWRGIWHGKSAESLRAMGVPLGVLNGVTTRVILGSYLNWWGFSTSTSNFRKCQRGGVG

SEQ ID NO: 16960 - protein, 980 aa, Stratiolaelaps scimitus
MNPGPIAPARDATPARDATPARRAASARDATGPPRVPCPHCEGRFSRRGLNRHITVRHPEVRSVPQPSPAPQPLELRLQAAMREARVFSIVPKATRSLVAVALTDVLRDVHTNNDVPSWEALLAFARVVLQMPDKGDTSRSLPAVIRGNLAAFRAGARLEYRLRRHFPRGPRPPPTDTGQRAARIASQKLSEGDISGAARALCSTDSATDSAEALNALRAKHPPAPPDYSFPARPPQVDIAPTSTDEVLAAVSSFPPSSSAGPDGLRPRHLRDLLSPALGAVATALAKALAKVVDCMRAGTVPSALRPILFGARLIALKKKDGSIRPIACSSTIRRLAAKIAWVNERDAVVTLLGPTQLGCGQASGTEIAAHAARAFIHAHPDAALVKLDFRNAFNTVRRDLVLREVAEHVPGLFPLVDLAYRCPSHLIMDNAVISSECGVQQGDPLGPALFCLALRPLAVSLQSRLRLWYMDDGTLAGDPATVASDVQRVLDYEGRSGLALNPTKCEIFSLDAQPDLQRSLPGCRLTQRLSLELVGSPLTDEAIRPLLDRCLERTAVMLDRLPLLSAHQGLFLLRSCFSAARMQHLLRTCPAGTEASALHEYDDLVLEALTTILNLQLPPEAASQASLPVRFGGLGILSVRRLADVCYAASLTAVADMVATVLPPEALAHFSASQEAALDQTGVRARVPPDKQSKQRAWSDALHQELRDSLLASAPHVADQARLRAVDRPGAGAWLHALPPSSLGTALDDRSLRFCVGLRLGAPVVAAHSCERCGDPVATNGHHGLSCERSAGRHPRHTMLNDTLVRALHSAGIPCTREPQGLDTSDGRRPDGLTLIPFHRGLHLVWDGTVVDTLAPSYVNHCATIPGYAVARAERAKLRKYAALQATHLFSPLAFETLGGHGPLTANFLEGVYHRLIRATGDKRAGSFLLQRLSLAVQRGNAIAFLGTLSSSPPPPIIPRNTDLPYVLAFVSATAEYS

SEQ ID NO: 16961 - protein, 985 aa, Stratiolaelaps scimitus
MNPGPIAPARDASPARDATPARDAIAARDATAARDATAARDATAARRAASARDATGPPRVPCPHCEGRFTRRGLNRHITVRHPEVRSVPQPSPAPQPLELRLQAAMREARVFSIVPKATRSLVAVALTDVLRDVHSNNDVSSWEALLAFARVVLQMPDKGDTSRSLPAVIRGNLAAFRAGARLEYRLRRQLPRGPRPPPTDTGQMAARIATQKLSEGDISGAARALCSTDSATDSAEALHALRAKHPPAPPDYAFPVRPPQVDIAPTSTDEVFAAVSSFPPSSSAGPDGLRPRHLRDLLSPALGAVATALAKALAKVVDCMRAGTVPSALRPILFGARLIALKKKDGSIRPIACSSTIRRLAAKIAWVNERDTVVTLLGPTQLGCGQASGTEIAAHAARAFIHAHPDAALVKLDFRNAFNTVRRDLVLREVAEHVPGLFPLVDLAYRGPSHLIMDNAVISSECGVQQGDPLGPALFCLALRPLAVSLQSRLRLWYMDDGTLAGDPATVASDVQRVLDYEGRSGLALNPTKCEIFSLDAQPDLQRSLPGCRLTQRLSLELVGSPLTDEAIRPLLDRCLERTAVMLDRLPLLSAHQGLFLLRSCFSAARMQHLLRTCPAGTEASALHDYDDLVLDALTTILNLQLPPEAASQATLPVRFGGLGILSVRRLADVCYAASLTAVADMVATVLPPEALAHFSASQEAALDQTGARARVPPDKQSKQRAWSDALHQELRDSLLASAPHAADQARLRAVDRPGAGAWLHALPSSSLGTALDDRSLRFCVGLRLGAPVVAAHSCERCGDPVATNGHHGLSCERSAGRHPRHTMLNDTLVRALHSAGIPCTREPQGLDTSDGRRPDGLTLVPFHRGQHLVWDGTVVDTLAPSYVNHCATIPGYAVARAERAKLRKYAALQATHLFSPLAFETLGGHGPLTANFLEGVYHRLIRATGDKRAGSFLLQRLSLAVQRGNAIAFLGTLSSSPPPPHNL

SEQ ID NO: 16962 - protein, 1021 aa, Stratiolaelaps scimitus
MNPGPIAPARDASPARDATPARDATPARDAIAARDAIAARDAIAARDATAARDATAARDATAARDATAARDATAARDATAARRAASARDATGPPRVPCPHCEGRFTRRGLNRHITVRHPEVRSVPQPSPAPQPLELRLQAAMREARVFSIVPKATRSLVAVALTDVLRDVHSNNDVSSWEALLAFARVVLQMPDKGDTSRSLPAVIRGNLAAFRAGARLEYRLRRQLPRGPRPPPTDTGQMAARIATQKLSEGDISGAARALCSTDSATDSAEALHALRAKHPPAPPDYAFPVRPPQVDIAPTSTDEVFAAVSSFPPSSSAGPDGLRPRHLRDLLSPALGAVATALAKALAKVVDCMRAGTVPSALRPILFGARLIALKKKDGSIRPIACSSTIRRLAAKIAWVNERDTVVTLLGPTQLGCGQASGTEIAAHAARAFIHAHPDAALVKLDFRNAFNTVRRDLVLREVAEHVPGLFPLVDLAYRGPSHLIMDNAVISSECGVQQGDPLGPALFCLALRPLAVSLQSRLRLWYMDDGTLAGDPATVASDVQRVLDYEGRSGLALNPTKCEIFSLDAQPDLQRSLPGCRLTQRLSLELVGSPLTDEAIRPLLDRCLERTAVMLDRLPLLSAHQGLFLLRSCFSAARMQHLLRTCPAGTEASALHDYDDLVLDALTTILNLQLPPEAASQATLPVRFGGLGILSVRRLADVCYAASLTAVADMVATVLPPEALAHFSASQEAALDQTGARARVPPDKQSKQRAWSDALHQELRDSLLASAPHAADQARLRAVDRPGAGAWLHALPSSSLGTALDDRSLRFCVGLRLGAPVVAAHSCERCGDPVATNGHHGLSCERSAGRHPRHTMLNDTLVRALHSAGIPCTREPQGLDTSDGRRPDGLTLVPFHRGQHLVWDGTVVDTLAPSYVNHCATIPGYAVARAERAKLRKYAALQATHLFSPLAFETLGGHGPLTANFLEGVYHRLIRATGDKRAGSFLLQRLSLAVQRGNAIAFLGTLSSSPPPPHNP

SEQ ID NO: 16963 - protein, 999 aa, Stratiolaelaps scimitus
MNPGPIAPARDASPARDATPARDAIAARDATAARDATAARDATAARDATAARRAASARDATGPPRVPCPHCEGRFTRRGLNRHITVRHPEVRSVPQPSPAPQPLELRLQAAMREARVFSIVPKATRSLVAVALTDVLRDVHSNNDVSSWEALLAFARVVLQMPDKGDTSRSLPAVIRGNLAAFRAGARLEYRLRRQLPRGPRPPPTDTGQMAARIATQKLSEGDISGAARALCSTDSATDSAEALHALRAKHPPPPPDYAFPVRPPQVDIAPTSTDEVFAAVSSFPPSSSAGPDGLRPRHLRDLLSPALGAVATALAKALAKVVDCMRAGTVPSALRPILFGARLIALKKKDGSIRPIACSSTIRRLAAKIAWVNERDTVVTLLGPTQLGCGQASGTEIAAHAARAFIHAHPDAALVKLDFRNAFNTVRRDLVLREVAEHVPGLFPLVDLAYRGPSHLIMDNAVISSECGVQQGDPLGPALFCLALRPLAVSLQSRLRLWYMDDGTLAGDPATVASDVQRVLDYEGRSGLALNPTKCEIFSLDAQPDLQRSLPGCRLTQRLSLELVGSPLTDEAIRPLLDRCLERTAVMLDRLPLLSAHQGLFLLRSCFSAARMQHLLRTCPAGTEASALHDYDDLVLDALTTILNLQLPPEAASQATLPVRFGGLGILSVRRLADVCYAASLTAVADMVATVLPPEALAHFSASQEAALDQTGARARVPPDKQSKQRAWSDALHQELRDSLLASAPHAADQARLRAVDRPGAGAWLHALPSSSLGTALDDRSLRFCVGLRLGAPVVAAHSCERCGDPVATNGHHGLSCERSAGRHPRHTMLNDTLVRALHSAGIPCTREPQGLDTSDGRRPDGLTLVPFHRGQHLVWDGTVVDTLAPSYVNHCATIPGYAVARAERAKLRKYAALQATHLFSPLAFETLGGHGPLTANFLEGVYHRLIRATGDKRAGSFLLQRLSLAVQRGNAIAFLGTLSSSPPPPIISRNPALLYV

SEQ ID NO: 16964 - protein, 1067 aa, Stratiolaelaps scimitus
MLIEAPVSTQAPARSYAAAARGIVVPSDGAQVPMVLLPNPRAIPAPSRRPAPRRPAPRRPAPPFFMNPGPIAPARDASPARDATPARDATPARDATAARDATAARDATAARDATAARRAASARDATGPPRVPCPHCEGRFTRRGLNRHITVRHPEVRSVPQPSPAPQPLELRLQAAMREARVFSIVPKATRSLVAVALTDVLRDVHSNNDVSSWEALLAFARVVLQMPDKGDTSRSLPAVIRGNLAAFRAGARLEYRLRRQLPRGPRPPPTDTGQMAARIATQKLSEGDISGAARALCSTDSATDSAEALHALRAKHPPAPPDYAFPVRPPQVDIAPTSTDEVFAAVSSFPPSSSAGPDGLRPRHLRDLLSPALGAVATALAKALAKVVDCMRAGTVPSALRPILFGARLIALKKKDGSIRPIACSSTIRRLAAKIAWVNERDTVVTLLGPTQLGCGQASGTEIAAHAARAFIHAHPDAALVKLDFRNAFNTVRRDLVLREVAEHVPGLFPLVDLAYRGPSHLIMDNAVISSECGVQQGDPLGPALFCLALRPLAVSLQSRLRLWYMDDGTLAGDPATVASDVQRVLDYEGRSGLALNPTKCEIFSLDAQPDLQRSLPGCRLTQRLSLELVGSPLTDEAIRPLLDRCLERTAVMLDRLPLLSAHQGLFLLRSCFSAARMQHLLRTCPAGTEASALHDYDDLVLDALTTILNLQLPPEAASQATLPVRFGGLGILSVRRLADVCYAASLTAVADMVATVLPPEALAHFSASQEAALDQTGARARVPPDKQSKQRAWSDALHQELRDSLLASAPHAADQARLRAVDRPGAGAWLHALPSSSLGTALDDRSLRFCVGLRLGAPVVAAHSCERCGDPVATNGHHGLSCERSAGRHPRHTMLNDTLVRALHSAGIPCTREPQGLDTSDGRRPDGLILVPFHRGQHLVWDGTVVDTLAPSYVNHCATIPGYAVARAERAKLRKYAALQATHLFSPLAFETLGGHGPLTANFLEGVYHRLIRATGDKRAGSFLLQRLSLAVQRGNAIAFLGTLSSSPPPPPIISRNPALLYVLP

SEQ ID NO: 16965 - protein, 985 aa, Stratiolaelaps scimitus
MNPGPIAPARDASPARDATPARDATPARDATPARDAVAARDATAARRAASARDATGPPRVPCPHCEGRFTRRGLNRHITVRHPEVRSVPQPSPAPQPLELRLQAAMREARVFSIVPKATRSLVAVALTDVLRDVHSNNDASSWEALLAFARVVLQMPDKGDTSRSLPAVIRGNLAAFRAGARLEYRLRRQLPRGPRPPPTDTGQMAARIATQKLSEGDISGAARALCSTDSATDSAEALHALRAKHPPAPPDYAFPVRPPQVDIAPTSTDEVFAAVSSFPPSSSAGPDGLRPRHLRDLLSPALGAVATALAKALAKVVDCMRAGTVPSALRPILFGARLIALKKKDGSIRPIACSSTIRRLAAKIAWVNERDTVVTLLGPTQLGCGQASGTEIAAHAARAFIHAHPDAALVKLDFRNAFNTVRRDLVLREVAEHVPGLFPLVDLAYRGPSHLIMDNAVISSECGVQQGDPLGPALFCLALRPLAVSLQSRLRLWYMDDGTLAGDPATVASDVQRVLDYEGRSGLALNPTKCEIFSLDAQPDLQRSLPGCRLTQRLSLELVGSPLTDEAIRPLLDRCLERTAVMLDRLPLLSAHQGLFLLRSCFSAARMQHLLRTCPAGTEASALHDYDDLVLDALTTILNLQLPPEAASQATLPVRFGGLGILSVRRLADVCYAASLTAVADMVATVLPPEALAHFSASQEAALDQTGARARVPPDKQSKQRAWSDALHQELRDSLLASAPHAADQARLRAVDRPGAGAWLHALPSSSLGTALDDRSLRFCVGLRLGAPVVAAHSCERCGDPVATNGHHGLSCERSAGRHPRHTMLNDTLVRALHSAGIPCTREPQGLDTSDGRRPDGLTLVPFHRGQHLVWDGTVVDTLAPSYVNHCATIPGYAVARAERAKLRKYAALQATHLFSPLAFETLGGHGPLTANFLEGVYHRLIRATGDKRAGSFLLQRLSLAVQRGNAIAFLGTLSSSPPPPHNP

SEQ ID NO: 16966 - protein, 955 aa, Stratiolaelaps scimitus
MNPGPIAPARDATPARRAASARDATGPPRVPCPHCEGRFSRRGLNRHITVRHPEVRSVPQPSPAPQPLELRLQAAMREARVFSIVPKATRSLVAVALTDVLRDVHTNNDVPSWEALLAFARVVLQMPDKGDTSRSLPAVIRGNLAAFRAGARLEYRLRRHFPRGPRPPPTDTGQRAARIASQKLSEGDISGAARALCSTDSATDSAEALNALRAKHPPAPPDYAFPARPPQVDIAPTSTDEVLAAVSSFPPSSSAGPDGLRPRHLRDLLSPALGAVATALAKALAKVVDCMRAGTVPSALRPILFGARLIALKKKDGSIRPIACSSTIRRLAAKIAWVNERDTVVTLLGPTQLGCGQASGTEIAAHAARAFIHAHPDAALVKLDFRNAFNTVRRDLVLREVAEHVPGLFPLVDLAYRCPSHLIMDNAVISSECGVQQGDPLDPALFCLALRPLAVSLQSRLRLWYMDDGTLAGDPATVASDVQRVLDYEGRSGLALNPTKCEIFSLDAQPDLQRSLPGCRLTQRLSLELVGSPLTDEAIRPLLDRCLERTAVMLDRLPLLSAHQGLFLLRSCFSAARMQHLLRTCPAGTEASALHEYDDLVLEALTTILNLQLPPEAASQASLPVRFGGLGILSVRRLADVCYAASLTAVADMVATVLPPEALAHFSASQEAALDQTGVRARVPPDKQSKQRAWSDALHQELRDSLLASAPHVADQARLRAVDRPGAGAWLHALPSSSLGTALDDRSLRFCVGLRLGAPVVAAHSCERCGDPVATNGHHGLSCERSAGRHPRHTMLNDTLVRALHSAGIPCTREPQGLDTSDGRRPDGLTLVPFHRGLHLVWDGTVVDTLAPSYVNHCATIPGYAVARAERAKLRKYAALQATHLFSPLAFETLGGHGPLTANFLEGVYHRLIRATGDKRAGSFLLQRLSLAVQRGNAIAFLGTLSSSPPPPHNP

SEQ ID NO: 16967 - protein, 887 aa, Stratiolaelaps scimitus
MREARVFSIVPKATRSLVAVALTDVLRDVHTNNDVSSWEALLAFARVVLQMPDKGDTSRSLPAVIRGNLAAFRAGARLEYRLRRHLARGPRPPPTDTGQTAARIASQKLSEGDISGAARALCSTDSATDSAEALDALRAKHPPAPPDYAFPDRPPQVDIAPTSPDEVFAAVSSFPPSSSAGPDGLRPRHLRDLLSPALGAVATALAKALAKVVDCMRAGTVPSALRPILFGARLIALKKKDGSIRPIACSSTIRRLAAKIAWVNERDTVVTLLGPTQLGCGQASGTEIAAHAARAFIHAHPDAALVKLDFRNAFNTVRRDLVLREVAEHVPGLFPLVDLAYRGPSHLIMDNAVISSECGVQQGDPLGPALFCLALRPLAVSLQSRLRLWYMDDGTLAGDPATVASDVQRVLDYEGRSGLALNPTKCEIFSLDAQPDLQRSLPGCRLTQRLSLELVGSPLTDEAIRPLLDRCLERTAVMLDRLPLLSAHQGLFLLRSCFSAARMQHLLRTCPAGTEASALHEYDDLVLDALTTILNLQLPPEAASQATLPVRFGGLGILSVRRLADVCYAASLTAVADMVATVLPPEALAHFSASQEAALDQTGARARVPPDKQSKQRAWSDALHQELRDSLLASAPHAADQARLRAVDRPGAGAWLHALPSSSLGTALDDRSLRFCVGLRLGAPVVAAHSCERCGDPVATNGHHGLSCERSAGRHPRHTMLNDTLVRALHSAGIPCTREPQGLDTSDGRRPDGLTLVPFHRGQHLVWDGTVVDTLAPSYVNHCATIPGYAVARAERAKLRKYAALQATHLFSPLAFETLGGHGPLTANFLEGVYHRLIRATGDKRAGSFLLQRLSLAVQRGNAIAFLGTLSSSPPPTPIIPRNSDLL

SEQ ID NO: 16968 - protein, 962 aa, Stratiolaelaps scimitus
MNPDPTAPARDATPARRAASAQDATGPPRVPCPHCEGRFSRRGLNRHITVRHPEVRSVPQPSPAPQPLELRLQAAMREARVFSIVPKATRSLVAVALTDVLRDVHTNNDVSSWEALLAFARVVLQMPDKGDTSRSLPAVIRGNLAAFRAGARLEYRLRRHLARGPRPPPTDTGQTAARIASQKLSEGDISGAARALCSTDSATDSAEALDALRAKHPPAPPDYAFPDRPPQVDIAPTSPDEVFAAVSSFPPSSSAGPDGLRPRHLRDLLSPALGAVATALAKALAKVVDCMRAGTVPSALRPILFGARLIALKKKDGSIRPIACSSTIRRLAAKIAWVNERDTVVTLLGPTQLGCGQASGTEIAAHAARAFIHAHPDAALVKLDFRNAFNTVRRDLVLREVAEHVPGLFPLVDLAYRGPSHLIMDNAVISSECGVQQGDPLGPALFCLALRPLAVSLQSRLRLWYMDDGTLAGDPATVASDVQRVLDYEGRSGLALNPTKCEIFSLDAQPDLQRSLPGCRLTQRLSLELVGSPLTDEAIRPLLDRCLERTAVMLDRLPLLSAHQGLFLLRSCFSAARMQHLLRTCPAGTEASALHEYDDLVLDALTTILNLQLPPEAASQATLPVRFGGLGILSVRRLADVCYAASLTAVADMVATVLPPEALAHFSASQEAALDQTGARARVPPDKQSKQRAWSDALHQELRDSLLASAPHAADQARLRAVDRPGAGAWLHALPSSSLGTALDDRSLRFCVGLRLGAPVVAAHSCERCGDPVATNGHHGLSCERSAGRHPRHTMLNDTLVRALHSAGIPCTREPQGLDTSDGRRPDGLTLVPFHRGQHLVWDGTVVDTLAPSYVNHCATIPGYAVARAERAKLRKYAALQATHLFSPLAFETLGGHGPLTANFLEGVYHRLIRATGDKRAGSFLLQRLSLAVQRGNAIAFLGTLSSSPPPTPIIPRNSDLL

SEQ ID NO: 16969 - protein, 888 aa, Stratiolaelaps scimitus
MRGARVFSIVPKATRSLVAVALTDVLRDVYTNNDVSSWEALLAFARVVLQMPDKGDTSRSLPAVIRGNLAAFRAGARLEYRLRRHLPRGPRPPPTDTGQTAARIASQKLSEGDISGAARALWSTDSATDSAEALHALRAKHPPAPPDYAFPVRPPQVDIAPTSTDEVFAAVSSFPPSSSAGPDGLRPRHLRDLLSPALGAVATALAKALAKVVDCMRAGTVPSALRPILFGARLIALKKKDGSIRPIACSSTIRRLAAKIAWVNERDTVVTLLGPTQLGCGQASGTEIAAHAARAFIHAHPDAALVKLDFRNAFNTVRRDLVLREVAEHVPGLFPLVDLAYRSPSHLIMDNAVISSECGVQQGDPLGPALFCLALRPLAVSLQSRLRLWYMDDGTLAGDPATVASDVQRVLDYEGRSGLALNPTKCEIFSLDAQPDLQRSLPGCRLTQRLSLELVGSPLTDEAIRPLLDRCLERTAVMLDRLPLLSAHQGLFLLRSCFSAARMQHLLRTCPAGTEASALHEYDELVLDALTTILNLQLPPEAASQATLPVRFGGLGILSVRRLADVCYAASLTAVADMVATVLPPEALAHFSASREAALDQTGVRARVPPDKQSKQRVWSDALHQELRDSLLASAPHVADQARLRAVDRPGAGAWLHALPSSSLGTALDDRSLRFCVGLRLGAPVVAAHSCERCGDPVATNGHHGLSCERSAGRHPRHTMLNDTLVRALHSAGIPCTREPQGLDTSDGRRPDGLTLIPFHRGQHLVWDGTVVDTLAPAYVNHCATIPGYAVARAERAKLRKYAALQATHLFSPLAFETLGGHGPLTANFLEGVYHRLIRATGDKRAGSFLLQRLSLAVQRGNAIAFLGTLSSSPPHPTPIIPRDSDLL

SEQ ID NO: 16970 - protein, 964 aa, Stratiolaelaps scimitus
MNPGPIAPARDATPARRAASARDATGPPRVPCPHCEGRFSRRGLNRHITVRHPEVRSVPQPSPAPQPLELRLQAAMREARVFSIVPKATRSLVAVALTDVLRDVHTNNDVPSWEALLAFARVVLQMPDKGDTSRSLPAVIRGNLAAFRAGARLEYRLRRHFPRGPRPPPTDTGQRAARIASQKLSEGDISGAARALCSTDSATDSAEALNALRAKHPPAPPDYAFPARPPQVDIAPTSTDEVLAAVSSFPPSSSAGPDGLRPRHLRDLLSPALGAVATALAKALAKVVDCMRAGTVPSALRPILFGARLIALKKKDGSIRPIACSSTIRRLAAKIAWVNERDTVVTLLGPTQLGCGQASGTEIAAHAARAFIHAHPDAAMVKLDFRNAFNTVRRDLVLREVAEHVPGLFPLVDLAYRCPSHLIMDNAVISSECGVQQGDPLGPALFCLALRPLAVSLQSRLRLWYMDDGTLAGDPATVASDVQRVLDYEGRSGLALNPTKCEIFSLDAQPDLQRSLPGCRLTQRLSLELVGSPLTDEAIRPLLDRCLERTAVMLDRLPLLSAHQGLFLLRSCFSAARMQHLLRTCPAGTEASALHEYDDLVLEALTTILNLQLPPEAASQASLPVRFGGLGILSVRRLADVCYAASLTAVADMVATVLPSEALAHFSASHEAALDQTGVRARVPPDKQSKQRAWSDALHQELRDSLLASAPHVADQARLRAVDRPGAGAWLHALPSSSLGTALDDRSLRFCVGLRLGAPVVAAHSCERCGDPVATNGHHGLSCERSAGRHPRHTMLNDTLVRALHSAGIPCTREPQGLDTSDGRRPDGLTLIPFHRGLHLVWDGTVVDTLAPSYVNHCATIPGYAVARAERAKLRKYAALQATHLFSPLAFETLGGHGPLTANFLEGVYHRLIRATGDKRAGSFLLQRLSLAVQRGNAIAFLGTLSSSPPPPPIIPRNTDLLYV

SEQ ID NO: 16971 - protein, 995 aa, Stratiolaelaps scimitus
MNPGPIAPARDASPARDATPARDATPARDATPARDATPARDAIAARDATAARDATAARRAASARDATGPPRVPCPHCEGRFTRRGLNRHITVRHPEVRSVPQPSPAPQPLELRLQAAMREARVFSIVPKATRSLVAVALTDVLRDVHSNNDASSWEALLAFARVVLQMPDKGDTSRSLPAVIRGNLAAFRAGARLEYRLRRQLPRGPRPPPTDTGQMAARIATQKLSEGDISGAARALCSTDSATDSAEALHALRAKHPPAPPDYAFPVRPPQVDIAPTSTDEVFAAVSSFPPSSSAGPDGLRPRHLRDLLSPALGAVATALAKALAKVVDCMRAGTVPSALRPILFGARLIALKKKDGSIRPIACSSTIRRLAAKIAWVNERDTVVTLLGPTQLGCGQASGTEIAAHAARAFIHAHPDAALVKLDFRNAFNTVRRDLVLREVAEHVPGLFPLVDLAYRGPSHLIMDNAVISSECGVQQGDPLGPALFCLALRPLAVSLQSRLRLWYMDDGTLAGDPATVASDVQRVLDYEGRSGLALNPTKCEIFSLDAQPDLQRSLPGCRLTQRLSLELVGSPLTDEAIRPLLDRCLERTAVMLDRLPLLSAHQGLFLLRSCFSAARMQHLLRTCPAGTEASALHDYDDLVLDALTTILNLQLPPEAVSQATLPVRFGGLGILSVRRLADVCYAASLTAVADMVATVLPPEALAHFSASQEAALDQTGARARVPPDKQSKQRAWSDALHQELRDSLLASAPHAADQARLRAVDRPGAGAWLHALPSSSLGTALDDRSLRFCVGLRLGAPVVAAHSCERCGDPVATNGHHGLSCERSAGRHPRHTMLNDTLVRALHSAGIPCTREPQGLDTSDGRRPDGLTLVPFHRGQHLVWDGTVVDTLAPSYVNHCATIPGYAVARAERAKLRKYAALQATHLFSPLAFETLGGHGPLTANFLEGVYHRLIRATGDKRAGSFLLQRLSLAVQRGNAIAFLGTLSSSPPPPP

SEQ ID NO: 16972 - protein, 1001 aa, Stratiolaelaps scimitus
MNPGPIAPARDASPARDATPARDATPARDATPARDATPARDATAARDATAARDATAARDATAARRAASARDATGPPRVPCPHCEGRFTRRGLNRHITVRHPEVRSVPQPSPAPQPLELRLQAAMREARVFSIVPKATRSLVAVALTDVLRDVHSNNDVSSWEALLAFARVVLQMPDKGDTSRSLPAVIRGNLAAFRAGARLEYRLRRHLPRGPRPPPTDTGQMAARIATQKLSEGDISGAARALCSTDSATDSAEALHALRAKHPPAPPDYAFPVRPPQVDIAPTSTDEVFAAVSSFPPSSSAGPDGLRPRHLRDLLSPALGAVATALAKALAKVVDCMRAGTVPSALRPILFGARLIALKKKDGSIRPIACSSTIRRLAAKIAWVNERDTVVTLLGPTQLGCGQASETEIAAHAARAFIHAHPDAALVKLDFRNAFNTVRRDLVLREVAEHVPGLFPLVDLAYRGPSHLIMDNAVISSECGVQQGDPLGPALFCLALRPLAVSLQSRLRLWYMDDGTLAGDPATVASDVQRVLDYEGRSGLALNPTKCEIFSLDAQLDLQRSLPGCRLTQRLSLELVGSPLTDEAIRPLLDRCLERTAVMLDRLPLLSAHQGLFLLRSCFSAARMQHLLRTCPAGTEASALHDYDDMVLDALTTILNLQLPPEAASQATLPVRFGGLGILSVRRLADVCYAASLTAVADLVATVLPPEALAHFSASQEAALDQTGARARVPPDKQSKQRAWSDALHQELRDSLLASAPHAADQARLRAVDRPGAGAWLHALPSSSLGTALDDRSLRFCVGLRLGAPVVAAHSCERCGDPVATNGHHGLSCERSAGRHPRHTMLNDTLVRALHSAGIPCTREPQGLDTSDGRRPDGLTLVPFHRGQHLVWDGTVVDTLAPSYVNHCATIPGYAVARAERAKLRKYAALQATHLFSPLAFETLGGHGPLTANFLEGVYHRLIRATGDKRAGSFLLQRLSLAVQRGNAIAFLGTLSSSPPPPP

SEQ ID NO: 16973 - protein, 977 aa, Stratiolaelaps scimitus
MNPGPIAPARDASPARDATPARDAIAARDATAARDATAARRAASARDATGPPRVPCPHCEGRFTRRGLNRHITVRHPEVRSVPQPSPAPQPLELRLQAAMREARVFSIVPKATRSLVAVALTDVLRDVHSNNDVSSWEALLAFARVVLQMPDKGDTSRSLPAVIRGNLAAFRAGARLEYRLRRQLPRGPRPPPTDTGQMAARIATQKLSEGDISGAARALCSTDSATDSAEALHALRAKHPPAPPDYAFPVRPPQVDIAPTSTDEVFAAVSSFPPSSSAGPDGLRPRHLRDLLSPALGAVATALAKALAKVVDCMRAGTVPSALRPILFGARLIALKKKDGSIRPIACSSTIRRLAAKIAWVNERDTVVTLLGPTQLGCGQASGTEIAAHAARAFIHAHPDAALVKLDFRNAFNTVRRDLVLREVAEHVPGLFPLVDLAYRGPSHLIMDNAVISSECGVQQGDPLGPALFCLALRPLAVSLQSRLRLWYMDDGTLAGDPATVASDVQRVLDYEGRSGLALNPTKCEIFSLDAQPDLQRSLPGCRLTQRLSLELVGSPLTDEAIRPLLDRCLERTAVMLDRLPLLSAHQGLFLLRSCFSAARMQHLLRTCPAGTEASALHDYDDLVLDALTTILNLQLPPEAASQATLPVRFGGLGILSVRRLADVCYAASLTAVADMVATVLPPEALAHFSASQEAALDQTGARARVPPDKQSKQRAWSDALHQELRDSLLASAPHAADQARLRAVDRPGAGAWLHALPSSSLGTALDDRSLRFCVGLRLGAPVVAAHSCERCGDPVATNGHHGLSCERSAGRHPRHTMLNDTLVRALHSAGIPCTREPQGLDTSDGRRPDGLTLVPFHRGQHLVWDGTVVDTLAPSYVNHCATIPGYAVARAERAKLRKYAALQATHLFSPLAFETLGGHGPLTANFLEGVYHRLIRATGDKRAGSFLLQRLSLAVQRGNAIAFLGTLSSSPPPPP

SEQ ID NO: 16974 - protein, 879 aa, Stratiolaelaps scimitus
MREARVFSIVPKATRSLVAVALTDVLRDVHTNNDVPSWEALLAFARVVLQMPDKGDTSRSLPAVIRGNLAAFRAGARLEYRLRRHFPRGPRPPPTDTGQRAARIASQKLSEGDISGAARALCSTDSATDSAEALNALRAKHPPAPPDYSFPARPPQVDIAPTSTDEVLAAVSSFPPSSSAGPDGLRPRHLRDLLSPALGAVATALAKALAKVVDCMRAGTVPSALRPILFGARLIALKKKDGSIRPIACSSTIRRLAAKIAWVNERDAVVTLLGPTQLGCGQASGTEIAAHAARAFIHAHPDAALVKLDFRNAFNTVRRDLVLREVAEHVPGLFPLVDLAYRCPSHLIMDNAVISSECGVQQGDPLGPALFCLALRPLAVSLQSRLRLWYMDDGTLAGDPATVASDVQRVLDYEGRSGLALNPTKCEIFSLDAQPDLQRSLPGCRLTQRLSLELVGSPLTDEAIRPLLDRCLERTAVMLDRLPLLSAHQGLFLLRSCFSAARMQHLLRTCPAGTEASALHEYDDLVLEALTTILNLQLPPEAASQASLPVRFGGLGILSVRRLADVCYAASLTAVADMVATVLPPEALAHFSASQEAALDQTGVRARVPPDKQSKQRAWSDALHQELRDSLLASAPHVADQARLRAVDRPGAGAWLHALPSSSLGTALDDRSLRFCVGLRLGAPVVAAHSCERCGDPVATNGHHGLSCERSAGRHPRHTMLNDTLVRALHSAGIPCTREPQGLDTSDGRRPDGLTLIPFHRGLHLVWDGTVVDTLAPSYVNHCATIPGYAVARAERAKLRKYAALQATHLFSPLAFETLGGHGPLTANFLEGVYHRLIRATGDKRAGSFLLQRLSLAVQRGNAIAFLGTLSSSPPPPPP

SEQ ID NO: 16975 - protein, 955 aa, Stratiolaelaps scimitus
MNPGPIAPARDATPARRAASARDATGPPRVPCPHCEGRFSRRGLNRHITVRHPEVRSVPQPSPAPQPLELRLQAAMREARVFSIVPKATRSLVAVALTDVLRDVHTNNDVPSWEALLAFARVVLQMPDKGDTSRSLPAVIRGNLAAFSAGARLEYRLRRHFPRGPRPPPTDTGQRAARIASQKLSEGDISGAARALCSTDSATDSAEALNALRAKHPPAPPDYAFPARPPQVDIAPTSTDEVLAAVSSFPPSSSAGPDGLRPRHLRDLLSPALGAVATALAKALAKVVDCMRAGTVPSALRPILFGARLIALKKKDGSIRPIACSSTIRRLAAKIAWVNERDTVVTLLGPTQLGCGQASGTEIAAHAARAFIHAHPDAALVKLDFRNAFNTVRRDLVLREVAEHVPGLFPLVDLAYRCPSHLIMDNAVISSECGVQQGDPLGPALFCLALRPLAVSLQSRLRLWYMDDGTLAGDPATVASDVQRVLDYEGRSGLALNPTKCEIFSLDAQPDLQRSLPGCRLTQRLSLELVGSPLTDEAIRPLLDRCLERTAVMLDRLPLLSAHQGLFLLRSCFSAARMQHLLRTCPAGTEASALHEYDDLVLEALTTILNLQLPPEAASQASLPVRFGGLGILSVRRLADVCYAASLTAVADMVATVLPPEALAHFSASQEAALDQTGVRARVPPDKQSKQRAWSDALHQELRDSLLASAPHVADQARLRAVDRPGAGAWLHALPSSSLGTALDDRSLRFCVGLRLGAPVVAAHSCERCGDPVATNGHHGLSCERSAGRHPRHTMLNDTLVRALHSAGIPCTREPQGLDTSDGRRPDGLTLIPFHRGLHLVWDGTVVDTLAPSYVNHCATIPGYAVARAERAKLRKYAALQATHLFSPLAFETLGGHGPLTANFLEGVYHRLIRATGDKRAGSFLLQRLSLAVQRGNAIAFLGTLSSSPPPPHNP

SEQ ID NO: 16976 - protein, 953 aa, Stratiolaelaps scimitus
MNPDPTAPARDATPARRAASAQDATGPPRVPCPHCEGRFSRRGLNRHITVRHPEVRSVPQPSPAPQPLELRLQAAMREARVFSIVPKATRSLVAVALTDVLRDVHTNNDVSSWEALLAFARVVLQMPDKGDTSRSLPAVIRGNLAAFRAGARLEYRLRRHLARGPRPPPTDTGQTAARIASQKLSEGDISGAARALCSTDSATDSAEALDALRAKHPPAPPDYAFPDRPPQVDIAPTSPDEVFAAVSSFPPSSSAGPDGLRPRHLRDLLSPALGAVATALAKALAKVVDCMRAGTVPSALRPILFGARLIALKKKDGSIRPIACSSTIRRLAAKIAWVNERDTVVTLLGPTQLGCGQASGTEIAAHAARAFIHAHPDAALVKLDFRNAFNTVRRDLVLREVAEHVPGLFPLVDLAYRGPSHLIMDNAVISSECGVQQGDPLGPALFCLALRPLAVSLQSRLRLWYMDDGTLAGDPATVASDVQRVLDYEGRSDLALNPTKCEIFSLDAQPDLQRSLPGCRLTQRLSLELVGSPLTDEAIRPLLDRCLERTAVMLDRLPLLSAHQGLFLLRSCFSAARMQHLLRTCPAGTEASALHEYDDLVLDALTTILNLQLPPEAASQATLPVRFGGLGILSVRRLADVCYAASLTAVADMVATVLPPEALAHFSASQEAALDQTGARARVPPDKQSKQRAWSDALHQELRDSLLASAPHAADQARLRAVDRPGAGAWLHALPSSSLGTALDDRSLRFCVGLRLGAPVVAAHSCERCGDPVATNGHHGLSCERSAGRHPRHTMLNDTLVKALHSAGIPCTREPQGLDTSDGRRPDGLTLVPFHRGQHLVWDGTVVDTLAPSYVNHCATIPGYAVARAERAKLRKYAALQATHLFSPLAFETLGGHGPLTANFLEGVYHRLIRATGDKRAGSFLLQRLSLAVQRGNAIAFLGTLSSSPPPPP

SEQ ID NO: 16977 - protein, 881 aa, Stratiolaelaps scimitus
MREARVFSIVPKATRSLVAVALTDVLRDVHTNNDVPSWEALLAFARVVLQMPDKGDTSRSLPAVIRGNLAAFRAGARLEYRLRRHFPRGPRPPPTDTGQRAARIASQKLSEGDISGAARALCSTDSATDSAEALNALRAKHPPAPPDYSFPARPPQVDIAPTSTDEVLAAVSSFPPSSSAGPDGLRPRHLRDLLSPALGAVATALAKALAKVVDCMRAGTVPSALRPILFGARLIALKKKDGSIRPIACSSTIRRLAAKIAWVNERDAVVTLLGPTQLGCGQASGTEIAAHAARAFIHAHPDAALVKLDFRNAFNTVRRDLVLREVAEHVPGLFPLVDLAYRCPSHLIMDNAVISSECGVQQGDPLGPALFCLALRPLAVSLQSRLRLWYMDDGTLAGDPATVASDVQRVLDYEERSGLALNPTKCEIFSLDAQPDLQRSLPGCRLTQRLSLELVGSPLTDEAIRPLLDRCLERTAVMLDRLPLLSAHQGLFLLRSCFSAARMQHLLRTCPAGIEASALHEYDDLVLEALTTILNLQLPPEAASQASLPVRFGGLGILSVRRLADVCYAASLTAVADMVATVLPPEALAHFSASQEAALDQTGVRARVPPDKQSKQRAWSDALHQELRDSLLASAPHVADQARLRAVDRPGAGAWLHALPSSSLGTALDDRSLRFCVGLRLGAPVVAAHSCERCGDPVATNGHHGLSCERSAGRHPRHTMLNDTLVRALHSAGIPCTREPQGLDTSDGRRPDGLTLIPFHRGLHLVWDGTVVDTLAPSYVNHCATIPGYAVARAERAKLRKYAALQATHLFSPLAFETLGGHGPLTANFLEGVYHRLIRATGDKRAGSFLLQRLSLAVQRGNAIAFLGTLSSSPPPPPHNP

SEQ ID NO: 16978 - protein, 1014 aa, Stratiolaelaps scimitus
MDRFSGLASAITEHVIIQTIITEERILYMAFSATEGHPHPSNRINTTANRGNDQLRIDSGPIAPARDATPARDATPARRAASARDATGPPRVPCPHCEGRFSRRGLNRHITVRHPEVRSVPQPSPAPQPLELRLQAAMREARVFSIVPKATRSLVAVALTDVLRDVHTNNDVPSWEALLAFARVVLQMPDKGDTSRSLPAVIRGNLAAFRAGARLEYRLRRHFPRGPRPPPTDTGQRAARIASQKLSEGDISGAARALCSTDSATDSAEALNALRAKHPPAPPDYSFPARPPQVDIAPTSTDEVLAAVSSFPPSSSAGPDGLRPRHLRDLLSPALGAVATALAKALAKVVDCMRAGTVPSALRPILFGARLIALKKKDGSIRPIACSSTIRRLAAKIAWVNERDAVVTLLGPTQLGCGQASGTEIAAHAARAFIHAHPDAALVKLDFRNAFNTVRRDLVLREVAEHVPGLFPLVDLAYRCPSHLIMDNAVISSECGVQQGDPLGPALFCLALRPLAVSLQSRLRLWYMDDGTLAGDPATVASDVQRVLDYEGRSGLALNPTKCEIFSLDAQPDLQRSLPGCRLTQRLSLELVGSPLTDEAIRPLLDRCLERTAVMLDRLPLLSAHQGLFLLRSCFSAARMQHLLRTCPAGTEASALHEYDDLVLEALTTILNLQLPPEAASQASLPVRFGGLGILSVRRLADVCYAASLTAVADMVATVLPPEALAHFSASQEAALDQTGVRARVPPDKQSKQRAWSDALHQELRDSLLASAPHVADQARLRAVDRPGAGAWLHALPSSSLGTALDDRSLRFCVGLRLGAPVVAAHSCERCGDPVATNGHHGLSCERSAGRHPRHTMLNDTLVRALHSAGIPCTREPQGLDTSDGRRPDGLTLIPLHRGLHLVWDGTVVDTLAPSYVNHCATIPGYAVARAERAKLRKYAALQATHLFSPLAFETLGGHGPLTANFLEGVYHRLIRATGDKRAGSFLLQRLSLAVQRGNAIAFLGTLSSSPPPP

SEQ ID NO: 16979 - protein, 987 aa, Stratiolaelaps scimitus
MNPGPIAPDRDATPARDATPARDATPARDATPARDATPARRAASARDATGPPRVPCPHCEGRFSRRGLNRHITVRHPEVRSVPQPSPAPQPLELRLQAAMREARVFSIVPKATRSLVAVALTDVLRDVHTNNDVPSWEALLAFARVVLQMPDKGDASRSLPAVIRGNLAAFRAGARLEYRLRRHFPRGPRPPPTDTGQRAARIASQKLSEGDISGAARALCSTDSATDSAEALNALRAKHPPAPPDYSFPARPPQVDIAPTSTDEVLAAVSSFPPSSSAGPDGLRPRHLRDLLSPALGAVATALAKALAKVVDCMRAGTVPSALRPILFGARLIALKKKDGSIRPIACSSTIRRLAAKIAWVNERDAVVTLLGPTQLGCGQASGTEIAAHAARAFIHAHPDAALVKLDFRNAFNTVRRDLVLREVAEHVPGLFPLVDLAYRCPSHLIMDNAVISSECGVQQGDPLGPALFCLALRPLAVSLQSRLRLWYMDDGTLAGDPATVASDVQRVLDYEGRSGLALNPTKCEIFSLDAQPDLQRSLPGCRLTQRLSLELVGSPLTDEAIRPLLDRCLERTAVMLDRLPLLSAHQGLFLLRSCFSAARMQHLLRTCPAGTEASALHEYDDLVLEALTTILNLQLPPEAASQASLPVRFGGLGILSVRRLADVCYAASLTAVADMVATVLPPEALAHFSASQEAALDQTGVRARVPPDKQSKQRAWSDALHQELRDSLLASAPHVADQARLRAVDRPGAGAWLHALPSSSLGTALDDRSLRFCVGLRLGAPVVAAHSCERCGDPVATNGHHGLSCERSAGRHPRHTMLNDTLVRALHSAGIPCTREPQGLDTSDGRRPDGLTLIPFHRGLHLVWDGTVVDTLAPSYVNHCATIPGYAVARAERAKLRKYAALQATHLFSPLAFETLGGHGPLTANFLEGVYHRLIRATGDKRAGSFLLQRLSLAVQRGNAIAFLGTLSSSPPPPIIPRNTDLPYV

SEQ ID NO: 16980 - protein, 1009 aa, Stratiolaelaps scimitus
MNPGPIAPARDASPARDATPARDATPARDATPARDATAARDATAARDATAARDATAARDATAARDATAARRAASARDATGPPRVPCPHCEGRFTRRGLNRHITVRHPEVRSVPQPSPAPQPLELRLQAAMREARVFSIVPKATRSLVAVALTDVLRDVHSNNDVSSWEALLAFARVVLQMPDKGDTSRSLPAVIRGNLAAFRAGARLEYRLRRHLPRGPRPPPTDTGQMAARIATQKLSEGDISGAARALCSTDSATDSAEALHALRAKHPPAPPDYAFPVRPPQVDIAPTSTDEVFAAVSSFPPSSSAGPDGLRPRHLRDLLSPALGAVATALAKALAKVVDCMRAGTVPSALRPILFGARLIALKKKDGSIRPIACSSTIRRLAAKIAWVNERDTVVTLLGPTQLGCGQASGTEIAAHAARAFIHAHPDAALVKLDFRNAFNTVRRDLVLREVAEHVPGLFPLVDLAYRGPSHLIMDNAVISSECGVQQGDPLGPALFCLALRPLAVSLQSRLRLWYMDDGTLAGDPATVASDVQRVLDYEGRSGLALNPTKCEIFSLDAQLDLQRSLPGCRLTQRLSLELVGSPLTDEAIRPLLDRCLERTAVMLDRLPLLSAHQGLFLLRSCFSAARMQHLLRTCPAGTEASALHDYDDMVLDALTTILNLQLPPEAASQATLPVRFGGLGILSVRRLADVCYAASLTAVADLVATVLPPEALAHFSASQEAALDQTGARARVPPDKQSKQRAWSDALHQELRDSLLASAPHAADQARLRAVDRPGAGAWLHALPSSSLGTALDDRSLRFCVGLRLGAPVVAAHSCERCGDPVATNGHHGLSCERSAGRHPRHTMLNDTLVRALHSAGIPCTREPQGLDTSDGRRPDGLTLVPFHRGQHLVWDGTVVDTLAPSYVNHCATIPGYAVARAERAKLRKYAALQATHLFSPLAFETLGGHGRLTANFLEGVYHRLIRANGDKRAGSFLLQRLSLAVQRGNAIAFLGTLSSSPPPPHNP

SEQ ID NO: 16981 - protein, 956 aa, Stratiolaelaps scimitus
MNPDPTAPARDATPARRAASAQDATGPPRVPCPHCEGRFSRRGLNRHITVRHPEVRSVPQPSPAPQPLELRLQAAMREARVFSIVPKATRSLVAVALTDVLRDVHTNNDVSSWEALLAFARVVLQMPDKGDTSRSLPAVIRGNLAAFRAGARLEYRLRRHLARGPRPPPTDTGQTAARIASQKLSEGDISGAARALCSTDSATDSAEALDALRAKHPPAPPDYAFPDRPPQVDIAPTSPDEVFAAVSSFPPSSSAGPDGLRPRHLRDLLSPALGAVATALAKALAKVVDCMRAGTVPSALRPILFGARLIALKKKDGSIRPIACSSTIRRLAAKIAWVNERDTVVTLLGPTQLGCGQASGTEIAAHAARAFIHAHPDAALVKLDFRNAFNTVRRDLVLREVAEHVPGLFPLVDLAYRGPSHLIMDNAVISSECGVQQGDPLGPALFCLALRPLAVSLQSRLRLWYMDDGTLAGDPATVASDVQRVLDYEGRSGLALNPTKCEIFSLDAQPDLQRSLPGCRLTQRLSLELVGSPLTDEAIRPLLDRCLERTAVMLDRLPLLSAHQGLFLLRSCFSAARMQHLLRTCPAGTEASALHEYDDLVLDALTTILNLQLPPEAASQATLPVRFGGLGILSVRRLADVCYAASLTAVADMVATVLPPEALAHFSASQEAALDQTGARARVPPDKQSKQRAWSDALHQELRDSLLASAPHAADQARLRAVDRPGAGAWLHALPSSSLGTALDDRSLRFCVGLRLGAPVVAAHSCERCGDPVATNGHHGLSCERSAGRHPRHTMLNDTLVRALHSAGIPCTREPQGLDTSDGRRPDGLTLVPFHRGQHLVWDGTVVDTLAPSYVNHCATIPGYAVARAERAKLRKYAALQATHLFSPLAFETLGGHGPLTANFLEGVYHRLIRATGDKRAGSFLLQRLSLAVQRGNAIAFLGTLSSSPPPHPHNP

SEQ ID NO: 16982 - protein, 997 aa, Stratiolaelaps scimitus
MNPGPIAPARDASPARDATPARDATPARDATPARDATAARDATAARDATAARDATAARRAASARDATGPPRVPCPHCEGRFTRRGLNRHITVRHPEVRSVPQPSPAPQPLELRLQAAMREARVFSIVPKATRSLVAVALTDVLRDVHSNNDVSSWEALLAFARVVLQMPDKGDTSRSLPAVIRGNLAAFRAGARLEYRLRRHLPRGPRPPPTDTGQMAARIATQKLSEGDISGAARALCSTDSATDSAEALHALRAKHPPAPPDYAFPVRPPQVDIAPTSTDEVFAAVSSFPPSSSAGPDGLRPRHLRDLLSPALGAVATALAKALAKVVDCMRAGTVPSALRPILFGARLIALKKKDGSIRPIACSSTIRRLAAKIAWVNERDTVVTLLGPTQLGCGQASGTEIAAHAARAFIHAHPDAALVKLDFRNAFNTVRRDLVLREVAEHVPGLFPLVDLAYRGPSHLIMDNAVISSECGVQQGDPLGPALFCLALRPLAVSLQSRLRLWYMDDGTLAGDPATVASDVQRVLDYEGRSGLALNPTKCEIFSLDAQLDLQRSLPGCRLTQRLSLELVGSPLTDEAIRPLLDRCLERTAVMLDRLPLLSAHQGLFLLRSCFSAARMQHLLRTCPAGTEASALHDYDDMVLDALTTILNLQLPPEAASQATLPVRFGGLGILSVRRLADVCYAASLTAVADLVATVLPPEALAHFSASQEAALDQTGARARVPPDKQSKQRAWSDALHQELRDSLLASAPHAADQARLRAVDRPGAGAWLHALPSSSLGTALDDRSLRFCVGLRLGAPVVAAHSCERCGDPVATNGHHGLSCERSAGRHPRHTMLNDTLVRALHSAGIPCTREPQGLDTSDGRRPDGLTLVPFHRGQHLVWDGTVVDTLAPSYVNHCATIPGYAVARAERAKLRKYAALQATHLFSPLAFETLGGHGPLTANFLEGVYHRLIRATGDKRAGSFLLQRLSLAVQRGNAIAFLGTLSSSPPPPHNP

SEQ ID NO: 16983 - protein, 966 aa, Stratiolaelaps scimitus
MNPGPIAPARDATPARDATPARDATPARRAASARDATGPPRVPCPHCEGRFSRRGLNRHITVRHPEVRSVPQPSPAPQPLELRLQAAMREARVFSIVPKATRSLVAVALTDVLRDVHTNNDVPSWEALLAFARVVLQMPDKGDTSRSLPAVIRGNLAAFRAGARLEYRLRRHFPRGPRPPPTDTGQRAARIASQKLSEGDISGAARALCSTDSATDSAEALNALRAKHPPAPPDYSFPARPPQVDIAPTSTDEVLAAVSSFPPSSSAGPDGLRPRHLRDLLSPALGAVATALAKALAKVVDCMRAGTVPSALRPILFGARLIALKKKDGSIRPIACSSTIRRLAAKIAWVNERDAVVTLLGPTQLGCGQASGTEIAAHAARAFIHAHPDAALVKLDFRNAFNTVRRDLVLREVAEHVPGLFPLVDLAYRCPSHLIMDNAVISSECGVQQGDPLGPALFCLALRPLAVSLQSRLRLWYMDDGTLAGDPATVASDVQRVLYYEGRSGLALNPTKCEIFSLDAQPDLQRSLPGCRLTQRLSLELVGSPLTDEAIRPLLDRCLERTAVMLDRLPLLSAHQGLFLLRSCFSAARMQHLLRTCPAGTEASALHEYDDLVLEALTTILNLQLPPEAASQASLPVRFGGLGILSVRRLADVCYAASLTVVADMVATVLPPEALAHFSASQEAALDQTGVRARVPPDKQSKQRAWSDALHQELRDSLLASAPHVADQARLRAVDRPGAGAWLHALPSSSLGTALDDRSLRFCVGLRLGAPVVAAHSCERCGDPVATNGHHGLSCERSAGRHPRHTMLNDTLVRALHSAGIPCTREPQGLDTSDGRRPDGLTLIPFHRGLHLVWDGTVVDTLAPSYVNHCATIPGYAVARAERAKLRKYAALQATHLFSPLAFETLGGHGPLTANFLEGVYHRLIRATGDKRAGSFLLQRLSLAVQRGNAIAFLGTLSSSPPPHNP

SEQ ID NO: 16984 - protein, 878 aa, Stratiolaelaps scimitus
MREARVFSIVPKATRSLVAVALTDVLRDVHSNNDASSWEALLAFARVVLQMPDKGDTSRSLPAVIRGNLAAFRAGARLEYRLRRQLPRGPRPPPTDTGQMAARIATQKLSEGDISGAARALCSTDSATDSAEALHALRAKHPPAPPDYAFPVRPPQVDIAPTSTDEVFAAVSSFPPSSSAGPDGLRPRHLRDLLSPALGAVATALAKALAKVVDCMRAGTVPSALRPILFGARLIALKKKDGSIRPIACSSTIRRLAAKIAWVNERDTVVTLLGPTQLGCGQASGTEIAAHAARAFIHAHPDAALVKLDFRNAFNTVRRDLVLREVAEHVPGLFPLVDLAYRGPSHLIMDNAVISSECGVQQGDPLGPALFCLALRPLAVSLQSRLRLWYMDDGTLAGDPATVASDVQRVLDYEGRSGLALNPTKCEIFSLDAQPDLQRSLPGCRLTQRLSLELAGSPLTDGAIRPLLDRCLERTAVMLDRLPLLSAHQGLFLLRSCFSAARMQHLLRTCPAGTEASALHDYDDLVLDALTTILNLQLPPEAASQATLPVRFGGLGILSVRRLADVCYAASLTAVADMVATVLPPEALAHFSASQEAALDQTGARARVPPDKQSKQRAWSDALHQELRDSLLASAPHAADQARLRAVDRPGAGAWLHALPSSSLGTALDDRSLRFCVGLRLGAPVVAAHSCERCGDPVATNGHHGLSCERSAGRHPRHTMLNDTLVRALHSAGIPCTREPQGLDTSDGRRPDGLTLVPFHRGQHLVWDGTVVDTLAPSYVNHCATIPGYAVARAERAKLRKYAALQATHLFSPLAFETLGGHGPLTANFLEGVYHRLIRATGDKRAGSFLLQRLSLAVQRGNAIAFLGTLSSSPPPPP

SEQ ID NO: 16985 - protein, 1003 aa, Stratiolaelaps scimitus
MNPGPIAPARDASPARDATPARDATPARDATPARDATPARDAIAARDATAARDATAARDATAARRAASARDATGPPRVPCPHCEGRFTRRGLNRHITVRHPEVRSVPQPSPAPQPLELRLQAAMREARVFSIVPKATRSLVAVALTDVLRDVHSNNDASSWEALLAFARVVLQMPDKGDTSRSLPAVIRGNLAAFRAGARLEYRLRRQLPRGPRPPPTDTGQMAARIATQKLSEGDISGAARALCSTDSATDSAEALHALRAKHPPAPPDYAFPVRPPQVDIAPTSTDEVFAAVSSFPPSSSAGPDGLRPRHLRDLLSPALGAVATALAKALAKVVDCMRAGTVPSALRPILFGARLIALKKKDGSIRPIACSSTIRRLAAKIAWVNERDTVVTLLGPTQLGCGQASGTEIAAHAARAFIHAHPDAALVKLDFRNAFNTVRRDLVLREVAEHVPGLFPLVDLAYRGPSHLIMDNAVISSECGVQQGDPLGPALFCLALRPLAVSLQSRLRLWYMDDGTLAGDPATVASDVQRVLDYEGRSGLALNPTKCEIFSLDAQPDLQRSLPGCRLTQRLSLELVGSPLTDEAIRPLLDRCLERTAVMLDRLPLLSAHQGLFLLRSCFSAARMQHLLRTCPAGTEASALHDYDDLVLDALTTILNLQLPPEAASQATLPVRFGGLGILSVRRLADVCYAASLTAVADMVATVLPPEALAHFSASQEAALDQTGARARVPPDKQSKQRAWSDALHQELRDSLLASAPHAADQARLRAVDRPGAGAWLHALPSSSLGTALDDRSLRFCVGLRLGAPVVAAHSCERCGDPVATNGHHGLSCERSAGRHPRHTMLNDTLVRALHSAGIPCTREPQGLDTSDGRRPDGLTLVPFHRGQHLVWDGTVVDTLAPSYVNHCATIPGYAVARAERAKLRKYAALQATHLFSPLAFETLGGHGPLTANFLEGVYHRLIRATGDKRAGSFLLQRLSLAVQRGNAIAFLGTLSSSPPPPHNP

SEQ ID NO: 16986 - protein, 971 aa, Stratiolaelaps scimitus
MNPGHIAPARDATPARDATPARDATPARDATPARRAASARDATGPPRVPCPHCEGRFSRRGLNRHITVRHPEVRSVPQPSPAPQPLELRLQAAMREARVFSIVPKATRSLVAVALTDVLRDVHTNNDVPSWEALLAFARVVLQMPDKGDTSRSLPAVIRGNLAAFRAGARLEYRLRRHFPRGPRPPPTDTGQRAARIASQKLSEGDISGAARALCSTDSATDSAEALNALRAKHPPAPPDYSFPARPPQVDIAPTSTDEVLAAVSSFPPSSSAGPDGLRPRHLRDLLSPALGAVATALAKALAKVVDCMRAGTVPSALRPILFGARLIALKKKDGSIRPIACSSTIRRLAAKIAWVNERDAVVTLLGPTQLGCGQASGTEIAAHAARAFIHAHPDAALVKLDFRNAFNTVRRDLVLREVAEHVPGLFPLVDLAYRCPSHLIMDNAVISSECGVQQGDPLGPALFCLALRPLAVSLQSRLRLWYMDDGTLAGDPATVASDVQRVLDYEGRSGLALNPTKCEIFSLDAQPDLQRSLPGCRLTQRLSLELVGSPLTDEAIRPLLDRCLERTAVMLDRLPLLSAHQGLFLLRSCFSAARMQHLLRTCPAGTEASALHEYDDLVLEALTTILNLQLPPEAASQASLPVRFGGLGILSVRRLADVCYAASLTAVADMVATVFPPEALAHFSASQEAALDQTGVRARVPPDKQSKQRAWSDALHQELRDSLLASAPHVADQARLRAVDRPGAGAWLHALPSSSLGTALDDRSLRFCVGLRLGAPVVAAHSCERCGDPVATNGHHGLSCERSAGRHPRHTMLNDTLVRALHSAGIPCTREPQGLDTSDGRRPDGLTLIPFHRGLHLVWDGTVVDTLAPSYVNHCATIPGYAVARAERAKLRKYAALQATHLFSPLAFETLGGHGPLTANFLEGVYHRLIRATGDKRAGSFLLQRLSLAVQRGKVLGTLSSSPPPPPHNP

SEQ ID NO: 16987 - protein, 1006 aa, Stratiolaelaps scimitus
MNPGPIAPARDASPARDATPARDATPARDATPARDAIAARDATAARDATAARDATAARRAASARDATGPPRVPCPHCEGRFTRRGLNRHITVRHPEVRSVPQPSPAPQPLELRLQAAMREARVFSIVPKATRSLVAVALTDVLRDVHSNNDASSWEALLAFARVVLQMPDKGDTSRSLPAVIRGNLAAFRAGARLEYRLRRQLPRGPRPPPTDTGQMAARIATQKLSEGDISGAARALCSTDSATDSAEALHALRAKHPPAPPDYAFPVRPPQVDIAPTSTDEVFAAVSSFPPSSSAGPDGLRPRHLRDLLSPALGAVATALAKALAKVVDCMRAGTVPSALRPILFGARLIALKKKDGSIRPIACSSTIRRLAAKIAWVNERDTVVTLLGPTQLGCGQASGTEIAAHAARAFIHAHPDAALVKLDFRNAFNTVRRDLVLREVAEHVPGLFPLVDLAYRGPSHLIMDNAVISSECGVQQGDPLGPALFCLALRPLAVSLQSRLRLWYMDDGTLAGDPATVASDVQRVLDYEGRSGLALNPTKCEIFSLDAQPDLQRSLPGCRLTQRLSLELVGSPLTDEAIRPLLDRCLERTAVMLDRLPLLSAHQGLFLLRSCFSAARMQHLLRTCPAGTEASALHDYDDLVLDALTTILNLQLPPEAASQATLPVRFGGLGILSVRRLADVCYAASLTAVADMVATVLPPEALAHFSASQEAALDQTGARARVPPDKQSKQRAWSDALHQELRDSLLASAPHAADQARLRAVDRPGAGAWLHALPSSSLGTALDDRSLRFCVGLRLGAPVVAAHSCERCGDPVATNGHHGLSCERSAGRHPRHTMLNDTLVRALHSAGIPCTREPQGLDTSDGRRPDGLTLVPFHRGQHLVWDGTVVDTLAPSYVNHCATIPGYAVVRAERAKLRKYAALQATHLFSPLAFETLGGHGPLTANFLEGVYHRLIRATGDKRAGSFLLQRLSLAVQRGNAIAFLGTLSSSPPPPPIIPRNPALLYV

SEQ ID NO: 16988 - protein, 877 aa, Stratiolaelaps scimitus
MREARVFSIVPKATRSLVAVALTDVLRDVHSNNDVSSWEALLAFARVVLQMPDKGDTSRSLPAVIRGNLAAFRAGARLEYRLRRHLPRGPRPPPTDTGQMAARIATQKLSEGDISGAARALCSTDSATDSAEALHALRAKHPPAPPDYAFPVRPPQVDIAPTSTDEVFAAVSSFPPSSSAGPDGLRPRHLRDLLSPALGAVATALAKALAKVVDCMRAGTVPSALRPILFGARLIALKKKDGSIRPIACSSTIRRLAAKIAWVNERDTVVTLLGPTQLGCGQASGTEIAAHAARAFIHAHPDAALVKLDFRNAFNTVRRDLVLREVAEHVPGLFPLVDLAYRGPSHLIMDNAVISSECGVQQGDPLGPALFCLALRPLAVSLQSRLRLWYMDDGTLAGDPATVASDVQRVLDYEGRSGLALNPTKCEIFSLDAQLDLQRSLPGCRLTQRLSLELVGSPLTDEAIRPLLDRCLERTAVMLDRLPLLSAHQGLFLLRSCFSAARMQHLLRTCPAGTEASALHDYDDMVLDALTTILNLQLPPEAASQATLPVRFGGLGILSVRRLADVCYAASLTAVADLVATVLPPEALAHFSASQEAALDQTGARARVPPDKQSKQRAWSDALHQELRDSLLASAPHAADQARLRAVDRPGAGAWLHALPSSSLGTALDDRSLRFCVGLRLGAPVVAAHSCERCGDPVATNGHHGLSCERSAGRHPRHTMLNDTLVRALHSAGIPCTREPQGLDTSDGRRPDGLTLVPFHRGQHLVWDGTVVDTLAPSYVNHCATIPGYAVARAERAKLRKYAALQATHLFSPLAFETLGGHGPLTANFLEGVYHRLIRATGDKRAGSFLLQRLSLAVQRGNAIAFLGTLSSSPPPP

SEQ ID NO: 16989 - protein, 889 aa, Stratiolaelaps scimitus
MREARVFSIVPKATRSLVAVALTDVLRDVHSNNDVSSWEALLAFARVVLQMPDKGDTSRSLPAVIRGNLAAFRAGARLEYRLRRQLPRGPRPPPTDTGQMAARIATQKLSEGDISGAARALCSTDSATDSAEALHALRAKHPPAPPDYAFPVRPPQVDIAPTSTDEVFAAVSSFPPSSSAGPDGLRPRHLRDLLSPALGAVATALAKALAKVVDCMRAGTVPSALRPILFGARLIALKKKDGSIRPIACSSTIRRLAAKIAWVNERDTVVTLLGPTQLGCGQASGTEIAAHAARAFIHAHPDAALVKLDFRNAFNTVRRDLVLREVAEHVPGLFPLVDLAYRGPSHLIMDNAVISSECGVQQGDPLGPALFCLALRPLAVSLQSRLRLWYMDDGTLAGDPATVASDVQRVLDYEGRSGLALNPTKCEIFSLDAQPDLQRSLPGCRLTQRLSLELVGSPLTDEAIRPLLDRCLERTAVMLDRLPLLSAHQGLFLLRSCFSAARMQHLLRTCPAGTEASALHDYDDLVLDALTTILNLQLPPEAASQATLPVRFGGLGILSVRRLADVCYAASLTAVADMVATVLPPEALAHFSASQEAALDQTGARARVPPDKQSKQRAWSDALHQELRDSLLASAPHAADQARLRAVDRPGAGAWLHALPSSSLGTALDDRSLRFCVGLRLGAPVVAAHSCERCGDPVATNGHHGLSCERSAGRHPRHTMLNDTLVRALHSAGIPCTREPQGLDTSDGRRPDGLTLVPFHRGQHLVWDGTVVDTLAPSYVNHCATIPGYAVARAERAKLRKYAALQATHLFSPLAFETLGGHGPLTANFLEGVYHRLIRATGDKRAGSFLLQRLSLAVQRGNAIAFLGTLSSSPPPPPIIPRNPALLYV

SEQ ID NO: 16990 - protein, 961 aa, Stratiolaelaps scimitus
MNPGPIAPARDATPARDATPARRAASARDATGPPRVPCPHCEGRFSRRGLNRHITVRHPEVRSVPQPSPAPQPLELRLQAAMREARVFSIVPKATRSLVAVALTDVLRDVHTNNDVPSWEALLAFARVVLQMPVKGDTSRSLPAVIRGNLAAFRAGARLEYRLRRHFPRGPRPPPTDTGQRAARIASQKLSEGDISGAARALCSTDSATDSAEALNALRAKHPPAPPDYSFPARPPQVDIAPTSTDEVLAAVSSFPPSSSAGPDGLRPRHLRDLLSPALGAVATALAKALAKVVDCMRAGTVPSALRPILFGARLIALKKKDGSIRPIACSSTIRRLAAKIAWVNERDAVVTLLGPTQLGCGQASGTEIAAHAARAFIHAHPDAALVKLDFRNAFNTVRRDLVLREVAEHVPGLFPLVDLAYRCPSHLIMDNAVISSECGVQQGDPLGPALFCLALRPLAVSLQSRLRLWYMDDGTLAGDPATVASDVQRVLDYEGRSGLALNPTKCEIFSLDAQPDLQRSLPGCRLTQRLSLELVGSPLTDEAIRPLLDRCLERTAVMLDRLPLLSAHQGLFLLRSCFSAARMQHLLRTCPAGTEASALHEYDDLVLEALTTILNLQLPPEAASQASLPVRFGGLGILSVRRLADVCYAASLTAVADMVATVLPPEALAHFSASQEAALDQTGVRARVPPDKQSKQRAWSDALHQELRDSLLASAPHVADQARLRAVDRPGAGAWLHALPSSSLGTALDDRSLRFCVGLRLGAPVVAAHSCERCGDPVATNGHHGLSCERSAGRHPRHTMLNDTLVRALHSAGIPCTREPQGLDTSDGRRPDGLTLIPFHRGLHLVWDGTVVDTLAPSYVNHCATIPGYAVARAERAKLRKYAALQATHLFSPLAFETLGGHGPLTANFLEGVYHRLIRATGDKRAGSFLLQRLSLAVQRGNAIAFLGTLSSSPPPPHNP

SEQ ID NO: 16991 - protein, 975 aa, Stratiolaelaps scimitus
MNPGPIAPARDATPARDATPARDATPARRAASARDATGPPRVPCPHCEGRFSRRGLNRHITVRHPEVRSVPQPSPAPQPLELRLQAAMREARVFSIVPKATRSLVAVALTDVLRDVHTNNDVPSWEALLAFARVVLQMPDKGDTSRSLPAVIRGNLAAFRAGARLEYRLRRHFPRGPRPPPTDTGQRAARIASQKLSEGDISGAARALCSTDSATDSAEALNALRAKHPPAPPDYSFPARPPQVDIAPASTDEVLAAVSSFPPSSSAGPDGLRPRHLRDLLSPALGAVATALAKALAKVVDCMRAGTVPSALRPILFGARLIALKKKDGSIRPIACSSTIRRLAAKIAWVNERDAVVTLLGPTQLGCGQASGTEIAAHAARAFIHAHPDAALVKLDFRNAFNTVRRDLVLREVAEHVPGLFPLVDLAYRCPSHLIMDNAVISSECGVQQGDPLGPALFCLALRPLAVSLQSRLRLWYMDDGTLAGDPATVASDVQRVLDYEGRSGLALNPTKCEIFSLDAQPDLQRSLPGCRLTQRLSLELVGSPLTDEAIRPLLDRCLERTAVMLDRLPLLSAHQGLFLLRSCFSAARMQHLLRTCPAGTEASALHEYDDLVLEALTTILNLQLPPEAASQASLPVRFGGLGILSVRRLADVCYAASLTAVADMVATVLPPEALAHFSASQEAALDQTGVRARVPPDKQSKQRAWSDALHQELRDSLLASAPHVADQARLRAVDRPGAGAWLHALPSSSLGTALDDRSLRFCVGLRLGAPVVAAHSCERCGDPVATNGHHGLSCERSAGRHPRHTMLNDTLVRALHSAGIPCTREPQGLDTSDGRRPDGLTLIPFHRGLHLVWDGTVVDTLAPSYVNHCATIPGYAVARAERAKLRKYAALQATHLFSPLAFETLGGHGPLTANFLEGVYHRLIRATGDKRAGSFLLQRLSLAVQRGNAIAFLGTLSSSPPPPIIPRNTDLPYV

SEQ ID NO: 16992 - protein, 962 aa, Stratiolaelaps scimitus
MNPDPTAPARDATPARRAASAQDATGPPRVPCPHCEGRFSRRGLNRHITVRHPEVRSVPQPSPAPQPLELRLQAAMREARVFSIVPKATRSLVAVALTDVLRDVHTNNDVSSWEALLAFARVVLQMPDKGDTSRSLPAVIRGNLAAFRAGARLEYRLRRHLARGPRPPPTDTGQTAARIASQKLSEGDISGAARALCSTDSATDSAEALDALRAKHPPAPPDYAFPDRPPQVDIAPTSPDEVFAAVSSFPPSSSAGPDGLRPRHLRDLLSPALGAVATALAKALAKVVDCMRAGTVPSALRPILFGARLIALKKKDGSIRPIACSSTIRRLAAKIAWVNERDTVVTLLGPTQLGCGQASGTEIAAHAARAFIHAHPDAALVKLDFRNAFNTVRRDLVLREVAEHVPGLFPLVDLAYRGPSHLIMDNAVISSECGVQQGDPLGPALFCLALRPLAVSLQSRLRLWYMDDGTLAGDPATVASDVQRVLDYEGRSGLALNPTKCEIFSLDAQPDLQRSLPGCRLTQRLSLELVGSPLTDEAIRPLLDRCLERTAVMLDRLPLLSAHQGLFLLRSCFSAARMQHLLRTCPAGTEASALHEYDDLVLDALTTILNLQLPPEAASQATLPVRFGGLGILSVRRLADVCYAASLTAVADMVATVLPPEALAHFSASQEAALDQTGARARVPPDKQSKQRAWSDALHQELRDSLLASAPHAADQARLRAVDRPGAGAWLHALPSSSLGTALDDRSLRFCVGLRLGAPVVAAHSCERCGDPVATNGHHGLSCERSAGRHPRHTMLNDTLVRALHSAGIPCTREPQGLDTSDGRRPDGLTLVPFHRGQHLVWDGTVVDTLAPSYVNHCATIPGYAVARAERAKLRKYAALQATHLFSPLAFETLGGHGPLTANFLEGVYHRLIRATGDKRAGSFLLQRLSLAVQRGNAIAFLGTLSSSPPPTPTIPRNSDLL

SEQ ID NO: 16993 - protein, 988 aa, Stratiolaelaps scimitus
MNPGPIAPARDASPARDATPARDATPARDATAARDATAARDATAARDATAASRAASARDATGPPRVPCPHCEGRFTRRGLNRHITVRHPEVRSVPQPSPAPQPLELRLQAAMREARVFSIVPKATRSLVAVALTDVLRDVHSNNDVSSWEALLAFARVVLQMPDKGDTSRSLPAVIRGNLAAFRAGARLEYRLRRQLPRGPRPPPTDTGQMAARIATQKLSEGDISGAARALCSTDSATDSAEALHALRAKHPPAPPDYAFPVRPPQVDIAPTSTDEVFAAVSSFPPSSSAGPDGLRPRHLRDLLSPALGAVATALAKALAKVVDCMRAGTVPSALRPILFGARLIALKKKDGSIRPIACSSTIRRLAAKIAWVNERDTVVTLLGPTQLGCGQASGTEIAAHAARAFIHAHPDAALVKLDFRNAFNTVRRDLVLREVAEHVPGLFPLVDLAYRGPSHLIMDNAVISSECGVQQGDPLGPALFCLALRPLAVSLQSRLRLWYMDDGTLAGDPATVASDVQRVLDYEGRSGLALNPTKCEIFSLDAQPDLQRSLPGCRLTQRLSLELVGSPLTDEAIRPLLDRCLERTAVMLDRLPLLSAHQGLFLLRSCFSAARMQHLLRTCPAGTEASALHDYDDLVLDALTTILNLQLPPEAASQATLPVRFGGLGILSVRRLADVCYAASLTAVADMVATVLPPEALAHFSASQEAALDQTGARARVPPDKQSKQRAWSDALHQELRDSLLASAPHAADQARLRAVDRPGAGAWLHALPSSSLGTALDDRSLRFCVGLRLGAPVVAAHSCERCGDPVATNGHHGLSCERSAGRHPRHTMLNDTLVRALHSAGIPCTREPQGLDTSDGRRPDGLTLVPFHRGQHLVWDGTVVDTLAPSYVNHCATIPGYAVARAERAKLRKYAALQATHLFSPLAFETLGGHGPLTANFLEGVYHRLIRATGDKRAGSFLLQRLSLAVQRGNAIAFLGTLSSSPPPP

SEQ ID NO: 16994 - protein, 961 aa, Stratiolaelaps scimitus
MNPGPIAPARDATPARDATPARRAASARDATGPPRVPCPHCEGRFSRRGLNRHITVRHPEVRSVPQPSPAPQPLELRLQAAMREARVFSIVPKATRSLVAVALTDVLRDVHTNNDVPSWEALLAFARVVLQMPDKGDTSRSLPAVIRGNLAAFRAGARLEYRLRRHFPRGPRPPPTDTGQRAARIASQKLSEGDISGAARALCSTDSATDSAEALNALRAKHPPAPPDYAFPARPPQVDIAPTSTDEVLAAVSSFPPSSSAGPDGLRPRHLRDLLSPALGAVATALAKALAKVVDCMRAGTVPSALRPILFGARLIALKKKDGSIRPIACSSTIRRLAAKIAWVNERDTVVTLLGPTQLGCGQASGTEIAAHAARAFIHAHPDAALVKLDFRNAFNTVRRDLVLREVAEHVPGLFPLVDLAYRCPSHLIMDNAVISSECGVQQGDPLGPALFCLALRPLAVSLQSRLRLWYMDDGTLAGDPATVASDVQRVLDYEGRSGLALNPTKCEIFSLDAQPDLQRSLPGCRLTQRLSLELVGSPLTDEAIRPLLDRCLERTAVMLDRLPLLSAHQGLFLLRSCFSAARMQHLLRTCPAGTEASALHEYDDLVLEALTTILNLQLPPEAASQASLPVRFGGLGILSVRRLADVCYAASLTAVADMVATVLPPEALAHFSASQEAALDQTGVRARVPPDKQSKQRAWSDALHQELRDSLLASAPHVADQARLRAVDRPGAGAWLLALPSSSLGTALDDRSLRFCVGLRLGAPVVAAHSCERCGDPVATNGHHGLSCERSAGRHPRHTMLNDTLVRALHSAGIPCTREPQGLDTSDGRRPDGLTLIPFHRGLHLVWDGTVVDTLAPSYVNHCATIPGYAVARAERAKLRKYAALQATHLFSPLAFETLGGHGPLTANFLEGVYHRLIRATGDKRAGSFLLQRLSLAVQRGNAIAFLGTLSSSPPPPHNP

SEQ ID NO: 16995 - protein, 967 aa, Stratiolaelaps scimitus
MNPGPIAPARDATPARDATPARRAASARRAASARDATGPPRVPCPHCEGRFSRRGLNRHITVRHPEVRSVPQPSPAPQPLELRLQAAMREARVFSIVPKATRSLVAVALTDVLRDVHTNNDVPSWEALLAFARVVLQMPDKGDTSRSLPAVIRGNLAAFRAGARLEYRLRRHFPRGPRPPPTDTGQRAARIASQKLSEGDISGAARALCSTDSATDSAEALNALRAKHPPAPPDYSFPARPPQVDIAPTSTDEVLAAVSSFPPSSSAGPDGLRPRHLRDLLSPALGAVATALAKALAKVVDCMRAGTVPSALRPILFGARLIALKKKDGSIRPIACSSTIRRLAAKIAWVNERDAVVTLLGPTQLGCGQASGTEIAAHAARAFIHAHPDAALVKLDFRNAFNTVRRDLVLREVAEHVPGLFPLVDLAYRCPSHLIMDNAVISSECGVQQGDPLGPALFCLALRPLAVSLQSRLRLWYMDDGTLAGDPATVASDVQRVLDYEGRSGLALNPTKCEIFSLDAQPDLQRSLPGCRLTQRLSLELVGSPLTDEAIRPLLDRCLERTAVMLDRLPLLSAHQGLFLLRSCFSAARMQHLLRTCPAGTEASALHEYDDLVLEALTTILNLQLPPEAASQASLPVRFGGLGILSVRRLADVCYAASLTAVADMVATVLPPEALAHFSASQEAALDQTGVRARVPPDKQSKQRAWSDALHQELRDSLLASAPHVADQARLRAVDRPGAGAWLHALPSSSLGTALDDRSLRFCVGLRLGAPVVAAHSCERCGDPVATNGHHGLSCERSAGRHPRHTMLNDTLVRALHSAGIPCTREPQGLDTSDGRRPDGLTLIPFHRGLHLVWDGTVVDTLAPSYVNHCATIPGYAVARAERAKLRKYAALQATHLFSPLAFETLGGHGPLTANFLEGVYHRLIRATGDKRAGSFLLQRLSLAVQRGNAIAFLGTLSSSPPPPHNP

SEQ ID NO: 16996 - protein, 969 aa, Stratiolaelaps scimitus
MNPGPIAPARDATPARDATPARRAASARDATGPPRVPCPHCEGRFSRRGLNRHITVRHPEVRSVPQPSPAPQPLELRLQAAMREARVFSIVPKATRSLVAVALTDVLRDVHTNNDVPSWEALLAFARVVLQMPDKGDTSRSLPAVIRGNLAAFRAGARLEYRLRRHFPRGPRPPPTDTGQRAARIASQKLSEGDISGAARALCSTDSATDSAEALNALRAKHPPAPPDYSFPARPPQVDIAPTSTDEVLAAVSSFPPSSSAGPDGLRPRHLRDLLSPALGAVATALAKALAKVVDCMRAGTVPSALRPILFGARLIALKKKDGSIRPIACSSTIRRLAAKIAWVNERDAVVTLLGPTQLGCGQASGTEIAAHAARAFIHAHPDAALVKLDFRNAFNTVRRDLVLREVAEHVPGLFPLVDLAYRCPSHLIMDNAVISSECGVQQGDPLGPALFCLALRPLAVSLQSRLRLWYMDDGTLAGDPATVASDVQRVLDYEGRSGLALNPTKCEIFSLDAQPDLQRSLPGCRLTQRLSLELVGSPLTDEAIRPLLDRCLERTAVMLDRLPLLSAHQGLFLLRSCFSAARMQHLLRTCPAGTEASALHEYDDLVLEALTTILNLQLPPEAASQASLPVRFGGLGILSVRRLADVCYAASLTAVADMVATVLPPEALAHFSASQEAALDQTGVRARVPPDKQSKQRAWSDALHQELRDSLLASAPHVADQARLRAVDRPGAGAWLHALPSSSLGTALDDRSLRFCVGLRLGAPVVAAHSCERCGDPVATNGHHGLSCERSAGRHPRHTMLNDTLVRALHSAGIPCTREPQGLDTSDGRRPDGLTLIPFHRGLHLVWDGTVVDTLAPSYVNHCATIPGYAVARAERAKLRKYAALQATHLFSPLAFETLGGHGPLTANFLEGVYHRLIRATGDKRAGSFLLQRLSLAVQRGNAIAFLGTLSSSPPPPIIPRNTDLPYV

SEQ ID NO: 16997 - protein, 958 aa, Stratiolaelaps scimitus
MNPGPIAPARDATPARDATPARRAASARDATGPPRVPCPHCEGRFSRRGLNRHITVRHPEVRSVPQPSPAPQPLELRLQAAMREARVFSIVPKATRSLVAVALTDVLRDVHTNNDVPSWEALLAFARVVLQMPDKGDTSRSLPAVIRGNLAAFRAGARLEYRLRRHFPRGPRPPPTDTGQRAARIASQKLSEGDISGAARALCSTDSATDSAEALNALRAKHPPAPPDYSFPARPPQVDIAPTSTDEVLAAVSSFPPSSSAGPDGLRPRHLRDLLSPALGAVATALAKALAKVVDCMRAGTVPSALRPILFGARLIALKKKDGSIRPIACSSTIRRLAAKIAWVNERDAVVTLLGPTQLGCGQASGTEIAAHAARAFIHAHPDAALVKLDFRNAFNTVRRDLVLREVAEHVPGLFPLVDLAYRCPSHLIMDNAVISSECGVQQGDPLGPALFCLALRPLAVSLQSRLRLWYMDDGTLAGDPATVASDVQRVLDYEGRSGLALNPTKCEIFSLDAQPDLQRSLPGCRLTQRLSLELVGSPLTDEAIRPLLDRCLERTAVMLDRLPLLSAHQGLFLLRSCFSAARMQHLLRTCPAGTEASALHEYDDLVLEALTTILNLQLPPEAASQASLPVRFGGLGILSVRRLADVCYAASLTAVADMVATVLPPEALAHFSASQEAALDQTGVRARVPPDKQSKQRAWSDALHQELRDSLLASAPHVADQARLRAVDRPGAGAWLHALPSSSLGTALDDRSLRFCVGLRLGAPVVAAHSCERCGDPVATNGHHGLSCERSAGRHPRHTMLNDTLVRALHSAGIPCTREPQGLDTSDGRRPDGLTLIPFHRGLHLVWDGTVVDTLAPSYVNHCATIPGYAVARAERAKLRKYAALQATHLFSPLAFETLGGHGPLTANFLEGVYHRLIRATGDKRAGSFLLQRLSLAVQRGNAIAFLGTLSSSPPPP

SEQ ID NO: 16998 - protein, 998 aa, Stratiolaelaps scimitus
MNPGPIAPARDASPARDATPARDATPARDATPARDAIAARDATAARDATAARDATAARRAASARDATGPPRVPCPHCEGRFARRGLNRHITVRHPEVRSVPQPSPAPQPLELRLQAAMREARVFSIVPKATRSLVAVALTDVLRDVHSNNDASSWEALLAFARVVLQMPDKGDTSRSLPAVIRGNLAAFRAGARLEYRLRRQLPRGPRPPPTDTGQMAARIATQKLSEGDISGAARALCSTDSATDSAEALHALRAKHPPAPPDYAFPVRPPQVDIAPTSTDEVFAAVSSFPPSSSAGPDGLRPRHLRDLLSPALGAVATALAKALAKVVDCMRAGTVPSALRPILFGARLIALKKKDGSIRPIACSSTIRRLAAKIAWVNERDTVVTLLGPTQLGCGQASGTEIAAHAARAFIHAHPDAALVKLDFRNAFNTVRRDLVLREVAEHVPGLFPLVDLAYRGPSHLIMDNAVISSECGVQQGDPLGPALFCLALRPLAVSLQSRLRLWYMDDGTLAGDPATVASDVQRVLDYEGRSGLALNPTKCEIFSLDAQPDLQRSLPGCRLTQRLSLELVGSPLTDEAIRPLLDRCLERTAVMLDRLPLLSAHQGLFLLRSCFSAARMQHLLRTCPAGTEASALHDYDDLVLDALTTILNLQLPPEAASQATLPVRFGGLGILSVRRLADVCYAASLTAVADMVATVLPPEALAHFSASQEAALDQTGARARVPPDKQSKQRAWSDALHQELRDSLLASAPHAADQARLRAVDRPGAGAWLHALPSSSLGTALDDRSLRFCVGLRLGAPVVAAHSCERCGDPVATNGHHGLSCERSAGRHPRHTMLNDTLVRALHSAGIPCTREPQGLDTSDGRRPDGLTLVPFHRGQHLVWDGTVVDTLAPSYVNHCATIPGYAVARAERAKLRKYAALQATHLFSPLAFETLGGHGPLTANFLEGVYHRLIRATGDKRAGSFLLQRLSLAVQRGNAIAFLGTLSSSPPPPPHNP

SEQ ID NO: 16999 - protein, 969 aa, Stratiolaelaps scimitus
MNPGPIAPARDATPARDATPARRAASARDATGPPRVPCPHCEGRFSRRGLNRHITVRHPEVRSVPQPSPAPQPLELRLQAAMREARVFSIVPKATRSLVAVALTDVLRDVHTNNDVPSWEALLAFARVVLQMPDKGDTSRSLPAVIRGNLAAFRAGARLEYRLRRHFPRGPRPPPTDTGQRAARIASQKLSEGDISGAARALCSTDSATDSAEALNALRAKHPPAPPDYSFPARPPQVDIAPTSTDEVLAAVSSFPPSSSAGPDGLRPRHLRDLLSPALGAVATALAKALAKVVDCMRAGTVPSALRPILFGARLIALKKKDGSIRPIACSSTIRRLAAKIAWVNERDAVVTLLGPTQLGCGQASGTEIAAHAARAFIHAHPDAALVKLDFRNAFNTVRRDLVLREVAEHVPGLFPLVDLAYRCPSHLIMDNAVISSECGVQQGDPLGPALFCLALRPLAVSLQSRLRLWYMDDGTLAGDPATVASDVQRVLDYEGRSGLALNPTKCEIFSLDAQPDLQRSLPGCRLTQRLSLELVGSPLTDEAIRPLLDRCLERTAVMLDRLPLLSAHQGLFLLRSCFSAARMQHLLRTCPAGTEASALHEYDDLVLEALTTILNLQLPPEAASQASLPVRFGGLGILSVRRLADVCYAASLTAVADMVATVLPPEALAHFSASQEAALDQTGVRARVPPDKQSKQRAWSDALHQELRDSLLASAPHVADQARLRAVDRPGAGAWLHALPSSSLGTALDDRSLRFCVGLRLGAPVVAAHSCERCGDPVATNGHHGLSCERSAGRHPRHTMLNDTLVRALHSAGIPCTREPQGLDTSDGRRPDGLTLIPFHRGLHLVWDGTVVDTLAPSYVNHCATIPGYAVARAERAKLRKYAALQATHLFSPLAFETLGGHGPLTANFLEGVYHRLIRATGDKRAGSFLLQRLSLAVHRGNAIAFLGTLSSSPPPPIIPRNTDQPYV

SEQ ID NO: 17000 - protein, 886 aa, Stratiolaelaps scimitus
MREARVFSIVPKATRSLVAVALTDVLRDVHTNNDVSSWEALLAFARVVLQMPDKGDTSRSLPAVIRGNLAAFRAGARLEYRLRRHIPRGPRPPPTDTGQTAARIASQKLSEGDISGAARALCSTDSATDSAEALDALIAKHPPAPPDYAFPVRPPQVDIAPTSPDEVFAAVSSFPPSSSAGPDGLRPRHLRDLLSPALGAVATALAKALAKVVDCMRAGTVPSALRPILFGARLIALKKKDGSIRPIACSSTIRRLAAKIAWVNERDTVVTLLGPTQLGCGQASGTEIAAHAARAFIHAHPDAALVKLDFRNAFNTVRRDLVLREVAEHVPGLFPLVDLAYRSPSHLIMDNAVISSECGVQQGDPLGPALFCLALRPLAVCLQSRLRLWYMDDGTLAGDPATVASDVQRVLDYEGRSGLALNPTKCEIFSLDAQPDLQRSLPGCRLTQRLSLELVGSPLTDEAIRPLLDRCLERTAVMLDRLPLLSAHQGLFLLRSCFSAARMQHLLRTCPAGTEASALHEYDELVLDALTTILNLQLPPEAASQATLPVRFGGLGILSVRRLADVCYAASLTAVADMVATVLPLEALAHFSASREAALDQTGVRARVPPDKQSKQRVWSDALHQELRDSLLASAPHVADQARLRAVDRPGAGAWLHALPSSSLGTALDDRSLRFCVGLRLGAPVVAAHSCERCGDPVATNGHHGLSCERSAGRHPRHTMLNDTLVRALHSAGIPCTREPQGLDTSDGRRPDGLTLIPFHQGQHLVWDGTVVDTLAPSYVNHCATIPGYAVARAERAKLRKYAALQATHLFSPLAFETLGGHGPLTANFLEGVYHRLIRATGDKRAGSFLLQHLSLAVQRGNAIAFLGTLSSSPPTPIIPRNSDLL

SEQ ID NO: 17001 - protein, 979 aa, Stratiolaelaps scimitus
MNPGPIAPARDATPARDATPARDATPARDATPARDATPARRAASARDATGPPRVPCPHCEGRFSRRGLNRHITVRHPEVRSVPQPSPAPQPLELRLQAAMREARVFSIVPKATRSLVAVALTDVLRDVHTNNDVPSWEALLAFARVVLQMPDKGDTSRSLPAVIRGNLAAFRAGARLEYRLRRHFPRGPRPPPTDTGQRAARIASQKLSEGDISGAARALCSTDSATDSAEALNALRAKHPPAPPDYSFPARPPQVDIAPTSTDEVLAAVSSFPPSSSAGPDGLRPRHLRDLLSPALGAVATALAKALAKVVDCMRAGTVPSALRPILFGARLIALKKKDGSIRPIACSSTIRRLAAKIAWVNERDAVVTLLGPTQLGCGQASGTEIAAHAARAFIHAHPDAALVKLDFRNAFNTVRRDLVLREVAEHVPGLFPLVDLAYRCPSHLIMDNAVISSECGVQQGDPLGPALFCLALRPLAVSLQSRLRLWYMDDGTLAGDPATVASDVQRVLDYEGRSGLALNPTKCEIFSLDAQPDLQRSLPGCRLTQRLSLELVGSPLTDEAIRPLLDRCLERTAVMLDRLPLLSAHQGLFLLRSCFSAARMQHLLRTCPAGTEASALHEYDDLVLEALTTILNLQLPPEAASQASLPVRFGGLGILSVRRLADVCYAASLTAVADMVATVLPPEALAHFSASQEAALDQTGVRARVPPDKQSKQRAWSDALHQELRDSLLASAPHVADQARLRAVDRPSAGAWLHALPSSSLGTALDDRSLRFCVGLRLGAPVVAAHSCERCGDPVATNGHHGLSCERSAGRHPRHTMLNDTLVRALHSAGIPCTREPQGLDTSDGRRPDGLTLIPFHRGLHLVWDGTVVDTLAPSYVNHCATIPGYAVARAERAKLRKYAALQATHLFSPLAFETLGGHGPLTANFLEGVYHRLIRATGDKRAGSFLLQRLSLAVQRGNAIAFLGTLSSSPPPPHNP

SEQ ID NO: 17002 - protein, 953 aa, Stratiolaelaps scimitus
MNPDPTAPARDATPARRAASAQDATGPPRVPCPHCEGRFSRRGLNRHITVRHPEVRSVPQPSPAPQPLELRLQAAMREARVFSIVPKATRSLVAVALTDVLRDVHTNNDVSSWEALLAFARVVLQMPDKGDTSRSLPAVIRGNLAAFRAGARLEYRLRRHLARGPRPPPTDTGQTAARIASQKLSEGDISGAARALCSTDSATDSAEALDALRAKHPPAPPDYAFPDRPPQVDIAPTSPDEVFAAVSSFPPSSSAGPDGLRPRHLRDLLSPALGAVATALAKALAKVVDCMRAGTVPSALRPILFGARLIALKKKDGSIRPIACSSTIRRLAAKIAWVNERDTVVTLLGPTQLGCGQASGTEIAAHAARAFIHAHPDAALVKLDFRNAFNTVRRDLVLREVAEHVPGLFPLVDLAYRGPSHLIMDNAVISSECGVQQGDPLGPALFCLALRPLAVSLQSRLRLWYMDDGTLAGDPATVASDVQRVLDYEGRSGLALNPTKCEIFSLDAQPDLQRSLPGCRLTQRLSLELVGSPLTDEAIRPLLDRCLERTAVMLDRLPLLSAHQGLFLLRSCFSAARMQHLLRTCPAGTEASALHEYDDLVLDALTTILNLQLPPEAASQATLPVRFGGLGILSVRRLADVCYAASLTAVADMVATVLPPEALAHFSASQEAALDQTGARARVPPDKQSKQRAWSDALHQELRDSLLASAPHAADQARLRAVDRPGAGAWLHALPSSSLGTALDDRSLRFCVGLRLGAPVVAAHSCERCGDPVATNGHHGLSCERSAGRHPRHTMLNDTLVRALHSAGIPCTREPQGLDTSDGRRPDGLTLVPFHRGQHLVWDGTVVDTLAPSYVNHCATIPGYAVARAERAKLRKYAALQATHLFSPLAFETLGGHGPLTANFLEGVYHRLIRATGDKRAGSFLLQRLSLAVQRGNAIAFLGTLSSSPPPPP

SEQ ID NO: 17003 - protein, 986 aa, Stratiolaelaps scimitus
MNPGPIAPARDASPARDATPARDAIAARDATAARDATAARDATAARRAASARDATGPPRVPCPHCEGRFTRRGLNRHITVRHPEVRSVPQPSPAPQPLELRLQAAMREARVFSIVPKATRSLVAVALTDVLRDVHSNNDVSSWEALLAFARVVLQMPDKGDTSRSLPAVIRGNLAAFRAGARLEYRLRRQLPRGPRPPPTDTGQMAARIATQKLSEGDISGAARALCSTDSATDSAEALHALRAKHPPAPPDYAFPVRPPQVDIAPTSTDEVFAAVSSFPPSSSAGPDGLRPRHLRDLLSPALGAVATALAKALAKVVDCMRAGTVPSALRPILFGARLIALKKKDGSIRPIACSSTIRRLAAKIAWVNERDTVVTLLGPTQLGCGQASGTEIAAHAARAFIHAHPDAALVKLDFRNAFNTVRRDLVLREVAEHVPGLFPLVDLAYRGPSHLIMDNAVISSECGVQQGDPLGPALFCLALRPLAVSLQSRLRLWYMDDGTLAGDPATVASDVQRVLDYEGRSGLALNPTKCEIFSLDAQPDLQRSLPGCRLTQRLSLELVGSPLTDEAIRPLLDRCLERTAVMLDRLPLLSAHQGLFLLRSCFSAARMQHLLRTCPAGTEASALHDYDDLVLDALTTILNLQLPPEAASQATLPVRFGGLGILSVRRLADVCYAASLTAVADMVATVLPPEALAHFSASQEAALDQTGARARVPPDKQSKQRAWSDALHQELRDSLLASAPHAADQARLRAVDRPGAGAWLHALPSSSLGTALDDRSLRFCVGLRLGAPVVAAHSCERCGDPVATNGHHGLSCERSAGRHPRHTMLNDTLVRALHSAGIPCTREPQGLDTSDGRRPDGLTLVPFHRGQHLVWDGTVVDTLAPSYVNHCATIPGYAVARAERAKLRKYAALQATHLFSPLAFETLGGHGPLTANFLEGVYHRLIRATGDKRAGSFLLQRLSLAVQRGNAIAFLGTLSSSPPPPPHNP

SEQ ID NO: 17004 - protein, 961 aa, Stratiolaelaps scimitus
MNPGPIAPARDATPARDATPARRAASARDATGPPRVPCPHCEGRFSRRGLNRHITVRHPEVRSVPQPSPAPQPLELRLQAAMREARVFSIVPKATRSLVAVALTDVLRDVHTNNDVPSWEALLAFARVVLQMPDKGDTSRSLPAVIRGNLAAFRAGARLEYRLRRHFPRGPRPPPTDTGQRAARIASQKLSEGDISGAARALCSTDSATDSAEALNALRAKHPPAPPDYSFPARPPQVDIAPTSTDEVLAAVSSFPPSSSAGPDGLRPRHLRDLLSPALGAVATALAKALAKVVDCMRAGTVPSALRPILFGARLIALKKKDGSIRPIACSSTIRRLAAKIAWVNERDAVVTLLGPTQLGCGQASGTEIAAHAARAFIHAHPDAALVKLDFRNAFNTVRRDLVLREVAEHVPGLFPLVDLAYRCPSHLIMDNAVISSECGVQQGDPLGPALFCLALRPLAVSLQSRLRLWYMDDGTLAGDPATVASDVQRVLDYEGRSGLALNPTKCEIFSLDAQPDLQRSLPGCRLTQRLSLELVGSPLTDEAIRPLLDRCLERTAVMLDRLPLLSAHQGLFLLRSCFSAARMQHLLRTCPAGTEASALHEYDDLVLEALTTILNLQLPPEAASQASLPVRFGGLGILSVRRLADVCYAASLTAVADMVATVLPPEALAHFSASQEAALDQTGVRARVPPDKQSKQRAWSDALHQELRDSLLASAPHVADQARLRAVDRPGAGAWLHALPSSSLGTALDDRSLRFCVGLRLGAPVVAAHSCERCGDPVATNGHHGLSCERSAGRHPRHTMLNDTLVRALHSAGIPCTREPQGLDTSDGRRPDGLTLIPFHRGLHLVWDGTVVDTLAPSYVNHCATIPGYAVARAERAKLRKYAALQATHLFSPLAFETLGGHGPLTANFLEGVYHRLIRATGDKRAGSFLLQRLSLAVQRGNAIAFLGTLSSSPPPPHNP

SEQ ID NO: 17005 - protein, 956 aa, Stratiolaelaps scimitus
MNPDPTAPARDATPARRAASAQDATGPPRVPCPHCEGRFSRRGLNRHITVRHPEVRSVPQPSPAPQPLELRLQAAMREARVFSIVPKATRSLVAVALTDVLRDVHTNNDVSSWEALLAFARVVLQMPDKGDTSRSLPAVIRGNLAAFRAGARLEYRLRRHLARGPRPPPTDTGQTAARIASQKLSEGDISGAARVLCSTDSATDSAEALDALRAKHPPAPPDYAFPDRPPQVDIAPTSPDEVFAAVSSFPPSSSAGPDGLRPRHLRDLLSPALGAVATALAKALAKVVDCMRAGTVPSALRPILFGARLIALKKKDGSIRPIACSSTIRRLAAKIAWVNERDTVVTLLGPTQLGCGQASGTEIAAHAARAFIHAHPDAALVKLDFRNAFNTVRRDLVLREVAEHVPGLFPLVDLAYRGPSHLIMDNAVISSECGVQQWDPLGPALFCLALRPLAVSLQSRLRLWYMDDGTLAGDPATVASDVQRVLDYEGRSGLALNPTKCEIFSLDAQPDLQRSLPGCRLTQRLSLELVGSPLTDEAIRPLLDRCLERTAVMLDRLPLLSAHQGLFLLRSCFSAARMQHLLRTCPAGTEASALHEYDDLVLDALTTILNLQLPPEAASQATLPVRFGGLGILSVRRLADVCYAASLTAVADMVATVLPPEALAHFSASQEAALDQTGARARVPPDKQSKQRAWSDALHQELRDSLLASAPHAADQARLRAVDRPGAGAWLHALPSSSLGTALDDRSLRFCVGLRLGAPVVAAHSCERCGDPVATNGHHGLSCERSAGRHPRHTMLNDTLVRALHSAGIPCTREPQGLDTSDGRRPDGLTLVPFHRGQHLVWDGTVVDTLAPSYVNHCATIPGYAVARAERAKLRKYAALQATHLFSPLAFETLGGHGPLTANFLEGVYHRLIRATGDKRAGSFLLQRLSLAVQRGNAIAFLGTLSSSPPPHPHNP

SEQ ID NO: 17006 - protein, 887 aa, Stratiolaelaps scimitus
MREARVFSIVPKATRSLVAVALTDVLRDVHTNNDVSSWEALLAFARVVLQMPDKGDTSRSLPAVIRGNLAAFRAGARLEYRLRRHLARGPRPPPTDTGQTAARIASQKLSEGDISGAARALCSTDSATDSAEALDALRAKHPPAPPDYAFPDRPPQVDIAPTSPDEVFAAVSSFPPSSSAGPDGLRPRHLRDLLSPALGAVATALATALAKVVDCMRAGTVPSALRPILFGARLIALKKKDGSIRPIACSSTIRRLAAKIAWVNERDTVVTLLGPTQLGCGQASGTEIAAHAARAFIHAHPDAALVKLDFRNAFNTVRRDLVLREVAEHVPGLFPLVDLVYRGPSHLIMDNAVISSECGVQQGDPLGPALFCLALRPLAVSLQSRLRLWYMDDGTLAGDPATVASDVQRVLDYEGRSGLALNPTKCEIFSLDAQPDLQRSLPGCRLTQRLSLELVGSPLTDEAIRPLLDRCLERTAVMLDRLPLLSAHQGLFLLRSCFSAARMQHLLRTCPAGTEASALHEYDDLVLDALTTILNLQLPPEAASQATLPVRFGGLGILSVRRLADVCYAASLTAVADMVATVLPPEALVHFSASQEAALDQTGARVRVPPDKQSKQRAWSDALHQELRDSLLASAPHAADQARLRAVDRPGAGAWLHALPSSSLGTALDDRSLRFCVGLRLGAPVVAAHSCERCGDPVATNGHHGLSCERSAGRHPRHTMLNDTLVRALHSAGIPCTREPQGLDTSDGRRPDGLTLVPFHRGQHLVWDGTVVDTLAPSYVNHCATIPGYAVARAERAKLRKYAALQATHLFSPLAFETLGGHGPLTANFLEGVYHRLIRATGDKRAGSFLLQRLSLAVQRGNAIAFLGTLSSSPPPTPIIPRNSDLL

SEQ ID NO: 17007 - protein, 985 aa, Stratiolaelaps scimitus
MNPGPIAPARDASPARDATPARDATPARDAIAARDATAARDATAARRAASARDATGPPRVPCPHCEGRFTRRGLNRHITVRHPEVRSVPQPSPAPQPLELRLQAAMREARVFSIVPKATRSLVAVALTDVLRDVHSNNDVSSWEALLAFARVVLQMPDKGDTSRSLPAVIRGNLAAFRAGARLEYRLRRQLPRGPRPPPTDTGQMAARIATQKLSEGDISGAARALCSTDSATDSAEALHALRAKHPPAPPDYAFPVRPPQVDIAPTSTDEVFAAVSSFPPSSSAGPDGLRPRHLRDLLSPALGAVATALAKALAKVVDCMRAGTVPSALRPILFGARLIALKKKDGSIRPIACSSTIRRLAAKIAWVNERDTVVTLLGPTQLGCGQASGTEIAAHAARAFIHAHPDAALVKLDFRNAFNTVRRDLVLREVAEHVPGLFPLVDLAYRGPSHLIMDNAVISSECGVQQGDPLGPALFCLALRPLAVSLQSRLRLWYMDDGTLAGDPATVASDVQRVLDYEGRSGLALNPTKCEIFSLDAQPDLQRSLPGCRLTQRLSLELVGSPLTDEAIRPLLDRCLERTAVMLDRLPLLSAHQGLFLLRSCFSAARMQHLLRTCPAGTEASALHDYDDLVLDALTTILNLQLPPEAASQATLPVRFGGLGILSVRRLADVCYAASLTAVADMVATVLPPEALAHFSASQEAALDQTGARARVPPDKQSKQRAWSDALHQELRDSLLASAPHAADQARLRAVDRPGAGAWLHALPSSSLGTALDDRSLRFCVGLRLGAPVVAAHSCERCGDPVATNGHHGLSCERSAGRHPRHTMLNDTLVRALHSAGIPCTREPQGLDTSDGRRPDGLTLVPFHRGQHLVWDGTVVDTLAPSYVNHCATIPGYAVARAERAKLRKYAALQATHLFSPLAFETLGGHGPLTANFLEGVYHRLIRATGDKRAGSFLLQRLSLAVQRGNAIAFLGTLSSSPPPPHNP

SEQ ID NO: 17008 - protein, 994 aa, Stratiolaelaps scimitus
MNPGPIAPARDASPARDATPARDAIAARDATAARDATAARDATAARRAASARDATGPPRVPCPHCEGRFTRRGLNRHITVRHPEVRSVPQPSPAPQPLELRLQAAMREARVFSIVPKATRSLVAVALTDVLRDVHSNNDVSSWEALLAFARVVLQMPDKGDTSRSLPAVIRGNLAAFRAGARLEYRLRRQLPRGPRPPPTDTGQMAARIATQKLSEGDISGAARALCSTDSATDSAEALHALRAKHPPAPPDYAFPVRPPQVDIAPTSTDEVFAAVSSFPPSSSAGPDGLRPRHLRDLLSPALGAVATALAKALAKVVDCMRAGTVPSALRPILFGARLIALKKKDGSIRPIACSSTIRRLAAKIAWVNERDTVVTLLGPTQLGCGQASGTEIAAHAARAFIHAHPDAALVKLDFRNAFNTVRRDLVLREVAEHVPGLFPLVDLAYRGPSHLIMDNAVISSECGVQQGDPLGPALFCLALRPLAVSLQSRLRLWYMDDGTLAGDPATVASDVQRVLDYEGRSGLALNPTKCEIFSLDAQPDLQRSLPGCRLTQRLSLELVGSPLTDEAIRPLLDRCLERTAVMLDRLPLLSAHQGLFLLRSCFSAARMQHLLRTCPAGTEASALHDYDDLVLDALTTILNLQLPPEAASQATLPVRFGGLGILSVRRLADVCYAASLTAVADMVATVLPPEALAHFSASQEAALDQTGARARVPPDKQSKQRAWSDALHQELRDSLLASAPHAADQARLRAVDRPGAGAWLHALPSSSLGTALDDRSLRFCVGLRLGAPVVAAHSCERCGDPVATNGHHGLSCERSAGRHPRHTMLNDTLVRALHSAGIPCTREPQGLDTSDGRRPDGLTLVPFHRGQHLVWDGTVVDTLAPSYVNHCATIPGYAVARAERAKLRKYAALQATHLFSPLAFETLGGHGPLTANFLEGVYHRLIRATGDKRAGSFLLQRLSLAVQRGNAIAFLGTLSSSPPPPPIISRNPALLYV

SEQ ID NO: 17009 - protein, 1021 aa, Stratiolaelaps scimitus
MNPGPIAPARDASPARDATPARDATPARDATPARDATPARDATPARDATAARDATAARDATAARDATAARDATAARDATAARRAASARDATGPPRVPCPHCEGRFTRRGLNRHITVRHPEVRSVPQPSPAPQPLELRLQAAMREARVFSIVPKATRSLVAVALTDVLRDVHSNNDVSSWEALLAFARVVLQMPDKGDTSRSLPAVIRGNLAAFRAGARLEYRLRRHLPRGPRPPPTDTGQMAARIATQKLSEGDISGAARALCSTDSATDSAEALHALRAKHPPAPPDYAFPVRPPQVDIAPTSTDEVFAAVSSFPPSSSAGPDGLRPRHLRDLLSPALGAVATALAKALAKVVDCMRAGTVPSALRPILFGARLIALKKKDGSIRPIACSSTIRRLAAKIAWVNERDTVVTLLGPTQLGCGQASGTEIAAHAARAFIHAHPDAALVKLDFRNAFNTVRRDLVLREVAEHVPGLFPLVDLAYRGPSHLIMDNAVISSECGVQQGDPLGPALFCLALRPLAVSLQSRLRLWYMDDGTLAGDPATVASDVQRVLDYEGRSGLALNPTKCEIFSLDAQLDLQRSLPGCRLTQRLSLELVGSPLTDEAIRPLLDRCLERTAVMLDRLPLLSAHQGLFLLRSCFSAARMQHLLRTCPAGTEASALHDYDDMVLDALTTILNLQLPPEAASQATLPVRFGGLGILSVRRLADVCYAASLTAVADLVATVLPPEALAHFSASQEAALDQTGARARVPPDKQSKQRAWSDALHQELRDSLLASAPHAADQARLRAVDRPGAGAWLHALPSSSLGTALDDRSLRFCVGLRLGAPVVAAHSCERCGDPVATNGHHGLSCERSAGRHPRHTMLNDTLVRALHSAGIPCTREPQGLDTSDGRRPDGLTLVPFHRGQHLVWDGTVVDTLAPFYVNHCATIPGYAVARAERAKLRKYAALQATHLFSPLAFETLGGHGPLTANFLEGVYHRLIRATGDKRAGSFLLQRLSLAVQRGNAIAFLGTLSSSPPPPHNP

SEQ ID NO: 17010 - protein, 955 aa, Stratiolaelaps scimitus
MNPDPTAPARDATPARRAASAQDATGPPRVPCPHCEGRFSRRGLNRHITVRHPEVRSVPQPSPAPQPLELRLQAAMREARVFSIVPKATRSLVAVALTDVLRDVHTNNDVSSWEALLAFARVVLQMPDKGDTSRSLPAVIRGNLAAFRAGARLEYRLRRHLARGPRPPPTDTGQTAARIASQKLSEGDISGAARALCSTDSATDSAEALDALRAKHPPAPPDYAFPDRPPQVDIAPTSPDEVFAAVSSFPPSSSAGPDGLRPRHLRDLLSPALGAVATALAKALAKVVDCMRAGTVPSALRPILFGARLIALKKKDGSIRPIACSSTIRRLAAKIAWVNERDTVVTLLGPTQLGCGQASGTEIAAHAARAFIHAHPDAALVKLDFRNAFNTVRRDLVLREVAEHVPGLFPLVDLAYRSPSHLIMDNAVISSECGVQQGDPLGPALFCLALRPLAVSLQSRLRLWYMDDGTLAGDPATVASDVQRVLDYEGRSGLALNPTKCEIFSLDAQPDLQRLLPGCRLTQRLSLELVGSPLTDEAIRPLLDRCLERTAVMLDRLPLLSAHQGLFLLRSCFSAERMQHLLRTCPAGTEASALHEYDELVLDALTTILNLQLPPEAASQATLPVRFGDLGILSVRRLADVCYAASLTAVADMVATVLSPEALAHFSASREAALDQTGVRARVPPDKQSKQRVWSDALHQELRDSLLASAPHVADQARLRAVDRPGAGAWLHALPSSSLGTALDDRSLRFCVGLRLGAPVVAAHSCERCGDPVATNGHHGLSCERSAGRHPRHTMLNDTLVRALHSAGIPCTREPQGLDTSDGRRPDGLTLIPFHRGQHLVWDGTVVDTLAPSYVNHCATIPGYAVARAERAKLRKYAALQATHLFSPLAFETLGGHGPLTANFLEGVYHRLIRATGDKRAGSFLLQRLSLAVQRGNAIAFLGTLSSSPPPPPPP

SEQ ID NO: 17011 - protein, 1009 aa, Stratiolaelaps scimitus
MNPGPIAPARDATPARDATPARDATPARDATAARDATAARDATAARDATAARDATAARDATAARDATAARRAASARDATGPPRVPCPHCEGRFTRRGLNRHITVRHPEVRSVPQPSPAPQPLELRLQAAMREARVFSIVPKATRSLVAVALTDVLRDVHSNNDASSWEALLAFARVVLQMPDKGDTSRSLPAVIRGNLAAFRAGARLEYRLRRQLPRGPRPPPTDTGQMAARIATQKLSEGDISGAARALCSTDSATDSAEALHALRAKHPPAPPDYAFPVRPPQVDIAPTSTDEVFAAVSSFPPSSSAGPDGLRPRHLRDLLSPALGAVATTLAKALAKVVDCMRAGTVPPALRPILFGARLIALKKKDGSIRPIACSSTIRRLAAKIAWVNERDTVVTLLGPTQLGCGQASGTEIAAHAARAFIHAHPDAALVKLDFRNAFNTVRRDLVLREVAEHVPGLFPLVDLAYRGPSHLIMDNAVISSECGVQQGDPLGPALFCLALRPLAVSLQSRLRLWYMDDGTLAGDPATVVSDVQRVLDYEGRSGLALNPTKCEIFSLDALPDLQRSLPGCRLTQRLSLELVGSPLTDEAIRPLLDRCLERTAVMLDRLPLLSAHQGLFLLRSCFSAARMQHLLRTCPAGTEASALHDYDDLVLDALTTILNLQLPPEAASQATLPVRFGGLGILSVRRLADVCYAASLTAVADMVATVLPPEALAHFSASQEAALDQTGARARVPPDKQSKQRAWSDALHQELRDSLLASAPHAADQARLRAVDRPGAGAWLHALPSSSLGTALDDRSLRFCVGLRLGAPVVAAHSCERCGDPVATNGHHGLSCERSAGRHPRHTMLNDTLVRALHSAGIPCTREPQGLDTSDGRRPDGLTLVPFHRGQHLVWDGTVVDTLAPSYVNHCATIPGYAVARAERAKLRKYAALQATHLFSPLAFETLGGHSPLTANFLEGVYHRLIRATGDKRAGSFLLQRLSLAVQRGNAIAFLGTLSSSPPPPHNP

SEQ ID NO: 17012 - protein, 970 aa, Stratiolaelaps scimitus
MNPGPIAPARDATPARDATPARRAASARDATGPPRVPCPHCEGRFSRRGLNRHITVRHPEVRSVPQPSPAPQPLELRLQAAMREARVFSIVPKATRSLVAVALTDVLRDVHTNNDVPSWEALLAFARVVLQMPDKGDTSRSLPAVIRGNLAAFRAGARLEYRLRRHFPRGPRPPPTDTGQRAARIASQKLSEGDISGAARALCSTDSATDSAEALNALRAKHPPAPPDYSFPARPPQVDIAPTSTDEVLAAVSSFPPSSSAGPDGLRPRHLRDLLSPALGAVATALAKALAKVVDCMRAGTVPSALRPILFGARLIALKKKDGSIRPIACSSTIRRLAAKIAWVNERDAVVTLLGPTQLGCGQASGTEIAAHAARAFIHAHPDAALVKLDFRNAFNTVRRDLVLREVAEHVPGLFPLVDLAYRCPSHLIMDNAVISSECGVQQGDPLGPALFCLALRPLAVSLQSRLRLWYMDDGTLAGDPATVASDVQRVLDYEGRSGLALNPTKCEIFSLDAQPDLQRSLPGCRLTQRLSLELVGSPLTDEAIRPLLDRCLERTAVMLDRLPLLSAHQGLFLLRSCFSAARMQHLLRTCPAGTEASALHEYDDLVLEALTTILNLQLPPEAASQASLPVRFGGLGILSVRRLADVCYAASLTAVADMVATVLPPEALAHFSASQEAALDQTGVRARVPPDKQSKQRAWSDALHQELRDSLLASAPHVADQARLRAVDRPGAGAWLHALPSSSLGTALDDRSLRFCVGLRLGAPVVAAHSCERCGDPVATNGHHGLSCERSAGRHPRHTMLNDTLVRALHSAGIPCTREPQGLDTSDGRRPDGLTLIPFHRGLHLVWDGTVVDTLAPSYVNHCATIPGYAVARAERAKLRKYAALQATHLFSPLAFETLGGHGPLTANFLEGVYHRLIRATGDKRAGSFLLQRLSLAVQRGNAIAFLGTLSSSPPPPPIIPRNTDLPYV

SEQ ID NO: 17013 - protein, 1003 aa, Stratiolaelaps scimitus
MNPGPIAPARDASPARDATPARDATPARDAIAARDATAARDATAARDATAARDATAARDATAARRAASARDATGPPRVPCPHCEGRFTRRGLNRHITVRHPEVRSVPQPSPAPQPLELRLQAAMREARVFSIVPKATRSLVAVALTDVLRDVHSNNDVSSWEALLAFARVVLQMPDKGDTSRSLPAVIRGNLAAFRAGARLEYRLRRQLPRGPRPPPTDTGQMAARIATQKLSEGDISGAARALCSTDSATDSAEALHALRAKHPPAPPDYAFPVRPPQVDIAPTSTDEVFAAVSSFPPSSSAGPDGLRPRHLRDLLSPALGAVATALAKALAKVVDCMRAGTVPSALRPILFGARLIALKKKDGSIRPIACSSTIRRLAAKIAWVNERDTVVTLLGPTQLGCGQASGTEIAAHAARAFIHAHPDAALVKLDFRNAFNTVRRDLVLREVAEHVPGLFPLVDLAYRGPSHLIMDNAVISSECGVQQGDPLGPALFCLALRPLAVSLQSRLRLWYMDDGTLAGDPATVASDVQRVLDYEGRSGLALNPTKCEIFSLDAQPDLQRSLPGCRLTQRLSLELVGSPLTDEAIRPLLDRCLERTAVMLDRLPLLSAHQGLFLLRSCFSAARMQHLLRTCPAGTEASALHDYDDLVLDALTTILNLQLPPEAASQATLPVRFGGLGILSVRRLADVCYAASLTAVADMVATVLPPEALAHFSASQEAALDQTGARARVPPDKQSKQRAWSDALHQELRDSLLASAPHAADQARLRAVDRPGAGAWLHALPSSSLGTALDDRSLRFCVGLRLGAPVVAAHSCERCGDPVATNGHHGLSCERSAGRHPRHTMLNDTLVRALHSAGIPCTREPQGLDTSDGRRPDGLTLVPFHRGQHLVWDGTVVDTLAPSYVNHCATIPGYAVARAERAKLRKYAALQATHLFSPLAFETLGGHGPLTANFLEGVYHRLIRATGDKRAGSFLLQRLSLAVQRGNAIAFLGTLSSSPPPPHNP

SEQ ID NO: 17014 - protein, 1002 aa, Stratiolaelaps scimitus
MNPGPIAPARDATPARDATPARDASPARDATPARDAIAARDATAARDATAARDATAARDATAARRAASARDATGPPRVPCPHCEGRFTRRGLNRHITVRHPEVRSVPQPSPAPQPLELRLQAAMREARVFSIVPKATRSLVAVALTDVLRDVHSNNDVSSWEALLAFARVVLQMPDKGDTSRSLPAVIRGNLAAFRAGARLEYRLRRQLPRGPRPPPTDTGQMAARIATQKLSEGDISGAARALCSTDSATDSAEALHALRAKHPPAPPDYAFPGRPPQVDIAPTSTDEVFAAVSSFPPSSSAGPDGLRPRHLRDLLSPALGAVATALAKALAKVVDCMRAGTVPSALRPILFGARLIALKKKDGSIRPIACSSTIRRLAAKIAWVNERDTVVTLLGPTQLGCGQASGTEIAAHAARAFIHAHPDAALVKLDFRNAFNTVRRDLVLREVAEHVPGLFPLVDLAYRGPSHLIMDNAVISSECGVQQGDPLGPALFCLALRPLAVSLQSRLRLWYMDDGTLAGDPATVASDVQRVLDYEGRSGLALNPTKCEIFSLDAQPDLQRSLPGCRLTQRLSLELVGSPLTDEAIRPLLDRCLERTAVMLDRLPLLSAHQGLFLLRSCFSAARMQHLLRTCPAGTEASALHDYDDLVLDALTTILNLQLPPEAASQATLPVRFGGLGILSVRRLADVCYAASLTAVADMVATVLPPEALAHFSASQEAALDQTGARARVPPDKQSKQRAWSDALHQELRDSLLASAPHAADQARLRAVDRPGAGAWLHALPSSSLGTALDDRSLRFCVGLRLGAPVVAAHSCERCGDPVATNGHHGLSCERSAGRHPRHTMLNDTLVRALHSAGIPCTREPQGLDTSDGRRPDGLTLVPFHRGQHLVWDGTVVDTLAPSYVNHCATIPGYAVARAERAKLRKYAALQATHLFSPLAFETLGGHGPLTANFLEGVYHRLIRATGDKRAGSFLLQRLSLAVQRGNAIAFLGTLSSSPPPHNP

SEQ ID NO: 17015 - protein, 961 aa, Stratiolaelaps scimitus
MNPGPIAPARDATPARDATPARRAASARDATGPPRVPCPHCEGRFSRRGLNRHITVRHPEVRSVPQPSPAPQPLELRLQAAMREARVFSIVPKATRSLVAVALTDVLRDVHTNNDVPSWEALLAFARVVLQMPDKGDTSRSLPAVIRGNLAAFRAGARLEYRLRRHFPRGPRPPPTDTGQRAARIASQKLSEGDISGAARALCSTDSATDSAEALNALRAKHPPAPPDYAFPARPPQVDIAPTSTDEVLAAVSSFPPSSSAGPDGLRPRHLRDLLSPALGAVATALAKALAKVVDCMRAGTVPSALRPILFGARLIALKKKDGSIRPIACSSTIRRLAAKIAWVNERDTVVTLLGPTQLGCGQASGTEIAAHAARAFIHAHPDAALVKLDFRNAFNTVRRDLVLREVAEHVPGLFPLVDLAYRCPSHLIMDNAVISSECGVQQGDPLGPALFCLALRPLAVSLQSRLRLWYMDDGTLAGDPATVASDVQRVLDYEGRSGLALNPTKCEIFSLDAQPDLQRSLPGCRLTQRLSLELVGSPLTDEAIRPLLDRCLERTAVMLDRLPLLSAHQGLFLLRSCFSAARMQHLLRTCPAGTEASALHEYDDLVLEALTTILNLQLPPEAASQASLPVRFGGLGILSVRRLADVCYAASLTAVADMVATVLPPEALAHFSASQEAALDQTGVRARVPPDKQSKQRAWSDALHQELRDSLLASAPHVADQARLRAVDRPGAGAWLHALPSSSLGTALDDRSLRFCVGLRLGAPVVAAHSCERCGDPVATNGHHGLSCERSAGRHPRHTMLNDTLVRALHSAGIPCTREPQGLDTSDGRRPDGLTLIPFHRGLHLVWDGTVVDTLAPSYVNHCATIPGYAVARAERAKLRKYAALQATHLFSPLAFETLGGHGPLTANFLEGVYHRLIRATGDKRAGSFLLQRLSLAVQRGNAIAFLGTLSSSPPPPHNP

SEQ ID NO: 17016 - protein, 975 aa, Stratiolaelaps scimitus
MNPGPIAPARDATPARDATPARDATPARRAASARDATGPPRVPCPHCEGRFSRRGLNRHITVRHPEVRSVPQPSPAPQPLELRLQAAMREARVFSIVPKATRSLVAVALTDVLRDVHTNNDVPSWEALLAFARVVLQMPDKGDTSRSLPAVIRGNLAAFRAGARLEYRLRRHFPRGPRPPPTDTGQRAARIASQKLSEGDISGAARALCSTDSATDSAEALNALRAKHPPAPPDYSFPARPPQVDIAPTSTDEVLAAVSSFPPSSSAGPDGLRPRHLRDLLSPALGAVATALAKALAKVVDCMRAGTVPSALRPILFGARLIALKKKDGSIRPIACSSTIRRLAAKIAWVNERDAVVTLLGPTQLGCGQASGTEIAAHAARAFIHAHPDAALVKLDFRNAFNTVRRDLVLREVAEHVPGLFPLVDLAYRCPSHLIMDNAVISSECGVQQGDPLGPALFCLALRPLAVSLQSRLRLWYMDDGTLAGDPATVASDVQRVLDYEGRSGLALNPTKCEIFSLDAQPDLQRSLPGCRLTQRLSLELVGSPLTDEAIRPLLDRCLERTAVMLDRLPLLSAHQGLFLLRSCFSAARMQHLLRTCPAGTEASALHEYDDLVLEALTTILNLQLPPEAASQASLPVRFGGLGILSVRRLADVCYAASLTAVADMVATVLPPEALAHFSASQEAALDQTGVRARVPPDKQSKQRAWSDALHQELRDSLLASAPHVADQARLRAVDRPGAGAWLHALPSSSLGTALDDRSLRFCVGLRLGAPVVAAHSCERCGDPVATNGHHGLSCERSAGRHPRHTMLNDTLVRALHSAGIPCTREPQGLDTSDGRRPDGLTLIPFHRGLHLVWDGTVVDTLAPSYVNHCATIPGYAVARAERAKLRKYAALQATHLFSPLAFETLGGHGPLTANFLEGVYHRLIRATGDKRAGSFLLQRLSLAVQRGNAIAFLGTLSSSPPPPIIPRNTDLPYV

SEQ ID NO: 17017 - protein, 983 aa, Stratiolaelaps scimitus
MNPGPIAPARDASPARDATPARDAIAARDATAARDATAARDATAARRAASARDATGPPRVPCPHCEGRFTRRGLNRHITVRHPEVRSVPQPSPAPQPLELRLQAAMREARVFSIVPKATRSLVAVALTDVLRDVHSNNDVSSWEALLAFARVVLQMPDKGDTSRSLPAVIRGNLAAFRAGARLEYRLRRQLPRGPRPPPTDTGQMAARIATQKLSEGDISGAARALCSTDSATDSAEALHALRAKHPPAPPDYAFPVRPPQVDIAPTSTDEVFAAVSSFPPSSSAGPDGLRPRHLRDLLSPALGAVATALAKALAKVVDCMRAGTVPSALRPILFGARLIALKKKDGSIRPIACSSTIRRLAAKIAWVNERDTVVTLLGPTQLGCGQASGTEIAAHAARAFIHAHPDAALVKLDFRNAFNTVRRDLVLREVAEHVPGLFPLVDLAYRGPSHLIMDNAVISSECGVQQGDPLGPALFCLALRPLAVSLQSRLRLWYMDDGTLAGDPATVASDVQRVLDYEGRSGLALNPTKCEIFSLDAQPDLQRSLPGCRLTQRLSLELVGSPLTDEAIRPLLDRCLERTAVMLDRLPLLSAHQGLFLLRSCFSAARMQHLLRTCPAGTEASALHDYDDLVLDALTTILNLQLPPEAASQATLPVRFGGLGILSVRRLADVCYAASLTAVADMVATVLPPEALAHFSASQEAALDQTGARARVPPDKQSKQRAWSDALHQELRDSLLASAPHAADQARLRAVDRPGAGAWLHALPSSSLGTALDDRSLRFCVGLRLGAPVVAAHSCERCGDPVATNGHHGLSCERSAGRHPRHTMLNDTLVRALHSAGIPCTREPQGLDTSDGRRPDGLTLVPFHRGQHLVWDGTVVDTLAPSYVNHCATIPGYAVARAERAKLRKYAALQATHLFSPLAFETLGGHGPLTANFLEGVYHRLIRATGDKRAGSFLLQRLSLAVQRGNAIAFLGTLSSSPPPPP

SEQ ID NO: 17018 - protein, 956 aa, Stratiolaelaps scimitus
MNPDPTAPARDATPARRAASAQDATGPPRVPCPHCEGRFSRRGLNRHITVRHPEVRSVPQPSPAPQPLELRLQAAMREARVFSIVPKATRSLVAVALTDVLRDVHTNNDVSSWEALLAFARVVLQMPDKGDTSRSLPAVIRGNLAAFRAGARLEYRLRRHLARGPRPPPTDTGQTAARIASQKLSEGDISGAARALCSTDSATDSAEALDALRAKHPPAPPDYAFPDRPPQVDIAPTSPDEVFAAVSSFPPSSSAGPDGLRPRHLRDLLSPALGAVATALAKALAKVVDCMRAGTVPSALRPILFGARLIALKKKDGSIRPIACSSTIRRLAAKIAWVNERDTVVTLLGPTQLGCGQASGTEIAAHAARAFIHAHPDAALVKLDFRNAFNTVRRDLVLREVAEHVPGLFPLVDLAYRGPSHLIMDNAVISSECGVQQGDPLGPALFCLALRPLAVSLQSRLRLWYMDDGTLAGDPATVASDVQRVLDYEGRSGLALNPTKCEIFSLDAQLDLQRSLPGCRLTQRLSLELVGSPLTDEAIRPLLDRCLERTAVMLDRLPLLSAHQGLFLLRSCFSAARMQHLLRTCPAGTEASALHDYDDMVLDALTTILNLQLPPEAASQATLPVRFGGLGILSVRRLADVCYAASLTAVADLVATVLPPEALAHFSASQEAALDQTGARARVPPDKQSKQRAWSDALHQELRDSLLASAPHAADQARVRAVDRPRAGAWLHALPSSSLGTALDDRSLRFCVGLRLGAPVVAAHSCERCGDPVATNGHHGLSCERSAGRHPRHTMLNDTLVRALHSAGIPCTREPQGLDTSDGRRPDGLTLVPFHRGQHLVWDGTVVDTLAPSYVNHCATIPGYAVARAERAKLRKYAALQATHLFSPLAFETLGGHGPLTANFLEGVYHRLIRATGDKRAGSFLLQRLSLAVQRGNAIAFLGTLSSSPPPPPHNP

SEQ ID NO: 17019 - protein, 963 aa, Stratiolaelaps scimitus
MNPGPIAPARDATPARDATPARRAASARDATGPPRVPCPHCEGRFSRRGLNRHITVRHPEVRSVPQPSPAPQPLELRLQAAMREARVFSIVPKATRSLVAVALTDVLRDVHTNNDVPSWEALLAFARVVLQMPDKGDTSRSLPAVIRGNLAAFRAGARLEYRLRRHFPRGPRPPPTDTGQRAARIASQKLSEGDISGAARALCSTDSATDSAEALNAHRAKHPPAPPDYSFPARPPQVDIAPTSTDEVLAAVSSFPPSSSAGPDGLRPRHLRDLLSPALGAVATALAKALAKVVDCMRAGTVPSALRPILFGARLIALKKKDGSIRPIACSSTIRRLAAKIAWVNERDAVVTLLGPTQLGCGQASGTEIAAHAARAFIHAHPDAALVKLDFRNAFNTVRRDLVLREVAEHVPGLFPLVDLAYRCPSHLIMDNAVISSECGVQQGDPLGPALFCLALRPLAVSLQSRLRLWYMDDGTLAGDPATVASDVQRVLDYEGRSGLALNPTKCEIFSLDAQPDLQRSLPGCRLTQRLSLELVGSPLTDEAIRPLLDRCLERTAVMLDRLPLLSAHQGLFLLRSCFSAARMQHLLRTCPAGTEASALHEYDDLVLEALTTILNLQLPPEAASQASLPVRFGGLGILSVRRLADVCYAASLTAVADMVATVLPPEALAHFSASQEAALDQTGVRARVPPDKQSKQRAWSDALHQELRDSLLASAPHVADQARLRAVDRPGAGAWLHALPSSSLGTALDDRSLRFCVGLRLGAPVVAAHSCERCGDPVATNGHHGLSCERSAGRHPRHTMLNDTLVRALHSAGIPCTREPQGLDTSDGRRPDGLTLIPFHRGLHLVWDGTVVDTLAPSYVNHCATIPGYAVARAERAKLRKYAALQATHLFSPLAFETLGGHGPLTANFLEGVYHRLIRATGDKRAGSFLLQRLLALSSLAVQRGNAIAFLGTLSSSPPPPP

SEQ ID NO: 17020 - protein, 997 aa, Stratiolaelaps scimitus
MNPGPIAPARDASPARDATPARDATPARDATAARDATAARDATAARDATAARDATAARRAASARDATGPPRVPCPHCEGRFTRRGLNRHITVRHPEVRSVPQPSPAPQPLELRLQAAMREARVFSIVPKATRSLVAVALTDVLRDVHSNNDVSSWEALLAFARVVLQMPDKGDTSRSLPAVIRGNLAAFRAGARLEYRLRRQLPRGPRPPPTDTGQMAARIATQKLSEGDISGAARALCSTDSATDSAEALHALRAKHPPAPPDYAFPVRPPQVDIAPTSTDEVFAAVSSFPPSSSAGPDGLRPRHLRDLLSPALGAVATALAKALAKVVDCMRAGTVPSALRPILFGARLIALKKKDGSIRPIACSSTIRRLAAKIAWVNERDTVVTLLGPTQLGCGQASGTEIAAHAARAFIHAHPDAALVKLDFRNAFNTVRRDLVLREVAEHVPGLFPLVDLAYRGPSHLIMDNAVISSECGVQQGDPLGPALFCLALRPLAVSLQSRLRLWYMDDGTLAGDPATVASDVQRVLDYEGRSGLALNPTKCEIFSLDAQPDLQRSLPGCRLTQRLSLELVGSPLTDEAIRPLLDRCLERTAVMLDRLPLLSAHQGLFLLRSCFSAARMQHLLRTCPAGTEASALHDYDDLVLDALTTILNLQLPPEAASQATLPVRFGGLGILSVRRLADVCYAASLTAVADMVATVLPPEALAHFSASQEAALDQTGARARVPPDKQSKQRAWSDALHQELRDSLLASAPHAADQARLRAVDRPGAGAWLHALPSSSLGTALDDRSLRFCVGLRLGAPVVAAHSCERCGDPVATNGHHGLSCERSAGRHPRHTMLNDTLVRALHSAGIPCTREPQGLDTSDGRRPDGLTLVPFHRGQHLVWDGTVVDTLAPSYVNHCATIPGYAVARAERAKLRKYAALQATHLFSPLAFETLGGHGPLTANFLEGVYHRLIRATGDKRAGSFLLQRLSLAVQRGNAIAFLGTLSSSPPPPHNP

SEQ ID NO: 17021 - protein, 995 aa, Stratiolaelaps scimitus
MNPGPIAPARDASPARDATPARDATPARDATPARDAIAARDATAARDATAARDATAARRAASARGATGPPRVPCPHCEGRFTRRGLNRHITVRHPEVRSVPRPSPAPQPLELRLQAAMREARVFSIVPKATRSLVAVALTDVLRDVHSNNDASSWEALLAFVRVVLQMPDKGDTSRSLPAVIRGNLAAFRAGARLEYRLRRQLPRGPRPPPTDTGQMAARIATQKLSEGDISGAARALCSTDSATDSAEALHALRAKHPPAPPDYAFPVRPPQVDIAPTSTDEVFAAVSSFPPSSSAGPDGLRPRHLRDLLSPALGAVATALAKALAKVVDCMRAGTVPSALRPILFGARLIALKKKDGSIRPIACSSTIRRLAAKIAWVNERDTVVTLLGPTQLGCGQASGTEIAAHAARAFIHAHPDAALVKLDFRNAFNTVRRDLVLREVAEHVPGLFPLVDLAYRGPSHLIMDNAVISSECGVQQGDPLGPALFCLALRPLAVSLQSRLRLWYMDDGTLAGDPATVASDVQRVLDYEGRSGLALNPTKCEIFSLDAQPDLQRSLPGCRLTQRLSLELVGSPLTDEAIRPLLDRCLERTAVMLDRLPLLSAHQGLFLLRSCFSAARMQHLLRTCPAGTEASALHDYDDLVLDALTTILNLQLPPEAASQATLPVRFGGLGILSVRRLADVCYAASLTAVADMVATVLPPEALAHFSASQEAALDQTGARARVPPDKQSKQRAWSDALHQELRDSLLASAPHAADQARLRAVDRPGAGAWLHALPSSSLGTALDDRSLRFCVGLRLGAPVVAAHSCERCGDPVATNGHHGLSCERSAGRHPRHTMLNDTLVRALHSAGIPCTREPQGLDTSDGRRPDGLTLVPFHRGQHLVWDGTVVDTLAPSYVNHCATIPGYAVARAERAKLRKYAALQATHLFSPLAFETLGGHGPLTANFLEGVYHRLIRATGDKRAGSFLLQRLSLAVQRGNAIAFLGTLSSSPPPPP

SEQ ID NO: 17022 - protein, 970 aa, Stratiolaelaps scimitus
MNPGPIAPARDATPARDATPARRAASARDATGPPRVPCPHCEGRFSRRGLNRHITVRHPEVRSVPQPSPAPQPLELRLQAAMREARVFSIVPKATRSLVAVALTDVLRDVHTNNDVPSWEALLAFARVVLQMPDKGDTSRSLPAVIRGNLAAFRAGARLEYRLRRHFPRGPRPPPTDTGQRAARIASQKLSEGDISGAARALCSTDSATDSAEALNALRAKHPPAPPDYAFPARPPQVDIAPTSTDEVLAAVSSFPPSSSAGPDGLRPRHLRDLLSPTLGAVATALAKALAKVVDCMRARTVPSALRPILFGARLIALKKKDGSIRPIACSSTIRRLAAKIAWVNERDTVVTLLGPTQLGCGQASGTEIAAHAARAFIHAHPDAALVKLDFRNAFNTVRRDLVLREVAEHVPGLFPLVDLAYRCPSHLIMDNAVISSECGVQQGDPLGPALFCLALRPLAVSLQSRLRLWYMDDGTLAGDPATVASDVQRVLDYEGRSGLALNPTKCEIFSLDAQPDLQRSLPGCRLTQRLSLELVGSPLTDEAIRPLLDRCLERTAVMLDRLPLLSAHQGLFLLRSCFSAARMQHLLRTCPAGTEASALHEYDDLVLEALTTILNLQLPPEAASQASLPVRFGGLGILSVRRLADVCYAASLTAVADMVATVLPPEALAHFSASQEAALDQTGVRARVPPDKQSKQRAWSDALHQELRDSLLASAPHVADQARLRAVDRPGAGAWLHALPSSSLGTALDDRSLRFCVGLRRGAPVVAAHSCERCGDPVATNGHHGLSCERSAGRHPRHTMLNDTLVRALHSAGIPCTREPQGLDTSDGRRPDGLTLIPFHRGLHLVWDGTVVDTLAPSYVNHCATIPGYAVARAERAKLRKYAALQATHLFSPLAFETLGGHGPLTANFLEGVYHRLIRATGDKRAGSFLLQRLSLAVQRGNAIAFLGTLSSSPPPPPIIPRNTDLLYV

SEQ ID NO: 17023 - protein, 979 aa, Stratiolaelaps scimitus
MNPGPIAPARDATPARDATPARDATPARDATPARDATPARRAASARDATGPPRVPCPHCEGRFSRRGLNRHITVRHPEVRSVPQPSPAPQPLELRLQAAMREARVFSIVPKATRSLVAVALTDVLRDVHTNNDVPSWEALLAFARVVLQMPDKGDTSRSLPAVIRGNLAAFRAGARLEYRLRRHFPRGPRPPPTDTGQRAARIASQKLSEGDISGAARALCSTDSATDSAEALNALRAKHPPAPPDYSFPARPPQVDIAPTSTDEVLAAVSSFPPSSSAGPDGLRPRHLRDLLSPALGAVATALAKALAKVVDCMRAGTVPSALRPILFGARLIALKKKDGSIRPIACSSTIRRLAAKIAWVNERDAVVTLLGPTQLGCGQASGTEIAAHAARAFIHAHPDAALVKLDFRNAFNTVRRDLVLREVAEHVPGLFPLVDLAYRCPSHLIMDNAVISSECGVQQGDPLGPALFCLALRPLAVSLQSRLRLWYMDDGTLAGDPATVASDVQRVLDYEGRSGLALNPTKCEIFSLDAQPDLQRSLPGCRLTQRLSLELVGSPLTDEAIRPLLDRCLERTAVMLDRLPLLSAHQGLFLLRSCFSAARMQHLLRTCPAGTEASALHEYDDLVLEALTTILNLQLPPEAASQASLPVRFGGLGILSVRRLADVCYAASLTAVADMVATVLPPEALAHFSASQEAALDQTGVRARVPPDKQSKQRAWSDALHQELRDSLLASAPHVADQARLRAVDRPGAGAWLHALPSSSLGTALDDRSLRFCVGLRLGAPVVAAHSCERCGDPVATNGHHGLSCERSAGRHPRHTMLNDTLVRALHSAGIPCTREPQGLDTSDGRRPDGLTLIPFHRGLHLVWDGTVVDTLAPSYVNHCATIPGYAVARAERAKLRKYAALQATHLFSPLAFETLGGHGPLTANFLEGVYHRLIRATGDKRAGSFLLQRLSLAVQRGNAIAFLGTLSSSPPPPHNP

SEQ ID NO: 17024 - protein, 888 aa, Stratiolaelaps scimitus
MREARVFSIVPKATRSLVAVALTDVLRDVHSNNDVSSWEALLAFARVVLQMPDKGDTSRSLPAVIRGNLAAFRAGARLEYRLRRQLPRGPRPPPTDTGQMAARIATQKLSEGDISGAARALCSTDSATDSAEALHALRAKHPPAPPDYAFPVRPPQVDIAPTSTDEVFAAVSSFPPSSSAGPDGLRPRHLRDLLSPALGAVATALAKALAKVVDCMRAGTVPSALRPILFGARLIALKKKDGSIRPIACSSTIRRLAAKIAWVNERDTVVTLLGPTQLGCGQASGTEIAAHAARAFIHAHPDAALVKLDFRNAFNTVRRDLVLREVAEHVPGLFPLVDLAYRGPSHLIMDNAVISSECGVQQGDPLGPALFCLALRPLAVSLQSRLRLWYMDDGTLAGDPATVASDVQRVLDYEGRSGLALNPTKCEIFSLDAQPDLQRSLPGCRLTQRLSLELVGSPLTDEAIRPLLDRCLERTAVMLDRLPLLSAHQGLFLLRSCFSAARMQHLLRTCPAGTEASALHDYDDLVLDALTTILNLQLPPEAASQATLPVRFGGLGILSVRRLADVCYAASLTAVADMVATVLPPEALAHFSASQEAALDQTGARARVPPDKQSKQRAWSDALHQELRDSLLASAPHAADQARLRAVDRPGAGAWLHALPSSSLGTALDDRSLRFCVGLRLGAPVVAAHSCERCGDPVATNGHHGLSCERSAGRHPRHTMLNDTLVRAFHSAGIPCTREPQGLDTSDGRRPDGLTLVPFHRGQHLVWDGTVVDTLAPSYVNHCATIPGYAVARAERAKLRKYSALQATHLFSPLAFETLGGHGPLTANFLEGVYHRLIRATGDKRAGSFLLQRLSLAVQRGNAIAFLGTLSSSPPPPIIPRNPALLYV

SEQ ID NO: 17025 - protein, 1003 aa, Stratiolaelaps scimitus
MNPGPIAPARDASPARDATPARDATPARDAIAARDATAARDVTAARDATAARDATAARDATAARRAASARDATGPPRVPCPHCEGRFTRRGLNRHITVRHPEVRSVPQPSPAPQPLELRLQAAMREARVFSIVPKATRSLVAVALTDVLRDVHSNNDVSSWEALLAFARVVLQMPDKGDTSRSLPAVIRGNLAAFRAGARLEYRLRRQLPRGPRPPPTDTGQMAARIATQKLSEGDISGAARALCSTDSATDSAEALHALRAKHPPAPPDYAFPVRPPQVDIAPTSTDEVFAAVSSFPPSSSAGPDGLRPRHLRDLLSPALGAVATALAKALAKVVDCMRAGTVPSALRPILFGARLIALKKKDGSIRPIACSSTIRRLAAKIAWVNERDTVVTLLGPTQLGCGQASGTEIAAHAARAFIHAHPDAALVKLDFRNAFNTVRRDLVLREVAEHVPGLFPLVDLAYRGPSHLIMDNAVISSECGVQQGDPLGPALFCLALRPLAVSLQSRLRLWYMDDGTLAGDPATVASDVQRVLDYEGRSGLALNPTKCEIFSLDAQPDLQRSLPGCRLTQRLSLELVGSPLTDEAIRPLLDRCLERTAVMLDRLPLLSAHQGLFLLRSCFSAARMQHLLRTCPAGTEASALHDYDDLVLDALTTILNLQLPPEAASQATLPVRFGGLGILSVRRLADVCYAASLTAVADMVATVLPPEALAHFSASQEAALDQTGARARVPPDKQSKQRAWSDALHQELRDSLLASAPHAADQARLRAVDRPGAGAWLHALPSSSLGTALDDRSLRFCVGLRLGAPVVAAHSCERCGDPVATNGHHGLSCERSAGRHPRHTMLNDTLVRALHSAGIPCTREPQGLDTSDGRRPDGLTLVPFHRGQHLVWDGTVVDTLAPSYVNHCATIPGYAVARAERAKLRKYAALQATHLFFPLAFETLGGHGPLTANFLEGVYHRLIRATGDKRAGSFLLQRLSLAVQRGNAIAFLGTLSSSPPPPHNL

SEQ ID NO: 17026 - protein, 967 aa, Stratiolaelaps scimitus
MNPGPIAPARDATPARDATPARDATPARDATPARRAASARDATGPPRVPCPHCEGRFSRRGLNRHITVRHPEVRSVPQPSPAPQPLELRLQAAMREARVFSIVPKATRSLVAVALTDVLRDVHTNNDVPSWEALLAFARVVLQMPDKGDTSRSLPAVIRGNLAAFRAGARLEYRLRRHFPRGPRPPPTDTGQRAARIASQKLSEGDISGAARALCSTDSATDSAEALNALRAKHPPAPPDYSFPARPPQVDIAPTSTDEVLAAVSSFPPSSSAGPDGLRPRHLRDLLSPALGAVATALAKALAKVVDCMGAGTVPSALRPILFGARLIALKKKDGSIRPIACSSTIRRLAAKIAWVNERDAVVTLLGPTQLGCGQASGTEIAAHAARAFIHAHPDAALVKLDFRNAFNTVRRDLVLREVAEHVPGLFPLVDLAYRCPSHLIMDNAVISSECGVQQGDPLGPALFCLALRPLAVSLQSRLRLWYMDDGTLAGDPATVASDVQRVLDYEGRSGLALNPTKCEIFSLDAQPDLQRSLPGCRLTQRLSLELVGSPLTDEAIRPLLDHCLERTAVMLDRLPLLSAHQGLFLLRSCFSAARMQHLLRTCPAGTEASALHEYDDLVLEALTTILNLQLPPEAASQASLPVRFGGLGILSVRRLADVCYAASLTAVADMVATVLPPEALAHFSASQEAALDQTGVRARVPPDKQSKQRAWSDALHQELRDSLLASAPHVADQARLRAVDRPGAGAWLHALPSSSLGTALDDRSLRFCVGLRLGAPVVAAHSCERCGDPVATNGHHGLSCERSAGRHPRHTMLNDTLVRALHSAGIPCTREPQGLDTSDGLTLIPFHRGLHLVWDGTVVDTLAPSYVNHCATIPGYAVARAERAKLRKYAALQATHLFSPLAFETLGGHGPLTANFLEGVYHRLIRATGDKRAGSFLLQRLSLAVQRGNAIAFLGTLSSSPPPHNP

SEQ ID NO: 17027 - protein, 880 aa, Stratiolaelaps scimitus
MREARVFSIVPKATRSLVAVALTDVLRDVHSNNDVSSWEALLAFARVVLQMPDKGDTSRSLPAVIRGNLAAFRAGARLEYRLRRQLPRGPRPPPTDTGQMAARIATQKLSEGDISGAARALCSTDSATDSAEALHALRAKHPPAPPDYAFPVRPPQVDIAPTSTDEVFAAVSSFPPSSSAGPDGLRPRHLRDLLSPALGAVATALAKALAKVVDCMRAGTVPSALRPILFGARLIALKKKDGSIRPIACSSTIRRLAAKIAWVNERDTVVTLLGPTQLGCGQASGTEIAAHAARAFIHAHPDAALVKLDFRNAFNTVRRDLVLREVAEHVPGLFPLVDLAYRGPSHLIMDNAVISSECGVQQGDPLGPALFCLALRPLAVSLQSRLRLWYMDDGTLAGDPATVASDVQRVLDYEGRSGLALNPTKCEIFSLDAQPDLQRSLPGCRLTQRLSLELVGSPLTDEAIRPLLDRCLERTAVMLDRLPLLSAHQGLFLLRSCFSAARMQHLLRTCPAGTEASALHDYDDLVLDALTTILNLQLPPEAASQATLPVRFGGLGILSVRRLADVCYAASLTAVADMVATVLPPEALAHFSASQEAALDQTGARARVPPDKQSKQRAWSDALHQELRDSLLASAPHAADQARLRAVDRPGAGAWLHALPSSSLGTALDDRSLRFCVGLRLGAPVVAAHSCERCGDPVATNGHHGLSCERSAGRHPRHTMLNDTLVRALHSAGIPCTREPQGLDTSDGRRPDGLTLVPFHRGQHLVWDGTVVDTLAPSCVNHCATIPGYAVARAERAKLRKYAALQATHLFSPLAFETLGGHGPLTANFLEGVYHRLIRATGDKRAGSFLLQRLSLAVQRGNAIAFLGTLSSSPPPPHNL

SEQ ID NO: 17028 - protein, 997 aa, Stratiolaelaps scimitus
MNPGPIAPARDASPARDATPARDATPARDATPARDAIAARDATAARDATAARDATAARRAASARDATGPPRVPCPHCEGRFTRRGLNRHITVRHPEVRSVPQPSPAPQPLELRLQAAMREARVFSIVPKATRSLVAVALTDVLRDVHSNNDVSSWEALLAFARVVLQMPDKGDTSRSLPAVIRGNLAAFRAGARLEYRLRRQLPRGPRPPPTDTGQMAARIATQKLSEGDISGAARALCSTDSATDSAEALHALRAKHPPAPPDYAFPVRPPQVDIAPTSTDEVFAAVSSFPPSSSAGPDGLRPRHLRDLLSPALGAVATALAKALAKVVDCMRAGTVPSALRPILFGARLIALKKKDGSIRPIACSSTIRRLAAKIAWVNERDTVVTLLGPTQLGCGQASGTEIAAHAARAFIHAHPDAALVKLDFRNAFNTVRRDLVLREVAEHVPGLFPLVDLAYRGPSHLIMDNAVISSECGVQQGDPLGPALFCLALRPLAVSLQSRLRLWYMDDGTLAGDPATVASDVQRVLDYEGRSGLALNPTKCEIFSLDAQPDLQRSLPGCRLTQRLSLELVGSPLTDEAIRPLLDRCLERTAVMLDRLPLLSAHQGLFLLRSCFSAARMQHLLRTCPAGTEASALHDYDDLVLDALTTILNLQLPPEAASQATLPVRFGGLGILSVRRLADVCYAASLTAVADMVATVLPPEALAHFSASQEAALDQTGARARVPPDKQSKQRAWSDALHQELRDSLLASAPHAADQARLRAVDRPGAGAWLHALPSSSLGTALDDRSLRFCVGLRLGAPVVAAHSCERCGDPVATNGHHGLSCERSAGRHPRHTMLNDTLVRALHSAGIPCTREPQGLDTSDGRRPDGLTLVPFHRGQHLVWDGTVVDTLAPSYVNHCATIPGYAVARAERAKLRKYAALQATHLFSPLAFETLGGHGPLTANFLEGVYHRLIRATGDKRAGSFLLQRLSLAVQRGNAIAFLGTLSSSPPPPHNP

SEQ ID NO: 17029 - protein, 962 aa, Stratiolaelaps scimitus
MNPDPTAPARDATPARRAASAHDATGPPRVPCPHCEGRFSRRGLNRHITVRHPEVRSVPQPSPAPQPLELRLQAAMREARVFSIVPKATRSLVAVALTDVLRDVHTNNDVSSWEALLAFARVVLQMPDKGDTSRSLPAVIRGNLAAFRAGARLEYRLRRHLARGPRPPPTDTGQTAARIASQKLSEGDISGAARALCSTDSATDSAEALDALRAKHPPAPPDYAFPDRPPQVDIAPTSPDEVFAAVSSFPPSSSAGPDGLRPRHLRDLLSPALGAVATALAKALAKVVDCMRAGTVPSALRPILFGARLIALKKKDGSIRPIACSSTIRRLAAKIAWVNERDTVVTLLGPTQLGCGQASGTEIAAHAARAFIHAHPDAALVKLDFRNAFNTVRRDLVLREVAEHVPGLFPLVDLAYRGPSHLIMDNAVISSECGVQQGDPLGPALFCLALRPLAASLQSRLRLWYMDDGTLAGDPATVASDVQRVLDYEGRSGLALNPTKCEIFSLDAQPDLQRSLPGCRLTQRLSLEFVGSPLTDEAIRPLLDRCLERTAVMLDRLPLLSAHQGLFLLRSCFSAARMQHLLRTCPAGTEASALHEYDDLVLDALTTILNLQLPPEAASQATLPVRFGGLGILSVRRLADVCYAASLTAVADMVATVLPPEALAHFSASQEAALDQTGARARVPPDKQSKQRAWSDALHQELRDSLLASAPHAADQARLRAVDRPGAGAWLHALPSSSLGTALDDRSLRFCVGLRLGAPVVGAHGCERCGDPVATNGHHGLSCERSAGRHPRHTMLNDTLVRALHSAGIPCTREPQGLDTSDGRRPDGLTLVPFHRGQHLVWDGTVVDTLAPSYVNHCATIPGYAVARAERAKLRKYAALQATHLFSPLAFETLGGHGPLTANFLEGVYHRLIRATGDKRAGSFLLQRLSLAVQRGNAIAFLGTLSSSPPPTPIIPRNSDLL

SEQ ID NO: 17030 - protein, 995 aa, Stratiolaelaps scimitus
MNPGPIAPARDASPARDATPARDATPARDATPARDAIAARDATAARDATAARDATAARRAASARDATGPPRVPCPHCEGRFTRRGLNRHITVRHPEVRSVPQPSPAPQPLELRLQAAMREARVFSIVPKATRSLVAVALTDVLRDVHSNNDASSWEALLAFARVVLQMPDKGDTSRSLPAVIRGNLAAFRAGARLEYRLRRQLPRGPRPPPTDTGQMAARIATQKLSEGDISGAARALCSTDSATDSAEALHALRAKHPPAPPDYAFPVRPPQVDIAPTSTDEVFAAVSSFPPSSSAGPDGLRPRHLRDLLSPALGAVATALAKALAKVVDCMRAGTVPSALRPILFGARLIALKKKDGSIRPIACSSTIRRLAAKIAWVNERDTVVTLLGPTQLGCGQASGTEIAAHAARAFIHAHPDAALVKLDFRNAFNTVRRDLVLREVAEHVPGLFPLVDLAYRGPSHLIMDNAVISSECGVQQGDPLGPALFCLALRPLAVSLQSRLRLWYMDDGTLAGDPATVASDVQRVLDYEGRSGLALNPTKCEIFSLDAQPDLQRSLPGCRLTQRLSLELVGSPLTDEAIRPLLDRCLERTAVMLDRLPLLSAHQGLFLLRSCFSAARMQHLLRTCPAGTEASALHDYDDLVLDALTTILNLQLPPEAASQATLPVRFGGLGILSVRRLADVCYAASLTAVADMVATVLPPEALAHFSASQEAALDQTGARARVPPDKQSKQRAWSDALHQELRDSLLASAPHAADQARLRAVDRPGAGAWLHALPSSSLGTALDDRSLRFCVGLRLGAPVVAAHSCERCGDPVATNGHHGLSCERSAGRHPRHTMLNDTLVRALHSAGIPCTREPQGLDTSDGRRPDGLTLVPFHRGQHLVWDGTVVDTLAPSYVNHCATIPGYAVARAERAKLRKYAALQATHLFSPLAFETLGGHGPLTANFLEGVYHRLIRATGDKRAGSFLLQRLSLAVQRGNAIAFLGTLSSSPPPPP

SEQ ID NO: 17031 - protein, 996 aa, Stratiolaelaps scimitus
MNPGPIAPARDASPARDATPARDATPARDAIAARDATAARDATAARDATAARDATAARRAASARDATGPPRVPCPHCEGRFTRRGLNRHITVRHPEVRSVPQPSPAPQPLELRLQAAMREARVFSIVPKATRSLVAVALTDVLRDVHSNNDASSWEALLAFARVVLQMPDKGDTSRSLPAVIRGNLAAFRAGARLEYRLRRQLPRGPRPPPTDTGQMAARIATQKLSEGDISGAARALCSTDSATDSAEALHALRAKHPPAPPDYAFPVRPPQVDIAPTSTDEVFAAVSSFPPSSSAGPDGLRPRHLRDLLSPALGAVATALAKALAKVVDCMRAGTVPSALRPILFGARLIALKKKDGSIRPIACSSTIRRLAAKIAWVNERDTVVTLLGPTQLGCGQASGTEIAAHAARAFIHAHPDAALVKLDFRNAFNTVRRDLVLREVAEHVPGLFPLVDLAYRGPSHLIMDNAVISSECGVQQGDPLGPALFCLALRPLAVSLQSRLRLWYMDDGTLAGDPATVASDVQRVLDYEGRSGLALNPTKCEIFSLDAQPDLQRSLPGCRLTQRLSLELVGSPLTDEAIRPLLDRCLERTAVMLDRLPLLSAHQGLFLLRSCFSAARMQHLLRTCPAGTEASALHDYDDLVLDALTTILNLQLPPEAASQATLPVRFGGLGILSVRRLADVCYAASLTAVADMVATVLPPEALAHFSASQEAALDQTGARARVPPDKQSKQRAWSDALHQELRDSLLASAPHAADQARLRAVDRPGAGAWLHALPSSSLGTALDDRSLRFCVGLRLGAPVVAAHSCERCGDPVATNGHHGLSCERSAGRHPRHTMLNDTLVRALHSAGIPCTREPQGLDTSDGRRPDGLTLVPFHRGQHLVWDGTVVDTLAPSYVNHCATIPGYAVARAERAKLRKYAALQATHLFSPLAFETLGGHGPLTANFLEGVYHRLIRATGDKRAGSFLLQRLSLAVQRGNAIAFLGTLSSSPPPPPP

SEQ ID NO: 17032 - protein, 971 aa, Stratiolaelaps scimitus
MNPGPIAPARDATPARDATPARRAASARDATGPPRVPCPHCEGRFSRRGLNRHITVRHPEVRSVPQPSPAPQPLELRLQAAMREARVFSIVPKATRSLVAVALTDVLRDVHTNNDVPSWEALLAFARVVLQMPDKGDTSRSLPAVIRGNLAAFRAGARLEYRLRRHFPRGPRPPPTDTGQRAARIASQKLSEGDISGAARALCSTDSATDSAEALNALRAKHPPAPPDYSFPARPPQVDIAPTSTDEVLAAVSSFPPSSSAGPDGLRPRHLRDLLSPALGAVATALAKALAKVVDCMRAGTVPSALRPILFGARLIALKKKDGSIRPIACSSTIRRLAAKIAWVNERDAVVTLLGPTQLGCGQASGTEIAAHAARAFIHAHPDAALVKLDFRNAFNTVRRDLVLREVAEHVPGLFPLVDLAYRCPSHLIMDNAVISSECGVQQGDPLGPALFCLALRPLAVSLQSRLRLWYMDDGTLAGDPATVASDVQRVLDYEGRSGLALNPTKCEIFSLDAQPDLQRSLPGCRLTQRLSLELVGSPLTDEAIRPLLDRCLERTAVMLDRLPLLSAHQGLFLLRSCFSAARMQHLLRTCPAGTEASALHEYDDLVLEALTTILNLQLPPEAASQASLPVRFGGLGILSVRRLADVCYAASLTAVADMVATVLPPEALAHFSASQEAALDQTGVRARVPPDKQSKQRAWSDALHQELRDSLLASAPHVADQARLRAVDRPGAGAWLHALPSSSLGTALDDRSLRFCVGLRLGAPVVAAHSCERCGDPVATNGHHGLSCERSAGRHPRHTMLNDTLVRALHSAGIPCTREPQGLDTSDGRRPDGLTLIPFHRGLHLVWDGTVVDTLAPSYVNHCATIPGYAVARAERAKLRKYAALHATHLFSPLAFETLGGHGPLTANFLEGVYHRLIRATGDKRAGSFLLQRLSLAVQRGNAIAFLGTLSSSPPPPPPIIPRNTDLPYV

SEQ ID NO: 17033 - protein, 957 aa, Stratiolaelaps scimitus
MNPDPTAPARDATPARRAASAQDATGPPRVPCPHCEGRFSRRGLNRHITVRHPEVRSVPQPSPAPQPLELRLQAAMREARVFSIVPKATRSLVAVALTDVLRDVHTNNDVSSWEALLAFARVVLQMPDKGDTSRSLPAVIRGNLAAFRAGARLEYRLRRHLARGPRPPPTDTGQTAARIASQKLSEGDISGAARALCSTDSATDSAEALDALRAKHPPAPPDYAFPDRPPQVDIAPTSPDEVFAAVSSFPPSSSAGPDGLRPRHLRDLLSPALGAVATALAKALAKVVDCMRAGTVPSALRPILFGARLIALKKKDGSIRPIACSSTIRRLAAKIAWVNERDTVVTLLGPTQLGCGQASGTEIAAHAARAFIHAHPDAALVKLDFRNAFNTVRRDLVLREVAEHVPGLFPLVDLAYRGPSHLIMDNAVISSECGVQQGDPLGPALFCLALRPLAVSLQSRLRLWYMDDGTLAGDPATVASDVQRVLDYEGRSGLALNPTKCEIFSLDAQPDLQRSLPGCRLTQRLSLELVGSPLTDEAIRPLLDRCLERTAVMLDRLPLLSAHQGLFLLRSCFSAARMQHLLRTCPAGTEASALHEYDDLVLDALTTILNLQLPPEAASQATLPVRFGGLGILSVRRLADVCYAASLTAVADMVATVLPPEALAHFSASQEAALDQTGARARVPPDKQSKQRAWSDALHQELRDSLLASAPHAADQARLRAVDRPGAGAWLHALPSSSLGTALDDRSLRFCVGLRLGAPVVAAHSCERCGDPVATNGHHGLSCERSAGRHPRHTMLNDTLVRALHSAGIPCTREPQGLDTSDGRRPDGLTLVPFHRGQHLVWDGTVVDTLAPSYVNHCATIPGYAVARAERAKLRKYAALQATHLFSPLAFETLGGHGPLTANFLEGVYHRLIRATGDKRAGSFLLQRLSLAVQRGNAIAFLGTLSSSPPPPHPHNP

SEQ ID NO: 17034 - protein, 997 aa, Stratiolaelaps scimitus
MNPGPIAPARDASPARDATPARDATPARDATPARDATAARDATAARDATAARDATAARRAASARDATGPPRVPCPHCEGRFTRRGLNRHITVRHPEVRSVPQPSPAPQPLELRLQAAMREARVFSIVPKATRSLVAVALTDVLRDVHSNNDVSSWEALLAFARVVLQMPDKGDTSRSLPAVIRGNLAAFRAGARLEYRLRRQLPRGPRPPPTDTGQMAARIATQKLSEGDISAAARALCSTNSATDSAEALHALRAKHPPAPPDYAFPVRPPQVDIAPTSTDEVFAAVSSFPPSSSAGPDGLRPRHLRDLLSPALGAVATALAKALAKVVDCMRAGTVPSALRPILFGARLIALKKKDGSIRPIACSSTIRRLAAKIAWVNERDTVVTLLGPTQLGCGQASGTEIAAHAARAFIHAHPDAALVKLDFRDAFNTVRRDLVLREVAEHVPGLFPLVDLAYRGPSHLIMDNAVISSECGVQQGDPLGPALFCLALRPLAVSLQSRLRLWYMDDGTLAGDPATVASDVQRVLDYEGRSGLALNPTKCEIFSLDAQPDLQRSLPGCRLTQRLSLELVGSPLTDEAIRPLLDRCLERTAVMLDRLPLLSAHQGLFLLRSCFSAARMQHLLRTCPAGTEASALHDYDDLVLDALTTILNLQLPPEAASQATLPVRFGGLGILSVRRLADVCYAASLTAVADMVATVLPPEALAHFSASQEAALDQTGARARVPPDKQSKQRAWSDALHQELRDSLLASAPHAADQARLRAVDRPGAGAWLHALPSSSLGTALDDRSLRFCVGLRLGAPVVAAHSCERCGDPVATNGHHGLSCERSAGRHPRHTMLNDTLVRALHSAGIPCTREPQGLDTSDGRRPDGLTLVPFHRGQHLVWDGTVVDTLAPSYVNHCATIPGYAVARAERAKLRKYAALQATHLFSPLAFETLGGHGPLTANFLEGVYHRLIRATGDKRAGSFLLQRLSLAVQRGNAIAFLGTLSSSPPPPHNP

SEQ ID NO: 17035 - protein, 961 aa, Stratiolaelaps scimitus
MNPGPIAPARDATPARDATPARRAASARDATGPPRVPCPHCEGRFSRRGLNRHITVRHPEVRSVPQPSPAPQPLELRLQAAMREARVFSIVPKATRSLVAVALTDVLRDVHTNNDVPSWEALLAFARVVLQMPDKGDTSRSLPAVIRGNLAAFRAGARLEYRLRRHFPRGPRPPPTDTGQRAARIASQKLSEGDISGAARALCSTDSATDSAEALNALRAKHPPAPPDYAFPARPPQVDIAPTSTDEVLAAVSSFPPSSSAGPDGLRPRHLRDLLSPALGAVATALAKALAKVVDCMRAGTVPSALRPILFGARLIALKKKDGSIRPIACSSTIRRLAAKIAWVNERDTVVTLLGPTQLGCGQASGTEIAAHAARAFIHAHPDAALVKLDFRNAFNTVRRDLVLREVAEHVPGLFPLVDLAYRCPSHLIMDNAVISSECGVQQGDPLGPALFCLALRPLAVSLQSRLRLWYMDDGTLAGDPATVASDVQRVLDYEGRSGLALNPTKCEIFSLDAQPDLQRSLPGCRLTQRLSLELVGSPLTDEAIRPLLDRCLERTAVMLDRLPLLSAHQGLFLLRSCFSAARMQHLLRTCPAGTEASALHEYDDLVLEALTTILNLQLPPEAASQASLPVRFGGLGILSVRRLADVCYAASLTAVADMVATVLPPEALAHFSASQEAALDQTGVRARVPPDKQSKQRAWSDALHQELRDSLLASAPHVADQARLRAVDRPGAGAWLHALPSSSLGTALDDRSLRFCVGLRLGAPVVAAHSCERCGDPVATNGHHGLSCERSAGRHPRHTMLNDTLVGALHSAGIPCTREPQGLDTSDGRRPDGLTLIPFHRGLHLVWDGTVVDTLAPSYVNHCATIPGYAVARAERAKLRKYAALQATHLFSPLAFETLGGHGPLTANFLEGVYHRLIRATGDKRAGSFLLQRLSLAVQRGNAIVFLGTLSSSPPPPHNP

SEQ ID NO: 17036 - protein, 959 aa, Stratiolaelaps scimitus
MNPGPIAPARDATPARDATPARRAASARDATGPPRVPCPHCEGRFSRRGLNRHITVRHPEVRSVPQPSPAPQPLELRLQAAMREARVFSIVPKATRSLVAVALTDVLRDVHTNNDVPSWEALLAFARVVLQMPDKGDTSRSLPAVIRGNLAAFRAGARLEYRLRRHFPRGPRPPPTDTGQRAARIASQKLSEGDISGAARALCSTDSATDSAEALNALRAKHPPAPPDYSFPARPPQVDIAPTSTDEVLAAVSSFPPSSSAGPDGLRPRHLRDLLSPALGAVATALAKALAKVVDCMRAGTVPSALRPILFGARLIALKKKDGSIRPIACSSTIRRLAAKIAWVNERDAVVTLLGPTQLGCGQASGTEIAAHAARAFIHAHPDAALVKLDFRNAFNTVRRDLVLREVAEHVPGLFPLVDLAYRCPSHLIMDNAVISSECGVQQGDPLGPALFCLALRPLAVSLQSRLRLWYMDDGTLAGDPATVASDVQRVLDYEGRSGLALNPTKCEIFSLDAQPDLQRSLPGCRLTQRLSLELVGSPLTDEAIRPLLDRCLERTAVMLDRLPLLSAHQGLFLLRSCFSAARMQHLLRTCPAGTEASALHEYDDLVLEALTTILNLQLPPEAASQASLPVRFGGLGILSVRRLADVCYAASLTAVADMVATVLPPEALAHFSASQEAALDQTGVRARVPPDKQSKQRAWSDALHQELRDSLLASAPHVADQARLRAVDRPGAGAWLHALPSSSLGTALDDRSLRFCVGLRLGAPVVAAHSCERCGDPVATNGHHGLSCERSAGRHPRHTMLNDTLVRALHSAGIPCTREPQGLDTSDGRRPDGLTLIPFHRGLHLVWDGTVVDTLAPSYVNHCATIPGYAVARAERAKLRKYAALQATHLFSPLAFETLGGHGPLTANFLEGVYHRLIRATGDKRAGSFLLQRLSLAVQRGNAIAFLGTLSSSPPPPP

SEQ ID NO: 17037 - protein, 975 aa, Stratiolaelaps scimitus
MNPGPIAPARDATPARDATPARDATPARRAASARDATGPPRVPCPHCEGRFSRRGLNRHITVRHPEVRSVPQPSPAPQPLELRLQAAMREARVFSIVPKATRSLVAVALTDVLRDVHTNNDVPSWEALLAFARVVLQMPDKGDTSRSLPAVIRGNLAAFRTGARLEYRLRRHFPRGPRPPPTDTGQRAARIASQKLSEGDISGAARALCSTDSATDSAEALNALRAKHRPAPPDYSFPARPPQVDIAPTSTDEVLAAVSSFPPSSSAGPDGLRPRHLRDLLSPALGAVATALAKALAKVVDCMRAGTVPSALRPILFGARLIALKKKDGSIRPIACSSTIRRLAAKIAWVNERDAVVTLLGPTQLGCGQASGTEIAAHAARAFIHAHPDAALVKLDFRNAFNTVRRDLVLREVAEHVPGLFPQVDLAYRCPSHLIMDNAVISSECGVQQGDPLGPALFCLALRPLAVSLQSRLRLWYMDDGTLAGDPATVASDVQRVLDYEGRSGLALNPTKCEIFSLDAQPDLQRSLPGCRLTQRLSLELVGSPLTDEAIRPLLDRCLERTAVMLDRLPLLSAHQGLFLLRSCFSAARMQHLLRTCPAGTEASALHEYDDLVLEALTTILNLQLPPEAASQASLPVRFGGLGILSVRRLADVCYAASLTAVADMVATVLPPEALAHFSASQEAALDQTGVRARVPPDKQSKQRAWSDALHQELRDSLLASAPHVADQARLRAVDRPGAGAWLHALPSSSLGTALDDRSLRFCVGLRLGAPVVAAHSCERCGDPVATNGHHGLSCERSAGRHPRHTMLNDTLVRALHSAGIPCTREPQGLDTSDGRRPDGLTLIPFHRGLHLVWDGTVVDTLAPSYVNHCATIPGYAVARAERAKLRKYAALQATHLFSPLAFETLGGHGPLTANFLEGVYHRLIRATGDKRAGSFLLQRLSLAVQRGNAIAFLGTLSSSPPPPIIPRNTDLPYV

SEQ ID NO: 17038 - protein, 1013 aa, Stratiolaelaps scimitus
MNPGPIAPARDASPARDATPARDATPARDAIAARDATAARDATAARDATAARDATAARDATAARRAASARDATGPPRVPCPHCEGRFTRRGLNRHITVRHPEVRSVPQPSPAPQPLELRLQAAMREARVFSIVPKATRSLVAVALTDVLRDVHSNNDVSSWEALLAFARVVLQMPDKGDTSRSLPAVIRGNLAAFRAGARLEYRLRRQLPRGPRPPPTDTGQMAARIATQKLSEGDISGAARARALCSTDSATDSAEALHALRAKHPPAPPDYAFPVRPPQVDIAPTSTDEVFAAVSSFPPSSSAGPDGLRPRHLRDLLSPALGAVATALAKALAKVVDCMRAGTVPSALRPILFGARLIALKKKDGSIRPIACSSTIRRLAAKIAWVNERDTVVTLLGPTQLGCGQASGTEIAAHAARAFIHAHPDAALVKLDFRNAFNTVRRDLVLREVAEHVPGLFPLVDLAYRGPSHLIMDNAVISSECGVQQGDPLGPALFCLALRPLAVSLQSRLRLWYMDDGTLAGDPATVASDVQRVLDYEGRSGLALNPTKCEIFSLDAQPDLQRSLPGCRLTQRLSLELVGSPLTDEAIRPLLDRCLERTAVMLDRLPLLSAHQGLFLLRSCFSAARMQHLLRTCPAGTEASALHDYDDLVLDALTTILNLQLPPEAASQATLPVRFGGLGILSVRRLADVCYAASLTAVADMVATVLPPEALAHFSASQEAALDQTGARARVPPDKQSKQRAWSDALHQELRDSLLASAPHAADQARLRAVDRPGAGAWLHALPSSSLGTALDDRSLRFCVGLRLGAPVVAAHSCERCGDPVATNGHHGLSCERSAGRHPRHTMLNDTLVRALHSAGIPCTREPQGLDTSDGRRPDGLTLVPFHRGQHLVWDGTVVDTLAPSYVNHCATIPGYAVARAERAKLRKYAALQATHLFSPLAFETLGGHGPLTANFLEGVYHRLIRATGDKRAGSFLLQRLSLAVQRGNAIAFLGTLSSSPPPPIISRNPALLYV

SEQ ID NO: 17039 - protein, 989 aa, Stratiolaelaps scimitus
MNPGPIAPARDASPARDATPARDATPARDATPARDATAARDATAARDATAARRAASARDATGPPRVPCPHCEGRFTRRGLNRHITVRHPEVRSVPQPSPAPQPLELRLQAAMREARVFSIVPKATRSLVAVALTDVLRDVHSNNDVSSWEALLAFARVVLQMPDKGDTSRSLPAVIRGNLAAFRAGARLEYRLRRQLPRGPRPPPTDTGQMAARIATQKLSEGDISGAARALCSTDSATDSAEALHALRAKHPPAPPDYAFPVRPPQVDIAPTSTDEVFAAVSSFPPSSSAGPDGLRPRHLRDLLSPALGAVATALAKALAKVVDCMRAGTVPSALRPILFGARLIALKKKDGSIRPIACSSTIRRLAAKIAWVNERDTVVTLLGPTQLGCGQASGTEIAAHAARAFIHAHPDAALVKLDFRNAFNTVRRDLVLREVAEHVPGLFPLVDLAYRGPSHLIMDNAVISSECGVQQGDPLGPALFCLALRPLAVSLQSRLRLWYMDDGTLAGDPATVASDVQRVLDYEGRSGLALNPTKCEIFSLDAQPDLQRSLPGCRLTQRLSLELVGSPLTDEAIRPLLDRCLERTAVMLDRLPLLSAHQGLFLLRSCFSAARMQHLLRTCPAGTEASALHDYDDLVLDALTTILNLQLPPEAASQATLPVRFGGLGILSVRRLADVCYAASLTAVADMVATVLPPEALAHFSASQEAALDQTGARARVPPDKQSKQRAWSDALHQELRDSLLASAPHAADQARLRAVDRPGAGAWLHALPSSSLGTALDDRSLRFCVGLRLGAPVVAAHSCERCGDPVATNGHHGLSCERSAGRHPRHTMLNDTLVRALHSAGIPCTREPQGLDTSDGRRPDGLTLVPFHRGQHLVWDGTVVDTLAPSYVNHCATIPGYAVARAERAKLRKYAALQATHLFSPLAFETLGGHGPLTANFLEGVYHRLIRATGDKRAGSFLLQRLSLAVQRGNAIAFLGTLSSSPPPPP

SEQ ID NO: 17040 - protein, 1007 aa, Stratiolaelaps scimitus
MNPGPIAPARDASPARDATPARDATPARDATPARDATPARDATAARDATAARDATAARDATAARDATAARRAASARDATGPPRVPCPHCEGRFTRRGLNRHITVRHPEVRSVPQPSPAPQPLELRLQAAMREARVFSIVPKATRSLVAVALTDVLRDVHSNNDVSSWEALLAFARVVLQMPDKGDTSRSLPAVIRGNLAAFRAGARLEYRLRRQLPRGPRPPPTDTGQMAARIATQKLSEGDISGAARALCSTDSATDSAEALHALRAKHPPAPPDYAFPVRPPQVDIAPTSTDEVFAAVSSFPPSSSAGPDGLRPRHLRDLLSPALGAVATALAKALAKVVDCMRAGTVPSALRPILFGARLIALKKKDGSIRPIACSSTIRRLAAKIAWVNERDTVVTLLGPTQLGCGQASGTEIAAHAARAFIHAHPDAALVKLDFRNAFNTVRRDLVLREVAEHVPGLFPLVDLAYRGPSHLIMDNAVISSECGVQQGDPLGPALFCLALRPLAVSLQSRLRLWYMDDGTLAGDPATVASDVQRVLDYEGRSGLALNPTKCEIFSLDAQPDLQRSLPGCRLTQRLSLELVGSPLTDEAIRPLLDRCLERTAVMLDRLPLLSAHQGLFLLRSCFSAARMQHLLRTCPAGTEASALHDYDDLVLDALTTILNLQLPPEAASQATLPVRFGGLGILSVRRLADVCYAASLTAVADMVATVLPPEALAHFSASQEAALDQTGARARVPPDKQSKQRAWSDALHQELRDSLLASAPHAADQARLRAVDRPGAGAWLHALPFSSLGTALDDRSLRFCVGLRLGAPVVAAHSCERCGDPVATNGHHGLSCERSAGRHPRHTMLNDTLVRALHSAGIPCTREPQGLDTSDGRRPDGLTLVPFHRGQHLVWDGTVVDTLAPSYVNHCATIPGYAVARAERAKLRKYAALQATHLFSPLAFETLGGHGPLTANFLEGVYHRLIRATGDKRAGSFLLQRLSLAVQRGNAIAFLGTLSSSPPPPP

SEQ ID NO: 17041 - protein, 961 aa, Stratiolaelaps scimitus
MNPGPIAPARDATPARDATPARRAASARDATGPPRVPCPHCEGRFSRRGLNRHITVRHPEVRSVPQPSPAPQPLELRLQAAMREARVFSIVPKATRSLVAVALTDVLRDVHTNNDVPSWEALLAFARVVLQMPDKGDTSRSLPAVIRGNLAAFRAGARLEYRLRRHFPRGPRPPPTDTGQRAARIASQKLSEGDISGAARALCSTDSATDSAEALNALRAKHPPAPPDYSFPARPPQVDIAPTSTDEVLAAVSSFPPSSSAGPDGLRPRHLRDLLSPALGAVATALAKALAKVVDCMRAGTVPSALRPILFGARLIALKKKDGSIRPIACSSTIRRLAAKIAWVNERDAVVTLLGPTQLGCGQASGTEIAAHAARAFIHAHPDAALVKLDFRNAFNTVRRDLVLREVAEHVPGLFPLVDLAYRCPSHLIMDNAVISSECGVQQGDPLGPALFCLALRPLAVSLQSRLRLWYMDDGTLAGDPATVASDVQRVLDYEGRSGLALNPTKCEIFSLDAQPDLQRSLPGCRLTQRLSLELVGSPLTDEAIRPLLDRCLERTAVMLDRLPLLSAHQGLFLLRSCFSAARMQHLLRTCPAGTEASALHEYDDLVLEALTTILNLQLPPEAASQASLPVRFGGLGILSVRRLADVCYAASLTAVADMVATVLPPEALAHFSASQEAALDQTGVRARVPLDKQSKQRAWSDALHQELRDSLLASAPHVADQARLRAVDRPGAGAWLHALPSSSLGTALDDRSLRFCVGLRLGAPVVAAHSCERCGDPVATNGHHGLSCERSAGRHPRHTMLNDTLVRALHSAGIPCTREPQGLDTSDGRRPDGLTLIPFHRGLHLVWDGTVVDTLAPSYVNHCATIPGYAVARAERAKLRKYAALQATHLFSPLAFETLGGHGPLTANFLEGVYHRLIRATGDKRAGSFLLQRLSLAVQRGNAIAFLGTLSSSPPPPHNP

SEQ ID NO: 17042 - protein, 1004 aa, Stratiolaelaps scimitus
MNPGPIAPARDASPARDATPARDATPARDATPARDAIAARDATAARDATAARDATAARDATAARRAASARDATGPPRVPCPHCEGRFTRRGLNRHITVRHPEVRSVPQPSPAPQPLELRLQAAMREARVFSIVPKATRSLVAVALTDVLRDVHSNNDVSSWEALLAFARVVLQMPDKGDTSRSLPAVIRGNLAAFRAGARLEYRLRRQLPRGPRPPPTDTGQMAARIATQKLSEGDISGAARALCSTDSATDSAEALHALRAKHPPAPPDYAFPVRPPQVDIAPTSTDEVFAAVSSFPPSSSAGPDGLRPRHLRDLLSPALGAVATALAKALAKVVDCMRAGTVPSALRPILFGARLIALKKKDGSIRPIACSSTIRRLAAKIAWVNERDTVVTLLGPTQLGCGQASGTEIAAHAARAFIHAHPDAALVKLDFRNAFNTVRRDLVLREVAEHVPGLFPLVDLAYRGPSHLIMDNAVISSECGVQQGDPLGPALFCLALRPLAVSLQSRLRLWYMDDGTLAGDPATVASDVQRVLDYEGRSGLALNPTKCEIFSLDAQPDLQRSLPGCRLTQRLSLELVGSPLTDEAIRPLLDRCLERTAVMLDRLPLLSAHQGLFLLRSCFSAARMQHLLRTCPAGTEASALHDYDDLVLDALTTILNLQLPPEAASQATLPVRFGGLGILSVRRLADVCYAASLTAVADMVATVLPPEALAHFSASQEAALDQTGARARVPPDKQSKQRAWSDALHQELRDSLLASAPHAADQARLRAVDRPGAGAWLHALPSSSLGTALDDRSLRFCVGLRLGAPVVAAHSCERCGDPVATNGHHGLSCERSAGRHPRHTMLNDTLVRALHSAGIPCTREPQGLDTSDGRRPDGLTLVPFHRGQHLVWDGTVVDTLAPSYVNHCATIPGYAVARAERAKLRKYAALQATHLFSPLAFETLGGHGPLTANFLEGVYHRLIRATGDKRAGSFLLQRLSLAVQRGNAIAFLGTLSSSPPPPPHNP

SEQ ID NO: 17043 - protein, 903 aa, Stratiolaelaps scimitus
MNTNNTSAPKHFLGAPQPLELRLQAAMREARVFSIVPKATRSLVAVALTDVLRDDHTNNDVPSWEALLAFARVVLQMPDKGDTSRSLPAVIRGNLAAFRAGARLEYRLRRHFPRGPRPPPTDTGQRAARIASQKLSEGDISGAARALCSTDSATDSAEALNALRAKHPPAPPDYSFPARPPQVDIAPTSTDEVLAAVSSFPPSSSAGPDGLRPRHLRDLLSPALGAVATALAKALAKVVDCMRAGTVSSALRPILFGARLIALKKKDGSIRPIACSSTIRRLAAKIAWVNERDAVVTLLGPTQLGCGQASGTEIAAHAARAFIHAHPDAALVKLDFRNAFNTVRRDLVLREVAEHVPGLFPLVDLAYRCPSHLIMDNAVISSECGVQQGDPLGPALFCLALRPLAVSLQSRLRLWYMDDGTLAGDPATVASDVQRVLDYEGRSGLALNPTKCEIFSLDAQPDLQRSLPGCRLTQRLSLELVGSPLTDEAIRPLLDRCLERTAVMLDRLPLLSAHQGLFLLRSCFSAARMQHLLRTCPAGTEASALHEYDDLVLEALTTILNLQLPPEAASQASLPVRFGGLGILSVRRLADVCYAASLTAVADMVATVLPPEALAHFSTSQEAALDQTGVRARVPPDKQSKQRAWSDALHQELRDSLLASAPHVADQARLRAVDRPGAGAWLHALPSSSLGTALDDRSLRFCVGLRLGAPVVAAHSCERCGDPVATNGHHGLSCERSAGRHPRHTMLNDTLVRALHSAGIPCTREPQGLDTSDGRRPDGLTLIPFHRGLHLVWDGTVVDTLAPSYVNHCATIPGYAVARAERAKLRKYAALQATHLFSPLAFETLGGHGPLTANFLEGVYHRLIRATGDKRAGSFLLQRLSLAVQRGNAIAFLGTLSSSPPPP

SEQ ID NO: 17044 - protein, 941 aa, Stratiolaelaps scimitus
MNPGPIAPARDATPARDATPARDATPARRAASARDATGPPRVPCPHCEGRFSRRGLNRHITVRHPEVRSVPQPGPAPQPLELRLQAAMREARVFSIVPKATRSLVVVALTDVLRDVHTNNDVPSWEALLAFARVVLQMPDKGDTSRSLPAVIRGNLAAFRAGARLEYRLRRHFPRGPRPPPTDTGQRAARIASQKLSEGDISGAARALCSTDSATDSAEALDALRAKHPPAPPDYAFPARPPQVDIAPTSTDEVLAAVSSFPPSSSAGPDGLRPRHLRDLLSPALGAVATALAKALAKVVDCMRAGTVPSALRPILFGARLIALKKKDGSIRPIACSSTIRRLAAKIAWVNERDTVVTLLGPTQLGCGQASGTEIAAHAARAFIHAHPDAALVKLDFRNAFNTVRRDLVLREVAEHVPGLFPLVDLAYRCPSHLIMDNAVISSECGVQQGDPLGPALFCLALRPLGVSLQSRLRLWYMDDGTLAGDPATVASDVQRVLDYEGRSGLALNPTKCEIFSLDAQPDLQRSLPGCRLTQRLSLELVGSPLTDEAIRPLLDRCLERTAVMLDRLPLLSAHQGLFLLRSCFSAARMQHLLRTCPAGTEASALHEYDHLVLEALTTILNLQLPPEAASQASLPVRFGGLGILSVRRLADVCYAASLTAVADMVATVLPPEALAHFSASQEAALDQTGVRARVPPDKQSKQRVEPRPRTRPVDSPEASLVSNVWRRGQEGVPQLLVQGIGPCPLLALFVATNGHHGLSCERSAGRHPRHTMLNDTLVRALHSAGIPCTREPQGLDTSDGRRPDGLTLIPFHRGLHLVWDGTVVDTLAPSYVNHCATIPGYAVARAERAKLRKYAALQATHLFSPLAFETLGGHGPLTANFLEGVYHRLIRATGDKRAGSFLLQRLSLAVQRGNAIAFLGTLSSSPPPPIIPRNTDLLYV

SEQ ID NO: 17045 - protein, 969 aa, Stratiolaelaps scimitus
MNPGPIAPARDATPARDATPARRAASARDATGPPRVPCPHCEGRFSRRGLNRHITVRHPEVRSVPQPSPAPQPLELRLQAAMREARVFSIVPKATRSLVAVALTDVLRDVHTNNDVPSWEALLAFARVVLQMPDKGDTSRSLPAVIRGNLAAFRAGARLEYRLRRHFPRGPRPPPTDTGQRAARIASQKLWEGDISGAARALCSTDSATDSAEALNALRAKHPPAPPDYSFPARPPQVDIAPTSTDEVLAAVSSFPPSSSAGPDGLRPRHLRDLLSPALGAVATALAKALAKVVDCMRAGTVPSALRPILFGARLIALKKKDGSIRPIACSSTIRRLAAKIAWVNERDAVVTLLGPTQLGCGQASGTEIAAHAARAFIHAHPDAALVKLDFRNAFNTVRRDLVLREVAEHVPGLFPLVDLAYRCPSHLIMDNAVISSECGVQQGDPLGPALFCLALRPLAVSLQSRLRLWYMDDGTLAGDPATVASDVQRVLDYEGRSGLALNPTKCEIFSLDAQPDLQRSLPGCRLTRLSLELVGSPLTDEAIRPLLDSCLERTAVMLDRLPLLSAHQGLFLLRSCFSAARMQHLLRTCPAGTEASALHEYDDLVLEALTTILNLQLPPEAASQASLPVRFGGLGILSVRRLADVCYAASLTAVADMVATVLPPEALAHFSASQEAALDQTGVRARVPPDKQSKQRAWSDALHQELRDSLLASAPHVADQARLRAVDRPGAGAWLHALPSSSLGTALDDRSLRFCVGLRLGAPVVAAHSCERCGDPVATNGHHGLSCERSAGRHPRHTMLNDTLVRALHSAGIPCTREPQGLDTSDGRRPDGLTLIPFHRGLHLVWDGTVVDTLAPSYVNHCATIPGYAVARAERAKLRKYAALQATHLFSPLAFETLGGHGPLSANFLEGVYHRLIRATGDKRAGSFLLQRLSLAVQRGNAIAFLGTLSSSPPPPPIIPRNTDLPYV

SEQ ID NO: 17046 - protein, 1011 aa, Leptopilina boulardi
MRKHVSVEPAESEEFPCEIVGCGMRFSTRIGLGQHIRRRHPERMDERVNIARVKERWTDEESMMLARRESEFLVEWERDGRVGFINAVLQAEFPHRTLEAIKGRRRNVEYKRMVENMCEEIRRGEEILTEISGEDLGSNPEESPDPFLEFFNTLEPPNLENDTFDVRQLYCICIDAAVVSRETLLARLSLYLDSIQPGSRLPLRGTAIRNRIELSRRKDRRRRYAETQDMWVKNRKRCIDTIINDTSNTIQPSREVMEAYWKGVLTQASDSKPELHIPEFERSDLWAPITVEEVEKYRLEVQTAAGPDGLTGRELRSFPKLGLQCLFNLFMWCGELPQCLHASRTIFIPKKGFEDVPDKYRPITVPSVIVRAFHKILAGRLALAFDIDDRQRGFRDIDGSRYNTFELDMILRQHYLQHKPLYMASVDIAKAFPSVSHPSLLECMRSFGVPVKFVDYVAGVYRNGYTILQGQGWTSDRIYPKRGVRQGDPLSPPIFNLLTHRLLACLSGEVGVKVGERSTNASAYVDDTNLYAMTPKGLQSSIDIVCNFLSSCGMSINIDKSFTLGFRPSGKEKKTTVDTTTSFKIGGQVLRRITRLDEWRFLGVRFNWAGRVRIKPLKLIGEDLTLLTRAPLKPQQRLFALRCNLIPKLYHQLALGYVLIGSLNRVDIAVRSAVRGWLNLPHDTPKAYFHSSVADGGLGIPSVRWMAPLLRKRRLEGLRTENIGAANSFLEKEIAICERRLVDRGDRLVSLNDVRKLWAGKLHSLVDGCGLRDSIATRGQHHWVSDGTRFLTGRDFINSCRLRISALPTRSRTSRGRVSDRGCRAGCSDPVTLNRAPETLNHVLQVCHRTHAARIARHDAVVKYCAQRLRARGCSVHLEPRIKTREGLRKPDLVVTKDQVAVVIDAQVVGEQTDLRSAHNNKVRYYQGNTEIAAFVSGEYGIPVDKVSFTSATINWKGVWSPCSARDLSGWGFVQNDWKTVSSRVLIGSLAAFKIFNASTATGPGVRRGVG

SEQ ID NO: 17047 - protein, 976 aa, Dendrolimus kikuchii
MLQPQPDTSSDNLIQCNKCSQVRFFKGIRGLRIHLGKAHKDQDDSSNTLPLPQSNDNTTPTPFWKKISICKQTLPILKRIPRAARITVCETFSQTIRKVVNENSICTWENLLLLPYQVLNITQNDRSTATSKIKKNCKQLKFLDFTDNPSSSGKRKESTRRLKRLVESKLSDGDIKGAARILFSDDDIAPCNEITLRALADKHPPPGSSPQLLDEGNDIDCLRATSDEVLAAVMSFKCGSAGGLDGLTPQHLKDLLSGDTGSAGEKLLKDMTDLVNLMLSGTVSKEILPILYGANLCALTKKDRSIRPIAVGMTYRRLAAKICCRAIKDLSSSYFLPHQLGFGTKGGCEAAVHSLRAFTASNSCEAILKVDVKNAFNSVNRFALLNQIKRHFPKIYRYVWQCYGENSFLLYKNHLIYSATGCQQGDPLGPAIFSLAIHPVIEKLNSKFNVWYLDDGTLGGDLGTLKNDLTMLTEEFGKIDLELNFSKCELFINENCDYLISELINLAPNLKIVSKKNLTLLGAPVFEESFNSFFDDKIQNFTHKVDNLKIISKHSAYFIIRHCLFVPNFMYVLRCSPLWRHSNILNVLDSTIRQSLTSILNLPFDFEDRTWTQATLPIRLGGLGIRKISDVALPAFLSSVYSTVDLIGKLINPSLSDFEVPYLAEARNAWSLACPSQNYPVEPKSQKLWDGPLSKLVYKNLLSTSVNEAERARLLAVSKWESGLWLQALPSSNLGTLLDDTTFRIAASIRLGAPTVVPHHCQCGDKVGGSGHHGLSCVRSAGRIPRHAALNDIIRRALVTTGTPAILEPNGLCRDDGKRPDGMSLVPWKMGRPLVWDATCVDTLAASHLPDTAVVAGAAAARQEDLKRRKYASVGSGYIFAAFGVETLGPWGPEAHRLYRDLSKRLIDVSRNQNAGLYFGQRISVAIQRGNAASVLGTFQTELFVVFIFNKLSCLPGSGYSVNTVRFFPHSCLSEK

SEQ ID NO: 17048 - protein, 951 aa, Dendrolimus kikuchii
MLQPQPDTSSDNLIQCNKCSQVRFFKGIRGLRIHLGKAHKDQDDSSNTLPLPQSNDNTTPTPFWKKISICKQTLPILKRIPRAARITVCETFSQTIRKVVNENSICTWENLLLLPYQVLNITQNDRSTATSKIKKNCKQLKILDFTDNPSSSGKRKESTRRLKRLVESKLSDGDIKGAARILFSDDDIAPCNEITLRALADKHPPPGSSPQLLDEGNDIDCLRATSDEVLAAVMSFKCGSAGGLDGLTPQHLKDLLSGDTGSAGEKLLKDMTDLVNLMLSGTVSKEILPILYGANLCALTKKDRSIRPIAVGMTYRRLAAKICCRAIKDLSSSYFLPHQLGFGTKGGCEAAVHSLRAFTASNSCEAILKVDVKNAFNSVNRFALLNQIKRHFPKIYRYVWQCYGENSFLLYKNHLIYSATGCQQGDPLGPAIFSLAIHPVIEKLNSKFNVWYLDDGTLGGDLGTLKNDLTMLTEEFGKIDLELNFSKCELFINENCDYLISELINLAPNLKIVSKKNLTLLGAPVFEESFNSFFDDKIQNFTHKVDNLKIISKHSAYFIIRHCLFVPNFMYVLRCSPLWRHSNILNVLDSTIRQSLTSILNLPFDFEDRTWTQATLPIRLGGLGIRKISDVALPAFLSSVYSTVDLIGKLINPSLSDFEVPYLAEARNAWSLACPSQNYPVEPKSQKLWDGPLSKLVYKNLLSTSVNEAERARLLAVSKWESGLWLQALPSSNLGTLLDDTTFRIAASIRLGAPTVVPHHCQCGDKVGGSGHHGLSCVRSAGRIPRHAALNDIIRRALVTTGTPAILEPNGLCRDDGKRPDGMSLVPWKMGRPLVWDATCVDTLAASHLPDTAVVAGAAAARQEDLKRRKYASVGSGYIFAAFGVETLGPWGPEAHRLYRDLSKRLIDVSRNQNAGLYFGQRISVAIQRGNAASVLGTFPTDGDLGPIYYL

SEQ ID NO: 17049 - protein, 951 aa, Dendrolimus punctatus
MLQPQPDTSSDNLIQCNKCSQVRFFKGIRGLRIHLGKAHKDQDDSSNTLPLPQSNDNTTPTPFWKKISTCKQTLPILKRIPRAARITVCETFSQTIRKVVNENSLCTWENLLLLPYQVLNITQNDRSTATSKIKKNCKQLKILDFTDNPSSSGKRKESTRRLTRLVESKLSDGDIKGAARILFSDDDIAPCNEITLRALADKHPPSGSGPQLLEEGNDIDCLRATPDEVLAAVMSFKCGSAGGLDGLTPQHLKDLLSGDTGSAGEKLLKDMTDLVNLMLSGTVTKEILPILYGANLCALTKKDKSIRPIAVGMTYRRLAAKICCRAIKDLSSSYFLPHQLGFGTKGGCEAAVHSLRAFSASNSCEAILKVDVKNAFNSVNRSALLNQIKKHFPKIYRYVWQCYGENSFLLYKNHLIYSATGCQQGDPLGPAIFSLAIHPVIEKLNSKFNVWYLDDGTLGGDLDTLKNDLTMLTEEFGKIDLELNFSKCELFINENCDYPVSGIINLAPNLKIVSKTNLTLLGAPVFEESFNSFFDDKIQNFTHKVDNLKIISKHTAYFIIRHCLFVPNFMYVLRCSPLWRHPNILNVLDSTFRQSLTSILNLPLDFEDRTWTQATLPIRLGGLGIRKISDVALPAFLSSVYSTVDLIGKIINPSPSDFEVPYLAEARNAWSLACPSQNYPVEPKSQKLWDGPLSKLVYENLLSSSVNEAERARLLAVSTWKSGLWLQALPSSNLGTFLDDTTFRIAASIRLGAPAVVPHHCQCGDKVGGSGYHGLSCVRSAGRIPRHAALNDIIRRALVTTGTPAILEPNGLCRDDGKRPDGMSLVPWKMGRPLVWDATCVDTLAASHLPDTAVVAGAAAARQEDLKRRKYASIGSGYIFAAFGVETLGPWGPEAHRLYRDLSKRLIDVSRNQNAGLYFGQRISIAIQRGNAASVLGTFPTDGDLGPIYYL

SEQ ID NO: 17050 - protein, 951 aa, Dendrolimus punctatus
MLQPQPDTSSDNLIQCNKCSQVRFFKGIRGLRIHLGKAHKDQDDSSNTLPLPQSNDNTTPTPFWKKISTCKQTLPILKRIPRAARITVCETFSQTIRKVVNENSLCTWENLLLLPYQVLNITQNDRSTATSKIKKNCKQLKILDFTDNPSSSGKRKESTRRLTRLVESKLSDGDIKGAARILFSDDDIAPCNEITLRALADKHPPSGSGPQLLEEGNDIDCLRATPDEVLAAVMSFKCGSAGGLDGLTPQHLKDLLSGDTGSAGEKLLKDMTDLVNLMLSGTVTKEILPILYGANLCALTKKDKSIRPIAVGMTYRRLAAKICCRAIKDLSSSYFLPHQLGFGTKGGCEAAVHSLRAFSASNSCEAILKVDVKNAFNSVNRSALLNQIKKHFPKIYRYVWQCYGENSFLLYKNHLIYSATGCQQGDPLGPAIFSLAIHPVIEKLNSKFNVWYLDDGTLGGDLDTLKNDLTMLTEEFGKIDLELNFSKCELFINENCDYPVSGIINLAPNLKIVSKTNLTLLGAPVFEESFNSFFDDKIQNFTHKVDNLKIISKHTAYFIIRHCLFVPNFMYVLRCSPLWRHPNILNVLDSTFRQSLTSILNLPLDFEDRTWTQATLPIRLGGLGIRKISDVALPAFLSSVYSTVDLIGKIINPSPSDFEVPYLAEARNAWSLACPSQNYPVEPKSQKLWDGPLSKLVYENLLSSSVNEAERARLLAVSTWESGLWLQALPSSNLGTFLDDTTFRIAASIRLGAPAVVPHHCQCGDKVGGSGYHGLSCVRSAGRIPRHAALNDIIRRALVTTGTPAILEPNGLCRDDGKRPDGMSLVPWKMGRPLVWDATCVDTLAASHLPDTAVVAGAAAARQEDLKRRKYASIGSGYIFAAFGVETLGPWGPEAHRLYRDLSKRLIDGSRNQNAGLYFGQRISIAIQRGNAASVLGTFPTDGDLGPIYYL

SEQ ID NO: 17051 - protein, 951 aa, Dendrolimus kikuchii
MLQPQPDTSSDNLIQCNKCSQVRFFKGIRGLRIHLGKAHKDQDDSSNTLPLPQSNDNTTPTPFWKKISICKQTLPILKRIPRAARITVCETFSQTIRKVVNENSICTWENLLLLPYQVLNITQNDRSTATSKIKKNCKQLKFLDFTDNPSSSGKRKESTRRLKRLVESKLSDGDIKGAARILFSDDDIAPCNEITLRALADKHPPPGSSPQLLDEGNDIDCLRATSDEVLAAVMSFKCGSAGGLDGLTPQHLKDLLSGDTGSAGEKLLKDMTDLVNLMLSGTVSKEILPILYGANLCALTKKDRSIRPIAVGMTYRRLAAKICCRAIKDLSSSYFLPHQLGFGTKGGCEAAVHSLRAFTASNSCEAILKVDVKNAFNSVNRFALLNQIKRHFPKIYRYVWQCYGENSFLLYKNHLIYSATGCQQGDPLGPAIFSLAIHPVIEKLNSKFNVWYLDDGTLGGDLGTLKNDLTMLTEEFGKIDLELNFSKCELFINENCDYLISELINLAPNLKIVSKKNLTLLGAPVFEESFNSFFDDKIQNFTHKVDNLKIISKHSAYFIIRHCLFVPNFMYVLRCSPLWRHSNILNVLDSTIRQSLTSILNLPFDFEDRTWTQATLPIRLGGLGIRKISDVALPAFLSSVYSTVDLIGKLINPSLSDFEVPYLAEARNAWSLACPSQNYPVEPKSQKLWDGPLSKLVYKNLLSTSVNEAERARLLAVSKWESGLWLQALPSSNLGTLLDDTTFRIAASIRLGAPTVVPHHCQCGDKVGGSGHHGLSCVRSAGRIPRHAALNDIIRRALVTTGTPAILEPNGLCRDDGKRPDGMSLVPWKMGRPLVWDATCVDTLAASHLPDTAVVAGAAAARQEDLKRRKYASVGSGYIFAAFGVETLGPWGPEAHRLYRDLSKRLIDVSRNQNAGLYFGQRISVAIQRGNAASVLGTFPTDGDLGPIYYL

SEQ ID NO: 17052 - protein, 951 aa, Dendrolimus punctatus
MLQPQPDTSSDNLIQCNKCSQVRFFKGIRGLRIHLGKAHKDQDDSSNTLPLPQSNDNTTPTPFWKKISTCKQTLPILKRIPRAARITVCETFSQTIRKVVNENSLCTWENLLLLPYQVLNITQNDRSTATSKIKKNCKQLKILDFTDNPSSSGKRKESTRRLTRLVESKLSDGDIKGAARILFSDDDIAPCNEITLRALADKHPPSGSGPQLLEEGNDIDCLRATSDEVLAAVMSFKCGSAGGLDGLTPQHLKDLLSGDTGSAGEKLLKDMTDLVNLMLSGTVTKEILPILYGANLCALTKKDRSIRPIAVGMTYRRLAAKICCRAIKDLSSSYFLPHQLGFGTKGGCEAAVHSLRAFTASNSCEAILKVDVKNAFNSVNRSALLNQIKRHFPKIYRYVWQCYGENSFLLYKNHLIYSATGCQQGDPLGPAIFSLAIHPVIEKLNSKFNIWYLDDGTLGGDLDTLKNDLSMLTEEFGKIDLELNFSKCELFINENCDYPVSGIINLAPNLKIVSKTNLTLLGAPVFEESFNSFFDDKIKNFTHKVDNLKIISKHSAYFIIRHCLFVPNFMYVLRCSPLWRHPNILNVLDSTIRQSLTSILNLPLDFEDRTWTQATLPIRLGGLGIRKISDVALPAFLSSVYSTVDLIGNIINPSPGDFEVPYLAEARNAWSLACPSQNYPVEPKSQKLWDGPLSKLVYENLLSSSANEAERARLLAVSTWESGLWLQALPSSNLGTFLDDTTFRIAASIRLGAPAVVPHHCQCGDKVGGSGYHGLSCVRSAGRIPRHAALNDIIRRALVTTGTPAILEPNGLCRDDGRRPDGMSLVPWKMGRPLVWDATCVDTLAASHLPDTAVVAGAAAARQEDLKRRKYASIGSGYIFAAFGVETLGPWGPEAHRLYRDLSKRLIDVSRNQNAGLYFGQRISIAIQRGNAASVLGTFLTDGDLGPIYYL

SEQ ID NO: 17053 - protein, 951 aa, Dendrolimus punctatus
MLQPQPDTSSDNLIQCNKCSQVRFFKGIRGLRIHLGKAHKDQDDSSNTLPLPQSNDNTTPTPFWKKISTCKQTLPILKRIPRAARITVCETFSQTIRKVVNENSLCTWENLLLLPYQVLNITQNDRSTATSKIKKNCKQLKILDFTDNPSSSGKRKESTRRLTRLVESKLSDGDIKGAARILFSDDDIAPCNEITLRALADKHPPSGSGPQLLEEGNDIDCLRATPDEVLAAVMSFKCGSAGGLDGLTPQHLKDLLSGDTGSAGEKLLKDMTDLVNLMLSGTVTKEILPILYGANLCALTKKDKSIRPIAVGMTYRRLAAKICCRAIKDLSSSYFLPHQLGFGTKGGCEAAVHSLRAFSASNSCEAILKVDVKNAFNSVNRSALLNQIKKHFPKIYRYVWQCYGENSFLLYKNHLIYSATGCQQGDPLGPAIFSLAIHPVIEKLNSKFNVWYLDDGTLGGDLDTLKNDLTMLTEEFGKIDLELNFSKCELFINENCDYPVSGIINLAPNLKIVSKTNLTLLGAPVFEESFNSFFDDKIQNFTHKVDNLKIISKHTAYFIIRHCLFVPNFMYVLRCSPLWRHPNILNVLDSTFRQSLTSILNLPLDFEDRTWTQATLPIRLGGLGIRKISDVALPAFLSSVYSTVDLIGKIINPSPSDFEVPYLAEARNAWSLACPSQNYPVEPKSQKLWDGPLSKLVYENLLSSSVNEAERARLLAVSTWESGLWLQALPSSNLGTFLDDTTFRIAASIRLGAPAVVPHHCQCGDKVGGSGYHGLSCVRSAGRIPRHAALNDIIRRALVTTGTPAILEPNGLCRDDGKRPDGMSLVPWKMGRPLVWDATCVDTLAASHLPDTAVVAGAAAARQEDLKRRKYASIGSGYIFAAFGVETLGPWGPEAHRLYRDLSKRLIDVSRNQNAGLYFGQRISIAIQRGNAASVLGTFPTDGDLGPIYYL

SEQ ID NO: 17054 - protein, 954 aa, Dendrolimus punctatus
MLQPQPDTSSDNLIQCNKCSQVRFFKGIRGLRIHLGKAHKDQDDSSNTLPLPQSNDNTTPTPFWKKISTCKQTLPILKRIPRAARITVCETFSQTIRKVVNENSLCTWENLLLLPYQVLNITQNDRSTATSKIKKNCKQLKILDFTDNPSSSGKRKESTRRLTRLVESKLSDGDIKGAARILFSDDDIAPCNEITLRALADKHPPSGSGPQLLEEGNDIDCLRATPDEVLAAVMSFKCGSAGGLDGLTPQHLKDLLSGDTGSAGEKLLKDMTDLVNLMLSGTVTKEILPILYGANLCALTKKDKSIRPIAVGMTYRRLAAKICCRAIKDLSSSYFLPHQLGFGTKGGCEAAVHSLRAFSASNSCEAILKVDVKNAFNSVNRSALLNQIKRYFPKIYRYVWQCYGENSFLLYKNHLIYSATGCQQGDPLGPAIFSLAIHPVIEKLNSKFNVWYLDDGTLGGDLDTLKNDLTMLTEEFGKIDLELNFSKCELFINQNCDYPVSGIINLAPNLKIVSKTNLTLLGAPVFEESFNSFFDDKIQNFTHKVDNLKIISKHSAYFIIRHCLFVPNFMYVLRCSPLWRHPNILNVLDSTFRQSLTSILNLPLDFEDRTWTQATLPIRLGGLGIRKISDVALPAFLSSVYSTVDLIGKIINPSPSDFEVPYLAEARNAWSLACPSQNYPVEPKSQKLWDGPLSKLVYENLLSSSVNEAERARLLAVSTWESGLWLQALPSSNLGTFLDDTTFRIAASIRLGAPAVVPHHCQCGDKVGGSGYHGLSCVRSAGRIPGHAALNDIIRRALVTTGTPAILEPNGLCRDDGKRPDGMSLVPWKMGRPLVWDATCVDTLAASHLPDTAVVAGAAAARQEDLKRRKYASIVSGYIFAAFGVETLGPWGPEAHRLYRDLSKRLIDVSRNQNAGLYYTKKKKISKKLTPGRCRRGECPKCLPHFVGNADALP

SEQ ID NO: 17055 - protein, 951 aa, Dendrolimus punctatus
MLQPQPDTSSDNLIQCNKCSQVRFFKGIRGLRIHLGKAHKDQDDSSNTLPLPQSNDNTTPTPFWKKISTCKQTLPILKRIPRAARITVCETFSQTIRKVVNENSLCTWENLLLLPYQVLNITQNDRSTATSKIKKNCKQLKILDFTDNPSSSGKRKESTRRLTRLVESKLSDGDIKGAARILFSDDDIAPCNEITLRALADKHPPSGSGPQLLEEGNDIDCLRATSDEVLAAVMSFKCGSAGGLDGLTPQHLKDLLSGDTGSAGEKLLKDMTDLVNLMLSGTVTKEILPILYGANLCALTKKDRSIRPIAVGMTYRRLAAKICCRAIKDLSSSYFLPHQLGFGTKGGCEAAVHSLRAFTASNSCEAILKVDVKNAFNSVNRSALLNQIKRHFPKIYRYVWQCYGENSFLLYKNHLIYSATGCQQGDPLGPAIFSLAIHPVIEKLNSKFNIWYLDDGTLGGDLDTLKNDLSMLTEEFGKIDLELNFSKCELFINENCDYPVSGIINLAPNLKIVSKTNLTLLGAPVFEESFNSFFDDKIKNFTHKVDNLKIISKHSAYFIIRHCLFVPNFMYVLRCSPLWRHPNILNVLDSTIRQSLTSILNLPLDFEDRTWTQATLPIRLGGLGIRKISDVALPAFLSSVYSTVDLIGNIINPSPGDFEVPYLAEARNAWSLACPSQNYPVEPKSQKLWDGPLSKLVYENLLSSSANEAERARLLAVSTWESGLWLQALPSSNLGTFLDDTTFRIAASIRLGAPAVVPHHCQCGDKVGGSGYHSLSCVRSAGRIPRHAALNDIIRRALVTTGTPAILEPNGLCRDDGRRPDGMSLVPWKMGRPLVWDATCVDTLAASHLPDTAVVAGAAAARQEDLKRRKYASIGSGYIFAAFGVETLGPWGPEAHRLYRDLSKRLIDVSRNQNAGLYFGQRISIAIQRGNAASVLGTFPTDGDLGPIYYL

SEQ ID NO: 17056 - protein, 718 aa, Dendrolimus kikuchii
MSFKCGSAGGLDGLTPQHLKDLLSGDTGSAGEKLLKDMTDLVNLMLSGTVSKEILPILYGANLCALTKKDRSIRPIAVGMTYRRLAAKICCRAIKDLSSSYFLPHQLGFGTKGGCEAAVHSLRAFTASNSCEAILKVDVKNAFNSVNRFALLNQIKRHFPKIYRYVWQCYGENSFLLYKNHLIYSATGCQQGDPLGPAIFSLAIHPVIEKLNSKFNVWYLDDGTLGGDLGTLKNDLTMLTEEFGKIDLELNFSKCELFINENCDYLISELINLAPNLKIVSKKNLTLLGAPVFEESFNSFFDDKIQNFTHKVDNLKIISKHSAYFIIRHCLFVPNFMYVLRCSPLWRHSNILNVLDSTIRQSLTSILNLPFDFEDRTWTQATLPIRLGGLGIRKISDVALPAFLSSVYSTVDLIGKLINPSLSDFEVPYLAEARNAWSLACPSQNYPVEPKSQKLWDGPLSKLVYKNLLSTSVNEAERARLLAVSKWESGLWLQALPSSNLGTLLDDTTFRIAASIRLGAPTVVPHHCQCGDKVGGSGHHGLSCVRSAGRIPRHAALNDIIRRALVTTGTPAILEPNGLCRDDGKRPDGMSLVPWKMGRPLVWDATCVDTLAASHLPDTAVVAGAAAARQEDLKRRKYASVGSGYIFAAFGVETLGPWGPEAHRLYRDLSKRLIDVSRNQNAGLYFGQRISVAIQRGNAASVLGTFPTDGDLGPMYYL

SEQ ID NO: 17057 - protein, 718 aa, Dendrolimus punctatus
MSFKCGSAGGLDGLTPQHLKDLLSGDTGSAGEKLLKDMTDLVNLMLSGTVTKEILPILYGANLCALTKKDKSIRPIAVGMTYRRLAAKICCRAIKDLSSSYFLPHQLGFGTKGGCEAAVHSLRAFSASNSCEAILKVDVKNAFNSVNRSALLNQIKKHFPKIYRYVWQCYGENSFLLYKNHLIYSATGCQQGDPLGPAIFSLAIHPVIEKLNSKFNVWYLDDGTLGGDLDTLKNDLTMLTEEFGKIDLELNFSKCELFINQNCDYPVSGIINLAPNLKIVSKTNLTLLGAPVFEESFNSFFDDKIQNFTHKVDNLKIISKHSAYFIIRHCLFVPNFMYVLRCSPLWRHPNILNVLDSTFRQSLTSILNLPLDFEDRTWTQATLPIRLGGLGIRKISDVALPAFLSSVYSTVDLIGKIINPSPSDFEVPYLAEARNAWSLACPSQNYPVEPKSQKLWDGPLSKLVYENLLSSSVNEAERARLLAVSTWESGLWLQALPSSNLGTFLDDTTFRIAASIRLGAPAVVPHHCQCGDKVGVSGYHGLSCVRSAGRIPRHAALNDIIRRALVTTGTPAILEPNGLCRDDGRRPDGMSLVPWKMGRPLVWDATCVDTLAASHLPDTAVVAGAAAARQEDLKRRKYASIVSGYIFAAFGVETLGPWGPEAHRLCRDLSKRLIDVSRNQNAGLYFGQRISIAIQRGNAASVLGTFPTDGDLGPIYYL

SEQ ID NO: 17058 - protein, 718 aa, Dendrolimus punctatus
MSFKCGSAGGLDGLTPQHLKDLLSGDTGSAGEKLLKDMTDLVNLMLSGTVTKEILPILYGANLCALTKKDKSIRPIAVGMTYRRLAAKICCRAIKDLSSSYFLPHQLGFGTKGGCEAAVHSLRAFSASNSCEAILKVDVKNAFNSVNRSALLNQIKKHFPKIYRYVWQCYGENSFLLYKNHLIYSATGCQQGDPLGPAIFSLAIHPVIEKLNSKFNVWYLDDGTLGGDLDTLKNDLTMLTEEFGKIDLELNFSKCELFINQNCDYPVSGIINLAPNLKIVSKTNLTLLGAPVFEESFNSFFDDKIQNFTHKVDNLKIISKHSAYFIIRHCLFVPNFMYVLRCSPLWRHPNILNVLDSTFRQSLTSILNLPLDFEDRTWTQATLPIRLGGLGIRKISDVALPAFLSSVYSTVDLIGKIINPSPSDFEVPYLAEARNAWSLACPSQNYPVEPKSQKLWDGPLSKLVYENLLSSSVNEAERARLLAVSTWESGLWLQALPSSNLGTFLDDTTFRIAASIRLGAPAVVPHHCQCGDKVGGSGYHGLSCVRSAGRIPRHAALNDIIRRALVTTGTPAILEPNGLCRDDGKRPDGMSLVPWKMGRPLVWDATCVDTLAASHLPDTAVVAGAAAARQEDLKRRKYASIVSGYIFAAFGVETLGPWGPEAHRLYRDLSKRLIDVSRNQNAGLYFGQRISIAIQRGNAASVLGTFPTDGDLGPIYYL

SEQ ID NO: 17059 - protein, 951 aa, Dendrolimus kikuchii
MLQPQPDTSSDNLIQCNKCSQVRFFKGIRGLRIHLGKAHKDQDDSSNTLPLPQSNDNTTPTPFWKKISICKQTLPILKRIPRAARITVCETFSQTIRKVVNENSICTWENLLLLPYQVLNITQNDRSTATSKIKKNCKQLKFLDFTDNPSSSGKRKESTRRLKRLVESKLSDGDIKGAARILFSDDDIAPCNEITLRALADKHPPPGSSPQLLDEGNDIDCLRATSDEVLAAVMSFKCGSAGGLDGLTPQHLKDLLSGDTGSAGEKLLKDMTDLVNLMLSGTVSKEILPILYGANLCALTKKDRSIRPIAVGMTYRRLAAKICCRAIKDLSSSYFLPHQLGFGTKGGCEAAVHSLRAFTASNSCEAILKVDVKNAFNSVNRFALLNQIKRHFPKIYRYVWQCYGENSFLLYKNHLIYSATGCQQGDPLGPAIFSLAIHPVIERLNSKFNVWYLDDGTLGGDLGTLKNDLTMLTEEFGKIDLELNFSKCELFINENCDYLISELINLAPNLKIVSKKNLTLLGAPVFEESFNSFFDDKIQNFTHKVDNLKIISKHSAYFIIRHCLFVPNFMYVLRCSPLWKHSNILTVLDSTIRQSLTSILNLPFDFEDRTWTQATLPIRLGGLGIRKISDVALPAFLSSVYSTVDLIGKLINPSLSDFEVPYLAEARNAWSLACPSQNYPAEPKSQKLWDGPLSKLVYKNLLSTSVNEAERARLLAVSKWESGLWLQALPSSNLGTLLDDTTFRIAASIRLGAPTVVPHHCQCGDKVGGSGHHGLSCVRSAGRIPRHAALNDIIRRALVTTGTPAILEPNGLCRDDGKRPDGMSLVPWKMGRPLVWDATCVDTLAASHLPDTAVVAGAAAARQEDLKRRKYASVGSGYIFAAFGVETLGPWGPETHRLYRDLSKRLIDVSRNQNAGLYFGQRISVAIQRGNAASVLGTFPTDGDLGPIYYL

SEQ ID NO: 17060 - protein, 951 aa, Dendrolimus punctatus
MLQPQPDTSSDNLIQCNKCSQVRFFKGIRGLRIHLGKAHKDQDDSSNTLPLPQSNDNTTPTPFWKKISTCKQTLPILKRIPRAARITVCETFSQTIRKVVNENSLCTWENLLLLPYQVLNITQNDRSTATSKIKKNCKQIKILDFTDNPSSSGKRKESTRRLTRLVESKLSDGDIKGAARILFSDDDIAPCNEITLRALADKHPPSGSGPQLLEEGNDIDCLRATPDEVLAAVMSFKCGSAGGLDGLTPQHLKDLLSGDTGSAGEKLLKDMTDLVNLMLSGTVTKEILPILYGANLCALTKKDKSIRPIAVGMTYRRLAAKICCRAIKDLSSSYFLPHQLGFGTKGGCEAAVHSLRAFSASNSCEAILKVDVKNAFNSVNRSALLNQIKKHFPKIYRYVWQCYGENSFLLYKNHLIYSATGCQQGDPLGPAIFSLAIHPVIEKLNSKFNVWYLDDGTLGGDLDTLKNDLTMLTEEFGKIDLELNFSKCELFINENCDYPVSGIINLAPNLKIVSKTNLTLLGAPVFEESFNSFFDDKIQNFTHKVDNLKIISKHTAYFIIRHCLFVPNFMYVLRCSPLWRHPNILNILDSTFRQSLTSILNLPLDFEDRTWTQATLPIRLGGLGIRKISDVALPAFLSSVYSTVDLIGKIINPSPSDFEVPYLAEARNAWSLACPSQNYPVEPKSQKLWDGPLSKLVYENLLSSSVNEAERARLLAVSTWESGLWLQALPSSNLGTFLDDTTFRIAASIRLGAPAVVPHHCQCGDKVGGSGYHGLSCVRSAGRIPRHAALNDIIRRALVTTGTPAILEPNGLCRDDGKRPDGMSLVPWKMGRPLVWDATCVDTLAASHLPDTAVVAGAAAARQEDLKRRKYASIGSGYIFAAFGVETLGPWGPEAHRLYRDLSKRLIDVSRNQNAGLYFGQRISIAIQRGNAASVLGTFPTDGDLGPIYYL

SEQ ID NO: 17061 - protein, 718 aa, Dendrolimus punctatus
MSFKCGSAGGLDGLTPQHLKDLLSGDTGSAGEKLLKDMTDLVNLMLSGTVTKEILPILYGANLCALTKKDRSIRPIAVGMTYRRLAAKICCRAIKDLSSSYFLPHQLGFGTKGGCEAAVHSLRAFSASNSCEAILKVDVKNAFNSVNRSALLNQIKRHFPKIYRYVWQCYGENSFLLYKNHLIYSATGCQQGDPLGPAIFSLAIHPVIEKLNSKFNVWYLDDGTLGGDLDTLKNDLTMLTEEFGKIDLELNFSKFELFINENCDYPVSGIINLAPNLKIVSKTNLTLLGAPVFEESFNSFFDDKIQNFTHKVDNLKIISKHSAYFIIRHCLFVPNFMYVLRCSPLWRHPNILNVLDSTIRQSLTSILNLPLDFEDRTWTQATLPIRLGGLGIRKISDVALPAFLSSVYSTVDLIGKIINPSPSDFEVPYLAEARNAWSLACPSQNYPVEPKSQKLWDGPLSKLVYENLLSSSVNEAERARLLAVSTWESGLWLQALPSSNLGTFLDDTTFRIAASIRLGAPAVVPHHCQCGDKVGGSGYHGLSCVRSAGRIPRHAALNDIIRRALVTTGTPAILEPNGLCRDDGKRPDGMSLVPWKMGRPLVWDATCVDTLAASHLPDTAVVAGAAAARQEDLKRRKYASIGSGYIFAAFGVETLGPWGPEAHRLYRDLSKRLIDVSRNQNAGLYFGQRISIAIQRGNAASVLGTFPTDGDLGPIYYL

SEQ ID NO: 17062 - protein, 949 aa, Dendrolimus punctatus
MLQPQPDTSSDNLIQCNKCSQVRFFKGIRGLRIHLGKAHKDQDDSSNTLPLPQSNDNTTPTPFWKKISTCKQTLPILKRIPRAARITVCETFSQTIRKVVNENSLCTWENLLLLPYQVLNITQNDRSTATSKIKKNCKQLKILDFTDNPSSSGKRKESTRRLTRLVESKLSDGDIKGAARILFSDDDIAPCNEITLRALADKHPPSGSGPQLLEEGNDIDCLRATPDEVLAAVMSFKCGSAGGLDGLTPQHLKDLLSGDTGSAGEKLLKDMTDLVNLMLSGTVTKEILPILYGANLCALTKKDKSIRPIAVGMTYRRLAAKICCRAIKDLSSSYFLPHQLGFGTKGGCEAAVHSLRAFSASNSCEAILKVDVKNAFNSVNRSALLNQIKKHFPKIYRYVWQCYGENSFLLYKNHLIYSATGCQQGDPLGPAIFSLAIHPVIEKLNSKFNVWYLDDGTLGGDLDTLKNDLTMLTEEFGKIDLELNFSKCELFINQNCDYPVSGIINPNLKIVSKTNLTLLGAPVFEESFNSFFDDKIQNFTHKVDNLKIISKHSAYFIIRHCLFVPNFMYVLRCSPLWRHPNILNVLDSTFRQSLTSILNLPLDFEDRTWTQATLPIRLGGLGIRKISDVALPAFLSSVYSTVDLIGKIINPSPSDFEVPYLAEARNAWSLACPSQNYPVEPKSQKLWDGPLSKLVYENLLSSSVNEAERARLLAVSTWESGLWLQALPSSNLGTFLDDTTFRIAASIRLGAPAVVPHHCQCGDKVGGSGYHGLSCVRSAGRIPRHAALNDTIRRALVTTGTPAILEPNGLCRDDGKRPDGMSLVPWKMGRPLVWDATCVDTLAASHLPDTAVVAGAAAARQEDLKRRKYASIVSGYIFAAFGVETLGPWGPEAHRLYRDLSKRLIDVSRNQNAGLYFGQRISIAIQRGNAASVLGTFPTDGDLGPIYYL

SEQ ID NO: 17063 - protein, 958 aa, Dendrolimus punctatus
MQKSQTDPSFENLIQCHECTQVRYFKGQRGLRVHIGKAHKNRNEVSTSLLNPPSIPDPLSHNSTQIPFWQKISKFKQLVPVVKRIPRGARISVCQIFSQKIRKVINENSLRTWEHLLLLPYHILNISKNEHGNVTSKIKNNCKHIENIEDKFDFSETKTYKHPDKRLGHMIEKKLSDGDIKGAARILFSNDHIAPYDETTLHALEDKHPPSGSTRLQVMPEDSNASNLEVTPESILNAVMSFRSGSAGGLDGLTPQHLKDLLNGGTGNAGELLLKDVTDLINLMLSGCVNKDILPIIYGANLCALKKKDGGIRPIAVGTTYRRLAAKLCCRAIRNRCSSYFAPIQLGFGIKGGCEAAVHSLRSFATTDFCEAILKVDVKNAFNSVDRCALLSEVRKHFPKIYKYVHQCYNENSYLVYQNNLIHSATGCQQGDPLGPAIFSLAIHPIIKQLNSKFNVWYLDDGTLGGDIDTMKKDLNFLIQEFGKIGLSLNFSKCELFPACPTKNNVYTISAFTDLAPNLKIVNKSNLNLLGSPIFDESFPSFVEDKIDTFQSKLLNLKQLNTHSAYFIIRHCVFTPNFTYVLRCSPFWKHSGILKNLDNIIRQTLISILNISLDDRSWTQASLPIRLGGLGIRKISDVALPAFLSSVYSTADLIGNIINPSLSDFEVPYLTEARNAWSLACPNENFPLDPKMQRLWDGPLSKSVYDNLMSSCTGETDRARLLAVSKWESGLWLQCLPSANLGTLLDDTTFRIAACIRLGADIVVPHRCRCGDKVDRLGHHGLSCLRSAGRTSRHAAINDIIRRSLVTVGVPAVLEPNGLCRDDGKRPDGMSLIPWKMGRPLVWDATCVDTLAASHLPNTAVTAGGAAALQETLKRRKYAPIGDGYIFVAFGVETLGPWGREAYQLYRDLSRRLKEVSRDQRAGLYLGQRISVAIQRGNAASVLGTLPTDSDLDYIFYL

SEQ ID NO: 17064 - protein, 958 aa, Dendrolimus punctatus
MQKSQTDPSFENLIQCHECTQVRYFKGQRGLRVHIGKAHKNRNEVSTSLLNPPSIPDPLSHNSTQIPFWQKISKFKQLAPVVKRIPRGARISVCQIFSQKIRKVINENSLRTWEHLLLLPYHILNISKNEHGNVTSKIKNNCKHIENIEDKFDFSETKTYKHPDKRLGHMIEKKLSDGDIKGAARILFSNDDIAPYDETTLHALEDKHPPSGSTRLQVMPEDSNASNLEVTPENILNAVMSFRSGSAGGLDGLTPQHLKDLLNGGTGNAGELLLKDVTDLINLMLSGCVNKDILPIIYGANLCALKKKDGGIRPIAVGTTYRRLAAKLCCRAIRNRCSSYFAPIQLGFGIKGGCEAAVHSLRSFATTDFCEAILKVDVKNAFNSVDRCALLSEVRKHFPKIYKYVHQCYNENSYLVYQNNLIHSATGCQQGDPLGPAIFSLAIHPIIKQLNSKFNVWYLDDGTLGGDIDTMKKDLNFLIQEFGKIGLSLNFSKCELFPACPTKNNVNTISAFTDLAPNLKIVNKSNFNLLGSPIFDESFPSFVEDKIDTFQSKLLNLKQLNTHSAYFIIRHCVFTPNFTYVLRCSPFWKHSGILKNLDNIIRQTLTSILNISLDDRSWTQASLPIRLGGLGIRKISDVALPAFLSSVYSTADLIGNIINPSLSDFEVPYLTEARNAWSLACPNENFPLDPKMQRLWDGPLSKSVYDNLMSSCTGETDRARLLAVSKWESGLWLQCLPSANLGTLLDDTTFRIAACIRLGADIVVPHRCRCGDKVDRLGHHGLSCLRSAGRTSRHAAINDIIRRSLVTVGVPAVLEPNGLCRDDGKRPDGMSLIPWKMGRPLVWDATCVDTLAASHLPNTAVTAGGAAALQETLKRRKYASIGDGYIFVAFGVETLGPWGREAYQLYRDLSRRLKEVSRDQRAGLYLGQRISVAIQRGNAASVLGTLPTDSDLDYIFYL

SEQ ID NO: 17065 - protein, 955 aa, Papilio dardanus
MSQPQPDASFDNLIQCNKCPQVRFFKGQRGLRIHLGKAHKDSVESSTSLPLPTNNNIPISNTTPFWQQLSNHKHKLPILKRIPRGARIKVCEIFSKYIRSVINENSVCAWENLLLLPYRVLNLSSDRKSSATAQIKKKCSLTQFINPNPTNFYNRPSKCMDSTSWLSRLVESKLSDGDIKGAARILFSNDDIAPCNETTLRALTDKHPPSGPSFQMSDDGSDLDDCLNATPDCVFKAVMSFRCGSAGGLDGLTPQHLKDLLSGSTGIVGQSLLKDITDLINMMLSGRVNPTILPVLYGANLCALIKKDGGIRPIAVGTTYRRLAAKICCRAIKESCSAYFVPHQLGFGTSGGCEAAVHSLRTFIAGNCCEAVLKLDVKNAFNSVNRCTLLAQIKKLFPKIYQYVWQCYGEKSYLQYKDNLIYSATGCQQGDPLGPALFALAIHPIIQTLNSKFNVWYLDDGTLGGSIDTLKNDLIVINREFGNIGLELNFSKCELFLNENTCVNPISDFLGLAPNLKIVTKKDLYLLGSPVFEQSITPFVNDKIQNFSSKINSLKEISMHSAYFIIRHCLFVPNFTYVLRCSPLWRHQNTLDLLNLTIRNALSCILNITLENRTWTQASLPIRLGGLGIRKISDVALPAFLSSVYSNEDLIGKILNPSLCDFEVPYLTEARNAWSTACPNQNFPVQPKSQRLWDGPLSALEYSRLLSSSSSDAERARLLAVSKWESGLWLQALPSANLGTFLDDTSFRIATSIRLGADAVVPHRCKCGDKVGSLGHHGLSCVRSTGRFPRHAALNDIIRRALATVGLPAVLEPTGLARDDGKRPDGMSLVPWRLGRPLVWDASCVDTLAPSHLPETSVLAGAAAARQEDLKRRKYACIGSGYIFSAFGVETLGPWGPEALRLYRDLSTRLIEVSRDQKAGLYFGQRISVAIQRGNAASVLGTFPADSDLGPIFYL

SEQ ID NO: 17066 - protein, 955 aa, Papilio dardanus
MSQPQPDASFDNLIQCNKCPQVRFFKGQRGLRIHLGKAHKDSVESSTSLPLPTNNNIPISNTTPFWQQLSNHKHKLPILKRIPRGARIKVCEIFSKYIRSVINENSVCAWENLLLLPYRVLNLSSDRKSSATAQIKKKCSLTQFINPNPTNFYNRPSKCMDSTSWLSRLVESKLSDGDIKGAARILFSNDDIAPCNETTLRALTDKHPPSGPSFQMSDDGSDLDDCLNATPDCVFKAVMSFRCGSAGGLDGLTPQHLKDLLSGSTGIVGQSLLKDITDLINMMLSGRVNPTILPVLYGANLCALIKKDGGIRPIAVGTTYRRLAAKICCRAIKESCSAYFVPHQLGFGTSGGCEAAVHSLRTFIAGNCCEAVLKLDVKNAFNSVNRCTLLAQIKKLFPKIYQYVWQCYGEKSYLQYKDNLIYSATGCQQGDPLGPALFALAIHPIIQTLNSKFNVWYLDDGTLGGSIDTLKNDLIVINREFGNIGLELNFSKCELFLNENTCVNPISDFLGLAPNLKIVTKKDLYLLGSPVFEQSITPFVNDKIQNFSSKINSLKEISMHSAYFIIRHCLFVPNFTYVLRCSPLWRHQNTLDLLDLTIRNALSCILNITLENRTWTQASLPIRLGGLGIRKISDVALPAFLSSVYSNEDLIGKILNPSLCDFEVPYLTEARNAWSTACPNQNFPVQPKSQRLWDGPLSALEYSRLLSSSSSDAERARLLAVSKWESGLWLQALPSANLGTFLDDTSFRIATSIRLGADAVVPHRCKCGDKVGSLGHHGLSCVRSTGRFPRHAALNDIIRRALATVGLPAVLEPTGLARDDGKRPDGMSLVPWRLGRPLVWDASCVDTLAPSHLPETSVLAGAAAARQEDLKRRKYACIGSGYIFSAFGVETLGPWGPEALRLYRDLSTRLIEVSRDQKAGLYFGQRISVAIQRGNAASVLGTFPADSDLGPIFYL

SEQ ID NO: 17067 - protein, 955 aa, Papilio dardanus
MSQPQPDASFDNLIQCNKCPQVRFFKGQRGLRIHLGKAHKDSVESSTSLPLPTNNNIPISNTTPFWQQLSNHKHKLPILKRIPRGARIKVCEIFSKYIRSVINENSVCAWENLLLLPYRVLNLSSDRKSSATAQIKKKCSLTQFINPNPTNFYNRPSKCMDSTSWLSRLVESKLSDGDIKGAARILFSNDDIAPCNETTLRALTDKHPPSGPTFQMSDDGSDLDDCLNATPDCVFKAVMSFRCGSAGGLDGLTPQHLKDLLSGSTGIVGQSLLKDITDLINMMLSGRVNPTILPVLYGANLCALIKKDGGIRPIAVGTTYRRLAAKICCRAIKESCSAYFVPHQLGFGTSGGCEAAVHSLRTFIAGNCCEAVLKLDVKNAFNSVNRCTLLAQIKKLFPKIYQYVWQCYGEKSYLQYKDNLIYSATGCQQGDPLGPALFALAIHPIIQTLNSKFNVWYLDDGTLGGSIDTLKNDLIVINREFGNIGLELNFSKCELFLNENTCVNPISDFLGLAPNLKIVTKKDLYLLGSPVFEQSITPFVNDKIQNFSSKINSLKEISMHSAYFIIRHCLFVPNFTYVLRCSPLWRHQNTLDLLDLTIRNALSCILNITLENRTWTQASLPIRLGGLGIRKISDVALPAFLSSVYSNEDLIGKILNPSLCDFEVPYLTEARNAWSTACPNQNFPVQPKSQRLWDGPLSALEYSRLLSSSSSDAERARLLAVSKWESGLWLQALPSANLGTFLDDTSFRIATSIRLGADAVVPHRCKCGDKVGSLGHHGLSCVRSTGRFPRHAALNDIIRRALATVGLPAVLEPTGLARDDGKRPDGMSLVPWRLGRPLVWDASCVDTLAPSHLPETSVLAGAAAARQEDLKRRKYACIGSGYIFSAFGVETLGPWGPEALRLYRDLSTRLIEVSRDQKAGLYFGQRISVAIQRGNAASVLGTFPADSDLGPIFYL

SEQ ID NO: 17068 - protein, 955 aa, Papilio dardanus
MSQPQPDASFDNLIQCNKCPQVRFFKGQRGLRIHLGKAHKDSVESSTSLPLPTNNNIPISNTTPFWQQLSNHKHKLPILKRIPRGARIKVCEIFSKYIRSVINENSVCAWENLLLLPYRVLNLSSDRKSSATAQIKKKCSLTQFINPNPTNFYNRPSKCMDSTSWLSRLVESKLSDGDIKGAARILFSNDDIAPCNETTLRALTDKHPPSGPSFQMSDDGSDLDDCLNATPDCVFKAVMSFRCGSAGGLDGLTPQHLKDLLSGSTGIVGQSLLKDITDLINMMLSGRVNPTILPVLYGANLCALIKKDGGIRPIAVGTTYRRLAAKICCRAIKESCSAYFVPHQLGFGTSGGCEAAVHSLRTFIAGNCCEAVLKLDVKNAFNSVNRCTLLAQIKKLFPKIYQYVWQCYGEKSYLQYKDNLIYSATGCQQGDPLGPALFALAIHPIIQTLNSKFNVWYLDDGTLGGSIDTLKNDLIVINREFGNIGLELNFSKCELFLNENTCVNPISDFLGLAPNLKIVTKKDLYLLGSPVFEQSITPFVNDKIQNFSSKINSLKEISMHSAYFIIRHCLFVPNFTYVLRCSPLWRHQNTLDLLDLTIRNALSCILNITLENLTWTQASLPIRLGGLGIRKISDVALPAFLSSVYSNEDLIGKILNPSLCDFEVPYLTEARNAWSTACPNQNFPVQPKSQRLWDGPLSALEYSRLLSSSSSDAERARLLAVSKWESGLWLQALPSANLGTFLDDTSFRIATSIRLGADAVVPHRCKCGDKVGSLGHHGLSCVRSTGRFPRHAALNDIIRRALATVGLPAVLEPTGLARDDGKRPDGMSLVPWRLGRPLVWDASCVDTLAPSHLPETSVLAGAAAARQEDLKRRKYACIGSGYIFSAFGVETLGPWGPEALRLYRDLSTRLIEVSRDQKAGLYFGQRISVAIQRGNAASVLGTFPADSDLGPIFYL

SEQ ID NO: 17069 - protein, 953 aa, Lycaena phlaeas
MSQPQPDASFDNLIQCNKCSQVRFFKGQRGLRIHLGKAHKDQGESSSSLPLPNNNDNIIPHSNTTPFWKQISNYKQKLPILKRIPRGARISVCENLSKCIKSVINENSLSAWENLLLFPYRILNISNETRSSATTQIKKKCSLSQFVNPTHTFNRSPKCTDSRSWTSRLVESKLSVGDIKGAARILFSNDDIAPCNDTTLSDLADKHPPSGPPFQMDHDSELNDCLVTTPESVYRAVMSFRCGSAGGLDGLTPQHLKDLLSGSTGNTGQSLLKDLTDLINMMLSGQVNSMILPVLYGANLCALIKKDGGIRPIAVGTTYRRLAAKICCRAIKDSCSTYFVPHQLGFGTRGGCEAAVHSLRTFVAGNCCEAVLKLDVKNAFNSVNRCSLLAQIKKLFPKIYKYIWQCYGEKSYLQYKDNLIYSATGCQQGDPLGPALFALAIHPIIQTLNSKFNVWYLDDGTLGGNIDTLKNDLIVINREFGNIGLELNFSKCELFLNENTCVPLSDFLVLAPNLKIVTKKDLCLLGSPVFEESITPFVNDKIQNFSSKINSLKEISMHSAYFIIRHCLFVPNFTYVLRCSPLWKHKNTLDLLDLTIRNALSCILNITLENRTWTQASLPIRLGGLGIRKISDVALPAFLSSVHSTVDLIGKILNPSLSDFEVPYLTEARNVWSTACPNQNFPVDPKSQRLWDGPLSALEYNRLLSSSSSDAERARLLAVSKWESGLWLQALPSANLGTFLDDTIFRIAASIRLGAEAVVPHRCKCGDKVGSLGYHGLSCVRSTGRIPRHAALNDIIRRALATVGLPAVLEPTGLARDDGKRPDGMSLVPWKMGRPLVWDASCVDTLAASHLPETSVLAGAAAARQEDLKRRKYACIGNGYIFSAFGVETLGPWGPEAFRLYRDLSTRLIEISRDQKAGLYLGQRISVAIQRGNAASVLGTIPADSDLGPIYYL

SEQ ID NO: 17070 - protein, 893 aa, Dendrolimus kikuchii
MSQSQPDTVSLENLIQCHKCPGSRFFKGHRGLKIHLGKTHKETNLSHSLPIIQTDPDTNLKTQLPLCQYLSNLKNSVPLIKRIPRGARITVCQTFSKLIKNVILNNNLQAWENLLLLPYNIFQIDDKSGNLTSKVKNRCISVPEPKALRNYNNTQDRKDSLSRLRRFVESKISDGDIKGAAQILFSSDTVAPNNETTLDALIDKHPPSRTVPSRKTQDENLVTEPRAVLQSVMSFRGGSAGGLDGLTPQHLKDLLSGSTGGAGETLLKDLTDLMNLMLSGSVASEVVPTLYGANLCALVKKDGGIRPIAIGTVYRRLAAKICCRQIIDTCSTYFAPTQLGFGSKGGCEAAVHALRTFITRNCCEAVLKVDVKNAFNSVDRDTLLTRVYEKFPKIYNFTSQCYNKITNLMYQGTQINSATGCQQGDPLGPALFSLAIHPIIDKLNSKFNVWYLDDGTLGGDIETIKNDFQFLLEEFAKIGLVLNLSKCEIYISNKLNNIDNIKSELQSLGLNFKIVNQSNLTLLGCPIFDDYFASFVDSKIQNFLSKTANLKNINIHCAYFIIRHCLFVPNFTYVLRCCPLWQYPHLVNNLDNTIRQSLSSLFNIPFDERSWTQATLPIRLGGLGIRKISDIALPAFLASVYSTLDLIGKILNPSLSDFEVPCLAEAKNAWSLACPNQNLPVNLKRQKLWDEPLSLITYQKLFSSFMGQAERARFLAVSRWESGLWLQALPSANLDTLLEDTTFRICASIRLGATCVVPRVCQCGDKVDRLGHHGLSCSRSAGRISRHAALNDIIRWALVPAGVSAVLEPNGLCRDDGRRPDGMTLVPWKMGRPLVWDATCVDILAASYISSTSATAGSAATEPSSAASTPLSEIVIHLRRLGWKLWVRGVLTL

SEQ ID NO: 17071 - protein, 952 aa, Dendrolimus punctatus
MSQPQPDTVSLENLIQCHKCPEPRFFKGHRGLKIHLGKSHKESNLSNSLPVIQIDPDTNFKTPLPLCQYLSNLKNAVPLIKRIPRGARISVCQIFSKLIKNVLINNNLQAWENLLLLPYSIFQIDDTSGNLTSKVKKRCISLPEPKTLQNFNHTQNLKDSSSRLRRFVESKISDGDIKGAAQILFSSDTVAPNNETTLDALIDKHPPSSTVPSRETQNENLVTEPRAVLQSVMSFRGGSAGGLDGLTPQHLKDLLSGSTGEAGETLLKDLTDLMNLMLSGSVTSEVVPTLYGANLCALVKKDGGIRPIAIGTVYRRLAAKICCRQIIDTCSTYFAPTQLGFGSKGGCEAAVHALRTFVTRNCCEAVLKVDVKNAFNSVNRDTLLTRVYEKFPQIYNFTSQCYNKATNLMYQGTQIISATGCQQGDPLGPALFSLAIHPIIDKLNSKFNVWYLDDGTLGGDIETIKNDFQFLLEEFSKIGLVLNLSKCEIYISNKFNNIEKIKSEFQNINLNFKIVNQSNLTLLGCPIFDDSFTSFVDSKIQNFLSKTANLKNINIHCAYFIIRHCLFVPNFTYTLRCCPLWKHPHLVNNLNNIIRQSLSSLFNIPFDDRSWAQATLPIRLGGLGIRKISDIALPAFLASAYSTMDLIGKILNPSLSDFEVPCLVEAKNAWSLACPNQNLPANLKLQKLWDEPLSLIAYQKLLSSCIGQAERARLLAVSRWESGLWLHALPSANLGTLLDDSTFRMCASIRLGATCVVPHLCQCGDKVDRLGHHGLSCSRSAGRISRHAALNDIIRRALVTAGVPAVLEPNGLCRDDGRRPDGMTLVPWKMGRPLVWDATCVDTLAASHLSSTSTTAGSAAAEQETLKRRKYAAIGNCYIFAAFGVETLGPWGPSALKLYRDVAERLIDLSRDQKAGVYFAQRISMAIQRGNAASLLGTLPVSDSGLGPIFYL

SEQ ID NO: 17072 - protein, 957 aa, Dendrolimus kikuchii
MTQSQPDVASLENLVQCPKCSQARYFKGNRGLKIHFGKAHREQDVLSSSATSQQPLSTNINLFTLSENLSRLKHSVQIIKRIPRGARISVCQIFSKFIRNTVTLNSLRAWEDLLQLPYKILNIKHNESGNLTTKIKKRCQNLPELDDLRTNSNIRKTDKESTYRLNRFVEAKLSDGDIKGAARILFSNDTIAPNNETTLRALEEKHPHSDAALGSSLVCLEESLVAAPKSVFTSVMSFRSGSAGGLDGLTPQHLKDLLGGSTGTAGETLLKDITDLINLMLSGAVNNDVVPTLYGANLCALNKKDGGIRPIAVGTTYRRLAAKICCREIADLSSSYFATRQLGFGVKGGCEAAVHSLRTFASRDCCQALLKVDVKNAFNSVNRATLLAQVRDKSPRIFNFIHQCYCDKSILMYQNHKVFSETGCQQGDPLGPAIFSLAIHPIIEKLNSKFNVWYLDDGTLGGDIDTLKKDIQYLIYEFDKIGLELNYSKCEIYFSDKVPNIHNIISDFQSLGLNFKIVDKNSLSLLGCPVFEESFSTFVSNKIQNFQSKIENLKSISLHSAYYIIRYCIFTPNFIYILRCCPIWQNQNILKTLDNVIRYSLSSIFNIPFDDRTWTQASLPIRYGGLGIRKISAVSLPAFLSSVYSTKDLIGEILNPSLGDFEVLYLTEARNAWSVVCPYQNLPINLKSQKLWDGPLCSLVHKNLLDTCAHETERARLLAVSRWESGLWLQALPSANLGTFLDDNAFRISACIRLGAACVVPHRCQCGDKVERLGHHGLSCSRSAGRISRHATLNDIIRRALVTAGVPAVLEPNGLCRDDGRRPDGMSLVPWKMGRPLVWDASCVDTLAASHLPATSMSAGTAAAQQEALKRRKYSAIGNGYIFAAFGVETLGPWGPEAHKLYRDIVKRLVDVSRDQKTGLYLAQRISIAIQRGNVASLLGTFPTESGLELDNFSLYI

SEQ ID NO: 17073 - protein, 958 aa, Dendrolimus kikuchii
MQKSQTDSSLENLIQCHECTQVRFFKGQRGLRVHIGKAHKNRNEVSTSLLNPPPIPDPLSHNLTQIPFWQKISKFKQLAPVVKRIPRGARISVCQIFSEKIRKVINENSLRTWEHLLLLPYQILNISKNEHGNVTSKIKHNCKHIENIEDKFDFTKTKRYKYPNKHLGHMVEKKLSDGDIKGAARILFSNDDIAPNDETTLRALEDKHPPSGSTWLQDMSEALNESNLDVTPESILEAVMSFRSGSAGGLDGLTPQHLKDLLSGGTGNAGELLLKDMTDLINLMLSGCINNDILPIIYGANLCALKKKDGGIRPIAVGTTYRRLAAKVCCRAIRNRCSSYFTPIQLGFGTKGGCEAAVHSLRSFATTDSCEVILKVDVKNAFNSVNRCTLLSEVKKHFPKIYKFVHQCYNENSYLVYQNNLIHSATGCQQGDPLGPAIFSLAIHPIIKQLNSKFNVWYLDDGTLGGNIDAVKKDLNFLIEEFGKIGLSLNFSKCELFLACSTKNNISTISAFTDLAPNLKIVNKNNLNLLGSPVFDESFSSFVEDKIVNFQSKLSNLKQLNTHSAYFIIRHCVFTPNFTYVLRCSPLWRHSSILNNLDNIIRQTLTSILNISLDDRSWTQASLPIRLGGLGIRKISDVALPAFLSSVHSTVDLIGNIINPSLSDFEVPYLTEARNAWSLACPNENFPLDPKMQRLWDGPLSKSVYDNLMSSCTGETDRARLLAVSNWESGLWLQSLPSANLGTLLDDTTFRIAACIRLGADIVVPHRCRCGDKVDRLGHHGLSCLRSAGRTSRHAAINDIIRRSLVTVGVPAVLEPNGLCRDDGKRPDGMSLVPWKMGRPLVWDATCVDTLAASHLPNTAVTAGGAATLQETLKRRKYASIGDGYIFVAFGVETLGPWGREAHQLYRDLSRRLKEVSRDQRAGLYLGQRISVAIQRGNAASILGTLPTESDLDYIFYL

SEQ ID NO: 17074 - protein, 954 aa, Dendrolimus kikuchii
MTQSQPDVASLENLVQCPKCSQARYFKGNRGLKIHFGKAHREQDVLSSSATSQQPLSTNINLFTLSENLSRLKHSVQIIKRIPRGARISVCQIFSKFIRNTVTLNSLRAWEDLLQLPYKILNIKHNESGNLTTKIKKRCQNLPELDDLRTNSNIRKTDKESTYRLNRFVEAKLSDGDIKGAARILFSNDTIAPNNETTLRALEEKHPHSDAALGSSLVCLEESLVAAPKSVFTSVMSFRSGSAGGLDGLTPQHLKDLLGGSTGTAGETLLKDITDLINLMLSGAVNNDVVPTLYGANLCALNKKDGGIRPIAVGTTYRRLAAKICCREIADLSSSYFATRQLGFGVKGGCEAAVHSLRTFASRDCCQALLKVDVKNAFNSVNRATLLAQVRDKSPRIFNFIHQCYCDKSILMYQNHKVFSETGCQQGDPLGPAIFSLAIHPIIEKLNSKFNVWYLDDGTLGGDIDTLKKDIQYLIYEFDKIGLELNYSKCEIYFSDKVPNIHNIISDFQSLGLNFKIVDKNSLSLLGCPVFEESFSTFVSNKIQNFQSKIENLKSISLHSAYYIIRYCIFTPNFIYILRCCPIWQNQNILKTLDNVIRYSLSSIFNIPFDDRTWTQASLPIRYGGLGIRKISAVSLPAFLSSVYSTKDLIGEILNPSLGDFEVLYLTEARNAWSVVCPYQNLPINLKSQKLWDGPLCSLVHKNLLDTCAHETERARLLAVSRWESGLWLQALPSANLGTFLDDNAFRISACIRLGAACVVPHRCQCGDKVERLGHHGLSCSRSAGRISRHATLNDIIRRALVTAGVPAVLEPNGLCRDDGRRPDGMSLVPWKMGRPLVWDASCVDTLAASHLPATSMSAGTAAAQQEALKRRKYSAIGNGYIFAAFGVETLGPWGPEAHKLYRDIVKRLVDVSRDQKTGLYLAQRISIAIQRGNVASLLGTFPTESGLELDFIL

SEQ ID NO: 17075 - protein, 958 aa, Dendrolimus punctatus
MQQLQPDSSFENLVQCHECSQVRYFKGQRGLRIHIGKAHKDRDGYSASLPNPQPVFDSLSDSTQIPFWQRISKLKHSAPILKRIPRAVRSSICEIFSKYIKKVLAENTLRTWEDLLLLPYQILNINKDDQGTVTSKIRKNCKIIQTIGQRSDTQINQTKKYPNRKTHLKNFIESKLSDGDIKGAARILFSNDDVAPNDETTLRALRDKHPPSGIAQLLDDDDTNNSSIYTTPEEILRAAMSFRSGSAGGLDGLTPQHLKDLLSGATGTSGVTLLRDITDLINLMLSGSVNMDILPIIYGANLCALKKKDGGIRPIAVGTTYRRLAAKICCRAIKDLSSSYFPPNQLGFGTKGGCEAAVHALRTFVGSNVCEAILKVDVKNAFNSVNRCTLLTEIKNRFPKIYNYIRQCYSENSFLVYQDNLIYSATGCQQGDPLGPAIFSLAIHPIIQKLNSKFNVWYLDDGTLGGDIDTLKNDLKYLISEFGKIGLTLNYSKCELFIHNANENDNNTISDFQVLAPNLRLAKKDNLSLLGSPIFDESFPYFVDDKVQNFQSKIKNLKEISAHSAYFIIRHCLFTPNFTYILRCSPLWRHPNILYKLDNIIRQTLTSIINIPLEDRSWTQASLPIRLGGLGIRKISDIALPAFLSSVYSTVALIGQILSPSLSGFEVPYLTEARNAWSLACPTQNLPAEPKSQKLWDGPLSKLIQENLLSSCIGETDRARLLAVSKWESGLWLQALPSANLGTLLDDTTFRIAACIRLGAGAVVPHRCRCGDRVDELGHHGLSCARSAGRMSRHATLNDIIRRSLATAGAPAVLEPNGLCRDDGKRPDGMSLVPWKMGRPLVWDATCVDTLAASHLSDTAVTAGAAAAHQEALKCRKYVSIGSGYVFVAFGVETLGPWGPGAHHLYRDLSRRLIEVSRDQKAGLYLGQRISVAIQRGNAASILGTLPADSDMESIFYL

SEQ ID NO: 17076 - protein, 952 aa, Dendrolimus kikuchii
MTQSQPDVASLENLVQCPKCSQARYFKGNRGLKIHFGKAHREQDVLSSSATSQQPLSTNINLFTLSENLSRLKHSVQIIKRIPRGARISVCQIFSKFIRNTVTLNSLRAWEDLLQLPYKILNIKHNESGNLTTKIKKRCQNLPELDDLRTNSNIRKTDKESTYRLNRFVEAKLSDGDIKGAARILFSNDTIAPNNETTLRALEEKHPHSDAALGSSLVCLEESLVAAPKSVFTSVMSFRSGSAGGLDGLTPQHLKDLLGGSTGTAGETLLKDITDLINLMLSGAVNNDVVPTLYGANLCALNKKDGGIRPIAVGTTYRRLAAKICCREIADLSSSYFATRQLGFGVKGGCEAAVHSLRTFASRDCCQALLKVDVKNAFNSVNRSTLLAQVRDKSPRIFNFIHQCYCDKSILMYQNHKVFSETGCQQGDPLGPAIFSLAIHPIIEKLNSKFNVWYLDDGTLGGDIDTLKKDIQYLIYEFDKIGLELNYSKCEIYFSDKVPNIHNIISDFQSLGLNFKIVDKNSLSLLGCPVFEESFSTFVSNKIQNFQSKIENLKSISLHSAYYIIRYCIFTPNFIYILRCCPIWQNQNILKTLDNVIRYSLSSIFNIPFDDRTWTQASLPIRYGGLGIRKISAVSLPAFLSSVYSTKDLIGEILNPSLGDFEVLYLTEARNAWSVVCPYQNLPINLKSQKLWDGPLCSLVHKNLLDTCAHETERARLLAVSRWESGLWLQALPSANLGTFLDDNAFRISACIRLGAACVVPHRCQCGDKVERLGHHGLSCSRSAGRISRHATLNDIIRRALVTAGVPAVLEPNGLCRDDGRRPDGMSLVPWKMGRPLVWDASCVDTLAASHLPATSMSAGTAAAQQEALKRRKYSAIGNGYIFAAFGVETLGPWGPEAHKLYRDIVKRLVDVSRDQKTGLYLAQRISIAIQRGNVASLLGTFPTESGLELDF

SEQ ID NO: 17077 - protein, 952 aa, Dendrolimus kikuchii
MSQSQPDTVSLENLIQCHKCPGSRFFKGHRGLKIHLGKTHKETNLSHSLPIIQTDPDTNLKTQLPLCQYLSNLKNSVPLIKRIPRGARITVCQTFSKLIKNVILNNNLQAWENLLLLPYNIFQIDDKSGNLTSKVKNRCISVPEPKALRNYNNTQDRKDSLSRLRRFVESKISDGDIKGAAQILFSSDTVAPNNETTLDALIDKHPPSRTVPSRKTQDENLVTEPRAVLQSVMSFRGGSAGGLDGLTPQHLKDLLSGSTGGAGETLLKDLTDLMNLMLSGSVASEVVPTLYGANLCALVKKDGGIRPIAIGTVYRRLAAKICCQQIIDTCSTYFAPTQLGFGSKGGCEAAVHALRTFITRNCCEAVLKVDVKNAFNSVDRDTLLTRVYEKFPKIYNFTSQCYNKITNLMYQGTQINSATGCQQGDPLGPALFSLAIHPIIDKLNSKFNVWYLDDGTLGGDIETIKNDFQFLLEEFAKIGLVLNLSKCEIYISNKLNNIDNIKSELQSLGLNFKIVNQSNLTLLGCPIFDDSFASFVDSKIQNFLSKTANLKNINIHCAYFIIRHCLFVPNFTYVLRCCPLWQYPHLVNNLDNTIRQSLSSLFNIPFDERSWTQATLPIRLGGLGIRKISDIALPAFLASVYSTLDLIGKILNPSLSDFEVPCLAEAKNAWSLACPNQNLPVNLKRQKLWDEPLSLITYQKLFSSCTGQAERARLLAVSRWESGLWLQALPSANLGTLLEDTTFRICASIRLGATCVVPHLCQCGDKVDRLGHHGLSCSRSAGRISRHAALNDIIRRALVTAGVPAVLEPNGLCRDDGRRPDGMTLVPWKMGRPLVWDATCVDTLAASRLSSTSVTAGSAAAEQEALKRRKYAAIGNSYTFAAFGVETLGPWGPNALKLYRDVAERLVDLSRDQKAGVYFAQRVSIAIQRGNAASLLGTFPVSDSGLGPIFYL

SEQ ID NO: 17078 - protein, 958 aa, Dendrolimus kikuchii
MQKSQTDSSLENLIQCHECTQVRFFKGQRGLRVHIGKAHKNRNEVSNSLLNPPPIPDPLSHNLTQIPFWQKISKFKQLAPVVKRIPRGARISVCQIFSEKIRKVINENSLRTWEHLLLLPYQILNISKNEHGNVTSKIKHNCKHIENIEDKFDFSKTKRYKYPNKHLGHMVEKKLSDGDIKGAARILFSNDDIAPNDETTLRALEDKHPPSGSTWLQDMSEALNESNLDVTPESILEAVMSFRSGSAGGLDGLTPQHLKDLLSGGTGNAGELLLKDMTDLINLMLSGCVNNDILPIIYGANLCALKKKDGGIRPIAVGTTYRRLAAKVCCRAIRNRCSSYFTPIQLGFGTKGGCEAAVHSLRSFATTDSCEVILKVDVKNAFNSVNRCTLLSEVKKHFPKIYKFVHQCYNENSYLVYQNNLIHSATGCQQGDPLGPAIFSLAIHPIIKQLNSKFNVWYLDDGTLGGNIDAVKKDLNFLIEEFGKIGLSLNFSKCELFLACSTKNNISTISAFTDLAPNLKIVNKNNLNLLGSPVFDESFSSFVEDKIVNFQSKLSNLKQLNTHSAYFIIRHCVFTPNFTYVLRCSPLWRHSSILNNLDNIIRQTLTSILNISLDDRSWTQASLPIRLGGLGIRKISDVALPAFLSSVHSTVDLIGNIINPSLSDFEVPYLTEARNAWSLACPNENFPLDPKMQRLWDGPLSKSVYDNLMSSCTGETDRARLLAVSNWESGLWLQSLPSANLGTLLDDTTFRIAACIRLGADIVVPHRCRCGDKVDRLGHHGLSCLRSAGRTSRHAAINDIIRRSLVTVGVPAVLEPNGLCRDDGKRPDGMSLVPWKMGRPLVWDATCVDTLAASHLPNTAVTAGGAATLQETLKRRKYASIGDGYIFVAFGVETLGPWGREAHQLYRDLSRRLKEVSRDQRAGLYLGQRISVAIQRGNAASILGTLPTESDLDYIFYL

SEQ ID NO: 17079 - protein, 958 aa, Dendrolimus kikuchii
MQKSQTDSSLENLIQCHECTQVRFFKGQRGLRVHIGKAHKNRNEVSTSLLNPPPIPDPLSHNLTQIPFWQKISKFKQLAPVVKRIPRGARISVCQIFSEKIRKVINENSLRTWEHLLLLPYQILNISKNEHGNVTSKIKHNCKHIENIEDKFDFSKTKRYKYPNKHLGHMVEKKLSDGDIKGAARILFSNDDIAPNDETTLRALEDKHPPSGSTWLQDMSEALNESNLDVTPESILEAVMSFRSGSAGGLDGLTPQHLKDLLSGGTGNAGELLLKDMTDLINLMLSGCVNNDILPIIYGANLCALKKKDGGIRPIAVGTTYRRLAAKVCCRAIRNRCSSYFTPIQLGFGTKGGCEAAVHSLRSFATTDSCEVILKVDVKNAFNSVNRCTLLSEVKKHFPKIYKFVHQCYNENSYLVYQNNLIHSATGCQQGDPLGPAIFSLAIHPIIKQLNSKFNVWYLDDGTLGGNIDAVKKDLNFLIEEFGKIGLSLNFSKCELFLACSTKNNISTISAFTDLAPNLKIVNKNNLNLLGSPVFDESFSSFVEDKIVNFQSKLSNLKQLNTHSAYFIIRHCVFTPNFTYVLRCSPLWRHSSILNNLDNIIRQTLTSILNISLDDRSWTQASLPIRLGGLGIRKISDVALPAFLSSVHSTVDLIGNIINPSLSDFEVPYLTEARNAWSLACPNENFPLDPKMQRLWDGPLSKSVYDNLMSSCTGETDRARLLAVSNWESGLWLQSLPSANLGTLLDDTTFRIAACIRLGADIVVPHRCRCGDKVDRLGHHGLSCLRSAGRTSRHAAINDIIRRSLVTVGVPAVLEPNGLCRDDGKRPDGMSLVPWKMGRPLVWDATCVDTLAASHLPNTAVTAGGAATLQETLKRRKYASIGDGYIFVAFGVETLGPWGREAHQLYRDLSRRLKEVSRDQRAGLYLGQRISVAIQRGNAASILGTLPTESDLDYIFYL

SEQ ID NO: 17080 - protein, 958 aa, Dendrolimus punctatus
MQKSQTDPSFENLIQCHECTQVRYFKGQRGLRVHIGKAHKNRNEVSTSLLNPPSIPDPLSHNSTQIPFWQKISKFKQLAPVVKRIPRGARISVCQIFSQKIRKVINENSLRTWEHLLLLPYHILNISKNEHGNVTSKIKNNCKHIENIEDKFDFSETKTYKHPDKRLGHMIEKKLSDGDIKGAARILFSNDDIAPYDETTLHALEDKHPPSGSTRLQVMPEDSNASNLEVTPENILNAVMSFRSGSAGGLDGLTPQHLKDLLNGGTGNAGELLLKDVTDLINLMLSGCVNKDILPIIYGANLCALKKKDGGIRPIAVGTTYRRLAAKLCCRAIRNRCSSYFAPIQLGFGIKGGCEAAVHSLRSFATTDFCEAILKVDVKNAFNSVDRCALLSEVRKHFPKIYKYVHQCYNENSYLVYQNNLIHSATGCQQGDPLGPAIFSLAIHPIIKQLNSKFNVWYLDDGTLGGDIDTMKKDLNFLIQEFGKIGLSLNFSKCELFPACPTKNNVNTISAFTDLAPNLKIVNKSNLNLLGSPIFDESFPSFVEDKIDTFQSKLLNLKQLNTHSAYFIIRHCVFTPNFTYVLRCSPFWKHSGILKNLDNIIRQTLTSILNISLDDRSWTQASLPIRLGGLGIRKISDVALPAFLSSVYSTADLIGNIINPSLSDFEVPYLTEARNAWSLACPNENFPLDPKMQRLWDGPLSKSVYDNLMSSCTGETDRARLLAVSKWESGLWLQCLPSANLGTLLDDTTFRIAACIRLGADIVVPHRCRCGDKVDRLGHHGLSCLRSAGRTSRHAAINDIIRRSLVTVGVPAVLEPNGLCRDDGKRPDGMSLIPWKMGRPLVWDATCVDTLAASHLPNTAVTAGGAAALQETLKRRKYASIGDGYIFVAFGVETLGPWGREAYQLYRDLSRRLKEVSRDQRAGLYLGQRISVAIQRGNAASVLGTLPTDSDLDYIFYL

SEQ ID NO: 17081 - protein, 958 aa, Dendrolimus punctatus
MQKSQTDPSFENLIQCHECTQVRYFKGERGLRVHIGKAHKNRNEVSTSLLNPPSIPDPLSHNSTQIPFWQKISKFKQLAPVVTRIPRGARISVCQIFSQKIRKVINENSLRTWEHLLLLPYHILNISKNEHGNVTSKIKNNCKHIENIEDKFDFSETKTYKHPDKRLGHMIEKKLSVGDIKGAARILFSNDDIAPYDETTLHALEDKHPPSGSTRLQVMPEDSNASNLEVTPENILNAVMSFRSGSAGGLDGLTPQHLKDLLNGGTGNAGELLLKDVTDLINLMLSGCVNKDILPIIYGANLCALKKKDGGIRPIAVGTTYRRLAAKLCCRAIRNRCSSYFAPIQLGFGIKGGCEAAVHSLRSFATTDFCEAILKVDVKNAFNSVDRCALLSEVRKHFPKIYKYVHQCYNENSYLVYQNNLIHSATGCQQGDPLGPAIFSLAIHPIIKQLNSKFNVWYLDDGTLGGDIDTMKKDLNFLIQEFGKIGLSLNFSKCELFPACPTKNNVNTISAFTDLAPNLKIVNKSNLNLLGSPIFDESFPSFVEDKIDTFQSKLLNLKQLNTHSAYFIIRHCVFTPNFTYVLRCSPFWKHSGILKNLDNIIRQTLTSILNISLDDRSWTQASLPIRLGGLGIRKISDVALPAFLSSVYSTADLIGNIINPSLSDFEVPYLTEARNAWSLACPNENFPLDPKMQRLWDGPLSKSVYDNLMSSCTGETDRARLLAVSKWESGLWLQCLPSANLGTLLDDTTFRIAACIRLGADIVVPHRCRCGDKVDRLGHHGLSCLRSAGRTSRHAAINDIIRRSLVTVGVPAVLEPNGLCRDDGKRPDGMSLIPWKMGRPLVWDATCVDTLAASHLPNTAVTAGGAAALQETLKRRKYASIGDGYIFVAFGVETLGPWGREAYQLYRDLSRRLKEVSRDQRAGLYLGQRISVAIQRGNAASVLGTLPTDSDLDYIFYL

SEQ ID NO: 17082 - protein, 958 aa, Dendrolimus kikuchii
MQKSQTDSSLENLIQCHKCTQVRFFKGQRGLRVHIGKAHKNRNEVSTSLLNPPPIPDPLSHNLTQIPFWQKISKFKQLAPVVKRIPRGARISVCQIFSEKIRKVINENSLRTWEHLLLLPYQILNISKNEHGNVTSKIKHNCKHIENIEDKFDFSKTKRYKYPNKHLGHMVEKKLSDGDIKGAARILFSNDDIAPNDETTLRALEDKHPPSGSTWLQDMSEALNESNLDVTPESILEAVMSFRSGSAGGLDGLTPQHLKDLLSGGTGNAGELLLKDMTDLINLMLSGCVNNDILPIIYGANLCALKKKDGGIRPIAVGTTYRRLAAKVCCRAIRNRCSSYFTPIQLGFGTKGGCEAAVHSLRSFATTDSCEVILKVDVKNAFNSVNRCTLLSEVKKHFPKIYKFVHQCYNENSYLVYQNNLIHSATGCQQGDPLGPAIFSLAIHPIIKQLNSKFNVWYLDDGTLGGNIDAVKKDLNFLIEEFGKIGLSLNFSKCELFLACSTKNNISTISAFTDLAPNLKIVNKNNLNLLGSPVFDESFSSFVEDKIVNFQSKLSNLKQLNTHSAYFIIRHCVFTPNFTYVLRCSPLWRHSSILNNLDNIIRQTLTSILNISLDDRSWTQASLPIRLGGLGIRKISDVALPAFLSSVHSTVDLIGNIINPSLSDFEVPYLTEARNAWSLACPNENFPLDPKMQRLWDGPLSKSVYDNLMSSCTGETDRARLLAVSNWESGLWLQSLPSANLGTLLDDTTFRIAACIRLGADIVVPHRCRCGDKVDRLGHHGLSCLRSAGRTSRHAAINDIIRRSLVTVGVPAVLEPNGLCRDDGKRPDGMSLVPWKMGRPLVWDATCVDTLAASHLPNTAVTAGGAATLQETLKRRKYASIGDGYIFVAFGVETLGPWGREAHQLYRDLSRRLKEVSRDQRAGLYLGQRISVAIQRGNAASILGTLPTESDLDYIFYL

SEQ ID NO: 17083 - protein, 957 aa, Dendrolimus kikuchii
MQQPQPESSFENLIQCHECSQVRYFKGQRGLRIHIGKAHKDREEHSASLPSTQTVVDDSTPDNTQIPLWQKLSKLKQSTPILKRIPRAVRTTVCEIFSKHIKKVLIENNLRTWEDLLLLPYQIFNINKEDHGNITSKIKKNCKIIQTIGNRLDINKPKKYQNSKTRRRHFVESKLSDGDIKGAARILFSNDDVAPNDETTLRALQDKHPPSENAQLLDDDDGNVGSIHATPEEILRAVMSFRSGSAGGLDGLSPQHLKDLLTGATGNAGGTLLRDITDLINLMLSGNVNKNILPILYGANLFALKKKDGGIRPIAVGTTYRRLAAKVCCRDIRDLSSRYFAPNQLGFGIKGGCEAAVHALRTFVTSNACEAILKVDVKNAFNSVNRCTLLAEIKNHFPKIYNYIRQCYGENSFLVYQENLIHSATGCQQGDPLGPAIFSLAIHPIIQKLNSKFNVWYLDDGTLGGDIDTLKNDLKYLISEFSKIGLVLNYSKCELFIANSTVNVSNTISDFQDLASNLKLVKKDTLTLLGSPIFDESFPSFVDDKIQNFHSKIVNLKEISAHSAYFLIRYCLFTPNFTYVLRCSPLWRHPTILYNLDNIIRQTLTSIINIPLEDRSWTQASLPIRLGGLGIRKISDTALPAFLSSVYSTVDLIGKILIPSLSGFEVPYLTEARNAWSLACPMQNLPAEPKSQKLWDGPLSKLVHENLLTSCIGETERARLLAVSKWESGLWLQALPSANLGTLLDDTTFRIAVCIRLGASVVVPHRCRCGDRVDKLGHHGLSCVRSAGRISRHATLNDIIRRSLVTAGAPAVLEPNGLCRDDGKRPDGMSLVPWKMGRPLVWDATCVDTLAASHLPVTTVTAGAAAANQEALKRRKYGSISNGYIFVAFGVETLGPWGPGAHHLYRDLTTRLIEVSRDQKAGLHLGQRISVAIQRGNAASILGTLPADSDLESIFYL

SEQ ID NO: 17084 - protein, 952 aa, Dendrolimus kikuchii
MSQSQPDTVSLENLIQCHKCPGSRFFKGHRGLKIHLGKTHKETNLSHSLPIIQTDPDTNLKTQLPLCQYLSNLKNSVPLIKRIPRGARITVCQTFSKLIKNVILNNNLQAWENLLLLPYNIFQIDDKSGNLTSKVKNRCISVPEPKALRNYNNTQDRKDSLSRLRRFVESKISDGDIKGAAQILFSSDTVAPNNETTLDALIDKHPPSRTVPSRKTQDENLVTEPRAVLQSVMSFRGGSAGGLDGLTPQHLKDLLSGSTGGAGETLLKDLTDLMNLMLSGSVASEVVPTLYGANLCALVKKDGGIRPIAIGTVYRRLAAKICCRQIIDTCSTYFAPTQLGFGSKGGCEAAVHALRTFITRNCCEAVLKVDVKNAFNSVDRDTLLTRVYEKFPKIYNFTSQCYNKITNLMYQGAQINSATGCQQGDPLGPALFSLAIHPIIDKLNSKFNVWYLDDGTLGGDIETIKNDFQFLLEEFAKIGLVLNLSKCEIYISNKLNNIDNIKSELQSLGLNFKIVNQSNLTLLGCPIFDDSFASFVDSKIQNFLSKTANLKNINIHCAYFIIRHCLFVPNFTYVLRCCPLWQYPHLVNNLDNTIRQSLSSLFNIPFDERSWTQATLPIRLGGLGIRKISDIALPAFLASVYSTLDLIGKILNPSLSDFEVPCLAEAKNAWSLACPNQNLPVNLKRQKLWDEPLSLITYQKLFSSCTGQAERARLLAVSRWESGLWLQALPSANLGTLLEDTTFRICASIRLGATCVVPHLCQCGDKVDRLGHHGLSCSRSAGRISRHAALNDIIRRALVTAGVPAVLEPNGLCRDDGRRPDGMTLVPWKMGRPLVWDATCVDTLAASRLSSTSVTAGSAAAEQEALKRRKYAAIGNSYTFAAFGVETLGPWGPNALKLYRDVAERLVDLSRDQKAGVYFAQRVSIAIQRGNAASLLGTFPVSDSGLGPIFYL

SEQ ID NO: 17085 - protein, 957 aa, Dendrolimus kikuchii
MQQPQPESSFENLIQCHECSQVRYFKGQRGLRIHIGKAHKDREEHSASLPSTQTVVDDSTPDNTQIPLWQKLSKLKQSTPILKRIPRAVRTTVCEIFSKHIKKVLIENNLRTWEDLLLLPYQIFNINKEDHGNITSKIKKNCKIIQTIGNRLDINKPKKYQNSKTRRRHFVESKLSDGDIKGAARILFSNDDVAPNDETTLRALQDKHPPSENAQLLDDDDGNMGSIHATPEEILRAVMSFRSGSAGGLDGLSPQHLKDLLTGATGNAGGTLLRDITDLINLMLSGNVNKNILPILYGANLFALKKKDGGIRPIAVGTTYRRLAAKVCCRDIRDLSSRYFAPNQLGFGIKGGCEAAVHALRTFVTSNACEAILKVDVKNAFNSVNRCTLLAEIKNHFPKIYNYIRQCYGENSFLVYQENLIHSATGCQQGDPLGPAIFSLAIHPIIQKLNSKFNVWYLDDGTLGGDIDTLKNDLKYLISEFSKIGLVLNYSKCELFIANSTVNDSNTISDFQDLASNLKLVKKDTLTLLGSPIFDESFPSFVDDKIQNFHSKIVNLKEISAHSAYFLIRYCLFTPNFTYVLRCSPLWRHPTILYNLDNIIRQTLTSIINIPLEDRSWTQASLPIRLGGLGIRKISDTALPAFLSSVYSTVDLIGKILIPSLSGFEVPYLTEARNAWSLACPMQNLPAEPKSQKLWDGPLSKLVHENLLTSCIGETERARLLAVSKWESGLWLQALPSANLGTLLDDTTFRIAVCIRLGASVVVPHRCRCGDRVDKLGHHGLSCVRSAGRISRHATLNDIIRRSLVTAGAPAVLEPNGLCRDDGKRPDGMSLVPWKMGRPLVWDATCVDTLAASHLPVTTVTAGAAAANQEALKRRKYGSISNGYIFVAFGVETLGPWGPGAHHLYRDLTTRLIEVSRDQKAGLHLGQRISVAIQRGNAASILGTLPADSDLESIFYL

SEQ ID NO: 17086 - protein, 958 aa, Dendrolimus punctatus
MQQLQPDSSFENLVQCHECSQVRYFKGQRGLRIHIGKAHKDRDGHSASLPNPQPVFDSLSDSTQIPFWQRISKLKHSAPILKRIPRAVRSSICEIFSKYIKKVLAENTVHTWEDLLLLPYQILNINKDDQGTVTSKIRKNCKIIQTIGQRLDTQINQTKKYPNRKTHLKNFIESKLSDGDIKGAARILFSNDDVAPNDETTLRALRDKHPPSGIAQLLDDDHTNNSSIYTTPEEILRAVMSFRSGSAGGLDGLAPQHLKDLLSGATGTSGVTLLRDITDLINLMLSGSVNMDILPIIYGANLCALKKKDGGIRPIAVGTTYRRLAAKICCRAIKDLSSSYFPPNQLGFGTKGGCEAAVHALRTFVGSNVCEAILKVDVKNAFNSVNRCTLLTEIKNRFPKIYNYIRQCYSENSFLVYQDNLIYSATGCQQGDPLGPAIFSLAIHPIIQKLNSKFNVWYLDDGTLGGDIDTLKNDLKYLISEFGKIGLTLNYSKCELFIHNATENDNNTISDFQVLAPSLRLAKKDNLSLLGSPIFDESFPYFVDDKVQNFQSKIKNLKEISAHSAYFIIRHCLFTPNFTYILRCSPLWRHPNILYKLDNIIRQTLTSIINIPLEDRSWTQASLPIRLGGLGVRKISDIALPAFLSSVYSTVALIGQILSPSLSGFEVPYLTEARNAWSLACPTQNLPAEPKSQKLWDGPLSKLIQENLLSSCIGETDRARLLAVSKWESGLWLQALPSANLGTLLDDTTFRIAACIRLGAGVVVPHRCRCGDRVDELGHHGLSCARSAGRMSRHATLNDIIRRSLATAGAPAVLEPNGLCRDDGRRPDGMSLVPWKMGRPLVWDATCVDTLAASHLTDTAVTAGAAAAHQEALKCRKYVSIGSGYVFVAFGVETLGPWGPGAHHLYRDLSRRLIEVSRDQKAGLYLGQRISVAIQRGNAASILGTLPAHSDMESIYYL

SEQ ID NO: 17087 - protein, 952 aa, Dendrolimus kikuchii
MSQSQPDTVSLENLIQCHKCPGSRFFKGHRGLKIHLGKTHKETNLSHSLPIIQTDLDTNLKTQLPLCQYLSNLKNSVPLIKRIPRGARITVCQTFSKLIKNVILNNNLEAWENLLLLPYNIFQIDDKSGNLTSKVKNRCISVPEPKALRNYNNTQNRKDSLSRLRRFVEFKISDGDIKGAAQILFSSDTVAPNNETTLDALIDKHPPSRTVPSRKTQDENLVTEPRAVLQSVMSFRGGSAGGLDGLTPQHLKDLLSGSTGGAGETLLKDLTDLMNLMLSGSVASEVVPTLYGANLCALVKKDGGIRPIAIGTVYRRLAAKICCRQIIDTCSTYFAPTQLGFGSKGGCEAAVHALRTFITRNCCEAVLKVDVKNAFNSVDRDTLLTRVYEKFPKIYNFTSQCYNKITNLMYQGTQINSATGCQQGDPLGPALFSLAIHPIIDKLNSKFNVWYLDDGTLGGDIETIKNDFQFLLEEFAKIGLVLNLSKCEIYISNKLNNIDNIKSELQSLGLNFKIVNQSNLTLLGCPIFDDSFASFVDSKIQNFLSKTANLKNINIHCAYFIIRHCLFVPNFTYVLRCCPLWQYPHLVNNLDNTIRQSLSSLFNIPFDERSWTQATLPIRLGGLGIRKISDIALPAFLASVYSTLDLIGKILNPSLSDFEVPCLAEAKNAWSLACPNQNLPVNLKRQKLWDEPLSLITYQKLFSSCTGQAERARLLAVSRWESGLWLQALPSANLGTLLEDTTFRICASIRLGATCVVPHLCQCGDKVDRLGHHGLSCSRSAGRISRHAALNDIIRRALVTAGVPAVLEPNGLCRDDGRRPDGMTLVPWKMGRPLVWDATCVDTLAASRLSSTSVTAGSAAAEQEALKRRKYAAIGNSYTFAAFGVETLGPWGPNALKLYRDVAERLVDLSRDQKAGVYFAQRVSIAIQRGNAASLLGTFPVSDSGLGPIFYL

SEQ ID NO: 17088 - protein, 958 aa, Dendrolimus kikuchii
MQKSQTDSSLENLIQCHECTQVRFFKGQRGLRVHIGKAHKNRNEVSTSLLNPPPIPDPLSHNLTQIPFWQKISKFKQLTPVVKRIPRGARISVCQIFSDKIRKVINENSLRTWEHLLVLPYQILNISKNEHGNVTSKIKHNCKHIENIEDKFDFSKTKRYKYPNKHLGHMVEKKLSDGDIKGAARILFSNDDIAPNDETTLRALEDKHPPSGSTWLQDMSEALNESNLDVTPESILEAVMSFRSGSAGGLDGLTPQHLKDLLSGGTGNAGELLLKDMTDLINLMLSGCVNNDILPIIYGANLCALKKKDGGIRPIAVGTTYRRLAAKVCCRAIRNRCSSYFTPIQLGFGTKGGCEAAVHSLRSFATTDSCEVILKVDVKNAFNSVNRCTLLSEVKKHFPKIYKFVHQCYNENSYLVYQNNLIHSATGCQQGDPLGPAIFSLAIHPIIKQLNSKFNVWYLDDGTLGGNIDAVKKDLNFLIEEFGKIGLSLNFSKCELFLACSTKNNISTISAFTDLAPNLKIVNKNNLNLLGSPVFDESFSSFVEDKIVNFQSKLSNLKQLNTHSAYFIIRHCVFTPNFTYVLRCSPLWRHSSILNNLDNIIRQTLTSILNISLDDRSWTQASLPIRLGGLGIRKISDVALPAFLSSVHSTVDLIGNIINPSLSDFEVPYLTEARNAWSLACPNENFPLDPKMQRLWDGPLSKSVYDNLMSSCTGETDRARLLAVSNWESGLWLQSLPSANLGTLLDDTTFRIAACIRLGADIVVPHRCRCGDKVDRLGHHGLSCLRSAGRTSRHAAINDIIRRSLVTVGVPAVLEPNGLCRDDGKRPDGMSLVPWKMGRPLVWDATCVDTLAASHLPNTAVTAGGAATLQETLKRRKYASIGDGYIFVAFGVETLGPWGREAHQLYRDLSRRLKEVSRDQRAGLYLGQRISVAIQRGNAASILGTLPTESDLDYIFYL

SEQ ID NO: 17089 - protein, 952 aa, Dendrolimus kikuchii
MSQSQPDTVSLENLIQCHKCPGSRFFKGHRGLKIHLGKTHKETNLSHSLPIIQTDPDTNLKTQLPLCQYLSNLKNSVPLIKRIPRGARITVCQTFSKLIKNVILNNNLQAWENLLLLPYNIFQIDDKSGNLTSKVKNRCISVPEPKALRNYNNTQDRKDSLSRLRRFVESKISDGDIKGAAQILFSNDTVAPNNETTLDALIDKHPPSRTVPSRKTQDENLVTEPRAVLQSVMSFRGGSAGGLDGLTPQHLKDLLSGSTGGAGETLLKDLTDLMNLMLSGSVASEVVPTLYGANLCALVKKDGGIRPIAIGTVYRRLAAKICCRQIIDTCSTYFAPTQLGFGSKGGCEAAVHALRTFITRNCCEAVLKVDVKNAFNSVDRDTLLTRVYEKFPKIYNFTSQCYNKITNLMYQGAQINSATGCQQGDPLGPALFSLAIHPIIDKLNSKFNVWYLDDGTLGGDIETIKNDFQFLLEEFAKIGLVLNLSKCEIYISNKLNNIDNIKSELQSLGLNFKIVNQSNLTLLGCPIFDDSFASFVDSKIQNFLSKTANLKNINIHCAYFIIRHCLFVPNFTYVLRCCPLWQYPHLVNNLDNTIRQSLSSLFNIPFDERSWTQATLPIRLGGLGIRKISDIALPAFLASVYSTLDLIGKILNPSLSDFEVPCLAEAKNAWSLACPNQNLPVNLKRQKLWDEPLSLITYQKLFSSCTGQAERARLLAVSRWESGLWLQALPSANLGTLLEDTTFRICASIRLGATCVVPHLCQCGDKVDRLGHHGLSCSRSAGRISRHAALNDIIRRALVTAGVPAVLEPNGLCRDDGRRPDGMTLVPWKMGRPLVWDATCVDTLAASRLSSTSVTAGSAAAEQEALKRRKYAAIGNSYTFAAFGVETLGPWGPNALKLYRDVAERLVDLSRDQKAGVYFAQRVSIAIQRGNAASLLGTFPVSDSGLGPIFYL

SEQ ID NO: 17090 - protein, 719 aa, Dendrolimus kikuchii
MSFRSGSAGGLDGLTPQHLKDLLGGSTGTAGETLLKDITDLINLMLSGAVNNDVVPTLYGANLCALNKKDGGIRPIAVGTTYRRLAAKICCREIADLSSSYFATRQLGFGVKGGCEAAVHSLRTFASRDCCQALLKVDVKNAFNSVNRATLLAQVRDKSPRIFNFIHQCYCDKSILMYQNHKVFSETGCQQGDPLGPAIFSLAIHPIIEKLNSKFNVWYLDDGTLGGDIDTLKKDIQYLIYEFDKIGLELNYSKCEIYFSDKVPNIHNIISDFQSLGLNFKIVDKNSLSLLGCPVFEESFSTFVSNKIQNFQSKIENLKSISLHSAYYIIRYCIFTPNFIYILRCCPIWQNQNILKTLDNVIRYSLSSIFNIPFDDRTWTQASLPIRYGGLGIRKISAVSLPAFLSSVYSTKDLIGEILNPSLGDFEVLYLTEARNAWSVVCPYQNLPINLKSQKLWDGPLCSLVHKNLLDTCAHETERARLLAVSRWESGLWLQALPSANLGTFLDDNAFRISACIRLGAACVVPHRCQCGDKVERLGHHGLSCSRSAGRISRHATLNDIIRRALVTAGVPAVLEPNGLCRDDGRRPDGMSLVPWKMGRPLVWDASCVDTLAASHLPATSMSAGTAAAQQEALKRRKYSAIGNGYIFAAFGVETLGPWGPEAHKLYRDIVKRLVDVSRDQKTGLYLAQRISIAIQRGNVASLLGTFPTESGLELDFIL

SEQ ID NO: 17091 - protein, 952 aa, Dendrolimus punctatus
MSQPQPDTVSLENLIQCHKCPEPRFFKGHRGLKIHLGKSHKESNLSNSLPVIQIDPDTNFKTPLPLCQYLSNLKNAVPLIKRIPRGARISVCQIFSKLIKNVLINNNLQAWENLLLLPYSIFQIDDTSGNLTSKVKKRCISLPEPKTLQNFNHTQNRKDSSSRLRRFVESKISDGDIKGAAQILFSSDTVAPNNETTLDALIDKHPPSSTVSSREAQNENLVTEPRAVLQSVMSFRGGSAGGLDGLTPQHLKDLLSGSTGEAGETLLKDLTDLMNLMLSGSVTSEVVPTLYGANLCALVKKDGGIRPIAIGTVYRRLAAKICCRQIIDTCSTYFAPTQLGFGSKGGCEAAVHALRTFVTRNCCEAVLKVDVKNAFNSVNRDTLLTRVYEKFPQIYNFTSQCYNKATNLMYQGTQIISATGCQQGDPLGPALFSLAIHPIIDKLNSKFNVWYLDDGTLGGDIETIKNDFQFLLEEFSKIGLVLNLSKCEIYISNKFNNIEKIKSEFQNINLNFKIVNQSNLTLLGCPIFDESFTSFVDSKIQNFLSKTANLKNINIHCAYFIIRHCLFVPNFTYTLRCCPLWKHPHLVNNLDNIIRQSLSSLFNIPFDDRSWAQATLPIRLGGLGIRKISDIALPAFLASAYSTMDLIGKILNPSLSDFEVPCLVEAKNAWSLACPSQNLPANLKLQKLWDEPLSLIAYQKLLSSCIGQAERARLLAVSRWESGLWLHALPSANLGTLLDDSTFRMCASIRLGATCVVPQLCQCGDKVDRLGHHGLSCSRSAGRISRHAALNDIIRRALVTAGVPAVLEPNGLCRDDGRRPDGMTLIPWKMGRPLVWDATCVDTLAASHLSSTSTTAGSAAAEQETLKRRKYAAIGNCYTFAAFGVETLGPWGPSALKLYRDVAERLIDLSRDQKAGVYFAQRISMAIQRGNAASLLGTFPVSDSGLGPIFYL

SEQ ID NO: 17092 - protein, 958 aa, Dendrolimus punctatus
MQKSQTDPSFENLIQCHECTQVRYFKGQRGLRVHIGKAHKNRNEVSTSLLNPPSIPDPLSHNSTQIPFWQKISKFKQLAPVVKRIPRGARISVCQIFSQKIRKVINENSLRTWEHLLLLPYHILNISKNEHGNVTSKIKNNCKHIENIEDKFDFSETKTYKHPDKRLGHMIEKKLSDGDIKGAARILFSNDDIAPYDETTLHALEDKHPPSGNTRLQVMPEDSNASNLEVTPESILNAVMSFRSGSAGGLDGLTPQHLKDLLNGGTGNAGELLLKDVTDLINLMLSGCVNKDILPIIYGANLCALKKKDGGIRPIAVGTTYRRLAAKLCCRAIRNRCSSYFAPIQLGFGIKGGCEAAVHSLRSFATTDFCEAILKVDVKNAFNSVDRCALLSEVRKHFPKIYKYVHQCYNENSYLVYQNNLIHSATGCQQGDPLGPAIFSLAIHPIIKQLNSKFNVWYLDDGTLGGDIDTMKKDLNFLIQEFGKIGLSLNFSKCELFPACPTKNNVNTISAFTDLAPNLKIVNKSNLNLLGSPIFDESFPSFVEDKIDTFQSKLLNLKQLNTHSAYFIIRHCVFTPNFTYVLRCSPFWKHSGILKNLDNIIRQTLTSILNISLDDRSWTQASLPIRLGGLGIRKISDVALPAFLSSVYSTADLIGNIINPSLSDFEVPYLTEARNAWSLACPNENFPLDPKMQRLWDGPLSKSVYDNLMSSCTGETDRARLLAVSKWESGLWLQCLPSANLGTLLDDTTFRIAACIRLGADIVVPHRCRCGDKVDRLGHHGLSCLRSAGRTSRHAAINDIIRRSLVTVGVPAVLEPNGLCRDDGKRPDGMSLIPWKMGRPLVWDATCVDTLAASHLPNTAVTAGGAAALQETLKRRKYASIGDGYIFVAFGVETLGPWGREAYQLYRDLSRRLKEVSRDQRAGLYLGQRISVAIQRGNAASVLGTLPTDSDLDYIFYL

SEQ ID NO: 17093 - protein, 952 aa, Dendrolimus punctatus
MFQSQPATVSLENLFQCHKCPDSRYFKGQRGLKIHLGKAHKEAKLPNSLPAIQPDLSSNLTTPLSLCQSLSNLKNSVPLIKRIPRGARISACQIFSKLIRNVISYNNLQAWKELLILPYKIFEIDHKSGNLTSKIKKRCISVPEPTAQRNYNNTRDSKSSSSQLRRVVESKISDGDIKGAAQILFSSDTVAPNNETTLDALIDKHPPSSTVPSKKSQVENLVTEPRAVLQSVMSFKGGSAGGLDGLTPQHLKDLLGGSTGVAGETLLKDLTDLMNLMLSGSVTSEVVPTLFGANLFALVKKDGGIRPIAIGTVYRRLAAKICCRQIIDSCSTYFAPTQLGFGSKGGCEAAVHALRTFISSDCCEAVLKVDVKNAFNSVDRDTLLTQVHEKFPQIYNFTSECYNKGTNLIYQGRQIISATGCQQGDPLGPALFSLAIHPIIKKLNSKFNAWYLDDGTLGGDIQTIKTDIQFLIEEFGKIGLTLNFSKCEIYLSNKLNNTDSIISEFQSLGLNFKIVNESNLTLLGCPIFDDSFTSFVDSKIQNFLSKIANLKNISIHCAYFIIRHCLFVPNFTYVLRCCPLWQHSHILTNLDNIIRQSLSSLFNIPFDDRSWTQAALPIRHGGLGIRKIFDVALPAFLASVYSTMDLIGNLLNPSLRDFEVPCLAEAKNAWSLACPNQNFPVNIKRQKLWDEPLSLITYQKLFSSCNGEAERARLLAVSRWESGLWLQALPSANLGTLLDDATFRICASIRLGAACVVPHLCHCGDRVGRLGHHGLSCSRSAGRTSRHAALNDIIRRALVTAGVPSILEPIGLFRDDGKRPDGMTLIPWKMGRPLVWDATCVDTLAASHLSGTCTTAGSAAAEQEALKRRKYATIGNGFIFAAFGVETLGPWGPSALKIYRDVAKRLVDVTRDQKAGVYFAQRLGIAIQRGNAASLLGKFQVHDSGLGPLINV

SEQ ID NO: 17094 - protein, 958 aa, Dendrolimus kikuchii
MQKSQTDSSLENLIQCHECTQVRFFKGQRGLRVHIGKAHKNRNEVSTSLLNPPPIPDPLSHNLTQIPFWQKISKFKQLAPVVKRIPRGARISVCQIFSEKIRKVINENSLRTWEHLLLLPYQILNISKNEHGNVTSKIKHNCKHIENIEDKFDFSKTKRYKYPNKHLGHMVEKKLSDGDIKGAARILFSNDDIAPNDETTLRALEDKHPPSGSTWLQDMSEALNESNLDVTPESILEAVMSFRSGSAGGLDGLTPQHLKDLLSGGTGNAGELLLKDMTDLINLMLSGCVNNDILPIIYGANLCALKKKDGGIRPIAVGTTYRRLAAKVCCRAIRNRCSSYFTPIQLGFGTKGGCEAAVHSLRSFATTDSCEVILKVDVKNAFNSVNRCTLLSEVKKHFPKIYKFVHQCYNENSYLVYQNNLIHSATGCQQGDPLGPAIFSLAIHPIIKQLNSKFNVWYLDDGTLGGNIDAVKKDLNFLIEEFGKIGLSLNFSKCELFLACSTKNNISTISAFTDLAPNLKIVNKNNLNLLGSPIFDESFSSFVEDKIVNFQSKLSNLKQLNTHSAYFIIRHCVFTPNFTYVLRCSPLWRHSSILNNLDNIIRQTLTSILNISLDDRSWTQASLPIRLGGLGIRKISDVALPAFLSSVHSTVDLIGNIINPSLSDFEVPYLTEARNAWSLACPNENFPLDPKMQRLWDGPLSKSVYDNLMSSCTGETDRARLLAVSNWESGLWLQSLPSANLGTLLDDTTFRIAACIRLGADIVVPHRCRCGDKVDRLGHHGLSCLRSAGRTSRHAAINDIIRRSLVTVGVPAVLEPNGLCRDDGKRPDGMSLVPWKMGRPLVWDATCVDTLAASHLPNTAVTAGGAATLQETLKRRKYASIGDGYIFVAFGVETLGPWGREAHQLYRDLSRRLKEVSRDQRAGLYLGQRISVAIQRGNAASILGTLPTESDLDYIFYL

SEQ ID NO: 17095 - protein, 952 aa, Dendrolimus kikuchii
MSQSQPDTVSLENLIQCHKCPGSRFFKGHRGLKIHLGKTHKETNLSHSLPIIQTDPDTNLKTQLPLCQYLSNLKNSVPLIKRIPRGARITVCQTFSKLIKNVILNNNLQAWENLLLLPYNIFQIDDKSGNLTSKVKNRCISVPEPKALRNYNNTQDRKDSLSRLRRFVESKISDGDIKGAAQILFSSDTVAPNNETTLDALIDKHPPSRTVLSRKTQDENLVTEPRAVLQSVMSFRGGSAGGLDGLTPQHLKDLLSGSTGGAGETLLKDLTDLMNLMLSGSVASEVVPTLYGANLCALVKKDGGIRPIAIGTVYRRLAAKICCRQIINTCSTYFAPTQLGFGSKGGCEAAVHALRTFITRNCCEAVLKVDVKNAFNSVDRDTLLTRVYEKFPKIYNFTSQCYNKITNLMYQGTQINSATGCQQGDPLGPALFSLAIHPIIDKLNSKFNVWYLDDGTLGGDIETIKNDFQFLLEEFAKIGLVLNLSKCEIYISNKLNNIDNIKSELQSLGLNFKIVNQSNLTLLGCPIFDDSFASFVDSKIQNFLSKTANLKNINIHCAYFIIRHCLFVPNFTYVLRCCPLWQYPHLVNNLDNTIRQSLSSLFNIPFDERSWTQATLPIRLGGLGIRKISDIALPAFLASVYSTLDLIGKILNPSLSDFEVPCLAEAKNAWSLACPNQNLPVNLKRQKLWDEPLSLITYQKLFSSCTGQAERARLLAVSRWESGLWLQALPSANLGTLLEDTTFRICASIRLGATCVVPHLCQCGDKVDRLGHHGLSCSRSAGRISRHAALNDIIRRALVTAGVPAVLEPNGLCRDDGRRPDGMTLVPWKMGRPLVWDATCVDTLAASRLSSTSVTAGSAAAEQEALKRRKYAAIGNSYTFAAFGVETLGPWGPNALKLYRDVAERLVDLSRDQKAGVYFAQRVSIAIQRGNAASLLGTFPVSDSGLGPIFYL

SEQ ID NO: 17096 - protein, 952 aa, Dendrolimus punctatus
MSQPQPDTVSLENLIQCHKCPEPRFFKGHRGLKIHLGKSHKESNLSNSLPVIQIDPDTNFKTPLPLCQYLSNLKNAVPLIKRIPRGARISVCQIFSKLIKNVLINNNLQAWENLLLLPYSIFQIDDTSGNLTSKVKKRCISLPEPKTLQNFNHTQNRKDSSSRLRRFVESKISDGDIKGAAQILFSSDTVAPNNETTLDALIDKHPPSSTVPSRETQNENLVTEPRAVLQSVMSFRGGSAGGLDGLTPQHLKDLLSGSTGEAGETLLKDLTDLMNLMLSGSVTSEVVPTLYGANLCALVKKDGGIRPIAIGTVYRRLAAKICCRQIIDTCSTYFAPTQLGFGSKGGCEAAVHALRTFVTRNCCEAVLKVDVKNAFNSVNRDTLLTRVYEKFPQIYNFTSQCYNKATNLMYQGTQIISATGCQQGDPLGPALFSLAIHPIIDKLNSKFNVWYLDDGTLGGDIETIKNDFQFLLEEFSKIGLVLNLSKCEIYISNKFNNIEKIKSEFQNINLNFKIVNQSNLTLLGCPIFDDSFTSFVDSKIQNFLSKTANLKNINIHCAYFIIRHCLFVPNFTYTLRCCPLWKHPHLVNNLNNIIRQSLSSLFNIPFDDRSWAQATLPIRLGGLGIRKISDIALPAFLASAYSTMDLIGKILNPSLSDFEVPCLVEAKNAWSLACPSQNLPANLKLQKLWDEPLSLIAYQKLLSSCIGQAERARLLAVSRWESGLWLHALPSANLGTLLDDSTFRMCASIRLGATCVVPHLCQCGDKVDRLGHHGLSCSRSAGRISRHAALNDIIRRALVTAGVPAVLEPNGLCRDDGRRPDGMTLVPWKMGRPLVWDATCVDTLAASHLSSTSTTAGSAAAEQETLKRRKYAAIGNCYIFAAFGVETLGPWGPSALKLYRDVAERLIDLSRDQKAGVYFAQRISMAIQRGNAASLLGTLPVSDSGLGPIFYL

SEQ ID NO: 17097 - protein, 957 aa, Dendrolimus kikuchii
MTQSQPDVASLENLVQCPKCSQARYFKGNRGLKIHFGKAHREQDVLSSSATSQQPLSTNINLFTLSENLSRLKHSVQIIKRIPRGARISVCQIFSKFIRNTVTLNSLRAWEDLLQLPYKILNIKHNESGNLTTKIKKRCQNLPELDDLRTNSNIRKTDKESTYRLNRFVEAKLSDGDIKGAARILFSNDTIAPNNETTLRALEEKHPHSDAALGSSLVCLEESLVAAPKSVFTSVMSFRSGSAGGLDGLTPQHLKDLLGGSTGTAGETLLKDITDLINLMLSGAVNNDVVPTLYGANLCALNKKDGGIRPIAVGTTYRRLAAKICCREIADLSSSYFATRQLGFGVKGGCEAAVHSLRTFASRDCCQALLKVDVKNAFNSVNRATLLAQVRDKSPRIFNFIHQCYCDKSILMYQNHKVFSETGCQQGDPLGPAIFSLAIHPIIEKLNSKFNVWYLDDGTLGGDIDTLKKDIQYLIYEFDKIGLELNYSKCEIYFSDKVPNIHNIISDFQSLGLNFKIVDKNSLSLLGCPVFEESFSTFVSNKIQNFQSKIENLKSISLHSAYYIIRYCIFTPNFIYILRCCPIWQNQNILKTLDNVIRYSLSSIFNIPFDDRTWTQASLPIRYGGLGIRKISAVSLPAFLSSVYSTKDLIGEILNPSLGDFEVLYLTEARNAWSVVCPYQNLPINLKSQKLWDGPLCSLVHKNLLDTCAHETERARLLAVSRWESGLWLQALPSANLGTFLDDNAFRISACIRLGAACVVPHRCQCGDKVERLGHHGLSCSRSAGRISRHATLNDIIRRALVTAGVPAVLEPNGLCRDDGRRPDGMSLVPWKMGRPLVWDASCVDTLAASHLPATSMSAGTAAAQQEALKRRKYSAIGNGYIFAAFGVETLGPWGPEAHKLYRDIVKRLVDVSRDQKTGLYLAQRISIAIQRGNVASLLGTFPTESGLELDFILFIV

SEQ ID NO: 17098 - protein, 957 aa, Dendrolimus punctatus
MTQPQPESSFENLIQCHECSQARYFKGQRGLRIHIGKVHKDRDEHSSSLPSYETVFDDSTPDNTQIPLWQKLSKLKQSTPILKRIPRAVRTTVCELFSKHIKKVLIENNLRTWEDLLLLPYQIFNINKEDHGNIASKIKKNCKIIQTIGNRLDNSKPKKYQNSKTRLRHFVESKLSDGDIKGAARILFSNDDVAPNDETTLHALQDKHPPSENAQLLDDDDSNVGSIHATTEEIFRAVMSFRSGSAGGLDGLSPQHLKDLLTGATGIAGKTLLSDITDLINLMLSGNVNKIILPILYGANLFALKKKDGGIRPIAVGTTFRRLAAKVCCRAIRDLSSSYFAPNQLGFGIKGGCEAAVHALRTFVTSKSCEAILKVDVKNAFNSVNRCTLLAEIKNHFPKIYNYIRQCYGENSFLVYQENLIHSATGCQQGDPLGPAIFSLAIHPIIQKLNSKFNVWYLDDGTLGGDIDTLKNDLNYLISEFNKIGLVLNYSKCELFIANTTGNDSNIISDFQDLASNLKLVTKDTLSLLGSPIFDESFPSFVDDKIQNFHSKIVNLKEISAHSAYFLIRYCLFTPNFTYVLRSSPLWRHPTILYNLDNIIRQTLTSIINIPLEDRSWTQASLPIRLGGLGIRKISDTALPAFLSSVYSTVDLIGKILIPSLSGFEVPYLTEARNAWSMACPIQNLPVKPKSQKLWDGPLSKLVHENLLTSCIGETERARLLAVSKWESGLWLQALPSANLGTLLDDTTFRIAVCIRLGASVVVPHRCRCGDRVDKLGHHGLSCMRSAGRISRHATLNDIIRRSLVTAGAPAVLEPNGLCRDDGMRPDGMSLVPWKMGRPLVWDATCVDTLAVSHLPVTAVTAGAAAANQEALKRRKYVSIGNGYIFVAFGVETLGPWGPGAHHLYRDLSKRLIEVSRDQKAGLHLGQRISVAIQRGNAASILGTLPAESDLESIFYL

SEQ ID NO: 17099 - protein, 1734 aa, Ceratina japonica
MTSEAGSAVCAAERRPAVWLEGDILVLTYLAAEWPCPICYNPNRALTKGQCIYQGHPDLIKHVRIYHKTVAKKRWVCGECSFSDESAYGIKKLKKHYAETHETSGNGAPGTTAAITTTKTTKGTATTSRVRRGAAVGAVEKRRPPGATRAPTEGAAPGPSTACAIVPPPVGGAPSAAPKPRVISNVRYTRPITIITGTSPASTTAATKRTTPPVAPIFQRGINGVTKTGVYVSTASRSAGRSTPPTSGRAASMGRTSTGPLSAKSAPGSRGTSTTPKTSEPPQPALPQRPRLVSPSTTFAEATRGELPAGAEAQRSACEARATTNITPVAGGSATPTINLCTPPYNHLAVCSASATLTTSTTTTSVCGRPIPSAEISPPHPTPRTSISGGRGGPSSAEAPGSNNTPLPEMPIRVVTRSMARAASEPPRSTPRTTRPKTADGEKRAADEAATSKRRSRAATLPPREMDSGPARRLRAAGGAPNIQAPPRVAATIGERLTPSTSSVPLPIIEESSCEESDTASTSSSTSDWSLDGWTRPATRRQRRSRGGSQQQQQQPQQQQQHPQQLQQQQQQRQQQEQQHQQEHTRRRVSDSCLRVEETDTRATRGRVYIDRGTSPINFNLLRSADESAESGHANPPPVRTGGKPSHCADTGTGLNNAADDNFDERSANRSGQRGVAKGGASGGSRARIGTGRSGRGRVNVPAVPVQRGAGRAPTDRRGRPAAARSSCVQSRGGGAIGAPRKAGAEGNSANRPRGGGSGAASDRGSRVQGSPRPGDVGAERARIVEAADEVETTQQLEDVARSVAAFFLANCSSGPAGRNRAGPKRKGGQPQRRGERNPSEGGSAPLTREEYTREATRIQSLFRTNRKRAVQQVLTGATTSCSIPVDVIQEHFRDLYKRRDRSESLPQLHHELASPETCEALVSAFTSEEVSRRLRRMKNSAPGPDGLIYSDLRGADPKAELLTAIFNACRRMEHIPLVWKESTTVLVYKKGEPAEVSNWRPLALGDVTSKLFAAVLADRLTEWVIKNKRLCSAQKGFLQYEGCLEHNYVLQEALADAKKGKREQVVAWLDLSNAFGSVPHSTILGMLADNGVPGVFVNIVRSMYTDCATRVIAGNGMTDRILMEAGVRQGCPLSPILFDLAIEPIVRAAADTMSGYEVSDQVVTVLAYADDIALIGKNPSTMRGLLTAAEELAGRLGFSFNSRKCATLHISRGGRVQPTAFSIGGSAVPSLEMGQHYDYLGVPVGDRVDQTPYHTIRGMLEDLRAVDLSLLTPWQKVETLRTFILPRLDFILRGGSVRKGPLVEADTLIRKTVKGWLNLPQRASAELVYIPPSQGGCGITPLADLADVATVAHAFRIMNAGDSVVSHIAKSTLAKVVSGKIGRPPSDADLAEYLSGSLEGDFARPARGGSSFWSRVREAARRSGQRLGFRWRWDDGRRELSIEHRSVKGGRVIVPPAAKGQVVRGLRASVSGSYLARLLEKPDQGKVIGATSRHAMSNHFMQGGKFIRFADWRFVHRARLDVLPLNGARRCGTGDQRCRRCGYALESLPHMLGHCGVHSAARQLRHNNIQDRLVKAIRVPGEIRVNKRVEGVEEQYAALRPDIVITNGAAKTVTIIDVAVPFENTFSALESARVAKVLKYQPLADSLKSLGFAVHIDAFIVGSLGAWVPSNESLLSRLRVSSNYSSLMRRLMVSETVAWSRDIYVEHVTGTRQYSVPRGNLPECETHQSGASA

SEQ ID NO: 17100 - protein, 1666 aa, Ceratina japonica
MTSEASSVVCAAEKRPAVWLDGDVLVLTYLAAEWPCPLCYNPNRALSRGQCTYQGHPDLIKHVRIYYKTISKKRWVCGECSFSDESAYGIKKLKKHYAETHETAGSNAPGITAATTKTTKGTATTSRVRRGAASAAVEKRRPPGATRAPAEGAAPGPSTACDIVPPPVGGAPSAAPKPRVISSVRYTRPITIMTGTSPASTTATTKMTTPPVAPIFQRGINGATKTGVCASTASRSAGRSTPPTSGRAASMGRTSTGPLSAKSVPGSRGTFTTPKTSEPPQPALPQRPRLVSSGTTFAEATRGELSAGAEAQRSACEARAVTNTTPVAEGSATPTVNLCTPPYNHLAVCSASATLTTSTTTTSVCGRPIPSAEISPPHPTVRTSVSGGRGGPSSAEAPGSNNTPLPEMVTRVVTRSMARAASEPPRSTPRTTRPKTADGEKRAADEAATSKRRSRAATLPPREMDSGPARRLRARRSRGGSQQQQQQQPQQQQQQRQQLQQQQQQRQQQEQQEHQQQQEHTRRRVSDSFLRVEETNTRAVRGRVYIDRGTSSINFNRFNSADESAESGHANPPPVRTGGKPSHCADTGTGLNNAADDNFDERSASRSGQRGVAKGGASGGSRARIGTGRSGRGPAVLVQRGAGRAPTDRRGRPAATRSSCVQSRGGGAIGAPRKAGAEGNTVNRPRGGGSGAASDRGSRVQGSPRPGDVGAERARIVEAADEVESTQQLEDVARSVAAFFLANCSSGPAGRNRAGPKRKGGQPQRRGERNPSEGGSAPLTREEYTREATRIQSLFRTNRKRAVQQVLTGATTSCSIPVDVIQEHFRDLYKRRDRSESLPQLHHELASPETCEALVSAFTSEEVSRRLRRMKNSAPGPDGLIYSDLRGADPKAELLTAIFNACRRMEHIPLVWKESTTVLVYKKGEPAEVSNWRPLALGDVTSKLFAAVLADRLTEWVIKNKRLCSAQKGFLQYEGCLEHNYVLQEALADAKKGKREQVVAWLDLSNAFGSVPHSTILGMLADNGVPGVFVNIVRSMYTDCATRVIAGNGMTDRILMEAGVRQGCPLSPILFDLAIEPIVRAAADTMSGYEVSDQVVTVLAYADDIALISRNPSTMRGLLTAAEELAGRLGFSFNSRKCATLHISRGGGGQPTAFSIGGSAVPSLEMGQHYDYLGVPVGDRVDQTPYHTIRGMLEDLRAVDLSLLTPWQKVETLRTFILPRLDFILRGGSVRKGPLVEADTLIRKTVKGWLNLPQRASAELVYIPPSQGGCGITPLADLADVATVAHAFRIMNAGDSVVSHIAKSTLAKVVSGKIGRPPSDADLAEYLSGSLEGDFARPARGGSSFWSRVREAARRSGQRLGFRWRWDDGRRELSIEHRSVKGGRVIVPPAAKGQVVRGLRASVSGSYLARLLEKPDQGKVIGATSRHAMSNHFMQGGKFIRFADWRFVHRARLDVLPLNGARRWGTGDQRCRRCGYALESLPHVLGHCGVHSAARQLRHNNIQDRLVKAIRAPGEIRVNKRVEGVGEQYAALRPDIVITNGAAKTVTIIDVAVPFENTFNALESARVAKVLKYQPLADSLKSLGFAVHVDAFIVGSLGAWDPSNEPLLSRLRVSSNYSSLMRRLMVSETVAWSRDIYVEHVTGTRQYSVPRGNLPECETHLSGASA

SEQ ID NO: 17101 - protein, 1750 aa, Ceratina japonica
MTNEACSAEPAADPRPAEFADNILLLKFPLVSEWPCPTCYKPGTNMTKGVGSYRKHEDLVKHVKLKHPAVNKKTWLCSKCPFTDNSVYALKVVKRHFEESHGTSGAINTKKTGTSRKTATATAKGTATTSRGSQGAVSGINQAEKRISSPVATRATAEGAAPGNATARVPALPLNGGVPPAAPKPRIISNVRVTRTITVVTRTSPAFTAAAPARKKTMTPPAPIFQKGFGASTTRAGVGASSSAGKKSPLKSGGAASMGRTAAGPLSADKPGSRRPSIRTPDICEPPQPVPPQRSRKATPTTTYAEAARGELPAAMAEAQRSAHEARASVITPVAGGVTPIINLCTPPPTTIAVCSASATLTTSTTTTSVCGRPIPSAEVSPPHITSPWSGGRGGHDNAGATNSNKINSREELQIPLGRVITRSMARAASEPPRSTPRTTRPKTAGGEKRTADEAATSKRRTRASTLPPREMDSGPAMRLRAAGGAPNIQAPPRVAATSGERQTPSSPTAPLPIIEESSCEDSDAASTSSSASDVSLDGWTRAATLRRQRRSQRSSQQQQQQPLQQQQQQQQQQQQQQQQQQQQQRQQQHHQLQQQQQQQHHQQEERRGRTPASRVEDAGVVATRGYDSNNNNNNNNNKTFCDRGTSPINFSASESTDSGRALPPPVRTGGEDSLHMNDNRGLNNATGDTIDKRNANRGQRGVARGGAPGGSRSRTRNSKSGQGRGHMNRPAVPVQRGNGRASMKRRGASTTNISSRGAKGIGSGNRIMDDQGSTGAHPGQSGAVSDRGSRACGSPCPEDVGTERARIVEAAELVDTPERLEDLARLVAIFFQSRCSGRTPRSGRSGPGGRRRKERSEESNSTGGVLAPITREEYTREATRIQGLFRTNRKRAVNQVLTGANRTCSIPVDTIQEHFSTLYKRRDSTESLPQLRHELASPDTSEALVSAFTRDEVSRRLRRMKNSASGPDGLMYSDLRGADPSAEVLTAIFNACRRTEHIPRAWKESNTVLVYKKGDPAEVSNWRPLALGDVAPKLFAAVLADRLTDWVVKNQRLSSAQKGFLQYEGCLEHNFVLQEALADARKRRREQVVAWLDLTNAFGSVPHATILGVLESNGVPGAFVNIVRNLYVDCGTRVVVGNGTTERILMEAGVRQGCPLSPILFNLAIEPIVRAAADTMAGCEVSDQVVTVLAYADDLAFLTKDPSAMRGLLSAAEELAGRLGFAFNPRKCATLHISRGGRVQPTAFSIGGSAVPSLEMGQHYDYLGVPVGDHVDQTPYATIRGMLEDLRAVDRSLLTPWQKIETLRMFILPRLDFILRGGHVRKGPLAEADALIRKTVKGWLYLPQRASAELVYIPPSRGGCGIIPLADLADVSTVAHAFRMLNAGDSVVSHIARSTLEKAVYGKIRRAPSDGDIADYLSGSLEGDFGRASSSGGTFWSRVREAARRSGKRLGFRWRWDDGRQELSVEHLSIKGGRVIVPPAAKGQVVRGLRASVSGSYLARLLEKPDQGKVIGATSRHAMSNHFMQGGKFIRFADWRFVHRARLDVLPLNGARRWGSDDQRCRRCGYALESLPHVLGHCGIHSAARQLRHNNIQDRLVKAIRVPGDIRVNRRVEGVGGELASLRPDIVITNGIAKTVTIIDVAVPFENSFNALESARVAKILKYQPLADSLTSAGFKVHVDAFIVGSLGAWDPNNEALLSRLRVSSGYSDLMRRLMVSETVAWSRDIYVEHVTGTRQYAPRTEDPPSVSP

SEQ ID NO: 17102 - protein, 1813 aa, Trypanosoma vivax
MVREGSARGRTGPAAPKHGPQNGVRADARWHGALGVPGRMVDGSVIAEIVEAATRAVMQRMFDGAGQQVCGDGRRNYVSPQKASTPSFVRPMPGAFSGPANAQGQSSNTQGRDNRPLSGTKVKWTSNNQQKHVQQQQQQQQHKVTWAAVVAQKAPPQQRHRPVPWTPVSAARRDAQTPRRADPQVRVSEGNGAQARREQGPRTPAAQQGKGHRGTKAEEVTKGHAATAASVAHAQKTPPPFAEDEVDLALSRNIAQLLYQAECEKIEVAQRAINVKTRWWNTMAHGRDLHHCPACAFAHKQEDAVLRHCREQHAAEGKLYPYTLACAHGVQQCGPSCALASVLAVVSHFPEEATFSRELRDTYAAPSRAATAHIVEACGLQLPVGPATALEEVVAREPVLRELFQDRHVAIRKCAVCGAAEVLHGEGGNLQTVSGGMVALLPPQRAPVHLDADAVMACVKSTQVDHTVSCTGRAKGRQHAPAPVATEQSRVFSEAVAVEIGMWGDDPVGVDQIPMELVLPHENGSATFGIAGVVAATSRTHVAAFVPGASQHGAWDMYDGMVHRVVPNGPEPKTVVLLIYRRRRDEDADMDGGECSAGFDDANEECAPEGAGAEEDLKHTQKRPRDALAQAMPPEMPRDKRGRRAFGSKRKRTRGTPNATGSDMDEEDGETSMVELLRLVGEHLAQTHDGDETASLPHDPPASAENEEAAPQSEAGAEVDASTPNGDETASLPHDPPASAENEEAAPQSEAVAEVDASTPNGDETASLPHDPPASAENEEAAPQSVAMAEVRAMETGVQEAASETQDAVAETGSWSHVDQRLMPAVVRCPVANCDAEFEGFRRSEGIKSHMNGRHTEADRRSLTNEAMIPQGLVRCEVCGHVHGASVRARRAHVSACGDYVPRKAAMARARDNYRHETETSSAMQAAVQPEQEPVRTLPRAMREVCVGQGGENDPTTDPWMQERVGTKRYLHKKEWAAWLEVCRPAFLGYGASSQAERCRRQLVIMDLVRTHLAMGRGEAQRRRDAVAGQAARAAGARNGIPQDEGAQDEGVQDEDAQARRTAARVEMLCMLNAAGRAARMLTRDGEDLVRSSAAEVVREVDGLYPQEDVSTFPQPPLPVTVVGVEKDEVSRAIRRRLTRGAAPGLDGWTRELLYPLTQDSALLMEVTVLTADILNGNVSEQMAHRLRATALTILRKPNGKYRPIGAESVWAKLASMVAFDRVVEASRRIFAGVQFGVGGQIELAIARVRKDFEEKGSVATLDGSNAYNAISRQKVLEALFGFEELRPAWSVVQLLLGVPGVVGLYDGGRLVHAWASTRGVRQGMVLGPLLFSLGTIAALRRLQAELPHASFVAYLDDVTVAAAPEHLEAACGAAAQAMEELGIKNNAAKMEVLDPTCLSGFGDARRLTCARVLGAFVECDAAHEAEVTEAVDKRARETERLFRAILECPLAARTRWRLLSASALPRLTFLLRNHAAKHTRGAAEWFDARVTAVLSAIVGRPVSQRARDVAALPIAMGGCGLRRQVTIAEFAHECVGHKNLQRSKTEEADRDLSNALFATVYGAERQVLTANAAAGAGRALTDPQVCTDDAAFCTYVLERLLERVLPDGQKCVCGADASNWHVHTCTKLHGKPRQLRHDVANSKLALGLRLCGFDCTTEPHLNEVSKRRPDLLITGLGTQAVTDVTVTHPAVHPRGGKRSDSHSGIMTYEEAQAVYNPVHSAKVRYQEKCRKYAHWASQNGLNFAPFVLLTNGAVYEQSRTWLRKVIASHDHRLTVTTAYDFVTGDVVAAVLRGNVHVFAVAGSGSGCEARAG

SEQ ID NO: 17103 - protein, 1182 aa, Trypanosoma vivax
MPPEMPRDKRGRRAFGSKRKRTRGTPNATGSDMDEEDGETSMVELLRLVGEHLAQTHDGDETASLPHDPPASAENEEAAPQSEAGAEVDASTPNGDETASLPHDPPASAENEEAAPQSEAGAEVDASTPNGDETASLPHDPPASAENEEAAPQSVAMAEVRAMETGVQEAASETQDAVAETGSWSHVDQRLMPAVVRCPVANCDAEFEGFRRSEGIKSHMNGRHTEADRRSLTNEAMIPQGLVRCEVCGHVHGASVRARRAHVSACGDYVPRKAAMARARDNYRHETETSSAMQAAVQPEQEPVRTLPRAMREVCVGQGGENDPTTDPWMQERVATKRYLHKKEWAAWLEVCRPAFLGYGASSQAERCRRQLVIMDLVRTHLAMGRGEAQRRRDAVAGQAARAAGARNGIPQDEGAQDEGVQDEDAQARRTAARVEMLCMLNAAGRAARMLTRDGEDLVRSSAAEVVREVDGLYPQEDVSTFPQPPLPVTVVGVEKDEVSRAIRRRLTRGAAPGLDGWTRELLYPLTQDSALLMEVTVLTADILNGNVSEQMAHRLRATALTILRKPNGKYRPIGAESVWAKLASMVAFDRVVEASRRIFAGVQFGVGGQIELAIARVRKDFEEKGSVATLDGSNAYNAISRQKVLEALFGFEELRPAWSVVQLLLGVPGVVGLYDGGRLVHAWASTRGVRQGMVLGPLLFSLGTIAALRRLQAELPHASFVAYLDDVTVAAAPEHLEAACGAAAQAMEELGIKNNAAKMEVLDPTCLSGFGDARRLTCARVLGAFVECDAAHEAEVTEAVDKRARETERLFRAILECPLAARTRWRLLSASALPRLTFLLRNHAAKHTRGAAEWFDARVTAVLSAIVGRPVSQRARDVAALPIAMGGCGLRRQVTIAEFAHECVGHKNLQRSKTEEADRDLSNALFATVYGAERQVLTANAAAGAGRALTDPQVCTDDAAFCTYVLERLLERVLPDGQKCVCGADASNWHVHTCTKLHGKPRQLRHDVANSKLALGLRLCGFDCTTEPHLNEVSKRRPDLLITGLGTQAVTDVTVTHPAVHPRGGKRSDSHSGIMTYEEAQAVYNPVHSAKVRYQEKCRKYAHWASQNGLNFAPFVLLTNGAVYEQSRTWLRKVIASHDHRLTVTTAYDFVTGDVVAAVLRGNVHVFAVAGSGSGCEARAG

SEQ ID NO: 17104 - protein, 1228 aa, Oncopeltus fasciatus
MTDRRLFDFVKISDDGRRIYLNYPLPVVPSGQAIIACPQECCHRLFITREHSSGIQSLKRHLAASHGIRDATVISECVLCREVLSLRPSLHGCLLTNPAPLITDIPGEHHACDVCGEFFASGKALQNHRTAIHVLGPRREAARANIPQPRTRRTTRPARRGVTGPPTPDVTTREDDDDGRRVTDEPAADNRQQQEDHTEQPTTPLQTDRPTRPPTPRPPPGTGRVETTHAPAREIASESSSTSCTTVNRPADWQHQNQEERTTSQPDPEDRDGPQEQAQSETGQQEEPDEEEGEDAGLLSSFEAGLRNLSRENYSPEMWANFIQIIDSAVEKIKQKFHGGPRNTEQQQHRVPQASATADPKRLQSLYKRNRRRAVRLICEGETQRTDPPQEVIQRLQEACLRQEWDTTCLADLRTAEDEIDLTHFSPEEVLARLRRFENSSPGPDGITYRQWRTADPKGKFLSFALNICLRSRRIPSDWKESNTVLIPKRAEPTTPSDWRPIALHRTIYKIYSGLLNDRLMQWCRSNGVIAHSQKGFMPYDGVFEHNFVIDHHLKQVRSTGGELCIAWLDVSNAFGSIPHDALFDTLRLRGAGTHFVDVIRDIYAGAKTRIRCAGTDGPLVSIERGVLQGDPLSGILFNIGINHILERFDMNRSGNNDVFMLGLADDLTIVSTSPVELQENINLVVDEIERLGLRLNLRKCKTMHLSGSRPVGLRETELTIHDQPVPFLREGETQSFLGQPVGFRAIPSSAPLEEITSRALKILKSHLAPWQKLDAVRSFVFPALNFPMRNGHFKKTQWASFDSVLRAELKRILYVPQEASNEYIYGARFEGLCGIPKADEESDFALVDTAFKLLTSGDERVSSLALSSLRDTLRDRSTQGGELADPSVFLSGGTEGLRDRGSLPSNQWSRARRASTRLGIGWSFDGDSPTVAVGDFTAAPDGRHQILRGLRAHFQKLRGQKLRAKLSQGRVAECLRESPDSSYFTYSGDFLSFADWRFIHKARLQVCPLGGNNRWSNVVGCRRCQFTNECLAHVLGQCNWHSRLRQKRHDAVVDRIERMAVRKGFRVLSKNQTVDDSALRPDLVLVKDDHAYIYDVTITFENRMAAFERARRGKLEKYAELAGNLLTNYARATICPIIVGQLGTWDHANDRYLRRLATTSYLKKFRRIVTAETIAWSRCIYLQHLTGRSQTPARWQTQDRDAADQQATQNETALGLEEEDAHRSTDE

SEQ ID NO: 17105 - protein, 1167 aa, Cephus cinctus
MERRITRASEAAARAASTDVAPGATVVACVAEGLGAGVEVAPRMATRSARGQNQQNPRRIEQAGGAVWEHETIEVVAVASDHLECPICLRKNHRLLCLGAKELEKHCNDNHTLTKIVWKCRGCAKVYNGAHGLRIHEYHCKGEKVATPDLPFKCDDCGSSFGTQAGLSQHKRLRHPQMRNLERREQAKGTGRKGRLPTLMTEQEFRELKRLNRLYSGVRNINVKIQEHFPHLTNKQISDIRRRNLSESSSNDGEAIEQEKDSSSEADEFVDAFADPIVAGADNTPSEPDYRTGLLDQIFEPVTLDQRWASAHNNILEAASSWGCTREHLDELHKEIIGLLVADGVDVNNEKQKRAGRPRGRRQQPITRAQKKRYVYSRTQDMYDECPKKLADLVVDNDFSLLQKSCLPGKAAVERLYKELWSQRGPENIGWDNIVSGPSIKTCDILQPITAAEVRIKISKLARKVAPGLDGIKKGSLRAPGTEHLLAKYFNLLLVKLHYPNEWRKNRTTLIPKVGRDKSDVKNWRPLTIGSLVGRLFSGLLDKRLRTNINQHPRQKGFGEENGCFINTQTLNCAIRVAKQAGGVIGVTDLEKAFDTVPHPAIYKALRRKGVSEVVATYITEMYKDCTTIIKADGGDVHIQLQRGVKQGDPLSPLLFNLCIEPFIEWAQEHTKGIAVAVNRQVAAIGFADDVVLLAKDRFESAKQFKQAHQFLDKMGMRLSLDKCTAIEFVPHAKTYYVQDPNISVGNIKVATVEPDQAFKYLGAKIKPWHGLINDFELHSLEELIRRVRRLSLKPMQKIEMLRAYLLPRYIYGLVSQPPAVLILRAIDSLIRREVKAILNIHETTCNEFLYTPKRSGGLGLPEIEKLVLIAALRNGLKARESADCITTAVMGTELVDKELKRCANLLRLNWPVSLEEVNAFKTRLKASYLKNWARHEVQGQGVLHFNNDPVSNEWLKRGGILKPSQITKAIRLRTDTAGTRMAIRRDPNKRAIPAECRKCGYAYENLPHILGQCVGTKDARIRRHDEIKNFVRDKCAEKYTVLDEPRLHQNGQLYKPDLVVDMNEAGALIVDITVRYEKGSYLADAHKEKSDKYGALRRTVGGLLKKRKVEVVPVVVGTRGALPSDTIAGLKKLGITKKGDWLTIAMTALRHAILIIDRFNDYEAEV

SEQ ID NO: 17106 - protein, 977 aa, Strongylocentrotus purpuratus
MPPYVLIGSLLLFFTFQANCLRFNVPNLRATEWQPHNAAIKDRLTLLHHDLGAGIVTPKSAADDLTSILTEYFSGQDDFVDKKLSDTYIEHEPKSLIQARKCKNVLRKRAFGKNGTAEDRKAFRAAVKTVSYLRKQDKQNKCDKSRSHMEKRYRNNFYEFSKAACSGSLNESPTKPLFSEDVANNYFGDKYSTPNVINIGSLNWFPYVNINTPDRFEFDMTPIKPKDVKNVLRRKKAMSAPGNDGLMYGMIKHLDSVHHFLATLYNKILDSGDPPESWSESKVTLIYKSGDTDKPENFRMISLTSCISKVFHQIIAERSMSYLTENNFIDKTVQKAFIDGVNGCIEHNIVLHEILSDAKCKKRSLHTTFFDLADAFGSVSHQLITSSMERYAIPTPIARYVATLYSRLNGRVRGPGWITKPFEFKRGVFQGDPLSPTIFLMCFNPVLEYLKEQQDQFGYKWGDRKIITTPYADDFNLITGNKLQHQKLMNGINDRLKSMGLTLKPRKCSSLSLTSGKPNIVDFTIGSDVISSVHGHPIKFLGSLITFSMKTSEIFEYLKGKIESTLENINKCNIRNEYKLCILTRYALPSLRYMLTVHDVHATHLKSLDIILDRYIKMWLGIPSRGANLAVVHDPDGLNIPSISDLYRTCHCLAYSRSRVKGDDVVNHALDRRLERERGWSRQTSFSLEAHEIHSKIPGSVSWNQTKTVIKKAVQDVCRENWKRVIEPLLVQGEFMKVVHMESTDVTWKSIIYNLPQSVMKFSVNAAIDSLPTNKNLYRWGKRISDTCNLCNCTGTLHHVLNNCERMLDRYTWRHNNILRIMLKHIKNTSNNSTKVYADIEGESINGGTIPPNIIRTQHKPDICHIDNKNKDIIIIELTVPFETNIDKAHQRKQDKYASLTHEITSTGWKSKLICIEIGSRGLITPQNKYRLKEILKITDSTRYPESRDEILKAVLFSSYVIFQGSREPAWQFDQYL

SEQ ID NO: 17107 - protein, 977 aa, Strongylocentrotus purpuratus
MPPYVLIGSLLLFFTFQANCLRFNVPNLRATEWQPHNAAIKDRLTLLHHDLGAGIVTPKSAADDLTSILTEYFSGQDDFVDKKLSDTYIEHEPKSLIQARKCKNVLRKRAFGKNGTAEDRKAFRAAVKTVSYLRKQDKQNKCDKSRSHMEKRYRNNFYEFSKAACSGSLNESPTKPLFSEDVANNYFGDKYSTPNVINIGSLNSFPYVNINTPDRFEFDMTPIKPKDVKNVLGRKKAMSAPGNDGLMYGMIKHLDSVHHFLATLYNKILDSGDPPESWSESKVTLIYKSGDTDKPENFRMISLTSCISKVFHQIIAERSMSYLTENNFIDKTVQKAFIDGVNGCIEHNIVLHEILSDAKCKKRSLHTTFFDLADAFGSVSHQLITSSMERYAIPTPIARYVATLYSRLNGRVRGPGWITKPFEFKRGVCQGDPLSPTIFLMCFNPVLEYLKEQQYQFGYKWGDRKIITTPYADDFNLITGNKVQHQKLMNGINDRLKSMGLTLKPRKCSSLSLTSGKPNIVDFTIGSDVISSVHGHPIKFLGSLITFSMKTSEIFEYLKGKIESTLENINKCNIRNEYKLCILTRYALPSLRYMLTVHDVHATHLKSLDIILDRYIKMWLGIPSRDANLAVVHDPDGLNIPSISDLYRTCHCLAYSRSRVKGDDVVNHALDRRLERERGWSRQTSFSLEAHEIHSKIPGSVSWNQTKTVIKKAVQDVCRENWKRVIEPLLVQGEFMKVVHMESTDVTWKSIIYNLPQSVMKFSVNAAIDSLPTNKNLYRWGKRISDTCNLFNCTGTLHHVLNNCERMLDRYTWRHNNILRIMLKHIKNTSNNSTKVYADIEGESINGGTIPPNIIRTQHKPDICHIDNKNKDIIIIELTVPFETNIDKAHQRKQDKYASLTHEITSTGWKSKLICIEIGSRGLITPQNKYRLKEILKITDSTRYPESRDEILKAVLFSSYVIFQGRREPAWQSDQYL

SEQ ID NO: 17108 - protein, 1051 aa, Copidosoma floridanum
MDCGPPQRERSPEAGTVTTPTHTPASSDESPSTSSATSFATPTAISPAHTVNTTANSDDDRPTPSPAPASAVPARPELSPISATGDAAMWQRANNNNIDANRAAEIPAGPQRESLNNTERDAGVTENQRRARRRPEPEQLEVKNALIQVQNKQQLVDIMPRINTSLGRFKRRNGSTEGRRVRRQSQARGRTDRIQAAANLQRFYRNNRKRAVQSILATTDHRCEISKERVEDHFRRQAARRDGGDEWPDVFQKDPPTRGSKGALCAPFTEEEVNGCLRRRTNTAPGPDGINYDHLRRADLGALVLTVLYNAVWRTEEVPAEWGVSETILLHKKDDRDDFRNWRPIALGNTTPKLFTALLSERVNRWGTDNARFSASQKGFLNFEGCFEHSFVLGELLRDVRTRGGELVVAWLDLASAFDSALHSSIYRALEGHGLPLKVRRVIGSLYSGITTTVRVVGGTTAPIEVMAGVRQGCPLSPDVFNLTLEVLLRTIATSEEGYTLRGRRYNNLFYADDGALVADSPEEMASLLEAAERAAAAIGIAFNPTKCATLHVIGGRDGGVRPTVFELQGARMPALEREEAYEHLGIPTGYQVRQTPISGIKDLVADAGKVNESLLAPWQKLDAVGTFLLPRLDFIKQGASIEKEYLVTADKEIKRMAKAWMGLPQRASTEIVHIVPRQGGGGLLPLADLYDLLTVAHSYRLLYTKDPNVSGLAMELLQKAASERLRKRATESDIARYLSGDMEIPLSGAGSSYWSRVRASTGRLSARLGLSWYPERGSLGLTVGGQAGPLLPENKNGVIHALRASLGIHYAGVLEAKRDQGKVFEVTRRSAASNHFLRTGRNTRFCEWRFVHRARLNVLPVNAAIRGIQGLDKSCRRCGAGLESLPHVLCHCGPHSTARRRRHDNLQNRLVRAARCAGVIAVNKTVMGSRGRAAALRPDIVVRDEAAHRVTIVDVCVPFENRREALTRARQEKISKYQPIVDELTARGYHVEVEAFVVGALGAWDGRNERVLKLLRIGRWYAGMMRRFMVSDTVQWSRDIYVEHVSGVRQ

SEQ ID NO: 17109 - protein, 773 aa, Periplaneta americana
MNTEKQRFCSLSKDIVENYFTDIFGHSNNMTSINLLPSCDTSEFSDSIMITEKEMIIALTKMKIDTAPEPDRITVRVLKHLKSAKFLSLLESAMLHFGVVPARLQKARTILIYKGGDHSDLKNWRPISIFSVVQRLIEKVLDFKLKHYISTSIHQRGFVSTPGTHVNTSLINGCLKHAKNKSDGFVAFLDVSKAFDCIGHEHVKRSLVMNSIPCNLRNLIIELLIRNQIQIEIANGKTKPIEVKKGVPQGSPLSPTLFNLAIDGIIKDLTDNEVSHAHGFSLDPTLDNLSAVAFADDIALISSSENGITSLISLAESNLSTLGLAINPSKCNLIAIKSGVLSQFNVMSANGSLIQSISNPNDRIKYLGINFNDEIVFDKCAVFTTFSKNISKLCLSPLLKPDQKVTIMNQYLWPTLTYPLQCAPLYQIKTKFLNDLDKVTRGACKELIGLPHDCPDGMLYSPKKYRGLSLMKASWEAYVQHINICNTLLRVDDSHLHNVRDLVSEKVSALSKLNITAIDAINWSGRKIRKHLRNDAFQTWTNHTLRGKGVIVYSDLPKANSWVSNRKGLSSSEWTNALKMSSNISAVRAIPGRTLSTTRCRHPDCSELETLGHVLGQCPKGELLINARHHRVRHALAISLKTLNWEIHEEVHCVSSDGSFRRADIIAINGRLKRALVLDPTIRFERNLNQATEVDIEKKSIYEPCLPYLSQKYNVPLKQWSVIGLLFGSRGSITKFTWNYLKELHIPFDYVMSILINIIKDSLQILHHHLYFN

SEQ ID NO: 17110 - protein, 983 aa, Periplaneta americana
MMTDSVNSQVLQNESKQQCTLCGKYYKSVKIHISKAHPSEHRQSITAKYSDSSITNLSAIDILNPSVCSSNKTQNQSATISSNNNITPTNSSLSPLQKWEDKLQHIITNNISQDLDQVTSEAFQFIVESISSLPGPQHPAVKYFNLRRNGKLNKRYTYTETSNPQKRNKRQKDKSRERYSYDLAQYNFYNNRKKVVRQIMNTEKQRFCSLSKDIVENHFTDIFGHSNNMTSINLLPSCDTSEFSDSIMITEKEMNIALTKMKIDTAPGPDRITVRVLKHLKSAKFLSLLGSAMLHFGVVPAPLRKARTILIYKGGDHSDLKNWRPITIFSVVRRLIEKVLDFKLKHYISTSIHQRGFVSTPGTHVNTSLINGCLKHAKNNKSDCFVAFLDVSKAFDCIGHEHVKRSLAMNSMPCNLRNLIIELLIRNQIQIEIANGKTKPIEVKKGVPQGSPLSPTLFNLAIDGIIKDLTDNEVSHAHGFSLDPTLDNLSAVAFADDIALISSSENGITSLISLAESNLSTLGLAINPSKCNLIAIKSGVLSQFNVMSANGSLIQSISNPNDRIKYLGINFNDEIVFDKCAVFTTFSKNISKLCLSPLLKPDQKVTIMNQYLWPTLTYPLQCAPLYQIKTKFLNDLDKVTRGACKELIGLPHDCPDGMLYSPKKYRGLSLMKASWEAYVQHINICNTLLRVDDSHLHNVRDLVSEKVSALSKLNITAIDAINWSGRKIRKHLRNDAFQTWTNHTLRGKGVIVYSDLPKANSWVSNRKGLSSSEWTNALKMSSNISAVRAIPGRTLSTTRCRHPDCSELETLGHVLGQCPKGELLINARHHRVRHALAISLKTLNWEIHEEVHCVSSDGSFRRADIIAINGRLKRALVLDPTIRFERNLNQATEVDIEKKSIYEPCLPYLSQEYNVPLKQWSVIGLLFGSRGSITKFTWNYLKEIHIPFDYVISILINIIKDSLHIYYIIISISINQLIFAFNN

SEQ ID NO: 17111 - protein, 972 aa, Periplaneta americana
MMTDSVNSQVLQDESKQQCTLCGKYYKSVKIHISKAHPSEHRQSITAKYSDSSITNLSAIDILNPDVCSSNKTQNQSTTTSNNNITPTNSSLSPLQKWEDKLQHIITNNLYQDLDQVTSEAFQFIVESISSLPGPQHPAVKYFNLRRNGKLNKRYTYTETSNPQKRNKRQKDKNRERYSYDLAQYNFYNNRKKVVRQIMNTEKQRFCSLSKDIVENHFTDIFGHSNNMTSINLLPSCDTSEFSDSIMITEKEMNIALTKMKIDTAPGPDRITVRVLKHLKSAKFLSLLGSAMLHFGVVPAPLRKARTILIYKGGDHSDVKNWRPITIFSVVRRLIEKVLDFKLKHYISTSIHQRGFVSTPGTHVNTSLINGCLKHAKNNKSDCFVAFLDVSKAFDCIGHEHVKRSLAMNSMPCNLRNLIIELLIRNQIQIEIANGKTKPIEVKKGVPQGSPLSPTLFNLAIDGIIKDLTDNEVSHAHGFSLDPTLDNLSAVAFADDIALISSSENGITSLISLAESNLSTLGLAINPSKCNLIAIKSGVLSQFNVMSANGSLIQSISNPNDRIKYLGINFNDEIVFDKCAVFTTFSKNISKLYLSPLLKPNQKVTIMNQYLWPTLTYPLQCAPLYQIKTQFLNDLDKVTRGACKELIGLPHDCPDGMLYSPKKYRGLSLMKASWEAYVQHINICNTLLRVDDSHLHNVRDLVSEKVSALSKLNITAIDAINWSGRKIRKHLRNDAFQTWTNHTLHGKGVIVYSDLPKANLWVSNRKGLSSSEWTNALKMSSNISAVRTIPGRTLSTTCCRHPDCSELETLGQVLGQSPKGELLINARHHHVQLALATSLKTLNWEIHEEVHCVSSDGSFRRAYIIAINGRLKRALVLDPTIRFERNLNQATEVDVEKKCIYEPCLPYLSQKCNVPLKQWSVIGLLFGSRGSITKFTWNYLKELHIPFDYVMSILINIIKDSLQILHHHLYFN

SEQ ID NO: 17112 - protein, 2031 aa, Trypanosoma congolense
MVACRDPPQNCVTPLDPSSGYNLRVSDKFWASNGFQLKLIIEQFLYYIGMRSSQLRFPAHPYGCAADSRPHTVGTRVSSEKEGRVHDGERRPSDAKAPEIWSGCLADGQANRRSERSRGNAAEFLSEKKFHVTVQQHNGSMHDERHVFFATPSEKQKKWLQDFVETITMAVVQQVHSSKHGRHSAAPGKSAVFDQKTRCTQREVVQHRQKRLEENSRKNKLNTQKQGEYKQETMPNVKESTEKQTWAQIARQTQQNQKAKHKIIRIIARTGEKILIHKDPGSPPSRKDQKWANTTSEASTKAVGQQVHSNKRGGHSAALGKSAVFDQKTRPEQCEVVQHKQKLLRENSCKNKLNTQKQGEYKQETMPNVKEMTKKQRWAHMAQQTQQNQKVEQEIKGITARIDEKILKHKTSGSPLSRKNQKWANTTEATTKAVGQQVHSNKRGGHSAALGKSAVLDQKTRPEQCEVVQNKQKLLRENSCKNKLNTQKQGECKQETMPNVKEMTKKQKWAHMAQQTQQNQKVEQEIKGITARTDEKTITRKVFGSLPALTDQQRLSTIIEATVKAVLQQLHRKQQATQNGRADTKQPVAKHQAPRSGKQAQVQQKALRQQPHNKQGMPKPQRQQQIRKQQKHNMELPPKTKETTKTLTRAEIAQQPQQNRKVPPKKHPTKETPQTNTKKKQPQQQMKAPMVPNPFELEGKIEELWAAETKIRHNLYRRFLQVRKHWWNTCFQGNGRFHCPACGYANPQEAVTLQHCREQHPQEGRLLPYSLQRDTDKVQFVGPSCAVSAVVSVLSHLEEEKTFHPMVRQCYTQPSRQATQALVQGLQLSLPTAPATVLEALGSVDPGITRCFQAAMVQAWQCRRCGRSEGNTEQQQSARPHLGLLKVQPTKRAPIELSHGQLAAAYSEEALDPTVPCVGPLGGPAHHPLATALVTARTFGDAVALEIGLWGEEQVGLKRIPADILLPHGNGSATYELVGAVIAATPTHVVAAIPRTVKKRRRWDIIDGMVKHTVSDATVDPRKVVLCIYRRQEEDLVTLDELWDEQEENLSNVEATAPAQQQRQQQTQRSKTLNTNISNLGMVDNTGRRVYGLRSPGHTQEENNSNNHSDSTGEENPQAEVLPTPQFSHNENLPRQEAYLCPVADCGAEFEGARRWEGLKSHIHGTHQEEERRALSNDTLLQHGLVRCETCSYIIPASDRARTTHVPNCGHYHSRKENIRQKRAAEREATEASGSSTAAKVPARPVPQRLPLTSQWDATTLLDLEQSPWLQEQIPTKRYLHKKEWPQWLEICRTVLLGYSASAQRERHTRQVLLLDLVRTHLHQGPPPKARRQQEACSPLPRAQQSDKEEEEKQRITKRVETLCLLSATGKAAKLLTAEPSQPVVYSSEMTRKIDELYPKEEVPGIQYRPLPRPPVNQPGIVAVDPEEVARIIARRLSRGAAPGLDGWTRELLYPLTLDAALRMEVAAVVRDIINADVPEEVAHRLRATRLTVLKKPNGKYRPIGAESVWAKLASHLAITRVTKVIDAQFKSIQYGVGGRIEEAIAKIRADLDRMGSLAMLDGRNAYNAISRRKILEALYATAQWCPLWSITNLLLGTPGVVGFYEGGTLRHTWASTRGVRQGMVLGPLLFSIGTLASLRELQESYPEAAITAYLDDVTIAAPPEKLQEVCEATAQAMEDLGIVMNNDKTEVIERSGATGFTAGTVKPCARVLGAYIAPDPESPLIREAVQEKAKETDRLFQALVELPLHLRTKWRVLSLSAAPRITFLLRNHAARHTQEAAAWYDDRTTQMMEHILGERLSQRARDIAALPISMGGCGIRRQAEVAEYAHQSVGEKGRQQQLALEVEQHRRDDLYATLGGADRLVFTANSAAGAGRPLTDAQVRVDDATFTVYMRERLLMRVLPEGTRCLCGEDASNHHVHTCTRVHNKPRQLRHDMLNAVFANNLRLCGFQCATEPHLHEASKRRPDILIAGLDTYAVTDLTVTYPGRVTTGAPTTGSGKATALDPMKAAVVRYQEKERKYGYWPYKTV

SEQ ID NO: 17113 - protein, 1802 aa, Trypanosoma congolense
MSGGNRFGSQRWTGFRSPVPPLGTPQNTSKNIGRKDKRRSRCGMALRREGDWWVVCPKQTVKVRQEPKDPAEKTVEKILARKVFGSLPSPKGQKQLSTIIEATTKAVLQQLHTKQQATHNRRAETKQQVAKHQALRPGTQPQVQQKLSRQQLCNKQGMWEQKLQPQQKQQTLQQPKHNVQPPPKVKKTTQKPSWVQVTQQPQQIGKIRQGPKDTAEKTVEKIPTRKVFGSLPSPKDQRWLSTIIEATTKAVLQQLHRQQQTTHNRRADTKQQAAKHQALRSGKQPQVQQKLSRQQQPYNKQGMPKSRQQQQQLLQQPKRIVEQLPKVKETTKKPSWADMVRQPQRNPKAQSKKHPTKEATQANTKKQQPQQQQHRKAPMVPNPFELEGKIEELWAASNKMRHNLYRRFLDVRKHWWKTCFQGNRQYHCPACGYANPQEAATLQHCREQHPQEGRLLPYSLQRDTDKVQFVGPSCAVSAVVSVLSHLEEEKTFHPMVRQCYTQPSRQATQALVQGLQVSLPTAPATVLEALGSVDPGITRCFQAAMVQAWQCRQCGRSEGDTQQQQQSARPHLGLLKVQPTKCAPIELSHGQLAAAYTEEVLDPTVPCVGPLGGPAHHPLATALVTARTFGDAVALEIGLWGEEQVGLKRIPADILLPHGNGSATYELVGAVIAATPTHVVAAIPRTVKKRRRWDIIDGMVKHTVSDATVDPRKVVLCVYRRQEEDLVTLDELWDEQEEDISTAEPTAPTQQQQQQQQQQQQTQRSKTLKHYNNSNHLGTVDSNGRRVYGLRTPRHTQANSNSNNHSNSTGEENPQAEVLPSPQFSHSENLPRQETYLCPVEGCGEEFEGARRWEGLKSHIHGTHQEEERRALSNDTLLQHGLVRCETCSYIIPASDRARATHVPNCGQYHSRKENIRQKRAAEREATEASGSSTAAKVPARPVPQGLPSTSQWDTTTMQDLEQNPWLQESIPTKRYLHKKEWPQWLEICRTVLLGYSASAQRERHTRQVMLLDLVRTHLHQGPPPKARRQQDERSPRPRAQQSDKEEEDKQRMTKRVETLCLLSATGKAAKLLTTEPSQPVVYSSEMTRKIDELYPQEEEPGIQHRPLPRPPVNQPGIVAVDPEEVAKIIARRLSRGAAPGLDGWTRELLYPLTLDAALRMEVAAVVRDIINADVPEEVAHRLRATRLTVLQKPNGKYRPIGAESVWAKLASHLAITRVTKVIDAQFKSIQYGVGGRIEEAIAKIRADLDRMGSLAMLDGRNAYNAISRRKILEALYATAQWCPLWSITNLLLGAPGVVGFYEGGTLRHTWASTRGVRQGMVLGPLLFSIGTLASLRELQESYPEAAITAYLDDVTIAAPPEKLQEVCEATAQAMEDLGIAMNNDKTEVLERSGPTGFTAGTVKPCARVLGAYIAPDPESPLIREAVQEKAKETDRLFQALVELPLHLRTKWRVLSLSAAPRITFLLRNHAALHTQEAAAWYDDRTTQVMEHILGERLSQRARDIAALPISMGGCGIRRQAEVAEYAHQSVGEKGRQQQLALEAEQHRRDDLYATLGGADRLVFTANSAAGAGRPLTDAQVRVDDATFTVYMRERLLMRVLPEGTRCLCGEDASNHHVHTCTRMHNKPRQLRHDMLNAVFANNLRLCGFQCATEPHLHEASKRRPDILIAGLDTYAVTDLTVTYPGRVTTGAPTTGSGKATALDPMKAAVVRYQEKERKYGYWAIQNGLAFAPFVMLTNGAIYGKSRDWLHRVLRGQDHRLTVTSAFESITAELVTSVLRGNVHVYRVVRSYGGGALTLPDI

SEQ ID NO: 17114 - protein, 2105 aa, Trypanosoma congolense
MVACRDPPQNCVTPLNPSSGYNLRVSDKFWASNGFQLKLIIEQFLYYIGMRSSQLRFPAHPYGCAADSRPHTVGTRVSSEKEGRVHDGERRPSDAKAPEIWSGCLADGQANRRSERSRGNAAEFLSEKKFHVTVQQHNGSMHDERHVFFATPSEKQKKWLQDFVETITMAVVQQVHSSKHGRHSAAPGKSAVFDQKTRCTQREVVQHRQKRLEENSRKNKLNTQKQGEYKQETMPNVKESTEKQTWAQIARQTQQNQKAKHKIIRIIARTGEKILIHKDPGSPPSRKDQKWANTTSEASTKAVGQQVHSNKRGGHSAALGKSAVFDQKTRPEQCEVVQHKQKLLRENSCKNKLNTQKQGEYKQETMPNVKEMTKKQRWAHMAQQTQQNQKVEQEIKGITARIDEKILKHKTSGSPLSRKNQKWANTTEATTKAVGQQVHSNKRGGHSAALGKSAVLDQKTRPEQCEVVQNKQKLLRENSCKNKLNTQKQGECKQETMPNVKEMTKKQKWAHMAQQTQQNQKVEQEIKGITARTDEKTITRKVFGSLPALTDQQRLSTIIEATVKAVLQQLHRKQQATQNGRADTKQPVAKHQAPRSGKQAQVQQKALRQQPHNKQGMPKPQRQQQIRKQQKHNMELPPKTKETTKTLTRAEIAQQPQQNRKVPPKKHPTKETPQTNTKKKQPQQQMKAPMVPNPFELEGKIEELWAAETKIRHNLYRRFLQVRKHWWNTCFQGNGRFHCPACGYANPQEAVTLQHCREQHPQEGRLLPYSLQRDTDKVQFVGPSCAVSAVVSVLSHLEEEKTFHPMVRQCYTQPSRQATQALVQGLQLSLPTAPATVLEALGSVDPGITRCFQAAMVQAWQCRRCGRSEGNTEQQQSARPHLGLLKVQPTKRAPIELSHGQLAAAYSEEALDPTVPCVGPLGGPAHHPLATALVTARTFGDAVALEIGLWGEEQVGLKRIPADILLPHGNGSATYELVGAVIAATPTHVVAAIPRTVKKRRRWDIIDGMVKHTVSDATVDPRKVVLCIYRRQEEDLVTLDELWDEQEENLSNVEATAPAQQQRQQQTQRSKTLNTNISNLGMVDNTGRRVYGLRSPGHTQEENNSNNHSDSTGEENPQAEVLPTPQFSHNENLPRQEAYLCPVADCGAEFEGARRWEGLKSHIHGTHQEEERRALSNDTLLQHGLVRCETCSYIIPASDRARTTHVPNCGHYHSRKENIRQKRAAEREATEASGSSTAAKVPARPVPQRLPLTSQWDATTLLDLEQSPWLQEQIPTKRYLHKKEWPQWLEICRTVLLGYSASAQRERHTRQVLLLDLVRTHLHQGPPPKARRQQEACSPLPRAQQSDKEEEEKQRITKRVETLCLLSATGKAAKLLTAEPSQPVVYSSEMTRKIDELYPKEEVPGIQYRPLPRPPVNQPGIVAVDPEEVARIIARRLSRGAAPGLDGWTRELLYPLTLDAALRMEVAAVVRDIINADVPEEVAHRLRATRLTVLKKPNGKYRPIGAESVWAKLASHLAITRVTKVIDAQFKSIQYGVGGRIEEAIAKIRADLDRMGSLAMLDGRNAYNAISRRKILEALYATAQWCPLWSITNLLLGTPGVVGFYEGGTLRHTWASTRGVRQGMVLGPLLFSIGTLASLRELQESYPEAAITAYLDDVTIAAPPEKLQEVCEATAQAMEDLGIVMNNDKTEVIERSGATGFTAGTVKPCARVLGAYIAPDPESPLIREAVQEKAKETDRLFQALVELPLHLRTKWRVLSLSAAPRITFLLRNHAARHTQEAAAWYDDRTTQMMEHILGERLSQRARDIAALPISMGGCGIRRQAEVAEYAHQSVGEKGRQQQLALEVEQHRRDDLYATLGGADRLVFTANSAAGAGRPLTDAQVRVDDATFTVYMRERLLMRVLPEGTRCLCGEDASNHHVHTCTRVHNKPRQLRHDMLNAVFANNLRLCGFQCATEPHLHEASKRRPDILIAGLDTYAVTDLTVTYPGRVTTGAPTTGSGKATALDPMKAAVVRYQEKERKYGYWAIQNGLAFAPFVMLTNGAIYGKSRDWLHRVLRGQDHRLTVTSAFDGITAELVTSVLRGNVHVYRVVRSYGGGALTLPDV

SEQ ID NO: 17115 - protein, 1380 aa, Trypanosoma brucei
MAQKKAQGEKKGAAANPFHWELQVEQLLKDAEQIRESMYIRFLHVRQSWWSTCFKAHMEFHCPVCGFAHPEETITVTHCRQQHPQEGRLIPYTLTTTGNQVQFAGPSCSLSAVVAILSHMEEEKNFHPIIRRSYQSPSKETTQTLVQALGLELPTAPITAIEALAHHDQMIRQLLEAPATTARQCGHCGVSELMEGPSNPGENLGIISVNPNTCESIELTNQILAKTYTTSWTDMEVVCTGERKNMAHRPTPTLITHSKTFGEMVVIDIGTWGNEAVGLKRILHEILLPHGNGTATYKLVGAVIAPTPFHVVAAIPQQTRKRRWDILDGMVRRTVSQSTVDPKTVVMCVYRREEEETYDVLDEEEQDDDLLGIPNPTPRRLTISQAGPQQNSWVDTRGRRAYGSQEEQDERTSTDQVSIFSHDETRELSSPLECPIVGCTASFVGPRRWEKAKSHIYGVHSLEEVREIPGGELICKGIVRCETCATLLPTSDRAKQAHADDCRPYLPRKENIRRKRAAEREATEASAQQGIALRLERQGPYITPRDIEEPTNTTTESWWREKVATKRYLHRKEWPQWLDICRTVLLGYSASSQGERHQRQVMLLDLVRNHLHTRTARREQQQQRGKDNQEEEDRQKEEEKSLAKRVETLCLPSATGRAAQLLAAEKAQPVEYSPEMAQTIGELYPQEDIHDIPRPPVEQPGVVSVDAEEVAKTIGRRLTRGAAPGLDGWTRELLYPLTLDPALKMEIAAVVKDIINADVSMEVGRRLQATSLTVLRKPNGKYRPIGAESVWAKLASHIAISRVMKTAEKKFSGIQFGVGGHIEEAIAKIRKDFATKGSLAMLDGRNAYNAISRRAILEAVYGDSTWSPLWRLVSLLLGTTGEVGFYENGKLCHTWESTRGVRQGMVLGPLLFSIGTLATLRRLQQTFPEAQFTAYLDDVTVAAPPEELKNVCAATAEAMEALGIVNNADKTEVLELTGDTGFGTAVKACARVLGAYVAPDPMSEEIREGVEKKAMETDRLFKAIVELPLYNRTRWRILAMSAMPRITFLLRNHDMQHTHQVASWFDERTTQVMEHILGQPMTERARNIAALPVSMGGCGIRRMAQVAEYAHQCAGEKGLQQRKTEEADQRQQDDLYATLGGADRQVFTANTAAGAGRPLTDAQVRLDDATFGVYLRERLLVRVLPEGVKCLCGEDASNHHIHTCTKVHNKPRQMRHDIINSVFANGLRLCGFQCATEPRLNEVSKRRPDILIAGLDTYAVTDITVTYPGRVTVGNTAQGQRSVAAADPMKAALVRFQEKERKYSYWAKQNGLAFAPFVMLTNGAIFGKSRDWLRRVLRGQDHRLTVTTAFDGITADMVAAVLRGNVHVYSAAQARGETLR

SEQ ID NO: 17116 - protein, 2145 aa, Trypanosoma brucei
MISIGKEGKPQNQKKSCFGGSNPDLQNTNTIRRGVLPVGLFRQIGGKIENLCSDEIYQIVHIEEKKHRCTNGAHVEKSSGIDRSQVNKPIKEISGSFSFLGQNIGRLDVKKSPENEYLEKNNCGQNDITTTKNCRYADFRSAFERARPAQCMSNNGYCDKEVTKKLGAVEPKIFSKNGNFEKINRGQIDMTTTNKCRYADFRSAFERARPAQCMSNNGYCDKEVTKKLGAVEPKIFSKNGNFEKINRGQIDMTTTKNCRYADFRSAFERARPAQCMSNNGYCDKEVTKKLGAVEPKIFSKNGNFEKINRGQIDMTTTKNCRYADFRSAFERARPAQCMSNNGYCDKEVTKKLGAAEPKIFSKNGNFEKINRGQIDMTTTKNCRYADFRSAFERARPAQCMSNNGYSDKEVIRKIGAVGKEKCSKNKEKEQISQADKNETNGFYADFRSAFTRNERVELGNNNGYCHNEATRNIERGKKPKTSKIDEKRQISNIAAGRKSDHYEDPSSAFSRISIDHCNAQIKIGRKKMVRNLRSSEPQKISRFPRHHGEGKKVSPPALNLQWPGQKQVASAVAPQIRKSATPKKNNTNIHRNCRKHLRKEGDWWIVEGGQSHKKAAHSPLKTKPVNKEGNRKKYGRPPREVEGKWLTSLIAATTEAVLRQLGKGKSPTAHTKSNQSRVPLQHSEKTAKGIKHATPQPKKKEHEQRKELPRRPPTKRSHGANKGQGAPVRAPTKTQGKGEEQPHTMRTWAQVAAPKKQKVTSKPPMVQKKKAQGEKKGAAANPFHWELQVEQLLKDAEQIRESMYIRFLHVRQSWWSTCFKAHMEFHCPVCGFAHPEETITVTHCRQQHPQEGRLIPYTLTTTGNQVQFAGPSCSLSAVVAILSHMEEEKNFHPIIRRSYQSPSKETTQTLVQALGLELPTAPITAIEALAHHDQMIRQLLEAPATTARQCGHCGVNELMEGPSNPGENLGIISVNPNTCESIELTNQILAKTYTTSWTDMEVVCTGERKNMAHRPTPTLITHSKTFGEMVVIDIGTWGNEAVGLKRILHEILLPHGNGTATYKLVGAVIAPTPFHVVAAIPQQTRKRRWDILDGMVRRTVSQSTVDPKTVVMCVYRREEEETYDVLDEEEQDDDLLGIPNPTPRRLMISQAGPQQNSWVDTRGRRAYGSQEEQDERTSTDQVSIFSHDETRELSSPLECPIVGCTASFVGPRRWEKAKSHIYGVHSLEEVREIPGGELICKGIVRCETCATLLPTSDRAKQAHADDCRPYLPRKENIRRKRAAEREATEASAQQGIALRLERQGPYITPRDIEEPTNTTTESWWREKVATKRYLHRKEWPQWLDICRTVLLGYSASSQGERHQRQVMLLDLVRNHLHTRTARREQQQQRGKDNQEEEDRQKEEEKSLAKRVETLCLLSATGRAAQLLAAEKAQPVEYSPEMAQTIGELYPQEDIHDIPRPPVEQPGVVSVDAEEVAKTIARRLTRGAAPGLDGWTRELLYPLTLDPALKMEIAAVVKDIINADVSMEVGRRLQATSLTVLRKPNGKYRPIGAESVWAKLASHIAISRVMKTAEKKFSGIQFGVGGHIEEAIAKIRKDFATKGSLAMLDGRNAYNAISRRAILEAVYGDSTWSPLWRLVSLLLGTTGEVGFYENGKLCHTWESTRGVRQGMVLGPLLFSIGTLATLRRLQQTFPEAQFTAYLDDVTVAAPPEELKNVCAATAEAMEALGIVNNADKTEVLELTGDTGFGTAVKACARVLGAYVAPDPMSEEIREGVEKKAMETDRLFKAIVELPLYNRTRWRILAMSAMPRITFLLRNHDMQHTHQVASWFDERTTQVMEHILGQPMTERARNIAALPVSMGGCGIRRMAQVAEYAHQCAGEKGLQQRKTEEADQRQQDDLYATLGGADRQVFTANTAAGAGRPLTDAQVRLDDATFGVYLRERLLVRVLPEGVKCLCGEDASNHHIHTCTKVHNKPRQMRHDIINSVFANGLRLCGFQCATEPRLNEVSKRRPDILIAGLDTYAVTDITVTYPGRVTVGNTAQGQRSVAAADPMKAALVRFQEKERKYSYWAIQNGLAFAPFVMLTNGAIFGKSRDWLRRVLRGQDHRLTVTTAFDGITADVVAAVLRGNVHVYSAAQARGETLR

SEQ ID NO: 17117 - protein, 1832 aa, Trypanosoma brucei
MTTTKNCRYADFRSGFERARPAQCMSNNGYCDKEVTKKLGAVEPKIFSKNGNFEKINRGQNDMTTTKNCRYADFRSAFERARPAQCMSNNGYSDKEVIRKIGAVGKEKCSKNKEKEQISQAEKNDTNGFYTDFRSAFTRNERVELGNNNGYCHNEATRNIERGKKPKTSKIDEKRQISNIAAGRKSDHYEDPSSAFSRISIDHCNAQIKIGRKKMVRNLRSSEPQKISRFPRHHGEGKKVSPPALNLQWPGQKQVASAVAPQIRKIATPKNNNTSIHRNCRKHLRKEGDWWIVEGGQNHKKAAHSPLKTKPVNKEGNRKKYGRPPREVEGKWLTSLIAATTEAVLRQLGKGKSPTAHTKSNQSRVPLQHSEKTAKGIKYATPQPKKKAHEQRKELPRRPPTKRSHGANKGQGAPVRAPAKTQGKGEEQPHTMRTWAQVAAPKKQKVTSKPPMAQKKKAQGEKKGAAANPFHWELQVEQLLKDAEQIRESMYIRFLHVRQSWWSTCFKAHMEFHCPVCGFAHPEETITVTHCRQQHPQEGRLIPYTLTTTGNQVQFAGPSCSLSAVVAILSHMEEEKNFHPIIRRSYQSPSKETTQTLVQALGLELPTAPITAIEALAHHDQMIRQLLEAPATTARQCGHCGVNELMEGPSNPGENLGIISVNPNTCESIELTNQILAKTYTTSWTDMEVVCTGERKNMAHRPTPTLITHSKTFGEMVVIDIGTWGNEAVGLKRILHEILLPHGNGTATYKLVGAVIAPTPFHVVAAIPQQTRKRRWDILDGMVRRTVSQSTVDPKTVVMCVYRREEEETYDVLDEEEQDDDLLGIPNPTPRRLRISQAGPQQNSWVDTRGRRAYGSQEEQDERTSTDQVSIFSHDETRELSSPLECPIVGCTASFVGPRRWEKAKSHIYGVHSLEEVREIPRGELICKGIVRCETCATLLPTSDRAKQAHADDCRPYLPRKENIRRKRAAEREATEASAQQGIALRLERQGPYITPRDIEEPTNTTTESWWREKVATKRYLHRKEWPQWLDICRTVLLGYSASSQGERHQRQVMLLDLVRNHLHTRTARREQQQQRGKDNQEEEDRQKKEEKSLAKRVETLCLLSATGRAAQLLAAEKAQPVEYSPEMAQTIGELYPQEDIHDIPRPPVEQPGVVSVDAEEVAKTIGRRLTRGAAPGLDGWTRELLYPLTLDPALKMEIAAVVKDIINADVSMEVGRRLQATSLTVLRKPNGKYRPIGAESVWAKLASHIAISRVMKTAEKKFSGIQFGVGGHIEEAIAKIRKDFATKGSLAMLDGRNAYNAISRRAILEAVYGDSTWSPLWRLVSLLLGTTGEVGFYENGKLCHTWESTRGVRQGMVLGPLLFSIGTLATLRRLQQTFPEAQFTAYLDDVTVAAPPEELKNVCAATAEAMEALGIVNNADKTEVLELTGDTGFGTAVKACARVLGAYVAPDPMSEEIREGVEKKAMETDRLFKAIVELPLYNRTRWRILAMSAMPRITFLLRNHDMQHTHRVASWFDERTTQVMEHILGQPMTERARNIAALPVSMGGCGIRRMAQVAEYAHQCAGEKGLQQRKTEEADQRQQDDLYATLGGADRQVFTANTAAGAGRPLTDAQVRLDDATFGVYLRERLLVRVLPEGVKCLCGEDASNHHIHTCTKVHNKPRQMRHDIINSVFANGLRLCGFQCATEPRLNEVSKRRPDILIAGLDTYAVTDITVTYPGRVTVGNTAQGQRSVAAADPMKAALVRFQEKERKYSYWAIQNGLAFAPFVMLTNGAIFGKSRDWLRRVLRGQDHRLTVTTAFDGITADVVAAVLRGNVHVYSAAQARGETLR

SEQ ID NO: 17118 - protein, 1770 aa, Trypanosoma brucei
MTTTNKCRYADFRSAFERVRPAQCMSNNGYSDKEVIRKIGAVGKEKCSKNKEKEQISQADKNETNGFYADFRSAFTRNERVELGNNNGYCHNEATRNIERGKKPKTSKIDEKRQISNIAAGRKSDHYEDPSSAFSRISIDHCNAQIKIGRKKMVRNLRSSEPQKISRFPRHHGEGKKVSPPALNLQWPGQKQVASAVAPQIRKSATPKKNNTNIHRNCRKHLRKEGDWWIVEGGQSHKKAAHSPLKTKPVNKEGNRKKYGRPPREVEGKWLTSLIAATTEAVLRQLGKGKSPTAHTKSNQSRVPLQHSEKTAKGIKHATPQPKKKEHEQRKELPRRPPTKRSHGANKGQGAPVRAPTKTQGKGEEQPHTMRTWAQVAAPKKQKVTSKPPMVQKKKAQGEKKGAAANPFHWELQVEQLLKDAEQIRESMYIRFLHVRQSWWSTCFKAHMEFHCPVCGFAHPEETITVTHCRQQHPQEGRLIPYTLTTTGNQVQFAGPSCSLSAVVAILSHMEEEKNFHPIIRRSYQSPSKETTQTLVQALGLELPTAPITAIEALAHHDQMIRQLLEAPATTARQCGHCGVNELMEGPSNPGENLGIISVNPNTCESIDLTNQILAKTYTTSWTDMEVVCTGERKNMAHRPTPTLITHSKTFGEMVVIDIGTWGNEAVGLKRILHEILLPHGNGTATYKLVGAVIAPTPFHVVAAIPQQTRKRRWDILDGMVRRTVSQSTVDPKTVVMCVYRREEEETYDVLDEEEQDDDLLGIPNPTPRRLMISQAGPQQNSWVDTRGRRAYGSQEEQDERTSTDQVSIFSHDETRELSSPLECPIVGCTASFVGPRRWEKAKSHIYGVHSLEEVREIPGGELICKGIVRCETCATLLPTSDRAKQAHADDCRPYLPRKENIRRKRAAEREATEASAQQGIALRLERQGPYITPRDIEEPTNTTTESWWREKVATKRYLHRKEWPQWLDICRTVLLGYSASSQGERHQRQVMLLDLVRNHLHTRTARREQQQQRGKDNQEEEDRQKEEEKSLAKRVETLCLLSATGRAAQLLAAEKAQPVEYSPEMAQTIGELYPQEDIHDIPRPPVEQPGVVSVDAEEVAKTIARRLTRGAAPGLDGWTRELLYPLTLDPALKMEIAAVVKDIINADVSMEVGRRLQATSLTVLRKPNGKYRPIGAESVWAKLASHIAISRVMKTAEKKFSGIQFGVGGHIEEAIAKIRKDFATKGSLAMLDGRNAYNAISRRAILEAVYGDSTWSPLWRLVSLLLGTTGEVGFYENGKLCHTWESTRGVRQGMVLGPLLFSIGTLATLRRLQQTFPEAQFTAYLDDVTVAAPPEELKNVCAATAEAMEALGIVNNADKTEVLELTGDTGFGTAVKACARVLGAYVAPDPMSEEIREGVEKKAMETDRLFKAIVELPLYNRTRWRILAMSAMPRITFLLRNHDMQHTHQVASWFDERTTQVMEHILGQPMTERARNIAALPVSMGGCGIRRMAQVAEYAHQCAGEKGLQQRKTEEADQRQQDDLYATLGGADRQVFTANTAAGAGRPLTDAQVRLDDATFGVYLRERLLVRVLPEGVKCLCGEDASNHHIHTCTKVHNKPRQMRHDIINSVFANGLRLCGFQCATEPRLNEVSKRRPDILIAGLDTYAVTDITVTYPGRVTVGNTAQGQRSVAAADPMKAALVRFQEKERKYSYWAIQNGLAFAPFVMLTNGAIFGKSRDWLRRVLRGQDHRLTVTTAFDGITADVVAAVLRGNVHVYSAAQARGETLR

SEQ ID NO: 17119 - protein, 1782 aa, Trypanosoma brucei
MTTTKNCRYADFRSGFERARPAQCMSNNGYCDKEVTKKLGAVEPKIFSKNGNFEKINRGQNDMTTTKNCRYADFRSAFERARPAQCMSNNGYSDKEVIRKIGAVGKEKCSKNKEKEQISQAEKNDTNGFYTDFRSAFTRNGRVELGNNNGYCHNEATRNIERGKKPKTSKIDEKRQISNIAAGRKSDHYEDPSSAFSRISIDHCNAQIKIGRKKMVRNLRSSEPQKISRFPRHHGEGKKVSSPALNLQWPGQKQVASAVAPQIRKIATPKNNNTSIHRNCRKHLRKEGDWWIVEGGQNHKKAAHSPLKTKPVNKEGNRKKYGRPPREVEGKWLTSLIAATTEAVLRQLGKGKSPTAHTKSNQSRVPLQHSEKTAKGIKYATPQPKKKAHEQRKELPRRPPTKRSHGANKGQGAPVRAPAKTQGKGEEQPHTMRTWAQVAAPKKQKVTSKPPMAQKKKAQGEKKGAAANPFHWELQVEQLLKDAEQIRESMYIRFLHVRQSWWSTCFKAHMEFHCPVCGFAHPEETITVTHCRQQHPQEGRLIPYTLTTTGNQVQFAGPSCSLSAVVAILSHMEEEKNFHPIIRRSYQSPSKETTQTLVQALGLELPTAPITAIEALAHHDQMIRQLLEAPATTARQCGHCGVNELMEGPSNPGENLGIISVNPNTCESIELTNQILAKTYTTSWTDMEVVCTGERKNMAHRPTPTLITHSKTFGEMVVIDIGTWGNEAVGLKRILHEILLPHGNGTATYKLVGAVIAPTPFHVVAAIPQQTRKRRWDILDGMVRRTVSQSTVDPKTVVMCVYRREEEETYDVLDEEEQDDDLLGIPNPTPRRLRISQAGPQQNSWVDTRGRRAYGSQEEQDERTSTDQVSIFSHDETRELSSPLECPIVGCTASFVGPRRWEKAKSHIYGVHSLEEVREIPRGELICKGIVRCETCATLLPTSDRAKQAHADDCRPYLPRKENIRRKRAAEREATEASAQQGIALRLERQGPYITPRDIEEPTNTTTESWWREKVATKRYLHRKEWPQWLDICRTVLLGYSASSQGERHQRQVMLLDLVRNHLHTRTARREQQQQRGKDNQEEEDRQKKEEKSLAKRVETLCLLSATGRAAQLLAAEKAQPVEYSPEMAQTIGELYPQEDIHDIPRPPVEQPGVVSVDAEEVAKTIGRRLTRGAAPGLDGWTRELLYPLTLDPALKMEIAAVVKDIINADVSMEVGRRLQATSLTVLRKPNGKYRPIGAESVWAKLASHIAISRVMKTAEKKFSGIQFGVGGHIEEAIAKIRKDFATKGSLAMLDGRNAYNAISRRAILEAVYGDSTWSPLWRLVSLLLGTTGEVGFYENGKLCHTWESTRGVRQGMVLGPLLFSIGTLATLRRLQQTFPEAQFTAYLDDVTVAAPPEELKNVCAATAEAMEALGIVNNADKTEVLELTGDTGFGTAVKACARVLGAYVAPDPMSEEIREGVEKKAMETDRLFKAIVELPLYNRTRWRILAMSAMPRITFLLRNHDMQHTHRVASWFDERTTQVMEHILGQPMTERARNIAALPVSMGGCGIRRMAQVAEYAHQCAGEKGLQQRKTEEADQRQQDDLYATLGGADRQVFTANTAAGAGRPLTDAQVRLDDATFGVYLRERLLVRVLPEGVKCLCGEDASNHHIHTCTKVHNKPRQMRHDIINSVFANGLRLCGFQCATEPRLNEVSKRRPDILIAGLDTYAVTDITVTYPGRVTVGNTAQGQRSVAAADPMKAALVRFQEKERKYSYWAIQNGLAFAPFVMLTKRCYFRQKS

SEQ ID NO: 17120 - protein, 2144 aa, Trypanosoma brucei
MISIGKEGKPQNQKKSCFGGSNPDLQNTNTIRRGVLPVGLFRQIGEKIENLCLDEIYQIVHIEEKKHRCTNGAHVEKSSGIDRSQVNKPITEISGSVSFLGQNIGRFDVKKSPENEYFEKINCGQIDITTTKNCRYADFRSGFERDRPAQCMSNNGYCDKEVTKKLGAAEPKIFSKNGNFEKINCGQIDITTTKNCRYADFRSGFERARPAQCMSNNGYCDKEVTKKLGAVEPKIFSKNGNFEKINRGQIDMTTTKNCRYEDFRSAFERARPAQCMSNNGYCDKEVTKKLGAAEPKIFSKNGNFEKINRGQNDMTTTKNCRYADFRSAFERARPAQCMSNNGYCDKEVTKKLGAAEPKIFSKNGNFEKINRGQIDMTTTKNCRYADFRSAFERARPAQCMSNNGYCNKEVIRKIGAVGKEKCSKNKEKEQISQAEKNDTNGFYTDFRSAFTRNGRVELGNNNGYCHNEATRNIERGKKPKTSKIDEKRQISNIAAGRKSDHYEDPSSAFSRISIDHCNAQIKIGRKKMVRNLRSSEPQKISRFPRHHGEGKKVSSPALNLQWPGQKQVASAVAPQIRKSATPKNNNTNIHRNCRKHLRKEGDWWIVEGGQNHKKAAHSPLKTKPVNKEGNRKKYGRPPREVEGKWLTSLIAATTEAVLRQLGKGKSPTAHTKSNQSRVPLQHSEKTAKGIKYATPQPKKKAHEQRKELPHWPPTKRSHGANKGQGAPVRAPAKTQGKGEEQPHTMRTWAQVAAPKKQKVTSKPPMAQKKKAQGEKKGAAANPFHWELQVEQLLKDAEQIRESMYIRFLHVRQSWWSTCFKAHMEFHCPVCGFAHPEETITVTHCRQQHPQEGRLIPYTLTTTGNQVQFAGPSCSLSAVVAILSHMEEEKNFHPIIRRSYQSPSKETTQTLVQALGLELPTAPITAIEALAHHDQMIRQLLEAPATTARQCGHCGVNELMEGPSNPGENLGIISVNPNTCESIELTNQILAKTYTTSWTDMEVVCTGERKNMAHRPTPTLITHSKTFGEMVVIDIGTWGNEAVGLKRILHEILLPHGNGTATYKLVGAVIAPTPFHVVAAIPQQTRKRRWDILDGMVRRTVSQSTVDPKTVVMCVYRREEEETYDVLDEEEQDDDLLGIPNPTPRRLRISQAGPQQNSWVDTRGRRAYGSQEEQDERTSTDQVSIFSHDETRELSSPLECPIVGCTASFVGPRRWEKAKSHIYGVHSLEEVREIPRGELICKGIVRCETCATLLPTSDRAKQAHADDCRPYLPRKENIRRKRAAEREATEASAQQGIALRLERQGPYITPRDIEEPTNTTTESWWREKVATKRYLHRKEWPQWLDICRTVLLGYSASSQGERHQRQVMLLDLVRNHLHTRTARREQQQQRGKDNQEEEDRQKKEKSLAKRVETLCLLSATGRAAQLLAAEKAQPVEYSPEMAQTIGELYPQEDIHDIPRPPVEQPGVVSVDAEEVAKTIARRLTRGAAPGLDGWTRELLYPLTLDPALKMEIAAVVKDIINADVSMEVGRRLQATSLTVLRKPNGKYRPIGAESVWAKLASHIAISRVMKTAEKKFSGIQFGVGGHIEEAIAKIRKDFATKGSLAMLDGRNAYNAISRRAILEAVYGDSTWSPLWRLVSLLLGTTGEVGFYENGKLCHTWESTRGVRQGMVLGPLLFSIGTLATLRRLQQTFPEAQFTAYLDDVTVAAPPEELKNVCAATAEAMEALGIVNNADKTEVLELTGDTGFGTAVKACARVLGAYVAPDPMSEEIREGVEKKAMETDRLFKAIVELPLYNRTRWRILAMSAMPRITFLLRNHDMQHTHRVASWFDERTTQVMEHILGQPMTERARNIAALPVSMGGCGIRRMAQVAEYAHQCAGEKGLQQRKTEEADQRQQDDLYATLGGADRQVFTANTAAGAGRPLTDAQVRLDDATFGVYLRERLLVRVLPEGVKCLCGEDASNHHIHTCTKVHNKPRQMRHDIINSVFANGLRLCGFQCATEPRLNEVSKRRPDILIAGLDTYAVTDITVTYPGRVTVGNTAQGQRSVAAADPMKAALVRFQEKERKYSYWAIQNGLAFAPFVMLTNGAIFGKSRDWLRRVLRGQDHRLTVTTAFDGITADVVAAVLRGNVHVYSAAQARGETLR

SEQ ID NO: 17121 - protein, 2086 aa, Trypanosoma brucei
MISIGKEGKPQNQKKSCFGGSNPDLQNTNTIRRGVLPVGLFRQIGEKIENLCLDEIYQIVHIEEKKHRCTNGAHVEKSSGIDRSQVNKPITEISGSVSFLGQNIGRFDVKKSPENEYFEKINCGQIDITTTKNCRYADFRSGFERDRPAQCMSNNGYCDKEVTKKLGAAEPNIFSKNGNFEKINCGQIDITTTKNCRYADFRSGFERARPAQCMSNNGYCDKEVTKKLGAVEPKIFSKNGNFEKINRGQIDMTTTKNCRYEDFRSAFERARPAQCMSNNGYCDKEVTKKLGAAEPKIFSKNGNFEKINRGQNDMTTTKNCRYADFRSAFERARPAQCMSNNGYCDKEVTKKLGAAEPKIFSKNGNFEKINRGQIDMTTTKNCRYADFRSAFTRNGRVELGNNNGYCHNEATRNIERGKKPKTSKIDEKRQISNIAAGRKSDHYEDPSSAFSRISIDHCNAQIKIGRKKMVRNLRSSEPQKISRFPRHHGEGKKVSSPALNLQWPGQKQVASAVAPQMRKRATPKNNNTSIHRNCRKHLRKEGDWWIVEGGQNHKKAAHSPLKTKPVNKEGNRKKYGRPPREVEGKWLTSLIAATTEAVLRQLGKGKSPTAHTKSNQSRVPLQHSEKTAKGIKYATPQPKKKAHEQRKELPHWPPTKRSHGANKGQGAPVRAPAKTQGKGEEQPHTMRTWAQVAAPKKQKVTSKPPMAQKKKAQGEKKGAAANPFHWELQVEQLLKDAEQIRESMYIRFLHVRQSWWSTCFKAHMEFHCPVCGFAHPEETITVTHCRQQHPQEGRLIPYTLTTTGNQVQFAGPSCSLSAVVAILSHMEEEKNFHPIIRRSYQSPSKETTQTLVQALGLELPTAPITAIEALAHHDQMIRQLLEAPATTARQCGHCGVNELMEGPSNPGENLGIISVNPNTCESIELTNQILAKTYTTSWTDMEVVCTGERKNMAHRPTPTLITHSKTFGEMVVIDIGTWGNEAVGLKRILHEILLPHGNGTATYKLVGAVIAPTPFHVVAAIPQQTRKRRWDILDGMVRRTVSQSTVDPKTVVMCVYRREEEETYDVLDEEEQDDDLLGIPNPTPRRLRISQAGPQQNSWVDTRGRRAYGSQEEQDERTSTDQVSIFSHDETRELSSPLECPIVGCTASFVGPRRWEKAKSHIYGVHSLEEVREIPRGELICKGIVRCETCATLLPTSDRAKQAHADDCRPYLPRKENIRRKRAAEREATEASAQQGIALRLERQGPYITPRDIEEPTNTTTESWWREKVATKRYLHRKEWPQWLDICRTVLLGYSASSQGERHQRQVMLLDLVRNHLHTRTARREQQQQRGKDNQEEEDRQKKEEKSLAKRVETLCLLSATGRAAQLLAAEKAQPVEYSPEMAQTIGELYPQEDIHDIPRPPVEQPGVVSVDAEEVAKTIARRLTRGAAPGLDGWTRELLYPLTLDPALKMEIAAVVKDIINADVSMEVGRRLQATSLTVLRKPNGKYRPIGAESVWAKLASHIAISRVMKTAEKKFSGIQFGVGGHIEEAIAKIRKDFATKGSLAMLDGRNAYNAISRRAILEAVYGDSTWSPLWRLVSLLLGTTGEVGFYENGKLCHTWESTRGVRQGMVLGPLLFSIGTLATLRRLQQTFPEAQFTAYLDDVTVAAPPEELKNVCAATAEAMEALGIVNNADKTEVLELTGDTGFGTAVKACARVLGAYVAPDPMSEEIREGVEKKAMETDRLFKAIVELPLYNRTRWRILAMSAMPRITFLLRNHDMQHTHRVASWFDERTTQVMEHILGQPMTERARNIAALPVSMGGCGIRRMAQVAEYAHQCAGEKGLQQRKTEEADQRQQDDLYATLGGADRQVFTANTAAGAGRPLTDAQVRLDDATFGVYLRERLLVRVLPEGVKCLCGEDASNHHIHTCTKVHNKPRQMRHDIINSVFANGLRLCGFQCATEPRLNEVSKRRPDILIAGLDTYAVTDITVTYPGRVTVGNTAQGQRSVAAADPMKAALVRFQEKERKYSYWAIQNGLAFAPFVMLTNGAIFGKSRDWLRRVLRGQDHRLTVTTAFDGITADVVAAVLRGNVHVYSAAQARGETLR

SEQ ID NO: 17122 - protein, 1343 aa, Trypanosoma brucei
MYIRFLHVRQSWWSTCFKAHMEFHCPVCGFAHPEETITVTHCRQQHPQEGRLIPYTLTTTGNQVQFAGPSCSLSAVVAILSHMEEEKNFHPIIRRSYQSPSKETTQTLVQALGLELPTAPITAIEALAHHDQMIRQLLEAPATTARQCGHCGVNELMEGPSNPGENLGIISVNPNTCESIELTNQILAKTYTTSWTDMEVVCTGERKNMAHRPTPTLITHSKTFGEMVVIDIGTWGNEAVGLKRILHEILLPHGNGTATYKLVGAVIAPTPFHVVAAIPQQTRKRRWDILDGMVRRTVSQSTVDPKTVVMCVYRREEEETYDVLDEEEQDDDLLGIPNPTPRRLMISQAGPQQNSWVDTRGRRAYGSQEEQDERTSTDQVSIFSHDETRELSSPLECPIVGCTASFVGPRRWEKAKSHIYGVHSLEEVREIPGGELICKGIVRCETCATLLPTSDRAKQAHADDCRPYLPRKENIRRKRAAEREATEASAQQGIALRLERQGPYITPRDIEEPTNTTTESWWREKVATKRYLHRKEWPQWLDICRTVLLGYSASSQGERHQRQVMLLDLVRNHLHTRTARREQQQQRGKDNQEEEDRQKEEEKSLAKRVETLCLLSATGRAAQLLAAEKAQPVEYSPEMAQTIGELYPQEDIHDIPRPPVEQPGVVSVDAEEVAKTIARRLTRGAAPGLDGWTRELLYPLTLDPALKMEIAAVVKDIINADVSMKVGRRLQATSLTVLRKPNGKYRPIGAESVWAKLASHIAISRVMKTAEKKFSGIQFGVGGHIEEAIAKIRKDFATKGSLAMLDGRNAYNAISRRAILEAVYGDSTWSPLWRLVSLLLGTTGEVGFYENGKLCHTWESTRGVRQGMVLGPLLFSIGTLATLRRLQQTFPEAQFTAYLDDVTVAAPPEELKNVCAATAEAMEALGIVNNADKTEVLELTGDTGFGTAVKACARVLGAYVAPDPMSEEIREGVEKKAMETDRLFKAIVELPLYNRTRWRILAMSAMPRITFLLRNHDMQHTHQVASWFDERTTQVMEHILGQPMTERARNIAALPVSMGGCGIRRMAQVAEYAHQCAGEKGLQQRKTEEADQRQQDDLYATLGGADRQVFTANTAAGAGRPLTDAQVRLDDATFGVYLRERLLVRVLPEGVKCLCGEDASNHHIHTCTKVHNKPRQMRHDIINSVFANGLRLCGFQCATEPRLNEVSKRRPDILIAGLDTYAVTDITVTYPGRVTVGNTAQGQRSVAAADPMKAALVRFQEKERKYSYWAIQNGLAFAPFVMLTNGAIFGKSRDWLRRVLRGQDHRLTVTTAFDGITADVVAAVLRGNVHVYSAAQARGETLR

SEQ ID NO: 17123 - protein, 1560 aa, Trypanosoma brucei
MVRNLRSSEPQKISRFPRHHGEGKKVSSPALNLQWPGQKQVASAVAPQIRKSATPKNNNTNIHRNCRKHLRKEGDWWIVEGGQNHKKAAHSPLKTKPVNKEGNRKKYGRPPREVEGKWLTSLIAATTEAVLRQLGKGKSPTAHTKSNQSRVPLQHSEKTAKGIKYATPQPKKKAHEQRKELPRRPPTKRSHGANKGQGAPVRAPAKTQGKGEEQPHTMRTWAQVAAPKKQKVTSKPPMAQKKKAQGEKKGAAANPFHWELQVEQLLKDAEQIRESMYIRFLHVRQSWWSTCFKAHMEFHCPVCGFAHPEETITVTHCRQQHPQEGRLIPYTLTTTGNQVQFAGPSCSLSAVVAILSHMEEEKNFHPIIRRSYQSPSKETTQTLVQALGLELPTAPITAIEALAHHDQMIRQLLEAPATTARQCGHCGVNELMEGPSNPGENLGIISVNPNTCESIELTNQILAKTYTTSWTDMEVVCTGERKNMAHRPTPTLITHSKTFGEMVVIDIGTWGNEAVGLKRILHEILLPHGNGTATYKLVGAVIAPTPFHVVAAIPQQTRKRRWDILDGMVRRTVSQSTVDPKTVVMCVYRREEEETYDVLDEEEQDDDLLGIPNPTPRRLRISQAGPQQNSWVDTRGRRAYGSQEEQDERTSTDQVSIFSHDETRELSSPLECPIVGCTASFVGPRRWEKAKSHIYGVHSLEEVREIPRGELICKGIVRCETCATLLPTSDRAKQAHADDCRPYLPRKENIRRKRAAEREATEASAQQGIALRLERQGPYITPRDIEEPTNTTTESWWREKVATKRYLHRKEWPQWLDICRTVLLGYSASSQGERHQRQVMLLDLVRNHLHTRTARREQQQQRGKDNQEEEDRQKEEEKSLAKRVETLCLLSATGRAAQLLAAEKAQPVEYSPEMAQTIGELYPQEDIHDIPRPPVEQPGVVSVDAEEVAKTIARRLTRGAAPGLDGWTRELLYPLTLDPALKMEIAAVVKDIINADVSMEVGRRLQATSLTVLRKPNGKYRPIGAESVWAKLASHIAISRVMKTAEKKFSGIQFGVGGHIEEAIAKIRKDFATKGSLAMLDGRNAYNAISRRAILEAVYGDSTWSPLWRLVSLLLGTTGEVGFYENGKLCHTWESTRGVRQGMVLGPLLFSIGTLATLRRLQQTFPEAQFTAYLDDVTVAAPPEELKNVCAATAEAMEALGIVNNADKTEVLELTGDTGFGTAVKACARVLGAYVAPDPMSEEIREGVEKKAMETDRLFKAIVELPLYNRTRWRILAMSAMPRITFLLRNHDMQHTHRVASWFDERTTQVMEHILGQPMTERARNIAALPVSMGGCGIRRMAQVAEYAHQCAGEKGLQQRKTEEADQRQQDDLYATLGGADRQVFTANTAAGAGRPLTDAQVRLDDATFGVYLRERLLVRVLPEGVKCLCGEDASNHHIHTCTKVHNKPRQMRHDIINSVFANGLRLCGFQCATEPRLNEVSKRRPDILIAGLDYVRGDGHHGDVSRARDRRKHRPRSALSSCGRSNESRIGALPGKGAQVQLLGDTKWTGLRTICYAYK

SEQ ID NO: 17124 - protein, 1773 aa, Trypanosoma brucei
MTTTKNCRYADFRSAFERARPAQCMSNNGYCDKEVTKKLGAAEPKIFSKNGNFEKINRGQIDMTTTKNCRYADFRSAFTRNGRVELGNNNGYCHNEATRNIERGKKPKTSKIDEKRQISNIAAGRKSDHYEDPSSAFSRISIDHCNAQIKIGRKKMVRNLRSSEPQKISRFPRHHGEGKKVSSPALNLQWPGQKQVASAVAPQMRKRATPKNNNTSIHRNCRKHLRKEGDWWIVEGGQNHKKAAHSPLKTKPVNKEGNRKKYGRPPREVEGKWLTSLIAATTEAVLRQLGKGKSPTAHTKSNQSRVPLQHSEKTAKGIKYATPQPKKKAHEQRKELPHWPPTKRSHGANKGQGAPVRAPAKTQGKGEEQPHTMRTWAQVAAPKKQKVTSKPPMAQKKKAQGEKKGAAANPFHWELQVEQLLKDAEQIRESMYIRFLHVRQSWWSTCFKAHMEFHCPVCGFAHPEETITVTHCRQQHPQEGRLIPYTLTTTGNQVQFAGPSCSLSAVVAILSHMEEEKNFHPIIRRSYQSPSKETTQTLVQALGLELPTAPITAIEALAHHDQMIRQLLEAPATTARQCGHCGVNELMEGPSNPGENLGIISVNPNTCESIELTNQILAKTYTTSWTDMEVVCTGERKNMAHRPTPTLITHSKTFGEMVVIDIGTWGNEAVGLKRILHEILLPHGNGTATYKLVGAVIAPTPFHVVAAIPQQTRKRRWDILDGMVRRTVSQSTVDPKTVVMCVYRREEEETYDVLDEEEQDDDLLGIPNPTPRRLRISQAGPQQNSWVDTRGRRAYGSQEEQDERTSTDQVSIFSHDETRELSSPLECPIVGCTASFVGPRRWEKAKSHIYGVHSLEEVREIPRGELICKGIVRCETCATLLPTSDRAKQAHADDCRPYLPRKENIRRKRAAEREATEASAQQGIALRLERQGPYITPRDIEEPTNTTTESWWREKVATKRYLHRKEWPQWLDICRTVLLGYSASSQGERHQRQVMLLDLVRNHLHTRTARREQQQQRGKDNQEEEDRQKKEEKSLAKRVETLCLLSATGRAAQLLAAEKAQPVEYSPEMAQTIGELYPQEDIHDIPRPPVEQPGVVSVDAEEVAKTIARRLTRGAAPGLDGWTRELLYPLTLDPALKMEIAAVVKDIINADVSMEVGRRLQATSLTVLRKPNGKYRPIGAESVWAKLASHIAISRVMKTAEKKFSGIQFGVGGHIEEAIAKIRKDFATKGSLAMLDGRNAYNAISRRAILEAVYGDSTWSPLWRLVSLLLGTTGEVGFYENGKLCHTWESTRGVRQGMVLGPLLFSIGTLATLRRLQQTFPEAQFTAYLDDVTVAAPPEELKNVCAATAEAMEALGIVNNADKTEVLELTGDTGFGTAVKACARVLGAYVAPDPMSEEIREGVEKKAMETDRLFKAIVELPLYNRTRWRILAMSAMPRITFLLRNHDMQHTHRVASWFDERTTQVMEHILGQPMTERARNIAALPVSMGGCGIRRMAQVAEYAHQCAGEKGLQQRKTEEADQRQQDDLYATLGGADRQVFTANTAAGAGRPLTDAQVRLDDATFGVYLRERLLVRVLPEGVKCLCGEDASNHHIHTCTKVHNKPRQMRHDIINSVFANGLRLCGFQCATEPRLNEVSKRRPDILIAGLDTYAVTDITVTYPGRVTVGNTAQGQRSVAAADPMKAALVRFQEKERKYSYWAIQNGLAFAPFVMLTNGAIFGKSRDWLRRVLRGQDHRLTVTTAFDGITADVVAAVLRGNVHVYSAAQARGETLR

SEQ ID NO: 17125 - protein, 1618 aa, Trypanosoma brucei
MVRNLRSSEPQKISRFPRHHGEGKKVSPPALNLQWPGQKQVASAVAPQIRKSATPKKNNTNIHRNCRKHLRKEGDWWIVEGGQSHKKAAHSPLKTKPVNKEGNRKKYGRPPREVEGKWLTSLIAATTEAVLRQLGKGKSPTAHTKSNQSRVPLQHSEKTAKGIKHATPQPKKKEHEQRKELPRRPPTKRSHGANKGQGAPVRAPAKTQGKGEEQPHTMRTWAQVAAPKKQKVTSKPPMVQKKKAQGEKKGAAANPFHWELQVEQLLKDAEQIRESMYIRFLHVRQSWWSTCFKAHMEFHCPVCGFAHPEETITVTHCRQQHPQEGRLIPYTLTTTGNQVQFAGPSCSLSAVVAILSHMEEEKNFHPIIRRSYQSPSKETTQTLVQALGLELPTAPITAIEALAHHDQMIRQLLEAPATTARQCGHCGVNELMEGPSNPGENLGIISVNPNTCESIELTNQILAKTYTTSWTDMEVVCTGERKNMAHRPTPTLITHSKTFGEMVVIDIGTWGNEAVGLKRILHEILLPHGNGTATYKLVGAVIAPTPFHVVAAIPQQTRKRRWDILDGMVRRTVSQSTVDPKTVVMCVYRREEEETYDVLDEEEQDDDLLGIPNPTPRRLMISQAGPQQNSWVDTRGRRAYGSQEEQDERTSTDQVSIFSHDETRELSSPLECPIVGCTASFVGPRRWEKAKSHIYGVHSLEEVREIPGGELICKGIVRCETCATLLPTSDRAKQAHADDCRPYLPRKENIRRKRAAEREATEASAQQGIALRLERQGPYITPRDIEEPTNTTTESWWREKVATKRYLHRKEWPQWLDICRTVLLGYSASSQGERHQRQVMLLDLVRNHLHTRTARREQQQQRGKDNQEEEDRQKEEEKSLAKRVETLCLLSATGRAAQLLAAEKAQPVEYSPEMAQTIGELYPQEDIHDIPRPPVEQPGVVSVDAEEVAKTIARRLTRGAAPGLDGWTRELLYPLTLDPALKMEIAAVVKDIINADVSMEVGRRLQATSLTVLRKPNGKYRPIGAESVWAKLASHIAISRVMKTAEKKFSGIQFGVGGHIEEAIAKIRKDFATKGSLAMLDGRNAYNAISRRAILEAVYGDSTWSPLWRLVSLLLGTTGEVGFYENGKLCHTWESTRGVRQGMVLGPLLFSIGTLATLRRLQQTFPEAQFTAYLDDVTVAAPPEELKNVCAATAEAMEALGIVNNADKTEVLELTGDTGFGTAVKACARVLGAYVAPDPMSEEIREGVEKKAMETDRLFKAIVELPLYNRTRWRILAMSAMPRITFLLRNHDMQHTHQVASWFDERTTQVMEHILGQPMTERARNIAALPVSMGGCGIRRMAQVAEYAHQCAGEKGLQQRKTEEADQRQQDDLYATLGGADRQVFTANTAAGAGRPLTDAQVRLDDATFGVYLRERLLVRVLPEGVKCLCGEDASNHHIHTCTKVHNKPRQMRHDIINSVFANGLRLCGFQCATEPRLNEVSKRRPDILIAGLDTYAVTDITVTYPGRVTVGNTAQGQRSVAAADPMKAALVRFQEKERKYSYWAIQNGLAFAPFVMLTNGAIFGKSRDWLRRVLRGQDHRLTVTTAFDGITADVVAAVLRGNVHVYSAAQARGETLR

SEQ ID NO: 17126 - protein, 2207 aa, Trypanosoma brucei
MISIGKEGKPQNQKKSCFGGSNPDLQNTNTIRRGVLPVGLFRQIGGKIENLCSDEIYQIVHIEEKKHRCTNGAHVEKSSGIDRSQVNKPIKEISGSFSFLGQNIGRLDVKKSPENEYLEKNNCGQNDITTTKNCRYADFRSAFERARPAQCMSNNGYCDKEVTKKLGAAEPKIFSKNGNFEKINRGQIDMTTTKNCRYADFRSAFERARPAQCMSNNGYCDKEVTKKLGAVEPKIFSKNGNFEKINRGQIDMTTTKNCRYADFRSAFERARPAQCMSNNGYCDKEVTKKLGAVEPKIFSKNGNFEKINRGQIDMTTTKNCRYADFRSAFERARPAQCMSNNGYCDKEVTKKLGAAEPKIFSKNGNFEKINRGQIDMTTTKNCRYADFRSAFERARPAQCMSNNGYCDKEVTKKLGAAEPKIFSKNGNFEKINRGQIDMTTTKNCRYADFRSAFERARPAQCMSNNGYSDKEVIRKIGAVGKEKCSKNKEKEQISQADKNETNGFYADFRSAFTRNERVELGNNNGYCHNEATRNIERGKKPKTSKIDEKRQISNIAAGRKSDHYEDPSSAFSRISIDHCNAQIKIGRKKMVRNLRSSEPQKISRFPRHHGEGKKVSPPALNLQWPGQKQVASAVAPQIRKSATPKKNNTNIHRNCRKHLRKEGDWWIVEGGQSHKKAAHSPLKTKPVNKEGNRKKYGRPPREVEGKWLTSLIAATTEAVLRQLGKGKSPTAHTKSNQSRVPLQHSEKTAKGIKHATPQPKKKEHEQGKELPRRPPTKRSHGANKGQGAPVRAPAKTQGKGEEQPHTMRTWAQVAAPKKQKVTSKPPMVQKKKAQGEKKGAAANPFHWELQVEQLLKDAEQIRESMYIRFLHVRQSWWSTCFKAHMEFHCPVCGFAHPEETITVTHCRQQHPQEGRLIPYTLTTTGNQVQFAGPSCSLSAVVAILSHMEEEKNFHPIIRRSYQSPSKETTQTLVQALGLELPTAPITAIEALAHHDQMIRQLLEAPATTARQCGHCGVNELMEGPSNPGENLGIISVNPNTCESIELTNQILAKTYTTSWTDMEVVCTGERKNMAHRPTPTLITHSKTFGEMVVIDIGTWGNEAVGLKRILHEILLPHGNGTATYKLVGAVIAPTPFHVVAAIPQQTRKRRWDILDGMVRRTVSQSTVDPKTVVMCVYRREEEETYDVLDEEEQDDDLLGIPNPTPRRLMISQAGPQQNSWVDTRGRRAYGSQEEQDERTSTDQVSIFSHDETRELSSPLECPIVGCTASFVGPRRWEKAKSHIYGVHSLEEVREIPGGELICKGIVRCETCATLLPTSDRAKQAHADDCRPYLPRKENIRRKRAAEREATEASAQQGIALRLERQGPYITPRDIEEPTNTTTESWWREKVATKRYLHRKEWPQWLDICRTVLLGYSASSQGERHQRQVMLLDLVRNHLHTRTARREQQQQRGKDNQEEEDRQKEEEKSLAKRVETLCLLSATGRAAQLLAAEKAQPVEYSPEMAQTIGELYPQEDIHDIPRPPVEQPGVVSVDAEEVAKTIARRLTRGAAPGLDGWTRELLYPLTLDPALKMEIAAVVKDIINADVSMEVGRRLQATSLTVLRKPNGKYRPIGAESVWAKLASHIAISRVMKTAEKKFSGIQFGVGGHIEEAIAKIRKDFATKGSLAMLDGRNAYNAISRRAILEAVYGDSTWSPLWRLVSLLLGTTGEVGFYENGKLCHTWESTRGVRQGMVLGPLLFSIGTLATLRRLQQTFPEAQFTAYLDDVTVAAPPEELKNVCAATAEAMEALGIVNNADKTEVLELTGDTGFGTAVKACARVLGAYVAPDPMSEEIREGVEKKAMETDRLFKAIVELPLYNRTRWRILAMSAMPRITFLLRNHDMQHTHQVASWFDERTTQVMEHILGQPMTERARNIAALPVSMGGCGIRRMAQVAEYAHQCAGEKGLQQRKTEEADQRQQDDLYATLGGADRQVFTANTAAGAGRPLTDAQVRLDDATFGVYLRERLLVRVLPEGVKCLCGEDASNHHIHTCTKVHNKPRQMRHDIINSVFANGLRLCGFQCATEPRLNEVSKRRPDILIAGLDTYAVTDITVTYPGRVTVGNTAQGQRSVAAADPMKAALVRFQEKERKYSYWAIQNGLAFAPFVMLTNGAIFGKSRDWLRRVLRGQDHRLTVTTAFDGITADVVAAVLRGNVHVYSAAQARGETLR

SEQ ID NO: 17127 - protein, 1870 aa, Trypanosoma brucei
MSNNGYSDKEVTKKLGAAEPKIFSKNGNFEKINRGQIDMTTTNKCRYADFRSAFERARPAQCMSNNGYCNKEVTKKLGAAEPKIFSKNGNFEKINRGQIDMTTTNKCRYADFRSAFERARPAQCMSNNGYSDKEVIRKIGAVGKEKCSKNKEKEQISQADKNETNGFYADFRSAFTRNERVELGNNNGYCHNEATRNIERGKKPKTSKIDEKRQISNIAAGRKSDHYEDPSSAFSRISIDHCNAQIKIGRKKMVRNLRSSEPQKISRFPRHHGEGKKVSPPALNLQWPGQKQVASAVAPQIRKSATPKKNNTNIHRNCRKHLRKEGDWWIVEGGQSHKKAAHSPLKTKPVNKEGNRKKYGRPPREVEGKWLTSLIAATTEAVLRQLGKGKSPTAHTKSNQSRVPLQHSEKTAKGIKHATPQPKKKEHEQGKELPRRPPTKRSHGANKGQGAPVRAPAKTQGKGEEQPHTMRTWAQVAAPKKQKVTSKPPMVQKKKAQGEKKGAAANPFHWELQVEQLLKDAEQIRESMYIRFLHVRQSWWSTCFKAHMEFHCPVCGFAHPEETITVTHCRQQHPQEGRLIPYTLTTTGNQVQFAGPSCSLSAVVAILSHMEEEKNFHPIIRRSYQSPSKETTQTLVQALGLELPTAPITAIEALAHHDQMIRQLLEAPATTARQCGHCGVNELMEGPSNPGENLGIISVNPNTCESIELTNQILAKTYTTSWTDMEVVCTGERKNMAHRPTPTLITHSKTFGEMVVIDIGTWGNEAVGLKRILHEILLPHGNGTATYKLVGAVIAPTPFHVVAAIPQQTRKRRWDILDGMVRRTVSQSTVDPKTVVMCVYRREEEETYDVLDEEEQDDDLLGIPNPTPRRLMISQAGPQQNSWVDTRGRRAYGSQEEQDERTSTDQVSIFSHDETRELSSPLECPIVGCTASFVGPRRWEKAKSHIYGVHSLEEVREIPGGELICKGIVRCETCATLLPTSDRAKQAHADDCRPYLPRKENIRRKRAAEREATEASAQQGIALRLERQGPYITPRDIEEPTNTTTESWWREKVATKRYLHRKEWPQWLDICRTVLLGYSASSQGERHQRQVMLLDLVRNHLHTRTARREQQQQRGKDNQEEEDRQKEEEKSLAKRVETLCLLSATGRAAQLLAAEKAQPVEYSPEMAQTIGELYPQEDIHDIPRPPVEQPGVVSVDAEEVAKTIARRLTRGAAPGLDGWTRELLYPLTLDPALKMEIAAVVKDIINADVSMEVGRRLQATSLTVLRKPNGKYRPIGAESVWAKLASHIAISRVMKTAEKKFSGIQFGVGGHIEEAIAKIRKDFATKGSLAMLDGRNAYNAISRRAILEAVYGDSTWSPLWRLVSLLLGTTGEVGFYENGKLCHTWESTRGVRQGMVLGPLLFSIGTLATLRRLQQTFPEAQFTAYLDDVTVAAPPEELKNVCAATAEAMEALGIVNNADKTEVLELTGDTGFGTAVKACARVLGAYVAPDPMSEEIREGVEKKAMETDRLFKAIVELPLYNRTRWRILAMSAMPRITFLLRNHDMQHTHQVASWFDERTTQVMEHILGQPMTERARNIAALPVSMGGCGIRRMAQVAEYAHQCAGEKGLQQRKTEEADQRQQDDLYATLGGADRQVFTANTAAGAGRPLTDAQVRLDDATFGVYLRERLLVRVLPEGVKCLCGEDASNHHIHTCTKVHNKPRQMRHDIINSVFANGLRLCGFQCATEPRLNEVSKRRPDILIAGLDTYAVTDITVTYPGRVTVGNTAQGQRSVAAADPMKAALVRFQEKERKYSYWAIQNGLAFAPFVMLTNGAIFGKSRDWLRRVLRGQDHRLTVTTAFDGITADVVAAVLRGNVHVYSAAQARGETLR

SEQ ID NO: 17128 - protein, 2083 aa, Trypanosoma brucei
MISIGKEGKPQNQKKSCFGGSNPDLQNTNTIRRGVLPVGLFRQIGGKIENLCSDEIYQIVHIEEKKHRCTNGAHVEKSSGIDRSQVNKPIKEISGSFSFLGQNIGRLDVKKSPENEYLEKINRGQNDMTATKNCRYADFRSAFERARPAQCMSNNGYCDKEVTKKLGAVEPKIFSKNGNFEKINRGQIDMTTTKNCRYADFRSAFERARPAQCMSNNGYCDKEVTKKLGAAEPKIFSENGNFEKINRGQIDMTTTKNCRYADFRSAFERARPAQCMSNNGYCDKEVTKKLGAAEPKIFSKNGNFEKINRGQIDMTTTKNCRYADFRSAFERARPAQCMSNNGYSDKEVIRKIGAVGKEKCSKNKEKEQISQADKNETNGFYADFRSAFTRNERVELGNNNGYCHNEATRNIERGKKPKTSKIDEKRQISNIAAGRKSDHYEDPSSAFSRISIDHCNAQIKIGRKKMVRNLRSSEPQKISRFPRHHGEGKKVSPPALNLQWPGQKQVASAVAPQIRKSATPKKNNTNIHRNCRKHLRKEGDWWIVEGGQSHKKAAHSPLKTKPVNKEGNRKKYGRPPREVEGKWLTSLIAATTEAVLRQLGKGKSPTAHTKSNQSRVPLQHSEKTAKGIKHATPQPKKKEHEQGKELPRRPPTKRSHGANKGQGAPVRAPTKTQGKGEEQPHTMRTWAQVAAPKKQKVTSKPPMVQKKKAQGEKKGAAANPFHWELQVEQLLKDAEQIRESMYIRFLHVRQSWWSTCFKAHMEFHCPVCGFAHPEETITVTHCRQQHPQEGRLIPYTLTTTGNQVQFAGPSCSLSAVVAILSHMEEEKNFHPIIRRSYQSPSKETTQTLVQALGLELPTAPITAIEALAHHDQMIRQLLEAPATTARQCGHCGVNELMEGPSNPGENLGIISVNPNTCESIELTNQILAKTYTTSWTDMEVVCTGERKNMAHRPTPTLITHSKTFGEMVVIDIGTWGNEAVGLKRILHEILLPHGNGTATYKLVGAVIAPTPFHVVAAIPQQTRKRRWDILDGMVRRTVSQSTVDPKTVVMCVYRREEEETYDVLDEEEQDDDLLGIPNPTPRRLMISQAGPQQNSWVDTRGRRAYGSQEEQDERTSTDQVSIFSHDETRELSSPLECPIVGCTASFVGPRRWEKAKSHIYGVHSLEEVREIPGGELICKGIVRCETCATLLPTSDRAKQAHADDCRPYLPRKENIRRKRAAEREATEASAQQGIALRLERQGPYITPRDIEEPTNTTTESWWREKVATKRYLHRKEWPQWLDICRTVLLGYSASSQGERHQRQVMLLDLVRNHLHTRTARREQQQQRGKDNQEEEDRQKEEEKSLAKRVETLCLLSATGRAAQLLAAEKAQPVEYSPEMAQTIGELYPQEDIHDIPRPPVEQPGVVSVDAEEVAKTIARRLTRGAAPGLDGWTRELLYPLTLDPALKMEIAAVVKDIINADVSMEVGRRLQATSLTVLRKPNGKYRPIGAESVWAKLASHIAISRVMKTAEKKFSGIQFGVGGHIEEAIAKIRKDFATKGSLAMLDGRNAYNAISRRAILEAVYGDSTWSPLWRLVSLLLGTTGEVGFYENGKLCHTWESTRGVRQGMVLGPLLFSIGTLATLRRLQQTFPEAQFTAYLDDVTVAAPPEELKNVCAATAEAMEALGIVNNADKTEVLELTGDTGFGTAVKACARVLGAYVAPDPMSEEIREGVEKKAMETDRLFKAIVELPLYNRTRWRILAMSAMPRITFLLRNHDMQHTHQVASWFDERTTQVMEHILGQPMTERARNIAALPVSMGGCGIRRMAQVAEYAHQCAGEKGLQQRKTEEADQRQQDDLYATLGGADRQVFTANTAAGAGRPLTDAQVRLDDATFGVYLRERLLVRVLPEGVKCLCGEDASNHHIHTCTKVHNKPRQMRHDIINSVFANGLRLCGFQCATEPRLNEVSKRRPDILIAGLDTYAVTDITVTYPGRVTVGNTAQGQRSVAAADPMKAALVRFQEKERKYSYWAIQNGLAFAPFVMLTNGAIFGKSRDWLRRVLRGQDHRLTVTTAFDGITADVVAAVLRGNVHVYSAAQARGETLR

SEQ ID NO: 17129 - protein, 1401 aa, Trypanosoma brucei
MRTWAQVAAPKKQKVTSKPPMVQKKKAQGEKKGAAANPFHWELQVEQLLKDAEQIRESMYIRFLHVRQSWWSTCFKAHMEFHCPVCGFAHPEETITVTHCRQQHPQEGRLIPYTLTTTGNQVQFAGPSCSLSAVVAILSHMEEEKNFHPIIRRSYQSPSKETTQTLVQALGLELPTAPITAIEALAHHDQMIRQLLEAPATTARQCGHCGVNELMEGPSNPGENLGIISVNPNTCESIELTNQILAKTYTTSWTDMEVVCTGERKNMAHRPTPTLITHSKTFGEMVVIDIGTWGNEAVGLKRILHEILLPHGNGTATYKLVGAVIAPTPFHVVAAIPQQTRKRRWDILDGMVRRTVSQSTVDPKTVVMCVYRREEEETYDVLDEEEQDDDLLGIPNPTPRRLMISQAGPQQNSWVDTRGRRAYGSQEEQDERTSTDQVSIFSHDETRELSSPLECPIVGCTASFVGPRRWEKAKSHIYGVHSLEEVREIPGGELICKGIVRCETCATLLPTSDRAKQAHADDCRPYLPRKENIRRKRAAEREATEASAQQGIALRLERQGPYITPRDIEEPTNTTTESWWREKVATKRYLHRKEWPQWLDICRTVLLGYSASSQGERHQRQVMLLDLVRNHLHTRTARREQQQQRGKDNQEEEDRQKEEEKSLAKRVETLCLLSATGRAAQLLAAEKAQPVEYSPEMAQTIGELYPQEDIHDIPRPPVEQPGVVSVDAEEVAKTIARRLTRGAAPGLDGWTRELLYPLTLDPALKMEIAAVVKDIINADVSMEVGRRLQATSLTVLRKPNGKYRPIGAESVWAKLASHIAISRVMKTAEKKFSGIQFGVGGHIEEAIAKIRKDFATKGSLAMLDGRNAYNAISRRAILEAVYGDSTWSPLWRLVSLLLGTTGEVGFYENGKLCHTWESTRGVRQGMVLGPLLFSIGTLATLRRLQQTFPEAQFTAYLDDVTVAAPPEELKNVCAATAEAMEALGIVNNADKTEVLELTGDTGFGTAVKACARVLGAYVAPDPMSEEIREGVEKKAMETDRLFKAIVELPLYNRTRWRILAMSAMPRITFLLRNHDMQHTHQVASWFDERTTQVMEHILGQPMTERARNIAALPVSMGGCGIRRMAQVAEYAHQCAGEKGLQQRKTEEADQRQQDDLYATLGGADRQVFTANTAAGAGRPLTDAQVRLDDATFGVYLRERLLVRVLPEGVKCLCGEDASNHHIHTCTKVHNKPRQMRHDIINSVFANGLRLCGFQCATEPRLNEVSKRRPDILIAGLDTYAVTDITVTYPGRVTVGNTAQGQRSVAAADPMKAALVRFQEKERKYSYWAIQNGLAFAPFVMLTNGAIFGKSRDWLRRVLRGQDHRLTVTTAFDGITADVVAAVLRGNVHVYSAAQARGETLR

SEQ ID NO: 17130 - protein, 1401 aa, Trypanosoma brucei
MRTWAQVAAPKKQKVTSKPPMVQKKKAQGEKKGAAANPFHWELQVEQLLKDAEQIRESMYIRFLHVRQSWWNTCFKAHMEFHCPVCGFAHPEETITVTHCRQQHPQEGRLIPYTLTTTGNQVQFAGPSCSLSAVVAILSHMEEEKNFHPIIRRSYQSPSKETTQTLVQALGLELPTAPITAIEALAHHDQMIRQLLEAPATTARQCGHCGVNELMEGPSNPGENLGIISVNPNTCESIELTNQILAKKYTTSWTDMEVVCTGERKNMAHRPTPTLITHSKTFGEMVVIDIGTWGNEAVGLKRILHEILLPHGNGTATYKLVGAVIAPTPFHVVAAIPQQTRKRRWDILDGMVRRTVSQSTVDPKTVVMCVYRREEEETYDVLDEEEQDDDLLGIPNPTPRRLMISQAGPQQNSWVDTRGRRAYGSQEEQDERTSTDQVSIFSHDETRELSSPLECPIVGCTASFVGPRRWEKAKSHIYGVHSLEEVREIPGGELICKGIVRCETCATLLPTSDRAKQAHADDCRPYLPRKENIRRKRAAEREATEASAQQGIALRLERQGPYITPRDIEEPTNTTTESWWREKVATKRYLHRKEWPQWLDICRTVLLGYSASSQGERHQRQVMLLDLVRNHLHTRTARREQQQQRGKDNQEEEDRQKEEEKSLAKRVETLCLPSATGRAAQLLAAEKAQPVEYSPEMAQTIGELYPQEDIHDIPRPPVEQPGVVSVDAEEVAKTIGRRLTRGAAPGLDGWTRELLYPLTLDPALKMEIAAVVKDIINADVSMEVGRRLQATSLTVLRKPNGKYRPIGAESVWAKLASHIAISRVMKTAEKKFSGIQFGVGGHIEEAIAKIRKDFATKGSLAMLDGRNAYNAISRRAILEAVYGDSTWSPLWRLVSLLLGTTGEVGFYENGKLCHTWESTRGVRQGMVLGPLLFSIGTLATLRRLQQTFPEAQFTAYLDDVTVAAPPEELKNVCAATAEAMEALGIVNNADKTEVLELTGDTGFGTAVKACARVLGAYVAPDPMSEEIREGVEKKAMETDRLFKAIVELPLYNRTRWRILAMSAMPRITFLLRNHDMQHTHQVASWFDERTTQVMEHILGQPMTERARNIAALPVSMGGCGIRRMAQVAEYAHQCAGEKGLQQRKTEEADQRQQDDLYATLGGADRQVFTANTAAGAGRPLTDAQVRLDDATFGVYLRERLLVRVLPEGVKCLCGEDASNHHIHTCTKVHNKPRQMRHDIINSVFANGLRLCGFQCATEPRLNEVSKRRPDILIAGLDTYAVTDITVTYPGRVTVGNTAQGQRSVAAADPMKAALVRFQEKERKYSYWAIQNGLAFAPFVMLTNGAIFGKSRDWLRRVVRGQDHRLTVTTAFDGITADVVAAVLRGNVHVYSAAQARGETLR

SEQ ID NO: 17131 - protein, 2207 aa, Trypanosoma brucei
MISIGKEGKPENQKKSCFGGSNPDLQNTNTIRRGVLPVGLFRQIGGKIENLCSDEIYQIVHIEEKKHRCTNGAHVEKSSGIDRSQVNKPIKEISGSFSFLGQNIGRLDVKKSPENEYLEKNNCGQNDITTTKNCRYADFRSAFERARPAQCMSNNGYCNKEVTKKLGAAEPKIFSKNGNFEKINRGQIDMTTTKNCRYADFRGAFERARPAQCMSNNGYCDKEVTKKLGAVEPKIFSKNGNFEKINRGQIDMTTTKNCRYADFRSAFERARPAQCMSNNGYCNKEVTKKLGAAEPKIFSKNGNFEKINRGQIDMTTTKNCRYADFRSAFERARPAQCMSNNGYCDKEVTKKLGAAEPKIFSKNGNFEKINRGQIDMTTTKNCRYADFRSAFERARPAQCMSNNGYCDKEVTKKLGAAEPKIFSKNGNFEKINRGQIDMTTTKNCRYADFRSAFERARPAQCMSNNGYSDKEVIRKLGAVGKEKCSKNKEKEQISQADKNETNGFYADFRSAFTRNERVELGNNNGYCHNEATRNIERGKKPKTSKIDEKRQISNIAAGRKSDHYEDPSSAFSRISIDHCNAQIKIGRKKMVRNLRSSEPQKISRFPRHHGEGKKVSPPALNLQWPGQKQVASAVAPQIRKSATPKKNNTNIHRNCRKHLRKEGDWWIVEGGQSHKKAAHSPLKTKPVNKEGNRKKYGRPPREVEGKWLTSLIAATTEAVLRQLGKGKSPTAHTKSNQSRVPLQHSEKTAKGIKHATPQPKKKEHEQRKELPRRPPTKRSHGANKGQGAPVRAPAKTQGKGEEQPHTMRTWAQVAAPKKQKVTSKPPMVQKKKAQGEKKGAAANPFHWELQVEQLLKDAEQIRESMYIRFLHVRQSWWSTCFKAHMEFHCPVCGFAHPEETITVTHCRQQHPQEGRLIPYTLTTTGNQVQFAGPSCSLSAVVAILSHMEEEKNFHPIIRRSYQSPSKETTQTLVQALGLELPTAPITAIEALAHHDQMIRQLLEAPATTARQCGHCGVNELMEGPSNPGENLGIISVNPNTCESIELTNQILAKTYTTSWTDMEVVCTGERKNMAHRPTPTLITHSKTFGEMVVIDIGTWGNEAVGLKRILHEILLPHGNGTATYKLVGAVIAPTPFHVVAAIPQQTRKRRWDILDGMVRRTVSQSTVDPKTVVMCVYRREEEETYDVLDEEEQDDDLLGIPNPTPRRLMISQAGPQQNSWVDTRGRRAYGSQEEQDERTSTDQVSIFSHDETRELSSPLECPIVGCTASFVGPRRWEKAKSHIYGVHSLEEVREIPGGELICKGIVRCETCATLLPTSDRAKQAHADDCRPYLPRKENIRRKRAAEREATEASAQQGIALRLERQGPYITPRDIEEPTNTTTESWWREKVATKRYLHRKEWPQWLDICRTVLLGYSASSQGERHQRQVMLLDLVRNHLHTRTARREQQQQRGKDNQEEEDRQKEEEKSLAKRVETLCLLSATGRAAQLLAAEKAQPVEYSPEMAQTIGELYPQEDIHDIPRPPVEQPGVVSVDAEEVAKTIARRLTRGAAPGLDGWTRELLYPLTLDPALKMEIAAVVKDIINADVSMEVGRRLQATSLTVLRKPNGKYRPIGAESVWAKLASHIAISRVMKTAEKKFSGIQFGVGGHIEEAIAKIRKDFATKGSLAMLDGRNAYNAISRRAILEAVYGDSTWSPLWRLVSLLLGTTGEVGFYENGKLCHTWESTRGVRQGMVLGPLLFSIGTLATLRRLQQTFPEAQFTAYLDDVTVAAPPEELKNVCAATAEAMEALGIVNNADKTEVLELTGDTGFGTAVKACARVLGAYVAPDPMSEEIREGVEKKAMETDRLFKAIVELPLYNRTRWRILAMSAMPRITFLLRNHDMQHTHQVASWFDERTTQVMEHILGQPMTERARNIAALPVSMGGCGIRRMAQVAEYAHQCAGEKGLQQRKTEEADQRQQDDLYATLGGADRQVFTANTAAGAGRPLTDAQVRLDDATFGVYLRERLLVRVLPEGVKCLCGEDASNHHIHTCTKVHNKPRQMRHDIINSVFANGLRLCGFQCATEPRLNEVSKRRPDILIAGLDTYAVTDITVTYPGRVTVGNTAQGQRSVAAADPMKAALVRFQEKERKYSYWAIQNGLAFAPFVMLTNGAIFGKSRDWLRRVLRGQDHRLTVTTAFDGITADVVAAVLRGNVHVYSAAQARGETLR

SEQ ID NO: 17132 - protein, 988 aa, Trypanosoma brucei
MGGHTGRRAYGSQEEQDERTSTDQVSIFSHDETRELSSPLECPIVGCTASFVAHADGRRPNPIYTGSTRWKRSAKSRGGELICKGIVRCETCATLLPTSDRAKQAHADDCRPYLPRKENIRRKRAAEREATEASTQQGIALRLERQGPYITPRDIEEPTNTTTESWWREKVATKRYLHRKEWPQWLDICRTVLLGYSASSQGERHQRQVMLLDLVRNHLHTRTARREQQQQRGKDNQEEEDRQKEEEKSLAKRVETLCLLSATGRAAQLLAAEKAQPVEYSPEMAQTIGELYPQEDIHDIPRPPVEQPGVVSVDAEEVAKTIARRLTRGAAPGLDGWTRELLYPLTLDPALKMEIAAVVKDIINADVSMEVGRRLQATSLTVLRKPNGKYRPIGAESVWAKLASHIAISRVMKTAEKKFSGIQFGVGGHIEEAIAKIRKDFATKGSLAMLDGRNAYNAISRRAILEAVYGDSTWSPLWRLVSLLLGTTGEVGFYENGKLCHTWESTRGVRQGMVLGPLLFSIGTLATLRRLQQTFPEAQFTAYLDDVTVAAPPEELKNVCAATAEAMEALGIVNNADKTEVLELTGDTGFGTAVKACARVLGAYVAPDPMSEEIREGVEKKAMETDRLFKAIVELPLYNRTRWRILAMSAMPRITFLLRNHDMQHTHQVASWFDERTTQVMEHILGQPMTERARNIAALPVSMGGCGIRRMAQVAEYAHQCAGEKGLQQRKTEEADQRQQDDLYATLGGADRQVFTANTAAGAGRPLTDAQVRLDDATFGVYLRERLLVRVLPEGVKCLCGEDASNHHIHTCTKVHNKPRQMRHDIINSVFANGLRLCGFQCATEPRLNEVSKRRPDILIAGLDTYAVTDITVTYPGRVTVGNTAQGQRSVAAADPMKAALVRFQEKERKYSYWAIQNGLAFAPFVMLTNGAIFGKSRDWLRRVLRGQDHRLTVTTAFDGITADVVAAVLRGNVHVYSAAQARGETLR

SEQ ID NO: 17133 - protein, 2145 aa, Trypanosoma brucei
MISIGKEGKPQNQKKSCFGGSNPDLQNTNTIRRGVLPVGLFRQIGGKIENLCSDEIYQIVHIEEKKHRCTNGAHVEKSSGIDRSQVNKPIKEISGSFSFLGQNIGRLDVKKSPENEYLEKNNCGQNDITTTKNCRYADFRSAFERARPAQCMSNNGYCDKEVTKKLGAVEPKIFSKNGNFEKINRGQIDMTTTKNCRYADFRSAFERARPAQCMSNNGYCDKEVTKKLGAVEPKIFSKNGNFEKINRGQIDMTTTKNCRYADFRSAFERARPAQCMSNNGYCDKEVTKKLGAVEPKIFSKNGNFEKINRGQIDMTTTKNCRYADFRSAFERARPAQCMSNNGYCDKEVTKKLGAAEPKIFSKNGNFEKINRGQIDMTTTKNCRYADFRSAFERARPAQCMSNNGYSDKEVIRKIGAVGKEKCSKNKEKEQISQADKNETNGFYADFRSAFTRNERVELGNNNGYCHNEATRNIERGKKPKTSKIDEKRQISNIAAGRKSDHYEDPSSAFSRISIDHCNAQIKIGRKKMVRNLRSSEPQKISRFPRHHGEGKKVSPPALNLQWPGQKQVASAVAPQIRKSATPKKNNTNIHRNCRKHLRKEGDWWIVEGGQSHKKAAHSPLKTKPVNKEGNRKKYGRPPREVEGKWLTSLIAATTEAVLRQLGKGKSPTAHTKSNQSRVPLQHSEKTAKGIKHATPQPKKKEHEQRKELPRRPPTKRSHGANKGQGAPVRAPAKTQGKGEEQPHTMRTWAQVAAPKKQKVTSKPPMVQKKKAQGEKKGAAANPFHWELQVEQLLKDAEQIRESMYIRFLHVRQSWWSTCFKAHMEFHCPVCGFAHPEETITVTHCRQQHPQEGRLIPYTLTTTGNQVQFAGPSCSLSAVVAILSHMEEEKNFHPIIRRSYQSPSKETTQTLVQALGLELPTAPITAIEALAHHDQMIRQLLEAPATTARQCGHCGVNELMEGPSNPGENLGIISVNPNTCESIELTNQILAKTYTTSWTDMEVVCTGERKNMAHRPTPTLITHSKTFGEMVVIDIGTWGNEAVGLKRILHEILLPHGNGTATYKLVGAVIAPTPFHVVAAIPQQTRKRRWDILDGMVRRTVSQSTVDPKTVVMCVYRREEEETYDVLDEEEQDDDLLGIPNPTPRRLMISQAGPQQNSWVDTRGRRAYGSQEEQDERTSTDQVSIFSHDETRELSSPLECPIVGCTASFVGPRRWEKAKSHIYGVHSLEEVREIPGGELICKGIVRCETCATLLPTSDRAKQAHADDCRPYLPRKENIRRKRAAEREATEASAQQGIALRLERQGPYITPRDIEEPTNTTTESWWREKVATKRYLHRKEWPQWLDICRTVLLGYSASSQGERHQRQVMLLDLVRNHLHTRTARREQQQQRGKDNQEEEDRQKEEEKSLAKRVETLCLLSATGRAAQLLAAEKAQPVEYSPEMAQTIGELYPQEDIHDIPRPPVEQPGVVSVDAEEVAKTIARRLTRGAAPGLDGWTRELLYPLTLDPALKMEIAAVVKDIINADVSMEVGRRLQATSLTVLRKPNGKYRPIGAESVWAKLASHIAISRVMKTAEKKFSGIQFGVGGHIEEAIAKIRKDFATKGSLAMLDGRNAYNAISRRAILEAVYGDSTWSPLWRLVSLLLGTTGEVGFYENGKLCHTWESTRGVRQGMVLGPLLFSIGTLATLRRLQQTFPEAQFTAYLDDVTVAAPPEELKNVCAATAEAMEALGIVNNADKTEVLELTGDTGFGTAVKACARVLGAYVAPDPMSEEIREGVEKKAMETDRLFKAIVELPLYNRTRWRILAMSAMPRITFLLRNHDMQHTHQVASWFDERTTQVMEHILGQPMTERARNIAALPVSMGGCGIRRMAQVAEYAHQCAGEKGLQQRKTEEADQRQQDDLYATLGGADRQVFTANTAAGAGRPLTDAQVRLDDATFGVYLRERLLVRVLPEGVKCLCGEDASNHHIHTCTKVHNKPRQMRHDIINSVFANGLRLCGFQCATEPRLNEVSKRRPDILIAGLDTYAVTDITVTYPGRVTVGNTAQGQRSVAAADPMKAALVRFQEKERKYSYWAIQNGLAFAPFVMLTNGAIFGKSRDWLRRVLRGQDHRLTVTTAFDGITADVVAAVLRGNVHVYSAAQARGETLR

SEQ ID NO: 17134 - protein, 1443 aa, Trypanosoma brucei
MSSGKSSPRRAPNKRSHGANKGQGAPVRAPTKTQGKGEEQPHTTRTWAQVAAPRKPKVTSKPPMAQKKAQGEKKGAAANPFHWELQVEQLLKDAEQIRESMYIRFLHVRQSWWSTCFKAHMEFHCPVCGFAHPEETITVTHCRQQHPQEGRLIPYTLTTTGNQVQFAGPSCSLSAVVAILSHMEEEKNFHPIIRRSYQSPSKETTQTLVQALGLELPTAPITAIEALAHHDQMIRQLLEAPATTARQCGHCGVSELMEGPSNPGENLGIISVNPNTCESIELTNQILAKTYTTSWTDMEVVCTGERKNMAHRPTPTLITHSKTFGEMVVIDIGTWGNEAVGLKRILHEILLPHGNGTATYKLVGAVIAPTPFHVVAAIPQQTRKRRWDILDGMVRRTVSQSTVDPKTVVMCVYRREEEETYDVLDEEEQDDDLLGIPNPTPRRLTISQAGPQQNSWVDTRGRRAYGSQEEQDERTSTDQVSIFSHDETRELSSPLECPIVGCTASFVGPRRWEKAKSHIYGVHSLEEVREIPGGELICKGIVRCETCATLLPTSDRAKQAHADDCRPYLPRKENIRRKRAAEREATEASAQQGIALRLERQGPYITPRDIEEPTNTTTESWWREKVATKRYLHRKEWPQWLDICRTVLLGYSASSQGERHQRQVMLLDLVRNHLHTRTARREQQQQRGKDNQEEEDRQKEEEKSLAKRVETLCLPSATGRAAQLLAAEKAQPVEYSPEMAQTIGELYPQEDIHDIPRPPVEQPGVVSVDAEEVAKTIGRRLTRGAAPGLDGWTRELLYPLTLDPALKMEIAAVVKDIINADVSMEVGRRLQATSLTVLRKPNGKYRPIGAESVWAKLASHIAISRVMKTAEKKFSGIQFGVGGHIEEAIAKIRKDFATKGSLAMLDGRNAYNAISRRAILEAVYGDSTWSPLWRLVSLLLGTTGEVGFYENGKLCHTWESTRGVRQGMVLGPLLFSIGTLATLRRLQQTFPEAQFTAYLDDVTVAAPPEELKNVCAATAEAMEALGIVNNADKTEVLELTGDTGFGTAVKACARVLGAYVAPDPMSEEIREGVEKKAMETDRLFKAIVELPLYNRTRWRILAMSAMPRITFLLRNHDMQHTHQVASWFDERTTQVMEHILGQPMTERARNIAALPVSMGGCGIRRMAQVAEYAHQCAGEKGLQQRKTEEADQRQQDDLYATLGGADRQVFTANTAAGAGRPLTDAQVRLDDATFGVYLRERLLVRVLPEGVKCLCGEDASNHHIHTCTKVHNKPRQMRHDIINSVFANGLRLCGFQCATEPRLNEVSKRRPDILIAGLDTYAVTDITVTYPGRVTVGNTAQGQRSVAAADPMKAALVRFQEKERKYSYWAIQNGLAFAPIVMLTNGAIFGKSRDWLRRVLRGQDHRLTVTTAFDGITADVVAAVLRGNVHVYSAAQARGETLR

SEQ ID NO: 17135 - protein, 1870 aa, Trypanosoma brucei
MSNNGYCNKEVTKKLGAAEPKIFSKNGNFEKINRGQIDMTTTKNCRYADFRSAFERARPAQCMSNNGYCDKEVTKKLGAAEPKIFSKNGNFEKINRGQIDMTTTNKCRYADFRSAFERARPAQCMSNNGYSDKEVIRKLGAVGKEKCSKNKEKEQISQADKNETNGFYADFRSAFTRNERVELGNNNGYCHNEATRNIERGKKPKTSKIDEKRQISNIAAGRKSDHYEDPSSAFSRISIDHCNAQIKIGRKKMVRNLRSSEPQKISRFPRHHGEGKKVSPPALNLQWPGQKQVASAVAPQIRKSATPKKNNTNIHRNCRKHLRKEGDWWIVEGGQSHKKAAHSPLKTKPVNKEGNRKKYGRPPREVEGKWLTSLIAATTEAVLRQLGKGKSPTAHTKSNQSRVPLQHSEKTAKGIKHATPQPKKKEHEQGKELPRRPPTKRSHGANKGQGAPVRAPAKTQGKGEEQPHTMRTWAQVAAPKKQKVTSKPPMVQKKKAQGEKKGAAANPFHWELQVEQLLKDAEQIRESMYIRFLHVRQSWWSTCFKAHMEFHCPVCGFAHPEETITVTHCRQQHPQEGRLIPYTLTTTGNQVQFAGPSCSLSAVVAILSHMEEEKNFHPIIRRSYQSPSKETTQTLVQALGLELPTAPITAIEALAHHDQMIRQLLEAPATTARQCGHCGVNELMEGPSNPGENLGIISVNPNTCESIELTNQILAKTYTTSWTDMEVVCTGERKNMAHRPTPTLITHSKTFGEMVVIDIGTWGNEAVGLKRILHEILLPHGNGTATYKLVGAVIAPTPFHVVAAIPQQTRKRRWDILDGMVRRTVSQSTVDPKTVVMCVYRREEEETYDVLDEEEQDDDLLGIPNPTPRRLMISQAGPQQNSWVDTRGRRAYGSQEEQDERTSTDQVSIFSHDETRELSSPLECPIVGCTASFVGPRRWEKAKSHIYGVHSLEEVREIPGGELICKGIVRCETCATLLPTSDRAKQAHADDCRPYLPRKENIRRKRAAEREATEASAQQGIALRLERQGPYITPRDIEEPTNTTTESWWREKVATKRYLHRKEWPQWLDICRTVLLGYSASSQGERHQRQVMLLDLVRNHLHTRTARREQQQQRGKDNQEEEDRQKEEEKSLAKRVETLCLLSATGRAAQLLAAEKAQPVEYSPEMAQTIGELYPQEDIHDIPRPPVEQPGVVSVDAEEVAKTIARRLTRGAAPGLDGWTRELLYPLTLDPALKMEIAAVVKDIINADVSMEVGRRLQATSLTVLRKPNGKYRPIGAESVWAKLASHIAISRVMKTAEKKFSGIQFGVGGHIEEAIAKIRKDFATKGSLAMLDGRNAYNAISRRAILEAVYGDSTWSPLWRLVSLLLGTTGEVGFYENGKLCHTWESTRGVRQGMVLGPLLFSIGTLATLRRLQQTFPEAQFTAYLDDVTVAAPPEELKNVCAATAEAMEALGIVNNADKTEVLELTGDTGFGTAVKACARVLGAYVAPDPMSEEIREGVEKKAMETDRLFKAIVELPLYNRTRWRILAMSAMPRITFLLRNHDMQHTHQVASWFDERTTQVMEHILGQPMTERARNIAALPVSMGGCGIRRMAQVAEYAHQCAGEKGLQQRKTEEADQRQQDDLYATLGGADRQVFTANTAAGAGRPLTDAQVRLDDATFGVYLRERLLVRVLPEGVKCLCGEDASNHHIHTCTKVHNKPRQMRHDIINSVFANGLRLCGFQCATEPRLNEVSKRRPDILIAGLDTYAVTDITVTYPGRVTVGNTAQGQRSVAAADPMKAALVRFQEKERKYSYWAIQNGLAFAPFVMLTNGAIFGKSRDWLRRVLRGQDHRLTVTTAFDGITADVVAAVLRGNVHVYSAAQARGETLR

SEQ ID NO: 17136 - protein, 942 aa, Trypanosoma brucei
MHREFRGPTQMGEGQIPYIRGPLAGRGPRNPGGELICKGIVRCETCATLLPTSDRAKQAHADDCRPYLPRKENIRRKRAAEREATEASAQQGIALRLERQGPYITPRDIEEPTNTTTESWWREKVATKRYLHRKEWPQWLDICRTVLLGYSASSQGERHQRQVMLLDLVRNHLHTRTARREQQQQRGKDNQEEEDRQKEEEKSLAKRVETLCLLSATGRAAQLLAAEKAQPVEYSPEMAQTIGELYPQEDIHDIPRPPVEQPGVVSVDAEEVAKTIARRLTRCAAPGLDGWTRELLYPLTLDPALKMEIAAVVKDIINADVSMEVGRRLQATSLTVLRKPNGKYRPIGAESVWAKLASHIAISRVMKTAEKKFSGIQFGVGGHIEEAIAKIRKDFATKGSLAMLDGRNAYNAISRRAILEAVYGDSTWSPLWRLVSLLLGTTGEVRFYENGKLCHTWESTRGVRQGMVLGPLLFSIGTLATLRRLQQTFPEAQFTAYLDDVTVAAPPEELKNVCAATAEAMEALGIVNNADKTEVLELTGDTGFGTAVKACARVLGAYVAPDPMSEEIREGVEKKAMETDRLFKAIVELPLYNRTRWRILAMSAMPRITFLLRNHDMQHTHQVASWFDERTTQVMEHILGQPMTERARNIAALPVSMGGCGIRRMTQVAEYAHQCAGEKGLQQRKTEEADQRQQDDLYATLGGADRQVFTANTAAGAGRPLTDAQVRLDDATFGVYLRERLLVRVLPEGVKCLCGEDASNHHIHTCTKVHNKPRQMRHDIINSVFANGLRLCGFQCATEPRLNEVSKRRPDILIAGLDTYAVTDITVTYPGRVTVGNTAQGQRSVAAADPMKAALVRFQEKERKYSYWAIQNGLAFAPFVMLTNGAIFGKSRDWLRRVLRGQDHRLTVTTAFDGITADVVAAVLRGNVHVYSAAQARGETLR

SEQ ID NO: 17137 - protein, 2207 aa, Trypanosoma brucei
MISIGKEGKPQNQKKSCFGGSNPDLQNTNTIRRGVLPVGLFRQIGGKIENLCSDEIYQIVHIEEKKHRCTNGAHVEKSSGIDRSQVNKPIKEISGSFSFLGQNIGRLDVKKSPENEYLEKNNCGQNDITTTKNCRYADFRSAFERARPAQCMSNNGYCDKEVTKKLGAVEPKIFSKNGNFEKINRGQIDMTTTNKCRYADFRSAFERARPAQCMSNNGYCDKEVTKKLGAVEPKIFSKNGNFEKINRGQIDMTTTKNCRYADFRSAFERARPAQCMSNNGYCDKEVTKKLGAVEPKIFSKNGNFEKINRGQIDMTTTNKCRYADFRSAFERARPAQCMSNNGYSDKEVTKKLGAAEPKIFSKNGNFEKINRGQIDMTTTNKCRYADFRSAFERARPAQCMSNNGYCNKEVTKKLGAAEPKIFSKNGNFEKINRGQIDMTTTNKCRYADFRSAFERARPAQCMSNNGYSDKEVIRKIGAVGKEKCSKNKEKEQISQADKNETNGFYADFRSAFTRNERVELGNNNGYCHNEATRNIERGKKPKTSKIDEKRQISNIAAGRKSDHYEDPSSAFSRISIDHCNAQIKIGRKKMVRNLRSSEPQKISRFPRHHGEGKKVSPPALNLQWPGQKQVASAVAPQIRKSATPKKNNTNIHRNCRKHLRKEGDWWIVEGGQSHKKAAHSPLKTKPVNKEGNRKKYGRPPREVEGKWLTSLIAATTEAVLRQLGKGKSPTAHTKSNQSRVPLQHSEKTAKGIKHATPQPKKKEHEQGKELPRRPPTKRSHGANKGQGAPVRAPAKTQGKGEEQPHTMRTWAQVAAPKKQKVTSKPPMVQKKKAQGEKKGAAANPFHWELQVEQLLKDAEQIRESMYIRFLHVRQSWWSTCFKAHMEFHCPVCGFAHPEETITVTHCRQQHPQEGRLIPYTLTTTGNQVQFAGPSCSLSAVVAILSHMEEEKNFHPIIRRSYQSPSKETTQTLVQALGLELPTAPITAIEALAHHDQMIRQLLEAPATTARQCGHCGVNELMEGPSNPGENLGIISVNPNTCESIELTNQILAKTYTTSWTDMEVVCTGERKNMAHRPTPTLITHSKTFGEMVVIDIGTWGNEAVGLKRILHEILLPHGNGTATYKLVGAVIAPTPFHVVAAIPQQTRKRRWDILDGMVRRTVSQSTVDPKTVVMCVYRREEEETYDVLDEEEQDDDLLGIPNPTPRRLMISQAGPQQNSWVDTRGRRAYGSQEEQDERTSTDQVSIFSHDETRELSSPLECPIVGCTASFVGPRRWEKAKSHIYGVHSLEEVREIPGGELICKGIVRCETCATLLPTSDRAKQAHADDCRPYLPRKENIRRKRAAEREATEASAQQGIALRLERQGPYITPRDIEEPTNTTTESWWREKVATKRYLHRKEWPQWLDICRTVLLGYSASSQGERHQRQVMLLDLVRNHLHTRTARREQQQQRGKDNQEEEDRQKEEEKSLAKRVETLCLLSATGRAAQLLAAEKAQPVEYSPEMAQTIGELYPQEDIHDIPRPPVEQPGVVSVDAEEVAKTIARRLTRGAAPGLDGWTRELLYPLTLDPALKMEIAAVVKDIINADVSMEVGRRLQATSLTVLRKPNGKYRPIGAESVWAKLASHIAISRVMKTAEKKFSGIQFGVGGHIEEAIAKIRKDFATKGSLAMLDGRNAYNAISRRAILEAVYGDSTWSPLWRLVSLLLGTTGEVGFYENGKLCHTWESTRGVRQGMVLGPLLFSIGTLATLRRLQQTFPEAQFTAYLDDVTVAAPPEELKNVCAATAEAMEALGIVNNADKTEVLELTGDTGFGTAVKACARVLGAYVAPDPMSEEIREGVEKKAMETDRLFKAIVELPLYNRTRWRILAMSAMPRITFLLRNHDMQHTHQVASWFDERTTQVMEHILGQPMTERARNIAALPVSMGGCGIRRMAQVAEYAHQCAGEKGLQQRKTEEADQRQQDDLYATLGGADRQVFTANTAAGAGRPLTDAQVRLDDATFGVYLRERLLVRVLPEGVKCLCGEDASNHHIHTCTKVHNKPRQMRHDIINSVFANGLRLCGFQCATEPRLNEVSKRRPDILIAGLDTYAVTDITVTYPGRVTVGNTAQGQRSVAAADPMKAALVRFQEKERKYSYWAIQNGLAFAPFVMLTNGAIFGKSRDWLRRVLRGQDHRLTVTTAFDGITADVVAAVLRGNVHVYSAAQARGETLR

SEQ ID NO: 17138 - protein, 1142 aa, Trypanosoma brucei
MHGGTEEYGPPAYPTLITHSKTFGKLVVIDIGTWGNEAVGLKRILHEILLPHGNGTATYKLVGAVIAPTPFHVVAAIPQQTRKRRWDILDGMVRRTVSQSTVDPKTVVMCVYRREEEETYDVLDEEEQDDDLLGIPNPTPRRLMISQAGPQQNSWVDTRGRRAYGSQEEQDERTSTDQVSIFSHDETRELSSPLECPIVGCTASFVGPRRWEKAKSHIYGVHSLEEVREIPGGELICKGIVRCETCATLLPTSDRAKQAHADDCRPYLPRKENIRRKRAAEREATEASAQQGIALRLERQGPYITPRDIEEPTNTTTESWWREKVATKRYLHRKEWPQWLDICRTVLLGYSASSQGERHQRQVMLLDLVRNHLHTRTARREQQQQRGKDNQEEEDRQKEEEKSLAKRVETLCLLSATGRAAQLLAAEKAQPVEYSPEMAQTIGELYPQEDIHDIPRPPVEQPGVVSVDAEEVAKTIARRLTRGAAPGLDGWTRELLYPLTLDPALKMEIAAVVKDIINADVSMEVGRRLQATSLTVLRKPNGKYRPIGAESVWAKLASHIAISRVMKTAEKKFSGIQFGVGGHIEEAIAKIRKDFATKGSLAMLDGRNAYNAISRRAILEAVYGDSTWSPLWRLVSLLLGTTGEVGFYENGKLCHTWESTRGVRQGMVLGPLLFSIGTLATLRRLQQTFPEAQFTAYLDDVTVAAPPEELKNVCAATAEAMEALGIVNNADKTEVLELTGDTGFGTAVKACARVLGAYVAPDPMSEEIREGVEKKAMETDRLFKAIVELPLYNRTRWRILAMSAMPRITFLLRNHDMQHTHQVASWFDERTTQVMEHILGQPMTERARNIAALPVSMGGCGIRRMAQVAEYAHQCAGEKGLQQRKTEEADQRQQDDLYATLGGADRQVFTANTAAGAGRPLTDAQVRLDDATFGVYLRERLLVRVLPEGVKCLCGEDASNHHIHTCTKVHNKPRQMRHDIINSVFANGLRLCGFQCATEPRLNEVSKRRPDILIAGLDTYAVTDITVTYPGRVTVGNTAQGQRSVAAADPMKAALVRFQEKERKYSYWAKQNGLAFAPFVMLTNGAIFGKSRDWLRRVLRGQDHRLTVTTAFDGITADMVAAVLRGNVHVYSAAQARGETLR

SEQ ID NO: 17139 - protein, 2100 aa, Trypanosoma brucei
MSKSHPKMNIWKKNNCGQNDITTTKNCRYADFRSAFERARPAQCMSNNGYCDKEVTKKLGAVEPKIFSKNGNFEKINRGQIDMTTTNKCRYADFRSAFERARPAQCMSNNGYCDKEVTKKLGAVEPKIFSKNGNFEKINRGQIDMTTTNKCRYADFRSAFERARPAQCMSNNGYCDKEVTKKLGAAEPKIFSKNGNFEKINRGQNDITTTKNCRYADFRSAFERARPAQCMSNNGYSDKEVTKKLGAAEPKIFSKNGNFEKINRGQIDMTTTNKCRYADFRSAFERARPAQCMSNNGYCNKEVTKKLGAAEPKIFSKNGNFEKINRGQIDMTTTNKCRYADFRSAFERARPAQCMSNNGYSDKEVIRKIGAVGKEKCSKNKEKEQISQADKNETNGFYADFRSAFTRNERVELGNNNGYCHNEATRNIERGKKPKTSKIDEKRQISNIAAGRKSDHYEDPSSAFSRISIDHCNAQIKIGRKKMVRNLRSSEPQKISRFPRHHGEGKKVSPPALNLQWPGQKQVASAVAPQIRKSATPKKNNTNIHRNCRKHLRKEGDWWIVEGGQSHKKAAHSPLKTKPVNKEGNRKKYGRPPREVEGKWLTSLIAATTEAVLRQLGKGKSPTAHTKSNQSRVPLQHSEKTAKGIKHATPQPKKKEHEQGKELPRRPPTKRSHGANKGQGAPVRAPAKTQGKGEEQPHTMRTWAQVAAPKKQKVTSKPPMVQKKKAQGEKKGAAANPFHWELQVEQLLKDAEQIRESMYIRFLHVRQSWWSTCFKAHMEFHCPVCGFAHPEETITVTHCRQQHPQEGRLIPYTLTTTGNQVQFAGPSCSLSAVVAILSHMEEEKNFHPIIRRSYQSPSKETTQTLVQALGLELPTAPITAIEALAHHDQMIRQLLEAPATTARQCGHCGVNELMEGPSNPGENLGIISVNPNTCESIELTNQILAKTYTTSWTDMEVVCTGERKNMAHRPTPTLITHSKTFGEMVVIDIGTWGNEAVGLKRILHEILLPHGNGTATYKLVGAVIAPTPFHVVAAIPQQTRKRRWDILDGMVRRTVSQSTVDPKTVVMCVYRREEEETYDVLDEEEQDDDLLGIPNPTPRRLMISQAGPQQNSWVDTRGRRAYGSQEEQDERTSTDQVSIFSHDETRELSSPLECPIVGCTASFVGPRRWEKAKSHIYGVHSLEEVREIPGGELICKGIVRCETCATLLPTSDRAKQAHADDCRPYLPRKENIRRKRAAEREATEASAQQGIALRLERQGPYITPRDIEEPTNTTTESWWREKVATKRYLHRKEWPQWLDICRTVLLGYSASSQGERHQRQVMLLDLVRNHLHTRTARREQQQQRGKDNQEEEDRQKEEEKSLAKRVETLCLLSATGRAAQLLAAEKAQPVEYSPEMAQTIRELYPQEDIHDIPRPPVEQPGVVSVDAEEVAKTIARRLTRGAAPGLDGWTRELLYPLTLDPALKMEIAAVVKDIINADVSMEVGRRLQATSLTVLRKPNGKYRPIGAESVWAKLASHIAISRVMKTAEKKFSGIQFGVGGHIEEAIAKIRKDFATKGSLAMLDGRNAYNAISRRAILEAVYGDSTWSPLWRLVSLLLGTTGEVGFYENGKLCHTWESTRGVRQGMVLGPLLFSIGTLATLRRLQQTFPEAQFTAYLDDVTVAAPPEELKNVCAATAEAMEALGIVNNADKTEVLELTGDTGFGTAVKACARVLGAYVAPDPMSEEIREGVEKKAMETDRLFKAIVELPLYNRTRWRILAMSAMPRITFLLRNHDMQHTHQVASWFDERTTQVMEHILGQPMTERARNIAALPVSMGGCGIRRMAQVAEYAHQCAGEKGLQQRKTEEADQRQQDDLYATLGGADRQVFTANTAAGAGRPLTDAQVRLDDATFGVYLRERLLVRVLPEGVKCLCGEDASNHHIHTCTKVHNKPRQMRHDIINSVFANGLRLCGFQCATEPRLNEVSKRRPDILIAGLDTYAVTDITVTYPGRVTVGNTAQGQRSVAAADPMKAALVRFQEKERKYSYWAIQNGLAFAPFVMLTNGAIFGKSRDWLRRVLRGQDHRLTVTTAFDGITADVVAAVLRGNVHVYSAAQARGETLR

SEQ ID NO: 17140 - protein, 779 aa, Trypanosoma brucei
MLLDLVRNHLHTRTARREQQQQRGKDNQEEEDRQKEEEKSLAKRVETLCLLSATGRAAQLLAAEKAQPVEYSPEMAQTIGELYPQEDIHDIPRPPVEQPGVVSVDAEEVAKTIARRLTRGAAPGLDGWTRELLYPLTLDPALKMEIAAVVKDIINADVSMEVGRRLQATSLTVLRKPNGKYRPIGAESVWAKLASHIAISRVMKTAEKKFSGIQFGVGGHIEEAIAKIRKDFATKGSLAMLDGRNAYNAISRRAILEAVYGDSTWSPLWRLVSLLLGTTGEVGFYENGKLCHTWESTRGVRQGMVLGPLLFSIGTLATLRRLQQTFPEAQFTAYLDDVTVAAPPEELKNVCAATAEAMEALGIVNNADKTEVLELTGDTGFGTAVKACARVLGAYVAPDPMSEEIREGVEKKAMETDRLFKAIVELPLYNRTRWRILAMSAMPRITFLLRNHDMQHTHQVASWFDERTTQVMEHILGQPMTERARNIAALPVSMGGCGIRRMAQVAEYAHQCAGEKGLQQRKTEEADQRQQDDLYATLGGADRQVFTANTAAGAGRPLTDAQVRLDDATFGVYLRERLLVRVLPEGVKCLCGEDASNHHIHTCTKVHNKPRQMRHDIINSVFANGLRLCGFQCATEPRLNEVSKRRPDILIAGLDTYAVTDITVTYPGRVTVGNTAQGQRSVAAADPMKAALVRFQEKERKYSYWAKQNGLAFAPFVMLTNGAIFGKSRDWLRRVLRGQDHRLTVTTAFDGITADMVAAVLRGNVHVYSAAQARGETLR

SEQ ID NO: 17141 - protein, 1400 aa, Trypanosoma brucei
MRTWAQVAAPKKQKVTSKPPMAQKKAQGEKKGAAANPFHWELQVEQLLKDAEQIRESMYIRFLHVRQSWWSTCFKAHMEFHCPVCGFAHPEETITVTHCRQQHPQEGRLIPYTLTTTGNQVQFAGPSCSLSAVVAILSHMEEEKNFHPIIRRSYQSPSKETTQTLVQALGLELPTAPITAIEALAHHDQMIRQLLEAPATTARQCGHCGVNELMEGPSNPGENLGIISVNPNTCESIELTNQILAKTYTTSWTDMEVVCTGERKNMAHRPTPTLITHSKTFGEMVVIDIGTWGNEAVGLKRILHEILLPHGNGTATYKLVGAVIAPTPFHVVAAIPQQTRKRRWDILDGMVRRTVSQSTVDPKTVVMCVYRREEEETYDVLDEEEQDDDLLGIPNPTPRRLMISQAGPQQNSWVDTRGRRAYGSQEEQDERTSTDQVSIFSHDETRELSSPLECPIVGCTASFVGPRRWEKAKSHIYGVHSLEEVREIPGGELICKGIVRCETCATLLPTSDRAKQAHADDCRPYLPRKENIRRKRAAEREATEASAQQGIALRLERQGPYITPRDIEEPTNTTTESWWREKVATKRYLHRKEWPQWLDICRTVLLGYSASSQGERHQRQVMLLDLVRNHLHTRTARREQQQQRGKDNQEEEDRQKEEEKSLAKRVETLCLPSATGRAAQLLAAEKAQPVEYSPEMAQTIGELYPQEDIHDIPRPPVEQPGVVSVDAEEVAKTIGRRLTRGAAPGLDGWTRELLYPLTLDPALKMEIAAVVKDIINADVSMEVGRRLQATSLTVLRKPNGKYRPIGAESVWAKLASHIAISRVMKTAEKKFSGIQFGVGGHIEEAIAKIRKDFATKGSLAMLDGRNAYNAISRRAILEAVYGDSTWSPLWRLVSLLLGTTGEVGFYENGKLCHTWESTRGVRQGMVLGPLLFSIGTLATLRRLQQTFPEAQFTAYLDDVTVAAPPEELKNVCAATAEAMEALGIVNNADKTEVLELTGDTGFGTAVKACARVLGAYVAPDPMSEEIREGVEKKAMETDRLFKAIVELPLYNRTRWRILAMSAMPRITFLLRNHDMQHTHQVASWFDERTTQVMEHILGQPMTERARNIAALPVSMGGCGIRRMAQVAEYAHQCAGEKGLQQRKTEEADQRQQDDLYTTLGGADRQVFTANTAAGAGRPLTDAQVRLDDATFGVYLRERLLVRVLPEGVKCLCGEDASNHHIHTCTKVHNKPRQMRHDIINSVFANGLRLCGFQCATEPRLNEVSKRRPDILIAGLDTYAVTDITVTYPGRVTVGNTAQGQRSVAAADPMKAALVRFQEKERKYSYWAKQNGLAFAPFVMLTNGAIFGKSRDWLRRVLRGQDHRLTVTTAFDGITADVVAAVLRGNVHVYSAAQARGETLR

SEQ ID NO: 17142 - protein, 1351 aa, Trypanosoma brucei
MRNRYAKACTFAFLHVRQSWWSTCFKAHMEFHCPVCGFAHPEETITVTHCRQQHPQEGRLIPYTLTTTGNQVQFAGPSCSLSAVVAILSHMEEEKNFHPIIRRSYQSPSKETTQTLVQALGLELPTAPITAIEALAHHDQMIRQLLEAPATTARQCGHCGVNELMEGPSNPGENLGIISVNPNTCESIELTNQILAKTYTTSWTDMEVVCTGERKNMAHRPTPTLITHSKTFGEMVVIDIGTWGNEAVGLKRILHEILLPHGNGTATYKLVGAVIAPTPFHVVAAIPQQTRKRRWDILDGMVRRTVSQSTVDPKTVVMCVYRREEEETYDVLDEEEQDDDLLGIPNPTPRRLRISQAGPQQNSWVDTRGRRAYGSQEEQDERTSTDQVSIFSHDETRELSSPLECPIVGCTASFVGPRRWEKAKSHIYGVHSLEEVREIPRGELICKGIVRCETCATLLPTSDRAKQAHADDCRPYLPRKENIRRKRAAEREATEASAQQGIALRLERQGPYITPRDIEEPTNTTTESWWREKVATKRYLHRKEWPQWLDICRTVLLGYSASSQGERHQRQVMLLDLVRNHLHTRTARREQQQQRGKDNQEEEDRQKKEEKSLAKRVETLCLLSATGRAAQLLAAEKAQPVEYSPEMAQTIGELYPQEDIHDIPRPPVEQPGVVSVDAEEVAKTIARRLTRGAAPGLDGWTRELLYPLTLDPALKMEIAAVVKDIINADVSMEVGRRLQATSLTVLRKPNGKYRPIGAESVWAKLASHIAISRVMKTAEKKFSGIQFGVGGHIEEAIAKIRKDFATKGSLAMLDGRNAYNAISRRAILEAVYGDSTWSPLWRLVSLLLGTTGEVGFYENGKLCHTWESTRGVRQGMVLGPLLFSIGTLATLRRLQQTFPEAQFTAYLDDVTVAAPPEELKNVCAATAEAMEALGIVNNADKTEVLELTGDTGFGTAVKACARVLGAYVAPDPMSEEIREGVEKKAMETDRLFKAIVELPLYNRTRWRILAMSAMPRITFLLRNHDMQHTHRVASWFDERTTQVMEHILGQPMTERARNIAALPVSMGGCGIRRMAQVAEYAHQCAGEKGLQQRKTEEADQRQQDDLYATLGGADRQVFTANTAAGAGRPLTDAQVRLDDATFGVYLRERLLVRVLPEGVKCLCGEDASNHHIHTCTKVHNKPRQMRHDIINSVFANGLRLCGFQCATEPRLNEVSKRRPDILIAGLDTYAVTDITVTYPGRVTVGNTAQGQRSVAAADPMKAALVRFQEKERKYSYWAIQNGLAFAPFVMLTNGAIFGKSRDWLRRVLRGQDHRLTVTTAFDGITADVVAAVLRGNVHVYSAAQARGETLR

SEQ ID NO: 17143 - protein, 1401 aa, Trypanosoma brucei
MRTWAQVAAPKKQKVTSKPPMVQKKKAQGEKKGAAANPFHWELQVEQLLKDAEQIRESMYIRFLHVRQSWWSTCFKAHMEFHCPVCGFAHPEETITVTHCRQQHPQEGRLIPYTLTTTGNQVQFAGPSCSLSAVVAILSHMEEEKNFHPIIRRSYQSPSKETTQTLVQALGLELPTAPITAIEALAHHDQMIRQLLEAPATTARQCGHCGVNELMEGPSNPGENLGIISVNPNTCESIELTNQILAKTYTTSWTDMEVVCTGERKNMAHRPTPTLITHSKTFGEMVVIDIGTWGNEAVGLKRILHEILLPHGNGTATYKLVGAVIAPTPFHVVAAIPQQTRKRRWDILDGMVRRTVSQSTVDPKTVVMCVYRREEEETYDVLDEEEQDDDLLGIPNPTPRRLMISQAGPQQNSWVDTRGRRAYGSQEEQDERTSTDQVSIFSHDETRELSSPLECPIVGCTASFVGPRRWEKAKSHIYGVHSLEEVREIPGGELICKGIVRCETCATLLPTSDRAKQAHADDCRPYLPRKENIRRKRAAEREATEASAQQGIALRLERQGPYITPRDIEEPTNTTTESLWREKVATKRYLHRKEWPQWLDICRTVLLGYSASSQGERHQRQVMLLDLVRNHLHTRTARREQQQQRGKDNQEEEDRQKEEEKSLAKRVETLCLLSATGRAAQLLAAEKAQPVEYSPEMAQTIGELYPQEDIHDIPRPPVEQPGVVSVDAEEVAKTIARRLTRGAAPGLDGWTRELLYPLTLDPALKMEIAAVVKDIINADVSMEVGRRLQATSLTVLRKPNGKYRPIGAESVWAKLASHIAISRVMKTAEKKFSGIQFGVGGHIEEAIAKIRKDFATKGSLAMLDGRNAYNAISRRAILEAVYGDSTWSPLWRLVSLLLGTTGEVGFYENGKLCHTWESTRGVRQGMVLGPLLFSIGTLATLRRLQQTFPEAQFTAYLDDVTVAAPPEELKNVCAATAEAMEALGIVNNADKTEVLELTGDTGFGTAVKACARVLGAYVAPDPMSEEIREGVEKKAMETDRLFKAIVELPLYNRTRWRILAMSAMPRITFLLRNHDMQHTHQVASWFDERTTQVMEHILGQPMTERARNIAALPVSMGGCGIRRMAQVAEYAHQCAGEKGLQQRKTEEADQRQQDDLYATLGGADRQVFTANTAAGAGRPLTDAQVRLDDATFGVYLRERLLVRVLPEGVKCLCGEDASNHHIHTCTKVHNKPRQMRHDIINSVFANGLRLCGFQCATEPRLNEVSKRRPDILIAGLDTYAVTDITVTYPGRVTVGNTAQGQRSVAAADPMKAALVRFQEKERKYSYWAIQNGLAFAPFVMLTNGAIFGKSRDWLRRVLRGQDHRLTVTTAFDGITADVVAAVLRGNVHVYSAAQARGETLR

SEQ ID NO: 17144 - protein, 1832 aa, Trypanosoma brucei
MTTTKNCRYADFRSGFERARPAQCMSNNGYCDKEVTKKLGAVEPKIFSKNGNFEKINRGQNDMTTTKNCRYADFRSAFERARPAQCMSNNGYSDKEVIRKIGAVGKEKCSKNKEKEQISQAEKNDTNGFYTDFRSAFTRNERVELGNNNGYCHNEATRNIERGKKPKTSKIDEKRQISNIAAGRKSDHYEDPSSAFSRISIDHCNAQIKIGRKKMVRNLRSSEPQKISRFPRHHGEGKKVSSPALNLQWPGQKQVASAVAPQIRKIATPKNNNTSIHRNCRKHLRKEGDWWIVEGGQNHKKAAHSPLKTKPVNKEGNRKKYGRPPREVEGKWLTSLIAATTEAVLRQLGKGKSPTAHTKSNQSRVPLQHSEKTAKGIKYATPQPKKKAHEQRKELPRRPPTKRSHGANKGQGAPVRAPAKTQGKGEEQPHTMRTWAQVAAPKKQKVTSKPPMAQKKKAQGEKKGAAANPFHWELQVEQLLKDAEQIRESMYIRFLHVRQSWWSTCFKAHMEFHCPVCGFAHPEETITVTHCRQQHPQEGRLIPYTLTTTGNQVQFAGPSCSLSAVVAILSHMEEEKNFHPIIRRSYQSPSKETTQTLVQALGLELPTAPITAIEALAHHDQMIRQLLEAPATTARQCGHCGVNELMEGPSNPGENLGIISVNPNTCESIELTNQILAKTYTTSWTDMEVVCTGERKNMAHRPTPTLITHSKTFGEMVVIDIGTWGNEAVGLKRILHEILLPHGNGTATYKLVGAVIAPTPFHVVAAIPQQTRKRRWDILDGMVRRTVSQSTVDPKTVVMCVYRREEEETYDVLDEEEQDDDLLGIPNPTPRRLRISQAGPQQNSWVDTRGRRAYGSQEEQDERTSTDQVSIFSHDETRELSSPLECPIVGCTASFVGPRRWEKAKSHIYGVHSLEEVREIPRGELICKGIVRCETCATLLPTSDRAKQAHADDCRPYLPRKENIRRKRAAEREATEASAQQGIALRLERQGPYITPRDIEEPTNTTTESWWREKVATKRYLHRKEWPQWLDICRTVLLGYSASSQGERHQRQVMLLDLVRNHLHTRTARREQQQQRGKDNQEEEDRQKKEEKSLAKRVETLCLLSATGRAAQLLAAEKAQPVEYSPEMAQTIGELYPQEDIHDIPRPPVEQPGVVSVDAEEVAKTIGRRLTRGAAPGLDGWTRELLYPLTLDPALKMEIAAVVKDIINADVSMEVGRRLQATSLTVLRKPNGKYRPIGAESVWAKLASHIAISRVMKTAEKKFSGIQFGVGGHIEEAIAKIRKDFATKGSLAMLDGRNAYNAISRRAILEAVYGDSTWSPLWRLVSLLLGTTGEVGFYENGKLCHTWESTRGVRQGMVLGPLLFSIGTLATLRRLQQTFPEAQFTAYLDDVTVAAPPEELKNVCAATAEAMEALGIVNNADKTEVLELTGDTGFGTAVKACARVLGAYVAPDPMSEEIREGVEKKAMETDRLFKAIVELPLYNRTRWRILAMSAMPRITFLLRNHDMQHTHRVASWFDERTTQVMEHILGQPMTERARNIAALPVSMGGCGIRRMAQVAEYAHQCAGEKGLQQRKTEEADQRQQDDLYATLGGADRQVFTANTAAGAGRPLTDAQVRLDDATFGVYLRERLLVRVLPEGVKCLCGEDASNHHIHTCTKVHNKPRQMRHDIINSVFANGLRLCGFQCATEPRLNEVSKRRPDILIAGLDTYAVTDITVTYPGRVTVGNTAQGQRSVAAADPMKAALVRFQEKERKYSYWAIQNGLAFAPFVMLTNGAIFGKSRDWLRRVLRGQDHRLTVTTAFDGITADVVAAVLRGNVHVYSAAQARGETLR

SEQ ID NO: 17145 - protein, 2083 aa, Trypanosoma brucei
MISIGKEGKPQNQKKSCFGGSNPDLQNTNTIRRGVLPVGLFRQIGGKIENLCSDEIYQIVHIEEKKHRCTNGAHVEKSSGIDRSQVNKPIKEISGSFSFLGQNIGRLDVKKSPENEYLEKNNCGQNDITTTKNCRYADFRSAFERARPAQCMSNNGYCDKEVTKKLGAVEPKIFSKNGNFEKINRGQIDMTTTKNCRYADFRSAFERARPAQCMSNNGYCDKEVTKKLGAAEPKIFSKNGNFEKINRGQIDMTTTKNCRYADFRSAFERARPAQCMSNNGYCDKEVTKKLGAAEPKIFSKNGNFEKINRGQIDMTTTKNCRYADFRSAFERARPAQCMSNNGYSDKEVIRKIGAVGKEKCSKNKEKEQISQADKNETNGFYADFRSAFTRNERVELGNNNGYCHNEATRNIERGKKPKTSKIDEKRQISNIAAGRKSDHYEDPSSAFSRISIDHCNAQIKIGRKKMVRNLRSSEPQKISRFPRHHGEGKKVSPPALNLQWPGQKQVASAVAPQIRKSATPKNNNTNIHRNCRKHLRKEGDWWIVEGGQSHKKAAHSPLKTKPVNKEGNRKKYGRPPREVEGKWLTSLIAATTEAVLRQLGKGKSPTAHTKSNQSRVPLQHSEKTAKGIKHATPQPKKKEHEQRKELPRRPPTKRSHGANKGQGAPVRAPTKTQGKGEEQPHTMRTWAQVAAPKKQKVTSKPPMVQKKKAQGEKKGAAANPFHWELQVEQLLKDAEQIRESMYIRFLHVRQSWWSTCFKAHMEFHCPVCGFAHPEETITVTHCRQQHPQEGRLIPYTLTTTGNQVQFAGPSCSLSAVVAILSHMEEEKNFHPIIRRSYQSPSKETTQTLVQALGLELPTAPITAIEALAHHDQMIRQLLEAPATTARQCGHCGVNELMEGPSNPGENLGIISVNPNTCESIELTNQILAKTYTTSWTDMEVVCTGERKNMAHRPTPTLITHSKTFGEMVVIDIGTWGNEAVGLKRILHEILLPHGNGTATYKLVGAVIAPTPFHVVAAIPQQTRKRRWDILDGMVRRTVSQSTVDPKTVVMCVYRREEEETYDVLDEEEQDDDLLGIPNPTPRRLMISQAGPQQNSWVDTRGRRAYGSQEEQDERTSTDQVSIFSHDETRELSSPLECPIVGCTASFVGPRRWEKAKSHIYGVHSLEEVREIPRGELICKGIVRCETCATLLPTSDRAKQAHADDCRPYLPRKENIRRKRAAEREATEASAQQGIALRLERQGPYITPRDIEEPTNTTTESWWREKVATKRYLHRKEWPQWLDICRTVLLGYSASSQGERHQRQVMLLDLVRNHLHTRTARREQQQQRGKDNQEEEDRQKEEEKSLAKRVETLCLLSATGRAAQLLAAEKAQPVEYSPEMAQTIGELYPQEDIHDIPRPPVEQPGVVSVDAEEVAKTIARRLTRGAAPGLDGWTRELLYPLTLDPALKMEIAAVVKDIINADVSMEVGRRLQATSLTVLRKPNGKYRPIGAESVWAKLASHIAISRVMKTAEKKFSGIQFGVGGHIEEAIAKIRKDFATKGSLAMLDGRNAYNAISRRAILEAVYGDSTWSPLWRLVSLLLGTTGEVGFYENGKLCHTWESTRGVRQGMVLGPLLFSIGTLATLRRLQQTFPEAQFTAYLDDVTVAAPPEELKNVCAATAEAMEALGIVNNADKTEVLELTGDTGFGTAVKACARVLGAYVAPDPMSEEIREGVEKKAMETDRLFKAIVELPLYNRTRWRILAMSAMPRITFLLRNHDMQHTHRVASWFDERTTQVMEHILGQPMTERARNIAALPVSMGGCGIRRMAQVAEYAHQCAGEKGLQQRKTEEADQRQQDDLYATLGGADRQVFTANTAAGAGRPLTDAQVRLDDATFGVYLRERLLVRVLPEGVKCLCGEDASNHHIHTCTKVHNKPRQMRHDIINSVFANGLRLCGFQCATEPRLNEVSKRRPDILIAGLDTYAVTDITVTYPGRVTVGNTAQGQRSVAAADPMKAALVRFQEKERKYSYWAIQNGLAFAPFVMLTNGAIFGKSRDWLRRVLRGQDHRLTVTTAFDGITADVVAAVLRGNVHVYSAAQARGETLR

SEQ ID NO: 17146 - protein, 1894 aa, Trypanosoma brucei
MTTTKNCRYADFRSAFERARPAQCMSNNGYCDKEVTKKLGAVEPKIFSKNGNFEKINRGQIDMTTTKNCRYADFRSAFERARPAQCMSNNGYCNKEVTKKLGAVEPKIFSKNGNFEKINRGQIDMTTTNKCRYADFRSAFERARPAQCMSNNGYSDKEVIRKIGAVGKEKCSKNKEKEQISQADKNETNGFYADFRSAFTRNERVELGNNNGYCHNEATRNIERGKKPKTSKIDEKRQISNIAAGRKSDHYEDPSSAFSRISIDHCNAQIKIGRKKMVRNLRSSEPQKISRFPRHHGEGKKVSPPALNLQWPGQKQVASAVAPQIRKSATPKKNNTNIHRNCRKHLRKEGDWWIVEGGQSHKKAAHSPLKTKPVNKEGNRKKYGRPPREVEGKWLTSLIAATTEAVLRQLGKGKSPTAHTKSNQSRVPLQHSEKTAKGIKHATPQPKKKEHEQRKELPRRPPTKRSHGANKGQGAPVRAPTKTQGKGEEQPHTMRTWAQVAAPKKQKVTSKPPMVQKKKAQGEKKGAAANPFHWELQVEQLLKDAEQIRESMYIRFLHVRQSWWSTCFKAHMEFHCPVCGFAHPEETITVTHCRQQHPQEGRLIPYTLTTTGNQVQFAGPSCSLSAVVAILSHMEEEKNFHPIIRRSYQSPSKETTQTLVQALGLELPTAPITAIEALAHHDQMIRQLLEAPATTARQCGHCGVNELMEGPSNPGENLGIISVNPNTCESIELTNQILAKTYTTSWTDMEVVCTGERKNMAHRPTPTLITHSKTFGEMVVIDIGTWGNEAVGLKRILHEILLPHGNGTATYKLVGAVIAPTPFHVVAAIPQQTRKRRWDILDGMVRRTVSQSTVDPKTVVMCVYRREEEETYDVLDEEEQDDDLLGIPNPTPRRLMISQAGPQQNSWVDTRGRRAYGSQEEQDERTSTDQVSIFSHDETRELSSPLECPIVGCTASFVGPRRWEKAKSHIYGVHSLEEVREIPGGELICKGIVRCETCATLLPTSDRAKQAHADDCRPYLPRKENIRRKRAAEREATEASAQQGIALRLERQGPYITPRDIEEPTNTTTESWWREKVATKRYLHRKEWPQWLDICRTVLLGYSASSQGERHQRQVMLLDLVRNHLHTRTARREQQQQRGKDNQEEEDRQKEEEKSLAKRVETLCLLSATGRAAQLLAAEKAQPVEYSPEMAQTIGELYPQEDIHDIPRPPVEQPGVVSVDAEEVAKTIARRLTRGAAPGLDGWTRELLYPLTLDPALKMEIAAVVKDIINADVSMEVGRRLQATSLTVLRKPNGKYRPIGAESVWAKLASHIAISRVMKTAEKKFSGIQFGVGGHIEEAIAKIRKDFATKGSLAMLDGRNAYNAISRRAILEAVYGDSTWSPLWRLVSLLLGTTGEVGFYENGKLCHTWESTRGVRQGMVLGPLLFSIGTLATLRRLQQTFPEAQFTAYLDDVTVAAPPEELKNVCAATAEAMEALGIVNNADKTEVLELTGDTGFGTAVKACARVLGAYVAPDPMSEEIREGVEKKAMETDRLFKAIVELPLYNRTRWRILAMSAMPRITFLLRNHDMQHTHQVASWFDERTTQVMEHILGQPMTERARNIAALPVSMGGCGIRRMAQVAEYAHQCAGEKGLQQRKTEEADQRQQDDLYATLGGADRQVFTANTAAGAGRPLTDAQVRLDDATFGVYLRERLLVRVLPEGVKCLCGEDASNHHIHTCTKVHNKPRQMRHDIINSVFANGLRLCGFQCATEPRLNEVSKRRPDILIAGLDTYAVTDITVTYPGRVTVGNTAQGQRSVAAADPMKAALVRFQEKERKYSYWAIQNGLAFAPFVMLTNGAIFGKSRDWLRRVLRGQDHRLTVTTAFDGITADVVAAVLRGNVHVYSAAQARGETLR

SEQ ID NO: 17147 - protein, 760 aa, Laupala kohalensis
MTTDMQEPVINAETLKKVIDNTHNWKSPGSDNIHNFWYKKFTSVHSKLACYINEFLTSPETVPKFLTQGKTYLIPKEKLTKDPSKYRPITCLQTMYKIITSCITQILNSHVESQNIMTEEQKGCRKGAKGCKEQLIIDSVILNQVSRKNQKISCCYIDYQKAYDSVPHTWLIKALEIYKVHPILVKFLRHLMQSWRTDIHLVTDEQTITTPGIKINRGIFQGDALSPLWFCLALNPLSNVLKRKGIGYCLKSNGTEHVVSHLYMDDLKFYAPSHNFLKELIREVEQFSRDINMTFGLDKCKVINITRGKYELIGFETNQGESMKAMDEGDFYKYRGYFQGKKISHTKVKDSLTKEYLVRVRKICQTDLNSKHIFKAINTFAVPVLTYLFGIISWSDTDLENIMRKTRVELTKFRKHHPKASTLRLTIPGAEGGRGLINIKNLHNRQVQKFRDYFHFKKLVSTLHRSVSQADLKLTPLNLSIEPSQNNVDSHIQSRNEKHNRWRSMALHGSHPHDLDQTYVDKEASNAWLRCGDLFPETEGFFITIQDQVINNKNYLKHIIKDPSVKDDRCRKCNDKAETIQHIMSACSTLCQSEYLHRHDQIVAIIHQEIALNSKLLKDKTPYYKYEVTPVLDSNKVSLYYDRSIITDRCIPNNRPDIVLRDKELKIAYLIDIAVPNTHNIQNTIAEKKRKYADLSDEIQKMWKLSKVYVVPIVFSTTGVIPKAHESLKILGIRREVYILLQKAAILNTTRIVRKFFSQE

SEQ ID NO: 17148 - protein, 1236 aa, Laupala kohalensis
METRLKSRKASEKMSLPGERQGTSGAAAGSDSMWTGSGGMLNRRAPTGSPESNTAETMNSSQEISQSAMTAESVSQGGNPILPETTSAGKRRVRMKWTQDINVFLMRTYFQQTRLETDMVAYRYKLYLAFVEKYPTIPVTEQRIADQRRSIVKNNLLSSDLLDLIKREVASEQEAIPVQEQNEETPPCVSISKANTEQSNDQEELERRGEDTVVPCDENLDKEGDKDCVNRIDDMFRTTMQEYMGTDPTKRPKIPKQKSSRKFAKNVELLDKNVLPRYLNVEDFEELHNLIYCAALTAARCNGAKIVDPNKQSDRHHRENVPKWKRRLSRKIETKRTEIARLLEFSKGKPSKKLRRKATTILKKYKTHTERDCPNHDITSIIDTLQQKLAAWSARLRRYSQCDRRKQQNNQFSNNEKQFYRKLKAKLSKEKDDGDSKETPSRDDITEFWSDIWSNRKEYNQEAKWIKEEEKATSMITDMQEPVITAETLKKVIDNTHNWKSPGSDNIHNFWYKKFTSVHSKLACYINEFLTSPETVPKFLTQGKTYLIPKGKLTKDPSKYRPITCLQTVYKIITSCITQILNSHVESQNIMTEEQKGCRKGAKGCKEQLIIDSVILNQVSRKNQKISCCYIDYQKAYDSVPHTWLIKALEIYKVHPILVKFLRHLMQSWRTDIHLVTDEQTITTPGIKINRGIFQGDALSPLWFCLALNPLSNVLKRKGIGYCLKSNGTEHVVSHLLYMDDLKLYAPSHNLLKELIREVEQFSSDINMTFGLDKCKVINITRGKYELIGFETNQGESMKAMDEGDFYKYLGYFQGKKINHTKVKDSLTKDYLLRVRKICQTDLNSKHIFKAINTFAVPVLTYSFGIISWSDTDLENIMRKTRVELTKFRKHHPKASTLRLTIPRAEGGRGLIDIKNLHNRQVQKLRDYFHLKKLVSTLHRSVSQADLKLTPLNLSIDPFQNNVDSHIQSRNEKHNQWRSMALHGRHPHDLDQTYVDKEASNAWLRCGDLFPETEGFFIAIQDQVINTKNYLKHIIKDPSVKDDRCRKCNDKAETIQHIMSACSTLCQSEYLHRHDQIVAIIHQEIALNSKLLKDKTPYYKYEVTPVLDSNKVSLYYDRSIITDRCIPNNRPDIVLRDKELKIAYLIDIAVPNTHNIQNTIAEKKRKYADLSDEIQKMWKLSKVYVVPIVLSTTGVIPKALHESLKILGIRREVYILLQKAAILNTTRIVRKFFSQE

SEQ ID NO: 17149 - protein, 1236 aa, Laupala kohalensis
METRLKSRKASEKMSLPGEHQGTSGAAAGSDSQWTGSGGMLNRRAPTGSPESNTAETMNSSQEISQSAMTAESVSQGGNPILPETTSAGKRRVRMKWTQDINVFLMRTYFQQTRLETDKVAYRYKLYLAFVEKYPTIPVTEQRIADQRRSIVKNNLLSSDLLDLIKREVASEQEAIPVQEQNEETPPCVSISKANTEQSNDQEELERRGEDTVVPCDENLDKEGDKDCVNRIDDMFRTTMQEYMGTDPTKRPKIPKQKSSRKFAKNVELLDKNVLPRYLNVEDFEELHNLIYCAALTAARCNGAKIVDPNKQSDRHHRENVPKWKRRLSRKIETKRTEIARLLEFSKGKPSKKLRRKATTILKKYKTHTERDCPNHDITSIIDTLQQKLAAWSARLRRYSQCDRRKQQNNQFSNNEKQFYRKLKAKLSKEKDDGDSKETPSRDDITEFWSDIWSNRKEYNQEAKWIKEEEKATSMITDMQEPVITAETLKKVIDNTHNWKSPGSDNIHNFWYKKFTSVHSKLACYINEFLTSPETVPKFLTQGKTYLIPKGKLTKDPSKYRPITCLQTVYKIITSCITQILNSHVESQNIMTEEQKGCRKGAKGCKEQLIIDSVILNQVSRKNQKISCCYIDYQKAYDSVPHTWLIKALEIYKVHPILVKFLRHLMQSWRTDIHLVTDEQTITTPGIKINRGIFQGDALSPLWFCLALNPLSNVLKRKGIGYCLKSNGTEHVVSHLLYMDDLKLYAPSHNLLKELIREVEQFSSDINMTFGLDKCKVINITRGKYELIGFETNQGESMKAMDEGDFYKYLGYFQGKKINHTKVKDSLTKDYLLRVRKICQTDLNSKHIFKAINTFAVPVLTYSFGIISWSDTDLENIMRKTRVELTKFRKHHPKASTLRLTIPRAEGGRGLIDIKNLYNRQVQKLRDYFHLKKLVSTLHRSVSQADLKLTPLNLSIDPFQNNVDSHIQSRNEKHNQWRSMALHGRHPHDLDQTYVDKEASNAWLRCGDLFPETEGFFIAIQDQVNNTKNYLKHIIKDPSVKDDRCRKCNDKAETIQHIMSACSTLCQSEYLHRHDQIVAIIHQEIALNSKLLKDKTPYYKYEVTPVLDSNKVSLYYDRSIITDRCIPNNRPDIVLRDKELKIAYLIDIAVPNTHNIQYTIAEKKRKYADLSDEIQKMWKLSKVYVVPIVLSTTGVIPKALHESLKILGIRREVYILLQKAAILNTTRIVRKFFSQE

SEQ ID NO: 17150 - protein, 762 aa, Laupala kohalensis
MMTDKQEPVITAETLKKVIDNTHNWKSPGSDNIHNFWYKKFTSVHSKLACYINEFLTSPETVPKFLTQGKTYLIPKGKLTKDPSKYRPITCLQTVYKIITSCITQILNSHVESQNIMTEEQKGCRKGAKGCKEQLIIDSVILNQVSRKNQKISCCYIDYQKAYDSVPHTWLIKALEIYKVHPILVKFLRHLMQSWRTDIHLVTDEQTITTPGIKINRGIFQGDALSPLWFCLALNPLSNVLKRKGIGYCLKSNGTEHVVSHLLYMDDLKLYAPSHNLLKELIKEVEQFSSDINMTFGLDKCKVINITRGKYELIGFETNQGESMKAMDEGDFYKYLGYFQGKKINHTKVKDSLTKDYLLRVRKICQTDLNSKHIFKAINTFAVPVLTYSFGIISWSDTDLENIMRKTRVELTKFRKHHPKASTLRLTIPRAEGGRGLIDIKNLHNRQVQKLRDYFHLKKLVSTLHRSVSQADLKLTPLNLSIDPFQNNVDSHIQSRNEKHNRWRSMALHGRHPHDLDQTYVDKEASNAWLRCGDLFPETEGFFIAIQDQVINTKNYLKHIIKDPSVKDDRCRKCNDKAETIQHIMSACSTLCQSEYLHRHDQIVAIIHQEIALNSKLLKDKTPYYKYEVTPVLDSNKVSLYYDRSIITDRCIPNNRPDIVLRDKELKIAYLIDIAVPNTHNIQNTIAEKKRKYADLSDEIQKMWKLSKVYVVPIVLSTTGVIPKALHESLKILGIRREVYILLQKAAILNTTRIVRKFFSQE

SEQ ID NO: 17151 - protein, 1118 aa, Laupala kohalensis
MVAYRYKLYLAFVEKYPTIPVTEQRIADQRRSIVKNNLLSSDLLDLIKREVASEQEAIPVQEQNEERPPCVSISKANTEQSNDQEELERRGEDTVVPCDENLDKEGDKDCVNRIDDMFRTTMQEYMGTDPTKRPKIPKQKSSRKFAKNVELLDKNVLPRYLNVEDFEELHNLIYCAALTAARCNGAKIVDPNKQSDRHHRENVPKWKRRLSRKIETKRTEIARLLEFSKGKPSKKLRRKATTILKKYKTHTERDCPNHDITSIIDTLQQKLAAWSARLRRYSQCDRRKQQNNQFSNNEKQFYRKLKAKLSKEKDDGDSKETPSRDDITEFWSDIWSNRKEYNQEAKWIKEEEKATSMITDMQEPVITAETLKKVIDNTHNWKSPGSDNIHNFWYKKFTSVHSKLACYINEFLTSPETVPKFLTQGKTYLIPKGKLTKDPSKYRPITCLQTVYKIITSCFTQILNSHVESQNIMTEEQKGCRKGAKGCKEQLIIDSVILNQVSRKNQKISCCYIDYQKAYDSVPHTWLIKALEIYKVHPILVKFLRHLMQSWRTDIHLVTDEQTITTPGIKINRGIFQGDALSPLWFCLALNPLSNVLKRKGIGYCLKSNGTEHVVSHLLYMDDLKLYAPSHNLLKELIREVEQFSSDINMTFGLDKCKVINITRGKYELIGFETNQGESMKAMDEGDFYKYLGYFQGKKINHTKVKDSLTKDYLLRVRKICQTDLNSKHIFKAINTFAVPVLTYSFGIISWSDTDLENIMRKTRVELTKFRKHHPKASTLRLTIPRAEGGRGLIDIRNLHNRQVQKLRDYFHLKKLVSTLHRSVSQADLKLTPLNLSIDPFQNNVDSHIQSRNEKHNQWRSMALHGRHPHDLDQTYVDKEASNAWLRCGDLFPETEGFFIAIQDQVINSKNYLKHIIKDPSVKDDRCRKCNDKAETIQHIMSACSTLCQSEYLHRHDQIVAIIHQEIALNSNLLKDKTPYYKYEVTPVLDSNKVSLYYDRSIITYRCIPNNRPDIVLRDKVLKIAYLIGIAVPNTHNIQNTIAEKKRKYADLSDEIQKMWKLSKVYVVPIVLSTTGVIPKALHESLKILGIRREVYNLLQKAAILNTTRIVRKFFSQE

SEQ ID NO: 17152 - protein, 1236 aa, Laupala kohalensis
METRLKSRKASEKMSLPGERQGTSGAAAGSDSMWTGSGGMLNRRAPTGSPESNTAETMNSSQEISQSAMTAESVSQGGNPILPETTSAGKRRVRMKWTQDINVFLMRTYFQQTRLETDMVAYRYKLYLAFVEKYPTIPVTEQRIADQRRSIVKNNLLSSDLLDLIKREVASEQEAIPVQEQNEETPPCVSISKANTEQSNDQEELERRGEDTVVPCDENLDKEGDKDCVNRIDDMFRTTMQEYMGTDPTKRPKIPKQKSSRKFAKNVELLDKNVLPRYLNVEDFEELHNLIYCAALTAARCNGAKIVDPNKQSDRHHRENVPKWKRRLSRKIETKRTEIARLLEFSKGKPSKKLRRKATTILKKYKTHTERDCPNHDITSIIDTLQQKLAAWSARLRRYSQCDRRKQQNNQFSNNKKQFYRKLKAKLSKEKDDGDSKETPSRDDITEFWSDIWSNRKEYNQEAKWIKEEEKATSMITDMQEPVITAETLKKVIDNTHNWKSPGSDNIHNFWYKKFTSVHSKLACYINEFLTSPETVPKFLTQGKTYLIPKGKLTEDPSKYKPITYLQTVYKIITSCITQILNSHVESQNIMTEEQKGCRKGAKGCKEQLIIDSVILNQVSRKNQKISCCYIDYQKAYDSVPHTWLIKALEIYKVHPILVKFLRHLMQSWRTDIHLVTDEQTITTPGIKINRGIFQGDALSPLWFCLALNPLSNVLKRKGIGYCLKSNGTEHVVSHLLYMDDLKLYAPSHNLLKELIREVEQFSSDINMTFGLDKCKVINITRGKYELIGFETNQGESMKAMDEGDFYKYLGYFQGKKINHTKVKDSLTKDYLLRVRKICQTDLNSKHIFKAINTFAVPVLTYSFGIISWSDTDLENIMRKTRVELTKFRKHHPKASTLRLTIPRAEGGRGLIDIKNLHNRQVQKLRDYFHLKKLVSTLHRSVSQADLKLTPLNLSIDPFQNNVDSHIQSRNEKHNQWRSMALHGRHPHDLDQTYVDKEASNAWLRCGDLFPETEGFFIAIQDQVINTKNYLKHIIKDPSVKDDRCRKCNDKAETIQHIMSACSTLCQSEYLHRHDQIVAIIHQEIVLNSKLLKDKTPYYKYEVTPVLDSNKVSLYYDRSIITDRCIPNNRPDIVLRDKELKIAYLIDIAVPNTHNIQNTIAEKKRKYADLSDEIQKMWKLSKVYVVPIVLSTTGVIPKALHESLKILGIRREVYILLQKAAILNTTRIVRKFFSQE

SEQ ID NO: 17153 - protein, 704 aa, Ligia exotica
MSHVRLFTFEEVAVMVKKYKSKTASGPDGISIRVLKGTDFTILTQIFNIWLMSGVIPKKTLDTRTVLIYKKGDATEPSNYRPITISSILYRLFAKLLTERLQKLISLSPNQAAFIPLEGTFKNSLILQEIFDKYKKKSLALVFLDLAKAFDKVPHQIVLNKLLERNIAHQYIKLIQHIYESSYTYIEHEGQKTNPIRMGRGVKQGCPLSPLLFNLVMDDLLRLYQNFGVEVGGEKLAIFSFADDTVLVAPSIGNMMALIYEVNKYFKSHGLEVNPGKCMALFHEKAHRNNKAIKVASSDKFFWEGIAIPPLDYDHLSTYLGIEYGPRGPVSILKSIEEYLENISRCPTKPIKKIKLIVEHLIPKLNYVLKIIHPCFNKLKRIDLIIRQALKKILHLPDDTKTYLLYHPNVLSLPLLQLKIPYMFVSSLEKIKLKGELKINRIADGLLNFYPKAIKASSKEEFYKCYDKIIGDQIDKYRFPEKLKLINLNKKNLLYLRPSQLINGIKLLLDVVPTNIKLRKLNPERSVLCRNCKLYPETELHILNQCHINKKAISKRHNVIVNLIAKLVKTNNTNFTVWVERSWTTPSGVYRPDLSILTNENVLKLVALTIPFEKSNNYLRNRYIAKVNKYQNTIKKEYLPDSMALVRRVETAAVVVGSHGTILTDTERVLKNLKIYKHRSLILTCVLGYSSWIVGGHIGGHREA

SEQ ID NO: 17154 - protein, 1422 aa, Parapoynx stratiotata
MEKKKREYNLRPLPGGYRRGAPGADAGCLSMRTVGGEELSKRALAGNNPEHTTAESHAYHHSSCISSSIPSLFSIFQSPNTSPASYKNLATSPSLSTSTTADVVQMANAAISTPTAACTTRARKRWTEAMNRFIWRTYLIETHLEQDKRGYLDKLFSHFSEAYPHMQATKQRLGDQRRAIINNKLLSDMVLKEIKTEVEKHLISKNAENNTQHGTLTHNHYINAEEPHKKRIRWSHSMNENILHNYYKITQLESNRTAYRRPLHLSFITEFPELSYLTEQRISDQLRVIFRNKLISDTTIQQIKEDVARELNNTGNSSTETALYTNVTNLEITQQNSAFTLQHHTPVLISQPDTLTLTTQYDTLKPTLQHHTPVSTSQHDTLTLTTQHNTLTPLTQRNSTAPIIAINDILVNQVILQIPEIEQNKIRDTFTAAVEEFKGTDPTSKPFIPKQRHSKRLTSIVHFINSNILPSHLQGNPDFETTHNAIYCAAYAAVLSNGGKVRREEQPHKTHTQHKPRWQERLERRIEDLRIKIGRITSFISGNNSQTLANHVEKIKSQYKIHCKHETENIHLSQFLDTLKQKLSALSSRLRRYKQTTMRKNQNKQFVSNEKAFYRNFSQTSSTNNIHTPSLEELHAFWSNIWSTPTNHNNADWISTDQMKYRDTPLMPFVAISLDTLQRTIAKLNNWKATGSDKIHNYWFKKFTCTHTILHKHINNFIKHPGSMPTYITYGITYMLPKDQNDLKNPAKYRPITCLQNIYKIITSCISEMIYQHLESQHILAEQQKGCRKKSQGCKEQLIIDAIVSKSANRKKTSIHTMYIDYQKAFDSIPHSWLLHILKHYNINDTIIKFLCTTIKNWKTVLKLQDHRSTSPINIRRGIFQGDALSPLWFCMALNPLSNLLNDSQYGYKIKSNTSSITLSHLLYMDDIKLYAKTLENLKELANIVELFSQDIKMDFGISKCKMQSVNKGKIEYNTYTLDSGDVIDAVDNIEGYKYLGYQQTQQIHQKHTKNTLTHKFKYRLHKILNSHLNSRNTIKAINSYAIPVLTYSFGVINWTKTDLLKHQRSINTLLTQYRKHHPRSCSQRLTLPKHEGGRGLIDIQNLHNKQITTLRTFFHNQAEHSLLHKTVTEMDNRFTPLNLQNYSTQINEKITQNNEKVEMWTQKVLHGRHRLHLDNPDIDKVASNSWLKKGELFPETEGFMLAIQDQVIETKNYKKYIIKDGRINSDLCRRCHRHPETIQHITGACPSIVQTDYKHRHDQVAKIVHQYLAYKYNLIKEKTPYYKYTPETVLDTPQYKLYWDRTIITDKTIHYNRPDITFHDKINKQVYLIDIAIPNTHNLSSTHIEKIAKYTDLAIEIKTQWQVPTVKTIPIIISTTGVIPKTLHKSLKICNMHPLSFQLLQKAVILNTCRIVRKFLSLDNT

SEQ ID NO: 17155 - protein, 1426 aa, Parapoynx stratiotata
MEKEKREYNLRPLPGGYRRGAPGADAGCLSMRTVGGEELSKRALAGNNPEHTTAESHAYHHSSCISSSISSQFSIFQSPNTSPASYKNLATSPSSLNSLSTSTTADVVQMANAAISTPTAACTTRARKRWTEAMNRFIWRTYLIETHLEQDKRGYLDKLFSHFSEAYPHMQATKQRLGDQRRAIINNKLLSDMVLKEIKTEVEKHLISNNAENNTQHGTLTHNHYINAEEPHKKRIRWSHSMNENILHNYYKITQLESNRTAYRRPLHLSFITEFPELSYLTEQRISDQLRVIFRNKLISDSTIQQIKEDVARELNNTGNSSTETALYTNVTNLEITQQNSAFTLQHHTPVLISQPDTLTLTTQYDTLTPTLQHHTPVSTSQHDTLTLTTQHNTLTPLTQRNSTAPIIATNDILVNQVILQIPEIEQNKIRNTFTAAVEEFKGTDPTSKPFIPKQRHSKRLTSIVHFINSNILPSHLQGNPDFETTHNAIYCAAYAAVLSNGGKVRREEQPHKTHTQHKPRWQERLERRIEDLRIKIGRITSFISGNNSQTLANHVEKIKSQYKIHCKHETENIHLSQFLDTLKQKLSALSSRLRRYKQTTMRKNQNKQFVSNEKAFYRNFSQTSSTNNIHTPSLEELHAFWSNIWSTPTNHNNADWISTDQMKYRDTPLMPFEAISLDTLQRTIAKLNNWKATGSDKIHNYWFKKFTCTHTILHKLINNFIKHPGSMPTYITYGITYMLPKDQNDLKNPAKYRPITCLQNIYKIITSCISEMIYQHLESQHILAEQQKGCRKKSQGCKEQLIIDAIVSKYANRKKTSIHTMYIDYQKAFDSIPHSWLLHILKHYNINDTIIKFLCTTMKNWKTVLKLQDHRSTSPINIRRGIFQGDALSPLWFCMALNPLSNLLNDSQYGYKIKSNTSSITLSHLLYMDDIKLYAKTLENLKELTNIVELFSQDIKMDFGISKCKMQSVNKGKIEYNTYTLDSGDVIDAVDNIEGYKYLGYQQTQQIHHKHTKNTLTHKFKYRLHKILNSHLNSRNTIKAINSYAIPVLTYSFGVINWTKTDLLKHQRSINTLLTQYRKHHPRSCSQRLTLPKHEGGRGLIDIQNLHNKQITTLRTFFHNQAEHSLLHKTVTEMDNRFTPLNLQNYSTQINEKITQNKEKVEMWTQKVLHGRHRLHLDNPDIDKVASNSWLKKGELFPETEGFMLAIQDQVIETKNYKKYIIKDRRINSDLCRRCHRHPETIQHITGACPSIAQTDYKHRHDQVAKIVHQYLAYKYNLIKEKTPYYKYTPETVLDTPQYKLYWDRTIITDKTIHYNRPDLTFHDKINKQVYLIDIAIPNTHNLSSTHIEKIAKYTDLAIEIKTQWQVTTVKTIPIIISTTGVIPKTLHKSLKICNMHPLSFQLLQKAVILNTCRIVRKFLSLDNT

SEQ ID NO: 17156 - protein, 1426 aa, Parapoynx stratiotata
MEKEKREYNLRPLPGGYRRGAPGADAGCLSMRTVGGEELSKRALAGKNPEHTTAESHAYHHSSCISSSISSQFSIFQSPNTSPASYKNLATSPSSLNSLSTSTTADVVQMANAAISTPTAACTTRARKRWTEAMNRFIWRTYLIETHLEQDKRGYLDKLFSHFSEAYPHMQATKQRLGDQRRAIINNKLLSDMVLKEIKTEVEKHLISNNAENNTQHGTLTHNHYINAEEPHKKRIRWSHSMNENILHNYYKITQLESNRTAYRRPLHLSFITEFPELSYLTEQRISDQLRVIFRNKLISDSTIQQIKEDVARELNNTGNSSTETDLYTDVTNLEITQQNSAFTLQHHTPVLISQPDTLTLTTQYDTLTPTLQHHTPVSTSQHDTLTLTTQHNTLTPLTQRNSTAPIIATNDILVNQVILQIPEIEQNKIRDTFTAAVEEFKGTDPTSKPFIPKQRHSKRLTSIVHFINSNILPSHLQGNPDFETTHNAIYCAAYAAVLSNGGKVRREEQPHKTHTQHKPRWQERLERRIEDLRIKIGRITSFISGNNSQTLANHVEKIKSQYKIHCKHETENIHLSQFLDTLKQKLSALSSRLRRYKQTTMRKNQNKQFVSNEKAFYRNFSQTSSTNNIHTPSLEELHAFWSNIWSTPTNHNNADWISTDQMKYRDTPLMPFEAISLDTLQRTIAKLNNWKATGSDKIHNYWFKKFTCTHTILHKHINNFIKHPGSMPTYITYGITYMLPKDQNDLKNPAKYRPITCLQNIYKIITSCISEMIYQHLESQHILAEQQKGCRKKSQGCKEQLIIDAIVSKSANRKKTSIHTMYIDYQKAFDSIPHSWLLHILKHYNINDTIIKFLCTTMKNWKTVLKLQDHRSTSPINIRRGIFQGDALSPLWFCMALNPLSNLLNDSQYGYKIKSNTSSITLSHLLYMDDIKLYAKTLENLKELANIVELFSQDIKMDFGISKCKMQSVNKGKIEYNTYTLDSGDVIDAVDNIEGYKYLGYQQTQQIHQKHTKNTLTHKFKYRLHKILNSHLNSRNTIKAINSYAIPVLTYSFGVINWTKTDLLKHQRSINTLLTQYRKHHPRSCSQRLTLPKHEGGRGLIDIQNLHNKQITTLRTFFHNQAEHSLLHKTVTEMDNRFTPLNLQNYSTQINEKITQNNEKVEMWTQKVLHGRHRLHLDNPDIDKVASNSWLKKGELFPETEGFMLAIQDQVIETKNYKKYIIKDGRINSDLCRRCHRHPETIQHITGACPSIVQTDYKHRHDQVAKIVHQYLAYKYNLIKEKTPYYKYTPETVLDTPQYKLYWDRTIITDKTIHYNRPDITFHDKINKQVYLIDIAIPNTHNLSSTHIGKIAKYTDLAIEIKTQWQVTTVKTIPIIISTTGVIPKTLHKSLKICNMHPLSFQLLQKAVILNTCRIVRKFLSLDNT

SEQ ID NO: 17157 - protein, 1426 aa, Parapoynx stratiotata
MEKEKREYNLRPLPGGYRRGAPGADAGCLSMRTVGGEELSKRALAGNNPEHTTAESHAYHHSSCISSSISSQFSIFQSPNTSPASYKNLATSPSSLNSLSTSTTADVVQMANAAISTPTAACTTRARKRWTEAMNRFIWRTYLIETHIEQDKRGYLDKLFSHFSEAYPHMQATKQRLGDQRRAIINNKLLSDMVLKEIKTEVEKHLISNNAENNTQHGTLTHNHYINAEEPHKKRIRWSHSMNKNILHNYYKITQLESNRTAYRRPLHLSFITEFPELSYLTEQRISDQLRVIFRNKLISDSTIQQIKEDVARELNNTGNSSTETALYTNVTNLEITQQNSAFTLQHHTPVLISQPDTLTLTTQYDTLTPTLQHHTPVSTSQHDTLTLTTQHNTLTPLTQRNSTAPIIATNDILVNQVILQIPEIEQNKIRDTFTAAVEEFKGTDPTSKPFIPKQRHSKRLTSIVHFINSNILPSHLQGNPDFETTHNAIYCAAYAAVLSNGGKVRREEQPHKIHTQHKPRWQERLERRIEDLRIKIGRITSFISGNNSQTLANHVEKIKSQYKIHCKHETENIHLSQFLDTLKQKLSALSSRLRRYKQTTMRKNQNKQFVSNEKAFYRNFSQTSSTNNIHTPSLEELHAFWSNIWSTPTNHNNADWISTDQMKYRDTPLMPFEAISLDTLQRTIGKLNNWKATGSDKIHNYWFKKFTCTHTILHKLINNFIKHPGSMPTYITYGITYMLPKDQNDLKNPAKYRPITCLQNIYKIITSCISEMIYQHLESQHILAEQQKGCRKKSQGCKEQLIIDAIVSKYANRKKTSIHTMYIDYQKAFDSIPHSWLLHILKHYNINDTIIKFLCTTMKNWKTVLKLQDHRSTSPINIRRGIFQGDALSPLWFCMALNPLSNLLNDSQYGYKIKSNTSSITLSHLLYMDDIKLYAKTLENLKELANIVELFSQDIKMDFGISKCKMQSVNKGKIEYNTYTLDSGDVIDAVDNIEGYKYLGYQQTQQIHQKHTKNTLTHKFKYRLHKILNSHLNSRNTIKAINSYAIPVLTYSFGVINWTKTDLLKHQRSINTLLTQYRKHHPRSCSQRLTLPKHEGGRGLIDIQNLHNKQITTLRTFFHNQAENSLLHKTVTEMDNRFTPLNLQNYSTQINEKITQNNEKVEMWTQKVLHGRHRLHLDNPDIDKVASNSWLKKGELFPETEGFMLAIQDQVIKTKNYKKYIIKDRRINSDLCRRCHRHPETIQHVTGACPSIAQTDYKHRHDQVAKIVHQYLAYKYNLIKEKTPYYKYTPETVLDTPQYKLYWDRTIITDKTIHYNRPDITFHDKINKQVYLIDIAIPNTHNLSSTHIEKIAKYTDLAIEIKTQWQVTTVKTIPIIISTTGVIPKTLHKSLKICNMHPLSFQLLQKAVILNTCRIVRKFLSLDNT

SEQ ID NO: 17158 - protein, 965 aa, Nymphalis polychloros
MSCSNNFNNSVPSQPDLLSCYQCCNGRIFKSQKRLKIHTTRCHSLPLGHSSNFIFNGPTVINSDTNSQLQFEQILAKYNQSIPLIKRIPRGARISLGRSLSSVIQKCLSNSNSAWQNLFTFSYKFFHVDKAKNGSLSTKLKQNGLDTQISLPKFVSRPLNFDLKKNVENKAMDGDLKNAARILFSSDTLAPFNNKTLESLHEKHPLPNPASVLPNPPSQNTFLQVKDEDTYASIMSFSSGSAGGIDGITPQHLKDLVSASAGDAGRALLGDITKLCNFMLSGKVISSFLPHLYGARLCAFNKKDGSIRPIAIGSTFRRLASKLACRHIVSTLKTKFQPTQLGFGSRGGCEAAVHSTRTFLKGNEAEVLLKVDVKNAFNSIDRATLLNEVSSYLPEIYPYVWQCYSSPSKLFFGEKTINSNVGVQQGDPLGPALFSLGIHNYISDLKSKLNIWYLDDGTIGGKVDDVIEDLIKITERFDKVGLKLNFSKCEIFFTNTLSSNDIYSATELFYKIAPNIKILHKNTLCLLGAPIFDECIEPVLNDKIKIFLDNVDRLGFLNSHIAYTILKHCLFVPKLMYILRASPVWKFPGLTNKIDAILKDSLEKILNLSLDEYSWTQATLPIRHGGIGVRKISSVALPAFLSSVHSITGLCSHILKSNTLKITNVTEAIEYWKVKCPNDDIPKEVTKQKLWDSPLVHVTQQSLNQNLTSANNRARLLALSTKESGHWLHAVPSKNLGTLLDNECFRIAIGLRLGTQLCIEHRCPCGKEVDSFGLHGLSCPRNSGRLFRHSSLNDTIKRALATIDVPALIEPHGISRDDGKRPDGLTLVPWERGRALVWDATCVDTLAPSHIRETMLKAGAAAEKAETNKRNKYSSLIQNYIFIPFAVETQPLDLGVTVQKISSKILHPVLLPLLVTGGLVHFSPRESELRFKGEMLLAFLPPFHAVTICIVNIFNFYLYLFKVLM

SEQ ID NO: 17159 - protein, 950 aa, Mellicta athalia
MSNSSKTTNVSQPELFTCPECTNGKLFRGRKGLKIHTTRCHSDLLVHSLPIITDTSSTVTSDNNSVPFEKFILKCHQNIPLVKRVPRGARMSLARSLSAVIKKCISDTDSAWQNLFLFSYKFLHIDKTKNGSLSTKLKQNSLLDIPINIPKNCPRPLYSDSNKIIENKAMDGDLKNAARILFSSDTLAPFDNKTLEALREKHPLPNPASLLPSPPISNNVLQVKDEDTYAAIMSFTSGSASGIDGITPQHLKDLVSVSAGDAGRALLNDITILCNFMLSGKVTSSFLSHIYGARLCAFNKKDGSIRPIAIGTTFRRLASKLACRHIVSTLKSKFQPIQVGFGSKGGCEAAVHAARTFLKSNEAEVLLKVDVKNAFNSLDRATLLNEVSLHLPEIYPYVWQCYSSPSKLLFGENTILSNVGVQQGDPLGPALFSLGIHKCIANLKSKLNIWYLDDGTIGGKVDDVVEDLIKIKTEFDKIGLKLNFSKCEIFFTDLLSLSKINLATELFNKIAPNLKILQRSTLCLLGAPIFDEGIQPILDNKIKIFVENTDKLANLNSHIAYTILKYCLFVPKLMYILRASPIWKFPRLTEKLDATLKNSLEKILNLSFDENSWTQATLPIRDGGIGVRKISSVALPAFLASVHSIKGLCSDILKSNSVEITDATDAIENWKLRCSNGDIPKDVTKQKLWDMPIVHNTHINLTLNLTSDKNRARLLALSNKESGHWLHAMPSKNLGTLLDNESFRIAVGLRLGTPLCFEHRCPCGKEVDSFGLHGLSCNKSSGRFSRHGSLNDTIKRALATIDVPALIEPTGISRDDGKRPDGLTLVPWERGRALLWDATCVDTLAPSHVRETALKAGAAAEKAETTKRHKYSSLIPNYIFVPFAVETLGPWSSSAKKFLNEITPRLIASTGDKRAGAFFAQRIGIAIQRGNAASILGTIPRGHDLYHNYL

SEQ ID NO: 17160 - protein, 860 aa, Mellicta athalia
MSLARSLSAVIKKCISDTDSAWQNLFLFSYKFLHVDKTKNGSLSTKLKQNSLLDIPINIPKNCPRPLYSDSNKIIENKAMDGDLKNAARILFSSDTLAPFDNKTLEALREKHPLPNPASLLPSPPISNNVLQVKDEDTYAAIMSFTSGSASGIDGITPQHLKDLVSVSAGDAGRALLNDITILCNFMLSGKVTSSFLSHIYGARLCAFNKKDGSIRPIAIGTTFRRLASKLACRHIVSTLKSKFQPIQVGFGSKGGCEAAVHAARTFLKSNEAEVLLKVDVKNAFNSLDRATLLNEVSLHLPEIYPYVWQCYSSPSKLLFGENTILSNVGVQQGDPLGPALFSLGIHKCIANLKSKLNIWYLDDGTIGGKVDDVVEDLIKIKTEFDKIGLKLNFSKCEIFFTDLLSLSKINLATELFNKIAPNLKILQRSTLCLLGAPIFDEGIQPILDNKIKIFVENTDKLANLNSHIAYTILKYCLFVPKLMYILRASPIWKFPGLTEKLDATLKNSLEKILNLSFDENSWTQATLPIRDGGIGVRKISSVALPAFLASVHSIKGLCSDILKSNSVEITDATDAIENWKLRCSNGDIPKDVTKQKLWDMPIVHNTHINLTLNLTSDKNRARLLALSNKESGHWLHAMPSKNLGTLLDNESFRIAVGLRLGTPLCFEHRCPCGKEVDSFGLHGLSCNKSSGRFSRHGSLNDTIKRALATIDVPALIEPTGISRDDGKRPDGLTLVPWERGRALLWDATCVDTLAPSHVRETALKAGAAAEKAETTKRHKYSSLIPNYIFVPFAVETLGPWSSSAKKFLNEITPRLIASTGDKRAGAFFAQRIGIAIQRGNAASILGTIPRGHDLYHNYL

SEQ ID NO: 17161 - protein, 950 aa, Mellicta athalia
MSNSFKTTNVSQPELFTCPECTNGRLFRGRKGLKIHTTRCHSDLLVHSLPIITDTSSTVTSDNNSVPFEKFILKCHQNIPLVKRVPRGARMSLARSLSAVIKKCISDTDSAWQNLFLFSYKFLHVDKTKNGSLSTKLKQNSLLDIPINIPKNCPRPLYSDSNKIIENKAMDGDLKNAARILFSSDTLAPFDNKTLEALREKHPLPNPASLLPSPPISNNVLQVKDEDTYAAIMSFTSGSASGIDGITPQHLKDLVSVSAGDAGRALLNDITILCNFMLSGKVTSSFLSHIYGARLCAFNKKDGSIRPIAIGTTFRRLASKLACRHIVSTLKSKFQPIQVGFGSKGGCEAAVHAARTFLKSNEAEVLLKVDVKNAFNSLDRATLLNEVSLHLPEIYPYVWQCYSSPSKLLFGENTILSNVGVQQGDPLGPALFSLGIHKCIANLKSKLNIWYLDDGTIGGKVDDVVEDLIKIKTEFDKIGLKLNFSKCEIFFTDLLSLSKINLATELFNKIAPNLKILQRSTLCLLGAPIFDEGIQPILDNKIKIFVENTDKLANLNSHIAYTILKYCLFVPKLMYILRASPIWKFPGLTEKLDATLKNSLEKILNLSFDENSWTQATLPIRDGGIGVRKISSVALPAFLASVHSIKGLCSDILKSNSVEITDATDAIENWKLRCSNGDIPKDVTKQKLWDMPIVHNTHINLTLNLTSDKNRARLLALSNKESGHWLHAMPSKNLGTLLDNESFRIAVGLRLGTPLCFEHRCPCGKEVDSFGLHGLSCNKSSGRFSRHGSLNDTIKRALATIDVPALIEPTGISRDDGKRPDGLTLVPWERGRALLWDATCVDTLAPSHVRETVLKAGAAAEKAETTKRHKYSSLIPNYIFVPFAVETLGPWSSSAKKFLNEITPRLIASTGDKRAGAFFAQRIGIAIQRGNAASILGTIPRGHDLYHNYL

SEQ ID NO: 17162 - protein, 950 aa, Mellicta athalia
MSNSFKTTNVSQPELFTCPECTNGRLFRGRKGLKIHTTRCHSDLLVHSLPIITDTSSTVTSDNNSVPFEKFILKCHQNIPLVKRVPRGARMSLARSLSAVIKKCISDTDSTWQNLFLFSYKFLHVDKTKNGSLSTKLKQNSLLDIPINIPKNCPRPLYSDSNKIIENKAMDGDLKNAARILFSSDTLAPFDNKTLEALREKHPLPNPASLLPSPPISNNVLQVKDEDTYAAIMSFTSGSASGIDGITPQHLKDLVSVSAGDAGRALLNDITILCNFMLSGKVTSSFLSHIYGARLCAFNKKDGSIRPIAIGTTFRRLASKLACRHIVSTLKSKFQPIQVGFGSKGGCEAAVHAARTFLKSNEAEVLLKVDVKNAFNSLDRATLLNEVSLHLPEIYPYVWQCYSSPSKLLFGENTILSNVGVQQGDPLGPALFSLGIHKCIANLKSKLNIWYLDDGTIGGKVDDVVEDLIKIKTEFDKIGLKLNFSKCEIFFTDLLSLSKINLATELFNKIAPNLKILQRSTLCLLGAPIFDEGIQPILDNKIKIFVENTDKLANLNSHIAYTILKYCLFVPKLMYILRASPIWKFPGLTEKLDATLKNSLEKILNLSFDENSWTQATLPIRDGGIGVRKISSVALPAFLASVHSIKGLCSDILKSNSVEITDATDAIENWKLRCSNGDIPKDVTKQKLWDVPIVHNTHINLTLNLTSDKNRARLLALSNKESGHWLHAMPSKNLGTLLDNESFRIAVGLRLGTPLCFEHRYPCGKEVDSFGLHGLSCNKSSGRFSRHGSLNDTIKRALATIDVPALIEPTGISRDDGKRPDGLTLVPWERGRALLWDATCVDTLAPSHVRETALKAGAAAEKAETTKRHKYSSLIPNYIFVPFAVETLGPWSSSAKKFLNEITPRLIASTGDKRAGAFFAQRIGIAIQRGNAASILGTIPRGHDLYHNYL

SEQ ID NO: 17163 - protein, 938 aa, Mellicta athalia
MSNSFKTTNVSQPELFTCPECTNGRLFRGRKGLKIHTTRCHSDPLVHSLPILTDTSSTVTSDNNSVPFEKFILKCHQNIPLVKRVPRGARMSLARSLSAVIKKCISDTDSAWQNLFLFSYKFLHVDKTKNGSLSTKLKQNSLLALYSDSNKIIENKAMDGDLKNAARILFSSDTLAPFDNKTLEALREKHPLPNPESLLPSQPISNNVLQVKDEDTYAAIMSFTSGSASGIDGITPQHLKDLVSVSAGDAGRALLNDITNLCNFMLTGKVTSSFVSHIYGARLCAFNKKDGSIRPIAIGTTFRRLASKLACRHIVSTLKTKFQPIQVGFGSKGGCEAAVHAARTFLKSNEAEVLLKVDVKNAFNSLDRATLLNEVSSHLPEIYPYVWQCYSSPSKLLFGENTIFSNVGVQQGDPLGPALFSLGIHKCISNLKSKLNIWYLDDGTIGGKVNDVVEDLIKIKNEFDKIGLKLNFSKCEIFSTDLLSLSKINLATELFNKIAPNLKILQRSTLCLICAPIFDEGIQPILDNKIKIFVENTDKLGTLNSHIAYTILKYCLFVPKLMYILRTSPIWKFPGLTEKLDATLKNSLEKILNLSFDENSWTQATLPIRDGGIGVRKICSVALPAFLASVHSIKGLCSDILKSKSVEITDATDAIENWKLRCPNGDIPKDVTKQKLWDMPIVHNTHMNLTLNLTSDKNRARLLALSNKESGHWLHATPSKNLGTLLDNESFRIAVGLRLGTPLCFEHRCPCGKEVDSFGLHGLSCNKSSGRFSRHGSLNDTIKRALATIDVPALIEPTGISRDDGKRPDGLTLVPWERGRALLWDATCVDTLARSHVRETALKAGAAAEKAESTKRHKYSSLIPNYIFVPFAVETLGPWSSSAKKFLIEITPRLIASTGDKRAGAFFAQRIGIAIQRGNAASILGTIPRGHDLYQNYL

SEQ ID NO: 17164 - protein, 950 aa, Mellicta athalia
MSNSFKTTNVSQPELFTCPECTNGRLFRGRKGLKIHTTRCHSDLLVHSLPIITDTSSTVTSDNNSVPFEKFILKCHQNIPLVKRVPRGARMSLARSLSAVIKKCISDTDSAWQNLFLFSYKFLHVDKTKNGSLSTKLKQNSLLDIPINIPKNCPRPLYSDSNKIIENKAMDGDLKNAARILFSSDTLAPFDNKTLEALREKHPLPNPASLLPSPPLSNNVLQVKDEDTYAAIMSFTSGSASGIDGITPQHLKDLVSVSAGDAGRALLNDITILCNFMLSGKVTSSFLSHIYGARLCAFNKKDGSIRPIAIGTTFRRLASKLACRHIVSTLKSKFQPIQVGFGSKGGCEAAVHAARTFLKSNEAEVLLKVDVKNAFNSLDRATLLNEVSLHLPEIYPYVWQCYSSPSKLLFGENTILSNVGVQQGDPLGPALFSLGIHKCISNLKSKLNIWYLDDGTIGGKVDDVVEDLIKIKNEFDKIGLKLNFSKCEIFFTDLLSLSKINLATELFNKIAPNLKILQKSTLCLLGAPIFDEGIQPILDNKIKIFVENTDKLANLNSHIAYTILKYCLFVPKLMYILRASPIWKFPGLTEKLDATLKNSLEKILNLSFDKNSWTQATLPIRDGGIGVRKISSVALPAFLASVHSIKGLCSDILKSNSVEITDATDAIENWKLRCPNGDIPKDVTKQKLWDMPIVHNTHINLTLNLTSDKNRARLLALSNKESGHWLHAMPSKNLGTLLDNESFRVAVGLRLGTPLCFEHRCPCGKEVDSFGLHGLSCNKSSGRFFRHGSLNDTIKRALATIDVPALIEPTGISRDDGKRPDGLTLVPWERGRALLWDATCVDTLAPSHVRETALKAGAAAEKAETTKRHKYSSLIPNYIFVPFAVETLGPWSSSAKKFLNEITPRLIASTGDKRAGAFFAQRIGIAIQRGNAASILGTIPRGHDLYQNNL

SEQ ID NO: 17165 - protein, 950 aa, Mellicta athalia
MSNSSKTTNVSQPELFTCPECTNGKLFRGRKGLKIHTTRCHSDLLVHSLPIITDTSSTVTSDNNSVPFEKFILKCHQNIPLVKRVPRGARMSLARSLSAVIKKCISDTDSAWQNLFLFSYKFLHVDKTKNGSLSTKLTQNSLLDIPINIPKNCPRPLYSDSNKIFENKAMDGDLKNAARILFSSDTLAPFDNKTLEALREKHPLPNPASLLPSPPISNNVLQVKDEDTYAAIMSFTSGSASGIDGITPQHLKDLVSVSAGDAGRALLNDITILCNFMLSGKVTSSFMSHIYGARLCAFNKKDGSIRPIAIGTTFRRLASKLACRHIVSTLKSKFQPIQVGFGSKGGCEAAVHAARTFLKSNEAEVLLKVDVKNAFNSLDRATLLNEVSLHLPEIYPYVWQCYSSPSKLLFGENTILSNVGVQQGDPLGPALFSLGIHKCIANLKSKLNIWYLDDGTIGGKVDDVVEDLIKIKTEFDKIGLKLNFSKCEIFFTDLLSLSKINLATELFNKIAPNLKILQRSTLCLLGAPIFDEGIQPILDTKIKIFVENTDKLANLNSHIAYTILKYCLFVPKLMYILRASPIWKFPGLTEKLDATLKNSLEKILNLSFDENSWTQATLPIRDGGIGVRKISSVALPAFLASVHSIKGLCSDILKSNSVEITDATDAIENWKLRCSNGDIPKDVTKQKLWDMPIVHNTHINLTLNLTSDKNRARLLALSNKESGHWLHAMPSKNLGTLLDNESFRIAVGLRLGTPLCFEHRCPCGKEVDSFGLHGLSCNKSSGRFSRHGSLNDTIKRALATIDVPALIEPTGISRDDGKRPDGLTLVPWERGRALLWDATCVDTLAPSHVRETALKAGASAEKAETTKRHKYSSLIPNYIFVPFAVETLGPWSSSAKKFLNEITPRLIASTGDKRAGAFFAQRIGIAIQRGNAASILGTIPRGHDLYHNYL

SEQ ID NO: 17166 - protein, 950 aa, Mellicta athalia
MSNSFKTTNVSQPELFTCPECTNGRLFRGRKGLKIHTTRCHSDLLVHSLPIITDTSSTVTSDNNSVPFEKFILKCHQNIPLVKRVPRGARMSLARSLSAVIKKCISDTDSAWQNLFLFSYKFLHVDKTKNGSLSTKLKQNSLLDIPINIPKNCPRPLYSDSNKIIENKAMDGDLKNAARILFSSDTLAPFDNKTLEALREKHPLPNPASLLPSPPISNNVLQVKDEDTYAAIMSFTSGSASGIDGITPQHLKDLVSVSAGDAGRALLNDITILCNFMLSGKVTSSFLSHIYGARLCAFNKKDGSIRPIAIGTTFRRLASKLACRHIVSTLKSKFQPIQVGFGSKGGCEAAVHAARTFLKSNEAEVLLKVDVKNAFNSLDRATLLNEVSLHLPEIYPYVWQCYSSPSKLLFGENTILSNVGVQQGDPLGPALFSLGIHKCIANLKSKLNIWYLDDGTIGGKVDDVVEDLIKIKTEFDKIGLKLNFSKCEIFFTDLLSLSKINLATELFNKIAPNLKILQRSTLCLLGAPIFDEGIQPILDNKIKIFVENTDKLANLNSHIAYTILKYCLFVPKLMYILRASPIWKFPGLTEKLDATLKNSLEKILNLSFDENSWTQATLPIRDGGIGVRKISSVALPAFLASVHSIKGLCSDILKSNSVEITDATDAIENWKLRCSNGDIPKDVTKQKLWDMPIVHNTHINLTLNLTSDKNRARLLALSNKESGHWLHAMPSKNLGTLLDNESFRIAVGLRLGTPLCFEHRCPCGKEVDSFGLHGLSCNKSSGRFSRHGSLNDTIKRALATIDVPALIEPTGISRDDGKRPDGLTLVPWERGRALLWDATCVDTLAPSHVKETALKAGAAAEKAETTKRHKYSSLIPNYIFVPFAVETLGPWSSSAKKFLNEITPRLIASTGDKRAGAFFAQRIGIAIQRGNAASILGTIPRGHDLYHNYL

SEQ ID NO: 17167 - protein, 950 aa, Mellicta athalia
MLNSYKTTNVSQPELFTCPECTNGRLFRGRKGLKIHTTRCHSDLLVHSLPIITDTSSTVTSDNNSVPFEKFILKCHQNIPLVKRVPRGARMSIARSLSAVIKKCISDTDSAWQNLFLFSYKFLHVDKTKNGSLSTKLKQNSLLDIPINIPKNCPRPLYSDSNKIIENKAMDGDLKNAARILFSSDTLAPFDNKTLEALREKHPLPNPASLLPSPPISNNVLQVKDEDTYAAIMSFTSGSASGIDGITPQHLKDLVSVSAGDAGRALLNDITILCNFMLSGKVTSSFLSHIYGARLCAFNKKDGSIRPIAIGTTFRRLASKLACRHIVSTLKSKFQPIQVGFGSKGGCEAAVHAARTFLKSNEAEVLLKVDVKNAFNSLDRATLLNEVSLHLPEIYPYVWQCYSSPSKLLFGENTILSNVGVQQGDPLGPALFSLGIHKCIANLKSKLNIWYLDDGTIGGKVDDVVEDLIKIKNEFDKIGLKLNFSKCEIFFTDLLSLSKINLATELFNKIAPNLKILQRSTLCLLGAPIFDEGIQPILDNKIKIFVENTDKLANLNSHIAYTILKYCLFVPKLMYILRASPIWKFPGLTEKLDATLKKSLEKILNLSFDENSWTQATLPIRDGGIGVRKISSVALPAFLASVHSIKGLCSDILKSNSVEITDATDAIENWKLRCPNGDIPKDVTKQKLWDMPIVHNTHINLTLNLTSDKNRARLLALSNKESGHWLHAMPSKNLGTLLDNESFRVAVGLRLGTPLCFEHRCPCGKEVDSFGLHGLSCNKSSGRFSRHGSLNDTIKRALATIDVPALIEPTGISRDDGKRPDGLTLVPWERGRALLWDATCVDTLAPSHVRETALKAGAAAEKAETTKRHKYSSLIPNYIFVPFAVETLGPWSSSAKKFLNEITPRLIASTGDKRAGAFFAQRIGIAIQRGNAASILGTIPRGHDLYQNYL

SEQ ID NO: 17168 - protein, 950 aa, Mellicta athalia
MSNSFKTTNVSQPELFTCPECTNGRLFRGRKGLKIHTTRCHSDLLVHSLPIITDTSSTVTSDNNSVPFEKFILKCHQNIPLVKRVPRGARMSLARSLSAVIKKCISDTDSAWQNLFLFSYKFLHVDKTKNGSLSTKLKQNSLLDIPINIPKNCPRPLYSDSNKIIENKAMDGDLKNAARILFSSDTLAPFDNKTLEALREKHPLPNPASLLPSPPISNNVLQVKDEDTYAAIMSFTSGSASGIDGITPQHLKDLVSVSAGDAGRALLNDITILCNFMLSGKVTSSFLSHIYGARLCAFNKKDGSIRPIAIGTTFRRLASKLACRHIVSTLKSKFQPIQVGFGSKGGCEAAVHAARTFLKSNEAEVLLKVDVKNAFNSLDRATLLNEVSLHLPEIYPYVWQCYSSPSKLLFGENTILSNVGVQQGDPLGPALFSLGIHKCIANLKSKLNIWYLDDGTIGGKVDDVVEDLIKIKTEFDKIGLKLNFSKCEIFFTDLLSLSKINLATELFNKIAPNLKILQRSTLCLLGAPIFDEGIQPILDNKIKIFVENTDKLANLNSHIAYTILKYCLFVPKLMYILRASPIWKFPGLTEKLDATLKNSLEKILNLSFDENSWTQATLPIRDGGIGVRKISSVALPAFLASVHSIKGLCSDILKSNSVEITDATDAIENWKLRCSNGDIPKDVTKQKLWDMPIVHNTHINLTLNLTSDKNRARLLALSNKESGHWLHAMPSKNLGTLLDNESFRIAVGLRLGTPLCFEHRCPCGKEVDSFGLHGLSCNKSSGRFSRHGSLNDTIKRALATIDVPALIEPTGISRDDGKRPDGLTLVPWERGRALLWDATCVDTLAPSHVRETALKAGAAAEKAETTKRHKYSSLIPNYIFVPFAVETLGPWSSSAKKFLNEITPRLIASTGDKRAGAFFAQRIGIAIQRGNAASILGTIPRGHDLYHNYL

SEQ ID NO: 17169 - protein, 944 aa, Melitaea cinxia
MINLHANTYTLMLIQNTHINAYIHTHINTYIHNTQPYCKLTLFIQNIIHIYNSQLKKNNSVPFEKIILKCQQNIPLVKRVPRGARMSLARSLSSVIKKCISDTDSAWQNLFLFSYKFLHVDKTKNGSLSTKLKQNSLLDIPIIIPKNPRPLYSDSSKIIENKAMDGDLKNAARILFSSDTLAPFDNKTLEVLREKHPLPNPASLLPSPPIFNNVLQVKDEDTYAAIMSFTSGSASGIDGITPQHLKDLVSVSAGDAGRALLNDITNLCNFMLSGKVSSSFLSHIYGARLCAFNKKDGSIRPIAIGTTFRRLASKLACRHIVSSLKIKFQPIQLGFGSKGGCEAAVHAARTFLKSNEAEVLLKVDVKNAFNSLDRATLLNEISLHLPEIYPYVWQCYSSPSKLLFGENTIFSNVGVQQGDPLGPALFSLGIHKCISNLKSKLNIWYLDDGTIGGKVDDVVEDLIKIKNEFDKIGLKLNFSKCEIFFTDILSLSKINLATELFNKIAPNLKILQRSTLCLLGAPLFDEGIQPILDNKIKIFVENTDKLGTLNSHIAYTILKYCLFVPKLMYILRASPIWKFPGMTEKLDATLKNSLEKIENLSFDENSWTQATLPIRDGGIGVRKISSVALPAFLASVHSIKGLCSDILKSSSVQITDATDAIENWKLMCPNGNIPKDVTKQKLWDIPIVHNTHISLTQNLTSDKNRARLLAVSNKESGHWLLAMPSKNLGTLLDNESFRIALGLRLGAPLCFEHRCPCGKEVDSFGLHGLSCNKSSGRFSRHGSLNDTIKRALATIDVPALIEPTGISRNDGKRPDGLTLVPWERGRALLWDATCVDTLAPSHVRETALKAGAAAEKAETTKRHKYSSLIPNYIFVPFAVETLGPWSSSAKKFLNEITPRLIASTGDKRAGAFFAQRIGIAIQRGNAASILGTIPRGHDLYQNYL

SEQ ID NO: 17170 - protein, 860 aa, Mellicta athalia
MSLARSLSAVIKKCISDTDSAWQNLFLFSYKYLHIDKTKNGSLSTKLKQNSFLDIPINIPKNCPRPLYSDSNKIIENKAMDGDLKNAARILFSSDTLAPFDNKTLEALREKHPLPNPASLLPSPPISNNVLQVKDEDTYAAIMSFTSGSASGIDGITPQHLKDLVSVSAGDAGRALLNDITILCNFMLSGKVTSSFLSHIYGARLCAFNKKDGSIRPIAIGTTFRRLASKLACRHIVSTLKSKFQPIQVGFGSKGGCEAAVHAARTFLKSNEAEVLLKVDVKNAFNSLDRATLLNEVSLHLPEIYPYVWQCYSSPSKLLFGENTILSNVGVQQGDPLGPALFSLGIHKCIANLKSKLNIWYLDDGTIGGKVDDVVEDLIKIKNEFDKIGLKLNFSKCEIFFTDLLSLSKIKLATELFNKIAPNLKILQRSTLCLLGAPIFDEGIQPILDNKIKIFVENTDKLANLNSHIAYTILKYCLFVPKLMYILRASPIWKFPGLTEKLDATLKNSLEKILNLSFDENSWTQATLPIRDGGIGVRKISSVALPAFLASVHSIKGLCSDILKSNSVEITDATDAIENWKLRCPNGDIPKDVTKQKLWDMPIVHNNHINLTLNLTSDKNRARLLALSNKESGHWLHAMPSKNLGTLLDNESFRVAVGLRLGTPLCFEHRCPCGKEVDSFGLHGLSCNKSSGRFSRHGSLNDTIKRALATIDVPALIEPTGISRDDGKRPDGLTLVPWERGRALLWDATCVDTLAPSHVRETALKAGAAAEKAETTKRHKYSSLIPNYIFVPFAVETLGPWSSSAKKFLNEITPRLIASTGDKRAGAFFAQRIGIAIQRGNAASILGTIPRGHNLYQNYL

SEQ ID NO: 17171 - protein, 949 aa, Melitaea cinxia
MSNSFKTTNVSQPELFTCPECTNGKLFRGRKGLKIHTTRCHSDPLVHSLPILTDTSSTVTSDNNSVPFEKFILKCHQNIPLVKRVPRGARMSLARSLSSVIKKCISDTDSAWQNLFLFSYKFLHVDKTKNGSLSTKLKQNSLLDIPIIIPKNPRPLYSDSSKIIENKAMDGDLKNAARILFSSDTLAPFDNKTLEALREKHPLPNPASLLPSPPIFNNVLQVKDEDTYAAIMSFTSGSASGIDGITPQHLKDLVSVSAGDAGRALLNDITNLCNFMLSGKVSSSFLSHIYGARLCAFNKKDGSIRPIAIGTTFRRLASKLACRHIVFSLKTKFQPIQLGFGSKGGCEAAVHAARTFLKSNEAEVLLKVDVKNAFNSLDRATLLNEVSLHLPEIYPYVWQCYSSPSKLLFGENTIFSNVGVQQGDPLGPALFSLGIHKCISNLKSKLNIWYLDDGTIGGKVDDVVEDLIKIKNEFDKIGLKLNFSKCEIFFTDILSLSKINLATELFNKIAPNLKILQRSTLCLLGAPLFDEGIQPILDNKIKIFVVNTDKLGTLNSHIAYTILKYCLFVPKLMYILRASPIWKFPGMTEKLDATLKNSLEKILNLSFDENSWTQATLPIRDGGIGVRKISSVALPAFLASVHSIKGLCSDILKSNSVQITDATDAIKNWKLMCPNGDIPKDVTKQKLWDIPIVHNTHISLTQNLTSDKNRARLLAVSNKKSGHWLHAMPSKNLGTLLDNESFRIALGLRLGAPLCFEHRCPCGKEVDSFGLHGLSCNKSSGRFSRHGSLNDTIKRALATIDVPALIEPTGISRNDGKRPDGLTLVPWERGRALLWDATCVDTLAPSHVRETALKAGAAAEKAETTKRHKYSSLIPNYIFVPFAVETLGPWSSSAKNILNEITPRLIASTGDKRAGTFFAQRIGIAIQRGNAASILGTIPRGHDLYQNYL

SEQ ID NO: 17172 - protein, 950 aa, Mellicta athalia
MSNSSKTTNVSQPELFTCPECTNGRLFRGRKGLKIHTTRCHSDLLVHSLPIITDTSSTVTSDNNSVPFEKFILKCHQNIPLVKRVPRGARMSLARSLSAVIKKCISDTDSAWQNLFLFSYKFLHVDKTKNGSLSTKLKQNSLLDIPINIPKNCPRPLYSDSNKIIENKAMDGDLKNAARILFSSDTLAPFDNKTLEALREKHPLPNPASLLPSPPISNNVLQVKDEDTYAAIMSFTSGSASGIDGITPQHLKDLVSVSAGDAGRALLNDITILCNFMLSGKVTSSFLSHIYGARLCAFNKKDGSIRPIAIGTTFRRLASKLACRHIVSTLKSKFQPIQVGFGSKGGCEAAVHAARTFLKSNEAEVLLKVDVKNAFNSLDRATLLNEVSLHLPEIYPYVWQCYSSPSKLLFGENTILSNVGVQQGDPLGPALFSLGIHKCIANLKSKLNIWYLDDGTIGGKVDDVVEDLIKIKTEFDKIGLKLNFSKCEIFFTDLLSLSKINLATELFNKIAPNLKILQRSTLCLLGAPIFDEGIQPILDNKIKIFVENTDKLANLNSHIAYTILKYCLFVPKLMYILRASPIWKFPGLTEKLDATLKNSLEKILNLSFDENSWTQATLPIRDGGIGVRKISSVALPAFLASVHSIKGLCSDILKSNSVEITDATDAIENWKLRCSNGDIPKDVTKQKLWDMPIVHNTHINLTLNLTSDKNRARLLALSNKESGHWLHAMPSKNLGTLLDNESFRIAVGLRLGTPLCFEHRCPCGKEVDSFGLHGLSCNKSSGRFSRHGSLNDTIKRALATIDVPALIEPTGISRDDGKRPDGLTLVPWERGRALLWDATCVDTLAPSHVRETALKAGAAAEKAETTKRHKYSSLIPNYIFVPFAVETLGPWSSSAKKFLNEITPRLIASTGDKRAGAFFAQRIGIAIQRGNAASILGTIPRGHDLYHNYL

SEQ ID NO: 17173 - protein, 950 aa, Vanessa cardui
MLYSNNDRTIINSQPDLLTCPQCTNGRLFRSQKGLKIYTTRCHSLPLEKSNDTFSILPTNSNSDTDSINFENLLTKCHKNIPLVKRIPRGARISLARSLFIVLKNCLSNSNSAWQNLFTFSFKFFHVDKTKNGSLSTKLKQNSLLDKQISIPKYSSRPQKFNLKKNVENKAMDGDFKNAARILFSSDTIAPFNDITLESLQEKHPLPYPTTVLPPPPTQNNFLQVKDEDTYAAIMSFSSGSASGIDGITPQHLKDLVSASAGDAGRALLSDITNLCNFMLSGKVISSFLPHLYGARLCAFNKKDGSIRPIAIGTTFRRLASKLACRHIVSTLKTKFQPIQLGFGSRGGCEAAVHSTRTFLKGNEAEVLLKVDVKNAFNSLDRGTLLNEVFSNLPEIYPYVWQCYSSPSKLFFGEDTIHSNVGVQQGDPLGPALFSLGIHSCISNLKSKLNVWYLDDGTIGGKVDDVIEDLIKIKEQFDKIGLKLNFSKCEIFFTDNLTHKNISLAIDKFNKIAPNIKILHKDTLCLLGAPLFDEGIEPSLNEKIKIFSDNFDRLGILNSHIAYTILKHCLFVPKLMYILRASPIWKYPSLTNQIDATLKKALEKILNLSLDEYSWTQATLPIPFGGIGVRKISSVALPAFLSSVHSISDLCSEILKSKSVKIMNVTEAIETWKVKCPNDDIPKEVTKQKLWDSSLVHATLHSLTQNLTSAQDRARLLALSSKESSHWLNSLPSKNLGTLLDNECFRISIGLRLGTPLCSEHRCPCGKEVDSFGLHGLSCPRSSGRLFRHGSLNDIIKRALATIDVPALTEPRGISRDDGKRPDGLTLVPWERGRALVWDATCVDTLAPSHIRETMLRAGAAAEKAEAKKITKYSCIMSNYFFVPFAVETLGPWSSGAKSFIKSITPRLIASTGDRRAGSFFAQRIGIAIQRGNAASILATIPRGQDLYSN

SEQ ID NO: 17174 - protein, 950 aa, Mellicta athalia
MSNSFKTTNVSQPELFTCPECTNGRLFRGRKGLKIHTTRCHSDLLVHSLPIITDTSSTVTSDNNSVPFEKFILKCHQNIPLVKRVPRGARMSLARSLSAVIKKCISDTDSAWQNLFLFSYKFLHVDKTKNGSLSTKLKQNSLLDIPINIPKNCPRPLYSDSNKIIENKAMDGDLKNAARILFSSDTLAPFDNKTLEALREKHPLPNPASLLPSPPISNNVLQVKDEDTYAAIMSFTSGSASGIDGITPQHLKDLVSVSAGDAGRALLNDITILCNFMLSGKVTSSFLSHIYGARLCAFNKKDGSIRPIAIGTTFRRLASKLACRHIVSTLKSKFQPIQVGFGSKGGCEAAVHAARTFLKSNEAEVLLKVDVKNAFNSLDRATLLNEVSLHLPEIYPYVWQCYSSPSKLLFGENTILSNVGVQQGDPLGPALFSLGIHKCIANLKSKLNIWYLDDGTIGGKVDDVVEDLIKIKTEFDKIGLKLNFSKCEIFFTDLLSLSKINLATELFNKIAPNLKILQRSTLCLLGAPIFDEGIQPILDNKIKIFVENTDKLANLNSHIAYTFLKYCLFVPKLMYILRASPIWKFPGLTEKLDATLKNSLEKILNLSFDENSWTQATLPIRDGGIGVRKISSVALPAFLASVHSIKGLCSDILKSNSVEITDATDAIENWKLRCSNGDIPKDVTKQKLWDMPIVHNTHINLTLNLTSDKNRARLLALSNKESGHWLHAMPSKNLGTLLDNESFRIAVGLRLGTPLCFEHRCPCGKEVDSFGLHGLSCNKSSGRFSRHGSLNDTIKRALATIDVPALIEPTGISRDDGKRPDGLTLVPWERGRALLWDATCVDTLAPSHVRETALKAGAAAEKAETTKRHKYSSLIPNYIFVPFAVETLGPWSSSAKKFLNEITPRLIASTGDKRAGAFFAHRIGIAIQRGNAASILGTIPRGHDLYHNYL

SEQ ID NO: 17175 - protein, 951 aa, Nymphalis c-album
MLGSNNLSNSVPSQPDLLSCPQCFNGRIFKSQKGLKIHTTRCHSLPLGHSSDFIFNRPTNINSDSSQLQFEQILAKYNQNIPLIKRIPRGARISLARSLSSVIQKCFSNSDSAWQNLFTFSYKFFHVDKAKNGSLSTKLKQNSLDTEISFPKFASRPLNFNLKKNVENKAMDGDLKNAARILFSSDTLAPFNDKTLESLHEKHPLPNPTSVLPNPPSQNTFLQVKDEDTYASIMSFSSGSAGGIDGITPQHLKDLVSASAGDAGRALLSDITKLCNFMLSGKVISSFLPHLYGARLCAFNKKDGSIRPIAIGSTFRRLASKLACRHIVSTLKPKFQPIQLGFGSRGGCEAAVHSTRTFLKGNEAEVLLKVYVKNAFNSLDRATLLNEVSSYLPEIYPYVWQCYISSSKLFFGENTINSNVGVQQGDPLGPALFSLGIHSCISNLKSKLNIWYLDDGTIGGKVDDVIEDLIIIKERFDKVGLKLNFSKCEIYFTDTLSLKDINSATELFFKIAPNIKILHKNTLCLLGAPLFDEGIEPVLNDKIKLFLDNVNRLGILNSHIAYTILKHCLFVPKLMYILRASPVWKFPGLTNKIDAILKDSLEKILNLSLDEYSWTQATLPIKHGGIGVRKISSVALPAFLSSVHSISDLCSHILKSNTQKITNVTEAIENWKVKCPNDDIPKEVTKQKLWDSPLVHVTQQSLNQNLTSAENRARLLALSTKESGHWLHAVPSKNLGTLLDNECFRVSIGLRLGTQLCIEHRCPCGKEVDSFGLHGLSCPKSSGRLFRHGSLNDIIKRALATIDVPALIEPHGISRDDGKRPDGLTSVPWERGRALVWDATCVDTLGPSHIRETMLKVGAAAEKAETNKRNKYSSLIPNYIFVPFAVETLGPWSNSAKKFIQNITPRLIASTGDRRAGSFFAQRIGIAIQRGNAASILATIPRGHDLYNNYF

SEQ ID NO: 17176 - protein, 950 aa, Vanessa cardui
MLYSNNDRTIINSQPDLLTCPQCTNGRLFRSQKGLKIHTTRCHSLPLEKSNDTFSILPTNSNSDTDSINFENLLTKCHKNIPLVKRIPRGARISLARSLSIVLQNCLSNSNSAWQNLFTFSFKFFHVDKTKNGSLSTKLKQNSLLDKQISIPKYSSRPQKFDLKKNVENKAMDGDFKNAARILFSNDTIAPFNDITLESLQEKHPLPYPTTVLPPPPTQNNFLQVKDEDTYAAIMSFSSGSASGIDGITPQHLKDLVSASAGDAGRALLSDITNLCNFMLSGKVISSFLKHFYGARLCAFNKKDGSIRPIAIGTTFRRLASKLACRHIVSTLKTKFQPIQLGFGSRGGCEAAVHSTRTFLKGNEAEVLLKVDVKNAFNSLDRGTLLNEVFSNLPEIYPYVWQCYSSPSKLFFGEDTIHSNVGVQQGDPLGPALFSLGIHSCISNLKSKLNVWYLDDGTIGGKVDDVIEDLIKIKEQFDKIGLKLNFSKCEFFFTDNLTHKNISLAIDKFNKIAPNIKILHKDTLCLLGAPLFDEGIEPSLNEKIKIFSDNFDRLGILNSHIAYTILKHCLFVPKLMYILRTSPIWKYPSLTNQIDATLKKALEKILNLSLDEYSWTQATLPIPFGGIGVRKISSVALPAFLSSVHSILDLCSEILKSKSVKIMDVTEAIETWKVKCPNDDIPKEVTKQKLWDSSLVHATLHSLTQNLTSAQDRARLLALSSKESSHWLNSLPSKNLGTLLDNECFRISIGLRLGTPLCSEHRCPCGKEVDSFGLHGLSCPRSSGRLFRHGSLNDIIKRALATIDVPALTEPRGISRDDGKRPDGLTLVPWERGRALVWDATCVDTLAPSHIRETMLRAGAAAEKAEAKKITKYSCIISNYFFVPFAVETLGPWSSGAKSFIKSITPRLIASTGDKRAGSFFAQRIGIAIQRGNAASILATIPRGQDLYSN

SEQ ID NO: 17177 - protein, 952 aa, Nymphalis c-album
MLGSNNFSNSVPSQPDLLSCPQCFNGRIFKSQKGLKIHTTRCHSLPLGHSSDFIFNRPNNINSDTSSQLQFEQILAKYNQNIPLIKRIPRGARISLARSLSSVIQKCFSNSDSAWQNLFTFSYKFFHVDKAKNGSLSTKLKQNSLDTEISFPKFASRPLNFNLKKNVENKAMDGDLKNAARILFSSDTLAPFNDKTLESLHEKHPLPNPTSVLPNPPSQNTFLQVKDEDTYASIMSFSSGSAGGIDGITPQHLKDLVSASAGDAGRALLSDITKLCNFMLSGKVISSFLPHLYGARLCAFNKKDGSIRPIAIGSTFRRLASKLACRHIVSTLKPKFQPIQLGFGSRGGCEAAVHSTRTFLKGNEAEVLLKVDVKNAFNSLDRATLLNEVSSYLPEIYPYVWQCYSSSSKLFFGENTINSNVGVQQGDPLGPALFSLGIHSCISNLKSKLNIWYLDDGTIGGKVDDVIEDLIIIKERFDKVGLKLNFSKCEIYFTDTLSLKDIYSATELFFKIAPNIKILHKNTLCLLGAPLFDEGIEPALNDKIKLFLDNVNRLGILNSHIAYTILKHCLFVPKLMYILRASPVWKFPGLTNKIDAILEDSLEKILNLSLDEYSWTQATLPIKHGGIGVRKISSVALPAFLSSVHSISDLCSHILKSNTQKITNVTEAIENWKVKCPNDDIPKKVTKQKLWDSPLVYVTQQSLNQNLTSAKNRARLLALSTKESGHWLHAVPSKNLGTLLDNECFRVSIGLRLGTQLCIEHRCPCGKEVDSFGLHGLSCPKSSGRLFRHGSLNDIIKKALATIDVPALIEPHGISRDDGKRPDGLTLVPWERGRALVWDATCVDTLAPSHIRETMLKVGAAAEKAETNKRNKYSSLIPNYIFVPFAVETLGPWSNSTKKFIQNITPRLIASTGDRRAGSFFAQRIGIAIQRGNAASILATIPRGHDLYNNYF

SEQ ID NO: 17178 - protein, 949 aa, Melitaea cinxia
MSNSFKTTNVSQPELFTCPECTNGKLFRGRKGLKIHTTRCHSDPLVHSLPILTDTSSTVTSDNNSVPFEKFILKCHQNIPLVKRVPRGARMSLARSLSSVIKKCISDTDSAWQNLFLFSYKFLHVDKTKNGSLSTKLKQNSLLDIPIIIPKNPRPLYSDSSKIIENKAMDGDLKNAARILFSSDTLAPFDNKTLEALREKHPLPNPASLLPSPPIFNNVLQVKDEDTYAAIMSFTSGSASGIDGITPQHLKDLVSVSAGDAGRALLNDITNLCNFMLSGKVSSSFLSHIYGARLCAFNKKDGSIRPIAIGTTFRRLASKLACRHIVSSLKTKFQPIQLGFGSKGGCEAAVHAVRTFLKSNEAEVLLKVDVKNAFNSLDRATLLNEVSLHLPEIYPYVWQCYSSPSKLLFGENTIFSNVGVQQGDPLGPALFSLGIHKCISNLKSKLNIWYLDDGTIGGKMDDVVEDLIKIKNEFDKIGLKLNFSKCEIFFTDILSLSKINLATELFNKIAPNLKILQRSTLCLLGAPLFDEGIQPILDNKIKIFVENTDKLGTLNSHIAYTILKYCLFVPKLMYILRASPIWKFPGMTEKLDATLKNSLEKILNLSFDENSWTQATLPIRDGGIGVRKISSVALPAFLASVHSIKGLCSDILKSNSVQITDATDAIENWKLMCPNGDIPKDVTKQKLWDIPIVHNTHISLTQNLTSDKNRARLLAVSNKESGHWLHAMPSKNLGTLLDNESFRIALGLRLGAPLCFEHRCPCGKEVDSFGLHGLSCNKSSGRFSRHGSLNDTIKRALATIDVPALIEPTGISRNDGKRPDGLTLVPWERGRALLWDATCVDTLAPSHVRETALKAGAAAEKAETTKRHKYSSLIPNYIFVAFAVETLGPWSSSAKKFLNEITPRLIASTGDKRAGAFFAQRIGIAIQRGNAASILGTIPRGHDLYQNYL

SEQ ID NO: 17179 - protein, 950 aa, Mellicta athalia
MSNSFKTTNVSQPELFTCPECTNGRLFRGRKGLKIHTTRCHSDPLVHSLPILTDTSSTVTSDNNSVPFEKFILKCHQNIPLVKRVPRGARMSLARSLSAVIKKCISDTDSAWQNLFLFSYKFLHVDKTKNGSLSTKLKQNSLLDIPIIIPKNCPRPLYSDSNKIIENKAMDGDLKNAARILFSSDTLAPFDNKTLEALREKHPLPNPESLLPSQPISNNVLQVKDEDTYAAIMSFTSGSASGIDGITPQHLKDLVSVSAGDAGRALLNDITNLCNFMLTGKVTSSFVSHIYGARLCAFNKKDGSIRPIAIGTTFRRLASKLACRYIVSTLKTKFQPIQVGFGSKGGCEAAVHAARTFLKSNEAEVLLKVDVKNAFNSLDRATLLNEVSSHLPEIYPYVWQCYSSPSKLLFSENTIFSNVGVQQGDPLGPALFSLGIHKCISNLKSKLNIWYLDDGTIGGKVDDVVEDLIKIKNEFDKIGLKLNFSKCEIFFTDLLSLSKINLATESFNKIAPNLKILQRSTLCLLGAPIFDEGIQPILDNKIKIFVENTDKLGTLNSHIAYTILKYCLFVPKLMYILRASPIWKFPGLTEKLDATLKNSLEKILNLSFDENSWTQATLPIRDGGIGVRKISSVALPAFLASVHSIKGLCSDILKSNSVDITDATDAIENWKLRCPNGDIPKDVTKQKLWDMPIVHNIHINLTLNLTSDKNRARLLALSNKESGHWLHAMPSKNLGTLLDNESFRIAVGLRLGTPLCFEHRCPCGKEVDSFGLHGLSCNKSSGRFSRHSSLNDTIKRALATIDVPALIEPTGISRDDGKRPDGLTLVPWERGRALLWDATCVDTLAPSHVRETALKAGAAAEKAESTKRHKYSSLIPNYIFVPFAVETLGPWSSSAKKFLIEITPRLIASTGDKRAGAFFAQRIGIAIQRGNAASILGTIPRGHDLYQNYL

SEQ ID NO: 17180 - protein, 950 aa, Mellicta athalia
MSNSFKTTNVSQPELFTCPECTNGRLFRGRKGLKIHTTRCHSDLLVHSLPIITDTSSTVTSDNNSVPFEKFILKCHQNIPLVKRVPRGARMSLARSLSAVIKKCISDTDSAWQNLFLFSYKFLHVDKTKNGSLSTKLKQNSLLDIPINIPKNCPRPLYSDSNKIIENKAMDGDLKNAARILFSSDTLAPFDNKTLEALREKHPLPNPASLLPSPPISNNVLQVKDEDTYAAIMSFTSGSASGIDGITPQHLKDLVSVSAGDAGRALLNDITILCNFMLSGKVTSSFLSHIYGARLCAFNKKDGSIRPIAIGTTFRRLASKLACRHIVSTLKSKFQPIQVGFGSKGGCEAAVHAARTFLKSNEAEVLLKVDVKNAFNSLDRATLLNEVSLHLPEIYPYVWQCYSSPSKLLFGENTILSNVGVQQGDPLGPALFSLGIHKCIANLKSKLNIWYLDDGTIGGKVDDVVEDLIKIKTEFDKIGLKLNFSKCEIFFTDLLSLSKINLATELFNKIAPNLKILQRSTLCLLGAPIFDEGIQPILDNKIKIFVENTDKLANLNSHIAYTILKYCLFVPKLMYILRASPIWKFPGLTEKLDATLKNSLEKILNLSFDENSWTQTTLPIRDGGIGVRKISSVALSAFLASVHSIKGLCSDILKSNSVEITDATDAIENWKLRCSNGDIPKDVTKQKLWDMPIVHNTHINLTLNLTSDKNRARLLALSNKESGHWLHAMPSKNLGTLLDNESFRIAVGLRLGTPLCFEHRCPCGKEVDSFGLHGLSCNKSSGRFSRHGSLNDTIKRALATIDVPALIEPTGISRDDGKRPDGLTLVPWERGRALLWDATCVDTLAPSHVRETALKAGAAAEKAETTKRHKYSSLIPNYIFVPFAVETLGPWSSSAKKFLNEITPRLIASTGDKRAGAFFAQRIGIAIQRGNAASILGTIPRGHDLYHNYL

SEQ ID NO: 17181 - protein, 950 aa, Mellicta athalia
MSNSFKTTNVSQPELFTCPECTNGRLFRGRKGLKIHTTRCHSDLLVHSLPIITDTSSTVTSDNNSVPFEKFILKCHQNIPLVKRVPRGARMSLARSLSAVIKKCISDTDSAWQNLFLFSYKFLHVDKTKNGSLSTKLKKNSLLDIPINIPKNCPRPLYSDSNKIIENKAMDGDLKNAARILFSSDTLAPFDNKTLEALREKHPLPNPASLLPSPPLSNNVLQVKDEDTYAAIMSFTSGSASGIDGITPQHLKDLVSVSAGDAGRALLNDITILCNFMLSGKVTSSFLSHIYGARLCAFNKKDGSIRPIAIGTTFRRLASKLACRHIVSTLKSKFQPIQVGFGSKGGCEAAVHAARTFLKSNEAEVLLKVDVKNAFNSLDRATLLNEVSLHLPEIYPYVWQCYSSPSKLLFGENTILSNVGVQQGDPLGPALFSLGIHKCISNLKSKLNIWYLDDGTIGGKVDDVVEDLIKIKNEFDKIGLKLNFSKCEIFFTDLLSLSKINLATELFNKIAPNLKILQKSTLCLLGAPIFDEGIQPILDNKIKIFVENTDKLANLNSHIAYTILKYCLFVPKLMYILRASPIWKFPGLTEKLDATLKNSLEKILNLSFDKNSWTQATLPIRDGGIGVRKISSVALPAFLASVHSIKGLCSDILKSNSVEITDATDAIENWKLRCPNGDIPKDVTKQKLWDMPIVHNTHINLTLNLTSDKNRARLLALSNKESGHWLHAMPSKNLGTLLDNESFRVAVGLRLGTPLCFEHRCPCGKEVDSFGLHGLSCNKSSGRFFRHGSLNDTIKRALATINVPALIEPTGISRDDGKRPDGLTLVPWERGRALLWDATCVDTLAPSHVRETALKAGAAAEKAETTKRHKYSSLIPNYIFVPFAVETLGPWSSSAKKFLNEITPRLIAFTGDKRAGAFFAQRIGIAIQRGNAASILGTIPRGHDLYQNNL

SEQ ID NO: 17182 - protein, 952 aa, Nymphalis c-album
MLGSNNFSNSVPSQPDLLSCPQCFNGRIFKSQKGLKIHTTRCHSLPLGHSSDFIFNRPTNINSDTSSQLQFEKILAKYNQNIPLIKRIPRGARISLARSLSSVIQKCFSNSDSAWQNLFTFSYKFFHVDKAKNGSLSTKLKQNSLDTEISFPKFASRPLNFNLKKNVENKAMDGDLKNAARILFSSDTLAPFNDKTLESLHEKHPLPNPTSVLPNPPSQNTFLQVKDEETYASIMSFSSGSAGGIDGITPQHLKDLVSASAGDAGRALLSDITKLCNFMLSGKVISSFLPHLYGARLCAFNKKDGSIRPIAIGSTFRRLASKLACRHIVSTLKPKFQPIQLGFGSRGGCEAAVHSTRTFLKGNEAEVLLKVDVKNAFNSLDRATLLNEVSSYLPEIYPYVWQCYSSSSKLFFGENTINSNVGVQQGDPLGPALFSLGIHSCISNLKSKLNIWYLDDGTIGGKVDDVIEDLIIIKERFDKVGLKLNFSKCEIYFTNSLSLKDIYSATELFFKIAPNIKILHKNTLCLLGAPLFDEGIEPVLNDKIKLFLDNVNRLGILNSHIAYTILKHCLFVPKLMYILRASPVWKFPGLTNKIDAILKDSLEKILNLSLDEYSWTQATLPIKHGGIGVRKISSVALPAFLSSVHSISDLCSHILKSNTQKITNVTEAIENWKVKCPNDDIPKEVTKQKLWDSPLVHVTQQSLNQNLTSAKNRARLLALSTKESGHWLHAVPSKNLGTLLDNECFRVSIGLRLGTQLCIEHRCPCGKEVDSFGLHGLSCPKSSGRLFRHGSLNDIIKRALATIDVPALIEPHGISRDDGKRPDGLTLVPWERGRALVWDATCVDTLAPSHIRETMLKVGAAAEKAETNKRNKYSSLIPNYIFVPFAVETLGPWSNSAKKFIQNITPRLIASTGDRRAGSFFAQRIGIAIQRGNAASILATIPRGHDLYNNYF

SEQ ID NO: 17183 - protein, 950 aa, Mellicta athalia
MSNSFKTTNVSQPELFTCPECTNGRLFRGRKGLKIHTTRCHSDPLVHSLPIITDTSSTVTSDNNSVPFEKFILKCHQNIPLVKRVPRGARVSLARSLSAVIKKCISDTDSAWQNLFLFSYKFLHVDKTKNGSLSTKLKQNSLLDLPIIIPKNCPRPLYSDSNKIIENKAMDGDLKNAARILFSSDTLAPFDNKTLEALREKHPLPNPESLLPSQPIFNNVLQVKDEDTYAAIMSFTSGSASGIDGITPQHLKDLVSVSAGDAGRALLNDITNLCNFMFSGKVTSSFVSHIYGARLCAFNKKDGSIRPIAIGTTFRRLASKLACRHIVSTLKTKFQPIQVGFGSKGGCEAAVHAARTFLKSNEAEVLLKVDVKNAFNSLDRATLLNEVSSHLPEIYPYVWQCYSSPSKLLFGENTIFSNVGVQQGDPLGPALFSLGIHKCISNLKSKLNIWYLDDGTIGGKVDDVVEDLIKIKNEFDKIGLKLNFSKCEIFFTDLLSLSKINLATELFNKIAPNLKILQRSTLCLLGAPIFDEGIQPILDNKIKIFVENTDKLGTLNSHIAYTILKYCLFVPKLMYILRTSPIWKFPGLTEKIDATLKNSLEKILNLSFDENSWTQATLPIRDGGIGVRKISSVALPAFLASVHSIKGLCSDILKSNSVEITGATDAIENWKLRCPNGDIPKDVTKQKLWDMPIVHNTHINLTLNLTSDKNRARLLALSNKESGHWLHAMPSKNLGTLLDNESFRIAVGLRLGTPLCFEHRCPCGKEVDSFGLHGLSCNKSSGRFSRHGSLNNTIKRALATIDVPALIEPTGISRDDSKRPDGLTLVPWERGRALLWDATCVDTLAPSHVRETALKAGAAAEKAESTKRHKYSSLIPNYIFVPFAVETLGPWSSSAKKFLNEIAPRLIASTGDKRAGAFFAQRIGIAIQRGNAASILGTIPRGHDLYQNYL

SEQ ID NO: 17184 - protein, 950 aa, Mellicta athalia
MSNSFKTTNVSQPELFTCPECTNGKLFRGRKGLKIHTTRCHSDLLVHSLPIITDTSSTVTSDNNSVPFEKFILKCHQNIPLVKRVPRGARMSLARSLSAVIKKCISDTDSAWQNLFLFSYKFLHVDKTKNGSLSTKLKQNSLLDIPINIPKNCPRPLYSDSNKIIENKAMDGDLKNAARVLFSSDTLAPFDNKTLEALREKHPLPNPASLLPSPPISNNVLQVKDEDTYAAIMSFTSGSASGIDGITPQYLKDLVSVSAGDAGRALLNDITILCNFMLSGKVTSSFLSHIYGARLCAFNKKDGSIRPIAIGTTFRRLASKLACRHIVSTLKSKFQPIQVGFGSKGGCEAAVHAARTFLKSNEAEVLLKVDVKNAFNSLDRATLLNEVSLHLPEIYPYVWQCYSSPSKLLFGENTILSNVGVQQGDPLGPALFSLGIHKCIANLKSKLNIWYLDDGTIGGKVDDVVEDLIKIKTEFDKIGLKLNFSKCEIFFTDLLSLSKINLATELFNKIAPNLKILQRSTLCLLGAPIFDEGIQPILDNKIKIFVENTDKLANLNSHIAYTILKYCLFVPKLMYILRASPIWKFPGLTEKLDATLKNSLEKNLNLSFDENSWTQATLPIRDGGIGVRKISSVALPAFLASVHSIKGLCSDILKSNSVEITDATDAIENWKLRCSNGDIPKDVTKQKLWDMPIVHNTHINLTLNLTCDKNRARLLALSNKETGHWLHAMPSKNLGTLLDNESFRIAVGLRLGTPLCFEHRCPCGKEVDSFGLHGLSCNKSSGRFSRHGSLNDTIKIALATIDVPALIEPTGISRDDGKRPDGLTLVPWERGRALLWDATCVDTLAPSHVRGTALKAGAAAEKAETTKRHKYSSLIPNYIFVPFAVETLGPWSSSAKKFLNEITPRLIASTGDKRAGAFFTQRIGIAIQRGNAASILGTIPRGHDLYHNYL

SEQ ID NO: 17185 - protein, 779 aa, Vanessa cardui
MDGDFKNAARILFSSDTIAPFNDITLESLQEKHPLPYPTTVLPPPPTQNNFLQVKDEDTYAAIMSFSSGSASGIDGITPQHLKDLVSASAGDAGRALLSDITNLCNFMLSGKVISSFLKHFYGARFCAFNKKDGSIRPIAIGTTFRRLASKLACRHIVSTLKTKFQPIQLGFGSRGGCEAAVHSTRTFLKGNEAEVLLKVDVKNAFNSLDRGTLLNEVFSNLPEIYPYVWQCYSSPSKLFFGEDTIHSNVGVQQGDPLGPALFSLGIHSCISNLKSKLNVWYLDDGTIGGKVDDVIEDLIKIKEQFDKIGLKLNFSKCEIFFTDNLTHKNISLAIDKFNKIAPNIKILHKDTLCLLGAPLFDEGIEPSLNEKIKIFSDNFDRLGILNSHIAYTILKHCLFVPKLMYILRTSPIWKYPSLTNQIDATLKKALEKILNLSLDEYSWTQATLPIPFGGIGVRKISSVALPAFLSSVHSISDLCSEILKSKSVKIMDVTEAIETWKVKCPNDDIPKEVTKQKLWDSSLVHATLHSLTQNLTSAQDRARLLALSSKESSHWLNSLPSKNLGTLLDNECFRICIGLRLGTPLCSEHRCPCGKEVDSFGLHGLSCPRSSGRLFRHGSLNDIIKRALATIDVPALTEPRGISRDDGKRPDGLTLVPWERGRALVWDATCVDTLAPSHIRETMLRAGAAAEKAEAKKITKYSCIISNYFFVPFAVETLGPWSSGAKSFIKSITPRLIASTGDKRAGSFFAQRIGIAIQRGNAASILATIPRGQDLYSN

SEQ ID NO: 17186 - protein, 950 aa, Mellicta athalia
MSNSFKTTNVSQPELFTCPECTNGRLFRGRKGLKIHTTRCHSDLLVHSLPIITDTSSTVTSDNNSVPFEKFILKCHQNIPLVKRVPRGARMSLARSLSAVIKKCISDTDSAWQNLFLFSYKFLHVDKTKNGSLSTKLKQNSLLDIPINIPKNCPRPLYSDSNKIIENKAMDGDLKNAARILFSSDTLAPFDNKTLEALREKHPLPNPASLLPSPPISNNVLQVKDEDTYAAIMSFTSGSASGIDGITPQHLKDLVSVSAGDAGRALLNDITILCNFMLSGKVTSSFLSHIYGARLCAFNKKDGSIRPIAIGTTFRRLASKLACRHIVSTLKSKFQPIQVGFGSKGGCEAAVHAARTFLKSNEAEVLLKVDVKNAFNSLDRATLLNEVSLHLPEIYPYVWQCYSSPSKLLFGENTILSNVGVQQGDPLGPALFSLGIHKCIANLKSKLNIWYLDDGTIGGKVDDVVEDLIKIKTEFDKIGLKLNFSKCEIFFTDLLSLSKINLATELFNKIAPNLKILQRNTLCLLGAPIFDEGIQPILDNKIKIFVENTDKLANLNSHIAYTILKYCLFVPKLMYILRASPIWKFPGLTEKLDATLKNSLEKILNLSFDENSWTQATLPIRDGGIGVRKISSVALPAFLASVHSIKGLCSDILKSNSVEITDATDAIENWKLRCSNGDIPKDVTKQKLWDMPIVHNTHINLTLNLTSDKNRARLLALSNKESGHWLHAMPSKNLGTLLDNESFRIAVGLRLGTPLCFEHRCPCGKEVDSFGLHGLSCNKSSGRFSRHGSLNDTIKRALATIDVPALIEPTGISRDDGKRPDGLTLVPWERGRALLWDATCVDTLAPSHVRETALKAGAAAEKAETTKRHKYSSLIPNYIFVPFAVETLGPWSSSAKKFLNEITPRLIASTGDKRAGAFFAQRIGIAIQRGNAASILGTIPRGHDLYHNYL

SEQ ID NO: 17187 - protein, 950 aa, Mellicta athalia
MSNSFKTTNVSQPELFTCPECTNGRLFRGRKGLKIHTTRCHSDPLVHSLPILTDTASNVTSDNNSVPFEKFILKCHQNIPLVKRVPRGARMSLARSLSAVIKKCISDTDSAWQNLFLFSYKFLHVDKTKNGSLSTKLKQNSLLDIPIIIPKNCPRPLYSDSNKIIENKAMDGDLKNAARILFSSDTLAPFDNKTLEALREKHPLPNPESLLPSQPISNNILQVKDEDTYAAIMSFTSGSASGIDGITPQHLKDLVSVSAGDAGRALLNDITNLCNFMLTGKVTSSFVSHIYGARLCAFNKKDGSIRPIAIGTTFRRLASKLACRHIVSTLKTKFQPIQVGFGSKGGCEAAVHAARTFLKSNEAEVLLKVDVKNAFNSLDRATLLNEVSSHLPEIYPYVWQCYSSPSKLLFGENTIFSNVGVQQGDPLGPALFSLGIHKCISNLKSKLNIWYLDDGTIGGKVDDVVEDLIKIKNEFDKIGLKLNFSKCEIFFTDLLSLSKINLATELFNKIAPNLKILQRSTLCLLGAPIFDEGIQPILDNKIKIFVENTDKLGTLNSHIAYTILKYCLFVPKLMYILRTSPIWKFPGLTEKLDATLKNSLEKILNLSFDENSWTQATLPIRDGGIGVRKISSVALPAFLASVHSIKGLCSDILKSNSVEITDATDAIENWKLRCPNGDIPKDVTKQKLWDMPIVHNTHINLTLNLTSDKNRARLLALSNKESGHWLHAMPSKNLGTLLDNESFRIAVGLRLGTPLCFEHRCPCGKEVDSFGLHGLSCNKSSGRFSRHGSLNDTIKRALATIDVPALIEPTGISRDDGKRPDGLTLVPWERGRALLWDATCVDTLAPSHVRETALKAGAAAEKAESTKRHKYSSLIPNYIFVPFAVETLGPWSSSAKKFLIEITPRLIASTGDKRAGAFFAQRIGIAIQRGNAASILGTIPRGHDLYQNYL

SEQ ID NO: 17188 - protein, 950 aa, Mellicta athalia
MSNSFKTTNVSQPELFTCPECTNGRLFRGRKGLKIHTTRCHSDLLVHSLPIITDTSSTVTSDNNSVPFEKFILKCHQNIPLVKRVPRGARMSLARSLSAVIKKCISDTDSAWQNLFLFSYKYLHIDKTKNGSLSTKLKQNSFLDLPINIPKNCPRPLYSDSNKIIENKAMDGDLKNAARILFSSDTLAPFDNKTLEALREKHPLPNPASLLPSPPISNNVLQVKDEDTYAAIMSFTSGSASGIDGITPQHLKDLVSVSAGDAGRALLNDITILCNFMLSGKVTSSFLSHIYGARLCAFNKKDGSIRPIAIGTTFRRLASKLACRHIVSTLKSKFQPIQVGFGSKGGCEAAVHAARTFLKSNEAEVLLKVDVKNAFNSLNRATLLNEVSLHLPEIYPYVWQCYSSPSKLLFGENTILSNVGVQQGDPLGPALFSLGIHKCIANLKSKLNIWYLDDGTIGGKVDDVVEDLIKIKNEFDKIGLKLNFSKCEIFFTDLLSLSKIKLATELFNKIAPNLKILQRSTLCLLGAPIFDEGIQPILDNKIKIFVENTDKLANLNSHIAYTILKYCLFVPKLMYILRASPIWKFPGLTEKLDATLKNSLEKILNLSFDKNSWTQATLPIRDGGIGVRKISSVALPAFLASVHSIKGLCSDILKSNSVEITDATDAIENWKLRCPNGDIPKDVTKQKLWDMPIVHNNHINLTLNLTSDKNRARLLALSNKESGHWLHAMPSKNLGTLLDNESFRVAVGLRLGTPLCFEHRCPCGKEVDSFGLHGLSCNKSSGRFSRHGSLNDTIKRALATIDVPALIEPTGISRDDGKRPDGLTLVPWERGRALLWDATCVDTLAPSHVRETALKAGAAAEKAETTKRHKYSSLIPNYIFVPFAVETLGPWSSSAKKFLNEITPRLIASTGDKRAGAFFAQRIGIAIQRGNAASILGTIPRGHDLYQNYL

SEQ ID NO: 17189 - protein, 781 aa, Nymphalis polychloros
MDGDLKNAARILFSSDTLAPFNNKTLESLHEKHPLPNPASVLPNPPSQNTFLQVKDEDTYASIMSFSSGSAGGIDGITPQHLKDLVSASAGDAGRALLGDITKLWNFMLSGKVISSFLPHLYGARLCAFNKKDGSIRPIAIGSTFRRLASKLACRHIVSTLKTKFQPTQLGFGSRGGCEAAVHSTRKFLKGNEAEVLLKVDVKNAFNSIDRATLLNEVSSYLPEIYPYVWQCYSSPSKLFFGEKTINSNVGVQQGDPLGPALFSLGIHNYISDLKSKLNIWYLDDGTIGGKVDDVIEDLIKITERFDKVGLKLNFSKCEIFFTNTLSSNDIYSATELFYKIAPNIKILHKNTLCLLGAPLSDEGIEPVLNDKIKIFLDNVDRLGLLNSHIAYTILKHCLFVPKLMYILRASPVWKFPGLTNKIDAILKDSLEKILNLSLDEYSWTQATLPIRHGGIGVRKISSVALPSFLSSVHSITGLCSHILKSNTLKITNVTEAIENWKVKCPNDDIPKEVTKQKLWDSPLVHVTQQSLNQNLTSANNRARLLALSTKESGHWLHAVPSKNLGTLLDNECFRIAIGLRLGTQLCIEHRCPCGKEVDSFGLHGVSCPRSSGRLFRHSSLNDTIKRALATIDVPALIEPHGISRDDGKRPDGLTLVPWERGRALVWDATCVDTLAPSHIRETMLKAGAAAEKAETNKRNKYSSLIQNYIFIPFAVETLGPWSNSAKNFIQNITPRLITSTGDRRAGSFFAQRIGIAIQRGNAASILATIPRGHDLYSKYF

SEQ ID NO: 17190 - protein, 950 aa, Mellicta athalia
MSNSFKTTNVSQPELFTCPECTNGRLFRGRKGLKIHTTRCHSDPLVHSLPILTNTSSTVTSDNNSVPFEKFILKCHQNIPLVKRVPRGARMSLARSLSAVIKKCISDTDSAWQNLFLFSYKFLHVDKTKNGSLSTKLKQNSLLDIPIIIPKNCPRPLYSDSNKIIENKAMDGDLKNAARILFSSDTLAPFDNKTLEALREKHPLPNPESLLPSQPISNNVLQVKDEDTYAAIMSFASGSASGIDGITPQHLKDHVSVSAGDAGRALLNDITNLCNFMLTGKVTSSFVSHIYGARLCAFNKKDGSIRPIAIGTTFRRLASKLACRHIVSTLKTKFQPIQVGFGSKGGCEAAVHAARTFLKSNEAEVLLKVDVKNAFNSLDRATLLNEVSSHLPEIYPYVWQCYSSPSKLLFGENTIFSNVGVQQGDPLGPALFSLGIHKCISNLKSKLNIWYLDDGTIGGKVDDVVEDLIKIKNEFDKIGLKLNFSKCEIFFTDLLSLSKINLATELFNKIAPNLKILQRSTLCLLGAPIFDEGIQPILDNKIKIFVENTDKLGTLNSHIAYTILKYFLFVPKLMYILRTSPIWKFPGLTEKLDATLKNSLEKILNLSFDENSWTQATLPIRDGGIGVRKISSVALPAFLASVHSIKGLCSDILKPNSVEITDATDAIENWKLRCPNGDIPKDVTKQKLWDMPIVHNTHINLTLNLTSDKNRARLLALSNKESGHWLHAMPSKNLGTLLDNESFRIAVGLRLGTPLCFEHRCPCGKEVDSFGLHGLSCNKSSGRFSRHGSLNDTIKRALATIDVPALIEPTGISRDDGKRPDGLTLVPWERGRALLWDATCVDTLAPSHVRETALKAGAAAEKAESTKRHKYSSLIPNYIFVPFAVETLGPWSSSAKKFLIEITPRLIASTGDKRAGAFFSQRIGIAIQRGNAASILGTIPRGHDLYQNYL

SEQ ID NO: 17191 - protein, 949 aa, Melitaea cinxia
MSNSFKTTNVSQPELFTCPECTNGKLFRGRKGLKNHTTRCHSDPLVHSLPILTDTSSTVTSDNNSVPFEKFILKCHQNIPLVKRVPRGARMSLARSLSSVIKKCISDTDSAWQNLFLFSYKFLHVDKTKNGSLSTKLKQNSLLDIPIIIPKNPRPLYSDSSKIIENKAMDGDLKNAARILFSSDTLAPFDNKTLEALREKHPLPNPASLLPSPPIFNNVLQVKDEDTYAAIMSFTSGSASGIDGITPQHLKDLVSVSAGDAGRALLNDITNLCNFMLSGKVSSSFLSHIYGARLCAFNKKDGNIRPIAIGTTFRRLASKLACRHIVSSLKTKFQPIQLGFGSKGGCEAAVHAARTFLKSNEAEVLLKVDVKNAFNSLERATLLNEVSLHLPEIYPYVWQCYSSPSKLLFGENTIFSNVGVQQGDPLGPALFSLGIHKCISNLKSKLNVWYLDDGTIGGKVDDVVEDLIKIKNEFDKIGLKLNFSKCEIFFTDILSLSKINLATELFNKIAPNLKILQRSTLCLLGAPLFDEGIQPILDNKIKIFVENTDKLGTLNSHIAYTILKYCLFVPKLMYILRASPIWKFPGMTEKLDATLKNSLEKILNLSFDENSWTQATLPIRDGGIGVRKISSVALPAFLASVHSIKGLCSDILKSNSVQITNATDAIENWKLMCPNGDIPKDVTKQKLWDIPIVHNTHISLTQNLTSDKNCARLLAVSNKESGHWLHAMPSKNLGTLLDNESFRIALGLRLGAPLCFEHRCPCGKEVDSFGLHGLSCNKSSGRFSRHGSLNDTIKRALATIDVPALIEPTGISRNDGKRPDGLTLVPWERGRALLWDATCVDTLAPSHVRETALKAGAAAEKAETTKRHKYSSLIPNYIFVPFAVETLGPWSSSAKHFLNEITPRLIASTGDKRAGAFFAQRIGIAIQRGNAASILGTIPRGHDLYQNYL

SEQ ID NO: 17192 - protein, 950 aa, Mellicta athalia
MSNSFKTTNVSQPELFTCPECTNGRLFRGRKGLKIHTTRCHSDLLVHSLPIITDTSSTVTSDNNSVPFEKFILKCHQNIPLVKRVPRGARMSLARSLSAVIKKCISDTDSAWQNLFLFSYKFLHVDKTKNGSLSTKLKQNSLLDIPINIPKNCPRPLYSDSNKIIENKAMDGDLKNAARILFSSDTLAPFDNKTLEALREKHPLPNPASLLPSPPISNNVLQVKDEDTYAAIMSFTSGSASGIDGITPQHLKDLVSVSAGDAGRALLNDITILCNFMLSGKVTSSFLSHIYGARLCAFNKKDGSIRPIAIGTTFRRLASKLTCRHIVSTLKSKFQPIQVGFGSKGGCEAAVHAARTFLKSNEAEVLLKVDVKNAFNSLDRATLLNEVSLHLPEIYPYVWQCYSSPSKLLFGENTILSNVGVQQGDPLGPALFSLGIHKCIANLKSKLNIWYLDDGTIGGKVDDVVEDLIKIKTEFDEIGLKLNFSKCEIFFTDLLSLSKINLATELFNKIAPNLKILQRSTLCLLGAPIFDEGIQPILDNKIKIFVENTDKLANLNSHIAYTILKYCLFVPKLMYILRASPIWKFPGLTEKLDATLKNSLEKILNLSFDENSWTQATLPIRDGGIGVRKISSVALPAFLASVHSIKGLCSDILKSNSVEITDATDAIENWKLRCSNGDIPKDVTKQKLWDMPIVHNTHINLTLNLTSDKNRARLLALSNKESGHWLHAMPSKNLGTLLDNESFRIAVGLRLGTPLCFEHRCPCGKEVDSFGLHGLSCNKSSGRFSRHGSLNDTIKRALATIDVPALIEPTGISRDDGKRPDGLTLVPWERGRALLWDATCVDTLAPSHVRETALKAGAAAEKAETTKRHKYSSLIPNYIFVPFAVETLGPWSSSAKKFLNEITPRLIASTGDKRAGAFFAQRIGIAIQRGNAASILGTIPRGHDLYHNYL

SEQ ID NO: 17193 - protein, 949 aa, Melitaea cinxia
MSNSFKTTNVSQPELFTCPECTNGKLFRGRKGLKIHTTRCHSDPLVHSLPILTDTSSTVTSDNNSVPFEKFILKCHQNIPLVKRVPRGARMSLARSLSSVIKKCISDTDSAWQNLFLFSYKFLHVDKTKNGSLSTKLKQNSLLDIPIIIPKNPRPLYSDSSKIIENKAMDGDLKNAARILFSSDTLAPFDNKTLEALREKHPLPNPASLLPRPPIFNNVLQVKDEDTYAAIMSFTSGSASGIDGITPQHLKDLVSVSAGDAGRALLNDITNLCNFMLSGKVSSSFLSHIYGARLCAFNKKDGSIRPIAIGTTFRRLASKLACRHIVSSLKTKFQPIQLGFGSKGGCEAAVHAARTFLKSNEAEVLLKVDVKNAFNSLDRATLLNEVSLHLPEIYPYVWQCYSSPSKLLFGENTIFSNVGVQQGDPLGSALFSLGIHKCISNLKSKLNIWYLDDGTIGGKVDDVVEDLIKIKNEFDKIGLKLNFSKCEIFFTDILSLSKINLATELFNKIAPNLKILQRSTLCLLGAPLFDEGIEPILDNKIKIFVENTDKLGTLNSHIAYTILKYCLFVPKLMYILRASPIWKFPGMTEKLDATLKNSLEKIVNLSFDENSWTQATLPIRDGGIGVRKISSVALPAFLASVHSIKSLCSDILKSNSVQITDATDAIENWKLMCPNGNIPKDVTKQKLWDIPIVHNTHISLTQNLTSDKNRARLLAVSNKESGHWLHAMPSKNLGTLLDNESFRIALGLRLGAPLCFEHRCPCGKEVDSFGLHGLSCNKSSGRFSRHGSLNDTIKRNLATIDVPALIEPTGISRNDGKRPDGLTLVPWERGRALLWDATCVDTLAPSHVRETALKAGAAAEKAETTKRHKYSSLIPNYIFVPFAVETLGPWSSSAKNFLNEITPRLIASTGDKRAGAFFAQRIGIAIQRGNAASILGTIPRGHDLYQNYL

SEQ ID NO: 17194 - protein, 950 aa, Mellicta athalia
MSNSFKTTNVSQPELFTCPECTNGRLFRGRKGLKIHTTRCHSDLLVHSLPIITDSSSTVTSDNNSVPFEKFILKCHQNIPLVKRVPRGARMSLARSLSAVIKKCISDTDSAWQNLFLFSYKFLHVDKTKNGSLSTKLKQNSLLDIPINIPKNCPRPLYSDSNKIIENKAMDGDLKNAARILFSSDTLAPFDNKTLEALREKHPLPNPASLLPSPPISNNVLQVKDEDTYAAIMSFTSGSASGIDGITPQHLKDLVSVSAGDAGRALLNDITILCNFMLSGKVTSSFLSHIYGARLCAFNKKDGSIRPIAIGTTFRRLASKLACRHIVSTLKSKFQPIQVGFGSKGGCEAAVHAARTFLKSNEAEVLLKVDVKNAFNSLDRATLLNEVSLHLPEIYPYVWQCYSSPSKLLFGENTILSNVGVQQGDPLGPALFSLGIHKCIANLKSKLNIWYLDDGTIGGKVDDVVEDLIKIKTEFDKIGLKLNFSKCEIFFTDLLSLSKINLATELFNKIAPNLKILQRSTLCLLGAPIFDEGIQPILDNKIKIFVENTDKLANLNSHIAYTILKYCLFVPKLMYILRASPIWKFPGLTEKLDATLKNSLEKILNLSFDENSWTQATLPIRDGGIGVRKISSVALPAFLASVHSIKGLCSDILKSNSVEITDATDAIENWKLRCSNGDIPKDVTKQKLWDMPIVHNTHINLTLNLTSDKNRARLLALSNKESGHWLHAMPSKNLGTLLDNESFRIAVGLRLGTPLCFEHRCPCGKEVDSFGLHGLSCNKSSGRFSRHGSLNDTIKRALATIDVPALIEPTGISRDDGKRPDGLTLVPWERGRALLWDATCVDTLAPSHVRETALKAGAAAEKAETTKRHKYSSLIPNYIFVPFAVETLGPWSSSAKKFLNEITPRLIASTGDKRAGAFFAQRIGIAIQRGNAASILGTIPRGHDLYHNYL

SEQ ID NO: 17195 - protein, 950 aa, Mellicta athalia
MSNSFKTTNVSQPELFTCPECTNGRLFRGRKGLKIHTTRCHSDLLVHSLPIITDTSSTVTSDNNSVPFEKFILKCHQNIPLVKRVPRGARMSLARSLSAVIKKCISDTDSAWQNLFLFSYKFLHVDKTKNGSLSTKLKQNSLLDIPINIPKNCPRPLYSDSNKIIENKAMDGDLKNAARILFSSDTLAPFDNKTLEALREKHPLPNPASLLPSPPISNNVLQVKDEDTYAAIMSFTSGSASGIDGITPQHLKDLVSVSAGDAGRALLNDITILCNFMLSGKVTSSFLSHIYGARLCAFNKKDGSIRPIAIGTTFRRLASKLACRHIVSTLKSKFQPIQVGFGSKGGCEAAVHAARTFLKSNEAEVLLKVDVKNAFNSLDRATLLNEVSLHLPEIYPYVWQCYSSPSKLLFGENTILSNVGVQQGDPLGPALFSLGIHKCIANLKSKLNIWYLDDGTIGGKVDDVVEDLIKIKTEFDKIGLKLNFSKCEIFFTDLLSLSKINLATELFNKIAPNLKILQRSTLCLLGAPIFDEGIQPILDNKIKIFVENTDKLANLNSHIAYTILKYCLFVPKLMYILRASPIWKFPGLTEKLDATLKNSLEKILNLSFDENSWTQATLPIRDGGIGVRKISSVALPAFLASVHSIKSLCSDILKSNSLEITDATDAIENWKLRCSNGDIPKDVTKQKLWDMPIVHNTHINLTLNLTSDKNRARLLALSNKESGHWLHAMPSKNLGTLLDNESFRIAVGLRLGTPLCFEHRCPCGKEVDSFGLHGLSCNKSSGRFSRHGSLNDTIKRALATIDVPALIEPTGISRDDGKRPDGLTLVPWERGRALLWDATCVDTLAPSHVRETALKAGAAAEKAETTKRHKYSSLIPNYIFVPFAVETLGPWSSSAKKFLNEITPRLIASTGDKRAGAFFAQRIGIAIQRGNAASILGTIPRGHDLYHNYL

SEQ ID NO: 17196 - protein, 950 aa, Vanessa cardui
MLCSNNDRTIINSQPDLLTCPQCTNGRLFRSQKGLKIHTTRCHSLPLEKSNDTFSILPTNSNSDTDSINFENLLTKCHKNIPLVKRIPRGARISLARSLSIVLQNCLSNSNSAWQNLFTFSFKFFHVDKTKNGSLSTKLKQNSLLDKQISIPKYSSRPQKFDLKKNVENKAMDGDFKNAARILFSSDTIAPFNDITLESLQEKHPLPYPTTVLPPPPTQNNFLQVKDEDTYAAIMSFSSGSASGIDGITPQHLKDLVSASAGDAGRALLSDITNLCNFMLSGKVISSFLPLLYGARLCAFNKKDGSIRPIAIGTTFRRLSSKLACRHIVSTLKTKFQPIQLGFGSRGGCEAAVHSTRTFLKGNEAEVLLKVDVKNAFNSLDRGTLLNEVFSNLPEIYPYVWQCYSSPSKLFFGEDTIHSNVGVQQGDPLGPALFSLGIHSCISNLKSKLNVSYLDDGTIGGKVDDVIKDLIKIKEQFDKIGLKLNFSKCEFLFTDNLTHKNISLAIDKFNKIAPNIKILHKDTLCLLGAPLFDEGIEPSLKEKIKIFSDNFDRLDILNSHIAYTILKHCLFVPKLMYILRASPIWKYPSLTNQIDATLKKALEKILNLSLDEYSWTQATLPIPFGGIGVRKISSVALPAFLSSVHSISDLCSEILKSKSVKIMNVTEAIETWKVKCPNDDIPKEVTKQKLWDSSLVHATLHSLTQNLTSAQDRARLLALSSKESSHWLNSLPSKNLGTLLDNECFRISIGLRLGTPLCSEHICPCGKEVDSFGLHGLSCPRSSGRLFRHGSLNDIIKRALATIDVPALTEPRGISRDDGKRPDGLTLVPWERGRALVWDATCVDTLAPSHIRETMLRAGAAAEKAEAKKITKYSCIMSNYFFVPFAVETLGPWSSGAKSFIKSITPRLIASTGDRRAGSFFAQRIGIAIQRGNAASILATIPRGQDLYSN

SEQ ID NO: 17197 - protein, 950 aa, Mellicta athalia
MSNSFKTTNVSQPELFTCPECTNGRLFRGRKGLKIHTTRCHSDLLVHSLPIITDTSSTVTSDNNSVPFEKFILKCHQNIPLVKRVPRGARMSLARSLSAVIKKCISDTDSAWQNLFLFSYKFLHVDKTKNGSLSTKLKQNSLLDIPINIPKNCPRPLYSDSNKIIENKAMDGDLKNAARILFSSDTLAPFDNKTLEALREKHPLPNPASLLPSPPISNNVLQVKDEDTYAAIMSFTSGSASGIDGITPQHLKDLVSVSAGDAGRALLNDITILCNFMLSGKVTSSFLSHIYGARLCAFNKKDGSIRPIAIGTTFRRLASKLACRHIVSTLKSKFQPIQVGFGSKGGCEAAVHAARTFLKSNEAEVLLKVDVKNAFNSLDRATLLNEVSLHLPEIYPYVWQCYSSPSKLLFGENTILSNVGVQQGDPLGPALFSLGIHKCIANLKSKLNIWYLDDGTIGGKVDDVVEDLIKIKTEFDKIGLKLNFSKCEIFFTDLLSLSKINLATELFNKIAPNLKILQRSTLCLLGAPIFDEGIQPILDNKIKIFVENTDKLANLNSHIAYTILKYCLFVPKLMYILRASPIWKFPGLTEKLDATLKNSLEKILNLSFDENSWTQATLPIRDGGIGVRKISSVALSAFLASVHSIKGLCSDILKSNSVEITDATDAIENWKLRCSNGDIPKDVTKQKLWDMPIVHNTHINLTLNLTSDKNRARLLALSNKESGHWLHAMPSKNLGTLLDNESFRIAVGLRLGTPLCFEHRCPCGKEVDSFGLHGLSCNKSSGRFSRHGSLNDTIKRALATIDVPALIEPTGISRDDGKRPDGLTLVPWERGRALLWDATCVDTLAPSHVRETALKAGAAAEKAETTKRHKYSSLIPNYIFVPFAVETLGPWSSSAKKFLNEITPRLIASTGDKRAGAFFAQRIGIAIQRGNAASILGTIPRGHDLYHNYL

SEQ ID NO: 17198 - protein, 952 aa, Nymphalis polychloros
MSCSNNFNNSVPSQPDLLSCYQCCNGRIFKSQKGLKIHTTRCHSLPLGHSSNFIFNGPTVINSDTNSQLQFEQILAKYNQSIPLIKRIPRGARISLARSLSSVIQKCLSNSNSAWHNLFTFSYKFFHVDKAKNGSLSTKLKQNSLDTQISLPKFVSGPLNFDLKKNVVNKAMDGDLKNAARILFSSDTLAPFNNKTLESLHEKHPLPNPASVLPNPPSQNTFLQVKDEDTYASIMSFSSGSAGGIDGITPQHLKDLVSASAGDAGRALLGDITKLCNFMLSGKMISSFLPYLYGASLCAFNKKDGSIRPIAIGSTFRRLASKLACRHIVSTLKTKFQPTQLGFGSRGGCEAAVHSTRTFLKGNEAEVLLKVDVKNAFNSIDRATLLNEVSSYLPKIYPYVWQCYSSPSKLFFGEKTINSNVGVQQGDPLGPALFSLGIHNYISDLKSKLNIWYLDDGTIGGKVDDVIEDLIKITKRFDKVGLKLNFSKCEFFFTNTLSSNDIYSATELFYKIAPNIKILHKNTLCLLGAPLFDEGIEPVLNHKIKIFLDNVDRLGVLNSHIAYTILKHCLFVPKLMYILRASPVWKFPGLTNKIDAILKDSLEKILNLSLDEYSWTQATLPIRHGGIGVRKISSVALPAFLSSVHSITGLCSHILKSNTLKITNVTEAIENWKGKCPNDDIPKEVTKQKLWDSPLVHITQQSLNQNLTSANNRARLLALSTKESGHWLHAVPSKNLGTLLDNECFRIAIGLRLGTQLCIEHRCPCGKEVDSFGLHGLSCPRSTGRLFRHSSLNDTIKRALATIDVPALIEPHGISRDDGKRPDGLTLVPWERGRALVWDATCVDTLAPSHIRETMLKAGAAAEKAETNKRNKYSSLIQNYIFIPFAVETLGPWSNSAKNFIQNITPRLIASTGDRRAGSFFAQRIGIAIQRGNAASILATIPRGHDLYSKYF

SEQ ID NO: 17199 - protein, 949 aa, Melitaea cinxia
MSNSFKTNNVSQPELFTCPECTNGKLFRGRKGLKIHTTRCHSDPLVHSLPILTDTSSTVTSDNNSVPFEKFILKCHKNIPLVKRVPRGARMSLARSLSSVIKKCISDTDSAWQNLFLFSYKFLHVDKTKNGSLSTKLKQNSLLDIPIIIPKNPRPLYSDSSKIIENKTMDGDLKNAARILFSSDTLAPFDNKTLEALREKHPLPNPASLLPSPPIFNNVLQVKDEDTYAAIMSFTSGSASGIDDITPQHLKDLVSVSAGDAGRALLNDITNLCNFMLSGKVSTSFLSHIYGARLCAFNKKDGSIRPIAIGTTFRRLASKLACRHIVSSLKTKFQPIQLGFGSKGGCEAAVHAARTFLKSNEAEVLLKVDVKNAFNSLDRATLLNEVSLHLPEIYPYVWQCYSSPSKLLFGENTIFSNVGVQQGDPLGPALFSLGIHKCISNLKSKLNIWYLDDGTIGGKVDDVVEDLIKIKNEFDKIGLKLNFSKCEIFFTDLLSLSKINLATELFNKIAPNLKILQRSTLCLLGAPLFDEGIQSILDNKIKIFVENTDKLGTLNSHIAYTILKYCLFVPKFMYILRASPIWKFPGMTEKLDATLKNSLEKILNLSFDENSWTQATLPIRDGGIGVRKISSVALPAFLASVHSIKGLCSDILKSNSVQITDATDAIENWKLMCPNGDIPKDVTKQKLWDIPIVHNIHISLTQNLTSDKNRARLLAVSNKESGHWLHAMPSKNLGTLLDNESFRITLGLRLGAPLCFEHRCPCGKEVDSFGLHGLSCNKSSGRFSRHGSLNDNIKRALATIDVPALIEPTGISRNDGKRPDGLTLVPWERGRALLWDATCVDTLAPSHVRETALKAGAAAEKAETTKRHKYSSLIPNYIFVPFAVETLGPWSSSAKNFLNEITPRLIASTGDKRAGAFFAQRIGIAIQRGNAASILGTIPRGHDLYQNYL

SEQ ID NO: 17200 - protein, 950 aa, Mellicta athalia
MSNSFKTTNVSQPELFTCPECTNGRLFRGRKGLKIHTTRCHSDPLVHSLPILTDTSSTVTSDNNSVPFEKFILKCHQNIPLVKRVPRGARMSLARSLSAVIKKCISDTDSAWQNLFLFSYKFLHVDKTKNGSLSTKLKQNSLLDIPIIIPKNCPRPLYSDSNKIIENKAMDGDLRNAARILFSSDTLAPFDNKTLEALREKHPLPNPVSLLPSQPISNNVLQVKDEDTYAAIMSFTSGSASGIDGITPQHLKDLVSVSAGDAGRALLNDITNLCNFMLSGKVTSSFVSHIYGARLCVFNKKDGSIRPIAIGTTFRRLASKLACRHIVSTLKTKFQPIQVGFGSKGGCEAAVHAARTFLKSNEAEVLLKVDVKNAFNSLDRATLLNEVSSHLPEIYPYVWQCYSSPSKLLFGENTIFSNVGVQQGDPLGPALFSLGIHKCISNLKSKLNIWYLDDGTIGGKVDDVVEDLIKIKNEFDKIGLKLNFSKCEFFFTDLLSLSKINLATELFNKIAPNLKILQRSTLCLLGAPIFDEGIQPILDNKIKIFVENTNKLGTLNSHIAYTILKYCLFVPKLMYILRTSPIWKFPGLTEKLDATLKNSLEKILNLSFDENSWTQATLPIRDGGIGVRKISSVALPAFLASVHSIKGLCSDILKSNSVEITDATDAIENWKLRCPNGDIPKDVTKQKLWDMPIVHNTHINLTLNLTSDKNRARLLALSNKESGHWLHAMPSKNLGTLLDNESFRIAVGLRLGTPLCFEHRCPCGKEVDSFGLHGLSCNKSSGRFSRHGSLNDTIKRALATIDVPALIEPTGISRDDGKRPDGLTLVPWERGRALLWDATCVDTLAPSHVRETALKAGAAAEKAESTKRHKYSSLIPNYIFVPFAVETLGPWSSSAKKFLNEITPRLIASTGDKRAGAFFAQRIGIAIQRGNAASILGTIPGGHDLYQNYL

SEQ ID NO: 17201 - protein, 950 aa, Mellicta athalia
MSNSFKTTNVSQPELFTCPECTNGRLFRGRKGLKIHTTRCHSDLLVHSLPIITDTSSTVTSDNNSVPFEKFILKCHQNIPLVKRVPKGARMSLARSLSAVIKKCISDTDSAWQNLFLFSYKYLHIDKTKNGSLSTKLKQNSFLDIPINIPKNCPRPLYSDSNKIIENKAMDGDLKNAARILFSSDTLAPFDNKTLEALREKHPLPNPASLLPSPPISNNVLQVKDEDTYAAIMSFTSGSASGIDGITPQHLKDLVSVSAGDAGRALLNDITILCNFMLSGKVTSSFLSHIYGARLCAFNKKDGSIRPIAIGTTFRRLASKLACRHIVSTLKSKFQPIQVGFGSKGGCEAAVHAARTFLKSNEAEVLLKVDVKNAFNSLDRATLLNEVSLHLPEIYPYVWQCYSSPSKLLFGENTILSNVGVQQGDPLGPALFSLGIHKCIANLKSKLNIWYLDEGTIGGKVDDVVEDLIKIKNEFDKIGLKLNFSKCEIFFTDLLSLSKIKLATELFNKIAPNLKILQRSTLCLLGAPIFDEGIQPILDDKIKIFVENTDKLANLNSHIAYTILKFCLFVPKLMYILRASPIWKFPGLTEKLDATLKNSLEKILNLSFDENSWTQATLPIRDGGIGVRKISSIALPAFLASVHSIKGLCSDILKSNSVEITDATDAIENWKLRCPNGDIPKDVTKQKLWDMPIVHNNHINLTLNLTSDKNRARLLALSNKESGHWLHAMPSKNLGTLLDNESFRVAVGLRLGTPLCFEHRCPCGKEVDSFGLHGLSCNKSSGRFSRHGSLNDTIKRALATIDVPALIEPTGISRDDGKRPDGLTLVPWERGRALLWDATCVDTLAPSHVRETALKAGAAAEKAETTKRHKYSSLIPNYIFVPFAVETLGPWSSSAKKFLNEITPRLIASTGDKRAGAFFAQRIGIAIQRGNAASILGTIPRGHDLYQNYL

SEQ ID NO: 17202 - protein, 950 aa, Mellicta athalia
MSNSFKTSNVSQPELFTCPECTNGRLFRGRKGLKIHTTRCHSDPLVHSLPILTDTSSTVTSDNNSVPFEKFILKCHQNIPLVKRVPRGARMSLARSLSAVIKKCISDTDSAWQNLFLFSYKFLHVDKTKNGSLSTKLKQNSLLDIPIIIPKNCPRPLYSDSNKIIENKAMDGDLKNAARILFSSDTLAPFDNKTLEALREKHPLPNPESLLPSQPISNNVLQVKDEDTYAAIMSFTSGSASGIDGITPQHLKDLVSVSAGDAGRALLNDITNLCNFMLSGKVTSSFVSHIYGARLCAFNKKDGSIRPIAIGTTFRRLASKLACRHIVSTLKTKFQPIQVGFGSKGGCEAAVHAARTFLKSNEAEVLLKVDVKNAFNSLDRATLLNEVSSHLPEIYPYVWQCYSSPSKLLFGENTIFSNVGVQQGDPLGPALFSLGIHKCISNLKSKLNIWYLDDGTIGGKVDDVVEDLIKIKNEFDKIGLKLNFSKCEIFFTDLLSLSKINLATELFNKIAPNLKILQRSTLCLLGAPIFDEGIQPILDNKIKIFVENTDKLGTLNSHIAYTILKYCLFVPKLMYILRTSPIWKFPGLTEKIDATLKNSLEKILNLSFDENSWTQATLPIRDGGIGVRKISSVALPAFLASVHSIKGLCSDILKSNSVEITDATDAIENWKLRCPNGDIPKDVTKQKLWDMPIVHNTHINLTLNLTCDKNRARLLALSNKESGHWLHAMPSKNLGTLLDNESFRIAVGLRLGTPLCFEHRCPCGKEVDSFGLHGLSCNKSSGRFSRHGSLNDIIKRALATIDVPALIEPTGISRDDGKRPDGLTLVPWERGRALLWDATCVDTLAPSHVRETALKAGAAAEKAESTKRHKYSSLIPNYIFVPFAVETLGPWSSSAKKFLNEITPRLIASTGDKRAGAFFAQRIGIAIQRGNAASILGTIPRGHDLYQNYL

SEQ ID NO: 17203 - protein, 950 aa, Vanessa cardui
MLYSNNDRTIINSQPDLLTCPQCTNGRLFRSQKGLKIHTTRCHSLPLEKSNDTFSILPTNSNSDIDSINFENLLTKCHKNIPLVKRIPRGARISLARSLSIVLQNCLSNSNLAWQNLFTFSFKFFHVDKTKNGSLSTKLKQNSLLDKQISIPKYSSRPQKFDLKKNVENKAMDGDFKNAARILFSSDTIAPFNDITLESLQEKHPLPYPTTVLPPPPTQNNFLQVKDEDTYAAIMSFSSGSASGIDGITPQHLKDLVSASAGDAGRALLSDITNLCNFMLSGKVISSFLKHFYGARLCAFNKKDGSIRPIAIGTTFRRLASKLACRHIVSTLKTKFQPIQLGFGSRGGCEAAVHSTRTFLKGNEAEVLLKVDVKNAFNSLDRGTLLNEVFSNLPEIYPYVWQCYSSPSKLFFGEDTIHSNVGVQQGDPLGPALFSLGIHSCISNLKSKLNVWYLDDGTIGDKVDDVIEDLIKIKEQFDKIGLKLNFSKCEFFFTDNLTHKNISLAIDKFNKIAPNIKILHKDTLCLLGAPLFDEGIEPSLNEKIKIFSDNFDRLGILNSHIAYTILKHCLFVPKLMYILRTSPIWKYPSLTNQIDATLKKALEKILNLSLDEYSWTQATLPIPFGGIGVRKISSVALPAFLSSVHSISDLCSEILKSKSVKIMDVTEAIETWKVKCPNDDIPKEVTKQKLWDSSLVHATLHSLTQNLTSAQDRARLLALSSKESSHWLNSLPSKNLGTLLDNECFRISIGLRLGTPLCSEHRCPCGKEVDSFGLHGLSCPRSSGRLFRHGSLNDIIKRALATIDVPALTEPRGISRDDGKRPDGLTLVPWERGRALVWDATCVDTLAPSHIRETMLRAGAAAEKAEAKKITKYSCIISNYFFVPFAVETLGPWSSGAKSFIKSITPRLIASSGDKRAGSFFAQRIGIAIQRGNAASILATISRGQDLYSN

SEQ ID NO: 17204 - protein, 958 aa, Vanessa cardui
MLCSNNDRTIINSQPDLLTCPQCTNGRLFRSQKGLKIHTTRCHSLPLEKSNDTFSILPTNSNSDTDSINFENLLTKCHKNIPLVKRIPRGARISLARSLSIVLQNCLSNSNSAWQNLFTFSFKFFHVDKTKNGSLSTKLKQNSLLDKQISIPKYSSRPQKFDLKKNVENKAMDGDFKNAARILFSSDTIAPFNDITLESLQEKHPLPYPTTVLPPPPTQNNFLQVKDEDTYAAIMSFSSGSASGIDGITPQHLKDLVSASAGDAGRALLSDITNLCNFMLSGKVISSFLPHLYGARLCAFNKKDGSIRPIAIGTTFRRLASKLACRHIVSTLKTKFQPIQLGFGSRGGCEAAVHSTRTFLKGNEAEVLLKVDVKNAFNSLDRGTLLNEVFSNLPEIYPFVWQCYSSPSKLIFGEDTIHSNVGVQQGDPLGPALFSLGIHSCISNLKSKLNVWYLDDGTIGGKVDDVIEDLIKIKEQFDKIGLKLNFSKCEIFFTDNLTHKNISLAIDKFNKIAPNIKILHKDTLCLLGAPLFDEGIEPSLKEKIKIFSDNFDRLGILNSHIAYTILKHCLFVPKLMYILRASPIWKYPSLTNQIDATLKKALEKILNLSLDEYSWTQATLPIPFGGIGVRKISSVALPAFLSSVHSISDLCSEILKSKSVKIMNVTEAIETWKVKCPNDDIPKEVTKQKLWDSSLVHATLHSLTQNLTSAQDRARLLALSSKESSHWLNSLPSKNLGTLLDNECFRISIGLRLGTPLCSEHRCPCGKEVDSFGLHGLSCPRSSGRLFRHGSLNDIIKRALATIDVPALTEPRGISRDDGKRPDGLTLVPWERGRALVWDATCVDTLAPSHIRETMLRAGAAAEKAEAKKITKYSCIMSNYFFVPFAVETLGPWSSGAKSFIKSITPRLIASTGDRRAGSFFAQRIGIAIQMLLAFLPPFHAVKIYTVTSFSSYLYIYI

SEQ ID NO: 17205 - protein, 950 aa, Mellicta athalia
MSNSLKTTNVSQPELFTCPECTNGRLFGGRKGLKIHTTRCHSDLLVHSLPIITDTSSTVTSDNNSVPFEKFILKCHQNIPLVKRVPRGARMSLARSLSAVIKKCISDTDSAWQNLFLFSYKFLHVDKTKNGSLSTKLKQNSLLDIPINIPKNCPRPLYSDSNKIIENKAMDGDLKNAARILFSSDTLAPFDNKTLEALREKHPLPNPASLLPSPPISNNVLQVKDEDTYAAIMSFTSGSASGIDGITPQHLKDLVSVSAGDAGRALLNDITILCNFMLSGKVTSSFLSHIYGARLCAFNKKDGSIRPIAIGTTFRRLASKLACRHIVSTLKSKFQPIQVGFGSKGGCEAAVHAARTFFKSNEAEVLLKVDVKNAFNSLDRATLLNEVSLHLPEIYPYVWQCYSSPSKLLFGENTILSNVGVQQGDPLGPALFSLGIHKCISNLKSKLNIWYLDDGTIGGKVDDVVEDLIKIKNEFDKIGLKLNFSKCEIFFTDLLSLSKINLATELFNKIAPNLKILQKSTLCLVGAPIFDEGIQPILDNKIKIFVENTDKLANLNSHIAYTILKYCLFVPKLMYILRASPIWKFPGLTEKLDATLKNSLEKILNLSFDENSWTQATLPIRDGGIGVRKISSVALPAFLASVHSNKGLCSDILKSNSVEITDATDAIENWRLRCPNGDIPKDVTKQKLWDMPIVHNTHINLTLNLTSDKNRARLLALSNKESGHWLHAMPSKNLGTLLDNESFRVAVGLRLGTPLCFEHRCPCGKEVDSFGLHGLSCNKSSGRFFRHGSLNDTIKRALATIDVPALIEPTGISRDDGKRPDGLTLVTWERGRALLWDATCVDTLAPSHVRETALKAGAAAEKAETTKRHKYSSLIPNYIFVPFAVETLGPWSSSAKKFLNEITPRLIASTGDKRAGAFFAQRIGIAIQRGNAASILGTIPRGHDLYQNYL

SEQ ID NO: 17206 - protein, 950 aa, Mellicta athalia
MSNSFKTTNVSQPELFTCPECTNGRLFRGRKGLKIHTTRCHSDPLVHSLPIITDTSSTVTSDNNSVPFEKFILKCHQNIPLVKRVPRGARVSLARSLSAVIKKCISDTDSAWQNLFLFSYKFLHVDKTKNGSLSTKLKQNSLLDIPIIIPKNCPRPVYSDSNKIIENKAMDGDLKNAARILFSSDTLAPFDNKTLEALREKHPLPNPESLLPSQPISNNVLQVKDEDTYAAIMSFTSGSASGIDGITPQHLKDLVSVSAGDAGRALLNDITNLCNFMLSGKVTSSFVSHIYGARLCAFNKKDGSIRPIAIGTTFRRLASKLACRHIVSTLKTKFQPIQVGFGSKGGCEAAVHAARTFLKSNEAEVLLKVDVKNAFNSLDRATLLNEVSSHLPEIYPYVWQCYSSPSKLLFGENTIFSNVGVQQGDPLGPALFSLGIHKCISNLKSKLNIWYLDDGTIGGKVDDVVEDLIKIKNEFDKIGLKLNFSKCEIFFTDLLSLSKINLATELFNKIAPNLKILQRSTLCLLGAPIFDEGIQPILDNKIKIFVENTDKLGTLNSHIAYTILKYCLFVPKLMYILRTSPVWKFPGLTEKIDATLKNSLEKILNLSFDENSWTQATLPIRDGGIGVRKISSVALPAFLASVHSIKGLCSDILKSNSVEITDATDAIENWKLRCPNGDIPKDVTKQKLWDMPIVHNTHINLTLNLTSDKNRARLLALSNKESGHWLHAMPSKNLGTLLDNESFRIAVGLRLGTPLCFEHRCPCGKEVDSFGLHGLSCNKSSGRFSRHGSLNDTIKRALATIDVPALIEPTGISRDDGKRPDGLTLVPWERGRALLWDATCVDTLAPSHVRETALKAGAAAEKAESTKRHKYSSLIPNYIFVPFAVETLGPWSSSAKKFLNEITPRLIASTGDKRAGAFFAQRIGIAIQRGNAASILGTIPRGHDLYQNYL

SEQ ID NO: 17207 - protein, 860 aa, Mellicta athalia
MSLARSLSAVIKKCISDTDSAWQNLFLFSYKFLHVDKTKNGSLSTKLKQNSLLDIPINIPKNCPRPLYSDSNKIIENKAMDGDLKNAARILFSSDTIAPFDNKTLEALREKHPLPNPASLLPSPPISNNVLQVKDEDTYAAIMSFTSGSASGIDGITPQHLKDLVSVSAGDAGRALLNDITILCNFMLSGKVTSSFLSHIYGARLCAFNKKDGSIRPIAIGTTFRRLASKLACRHIVSTLKSKFQPIQVGFGSKGGCEAAVHAARTFLKSNEAEVLLKVDVKNAFNSLDRATLLNEVSLHLPEIYPYVWQCYSSPSKLLFGENTILSNVGVQQGDPLGPALFSLGIHKCIANLKSKLNIWYLDDGTIGGKVDDVVEDLIKIKTEFDKIGLKLNFSKCEIFFTDLLSLSKINLATELFNKIAPNLKILQRSTLCLLGAPIFDEGMQPILDNKIKIFVENTDKLANLNSHIAYTILKYCLFVPKLIYILRASPIWKFPGLTEKLDATLKNSLEKILNLSFDENSWTQATLPIKDGGIGVRKISSVALPAFLASVHSIKGLCSDILKTNSVKITDATDAIENWKLRCSNGDIPKDVTKQKLWDMPIVHNTHINLTLNLTSDKNRARLLALSNKESGHWLHAMPSKNLGTILDNESFRIAVGLRLGTPLCFEHRCPCGKEVDSFGLHGLSCNKSSGRFSRHGSLNDTIKRALATIDVPALIEPTGISRDDGKRPDGLTLVPWERGRALLWDATCVDTLAPSHVRETALKAGAAAEKAETTKRHKYSSLIPNYIFVPFAVETLGPWSSSAKKFLNEITPRLIASTGDKRAGAFFAQRIGIAIQRGNAASILGTIPRGHDLYHNYL

SEQ ID NO: 17208 - protein, 950 aa, Mellicta athalia
MSNSFKTTNVSQPELFTCPECTNGRLFRGRKGLKIHTTRCHSDPLVHSLPILTDTSSNVTSDNNSVPFEKFILKCHQNIPLVKRVPRGARISLARSLSAVIKKCISDTDSAWQNLFLFSYKFLHVDKTKNGSLSTKLKQNSLLDIPIIIPKNCPRPLYSDSNKIIENKAMDGDLKNAARILFSSDTLAPFDNKTLEALREKHPLPNPESLLPSQPISNNILQVKDEGTYAAIMSFTSGSASGIDGITPQHLKDLVSVSAGDAGRALLNDITNLCNFMLTGKVTSSFVSHIYGARLCAFNKKDGSIRPIAIGTTFRRLASKLACRHIVSTLKTKFQPIQVGFGSKGGCEAAVHAARTFLKSNEAEVLLKVDVKNAFNSLDRATLLNEVSSHLPEIYPYVWQCYSSPSKLLFGENTIFSNVGVQQGDPLGPALFSLGIHKCISNLKSKLNIWYLDDGTIGGKVDDVVEDLIKIKNEFDKIGLKLNFSKCEIFFTDLLSLSKINLATELFNKIAPNLKILQRSTLCLLGAPIFDEGIQPILDNKIKIFVENTDKLGTLNSHIAYTILKYCLFVPKLMYILRTSPIWKFPGLTEKLDATLKNSLEKILNLSFDENSWTQATLPIRDGGIGVRKISSVALPAFLASVHSIKGLCSDILKSNSVEITDATDAIENWKLRCPNGDIPKDVTKQKLWDMPIVHNTHINLTLNLTSDKNRARLLALSNKESGHWLHAMPSKNLGTLLDNESFRIAVGLRLGTPLCFEHRCPCGKEVDSFGLHGLSCNKSSGRFSRHGSLNDTIKRALATIDVPALIEPIGISRDDGKRPDGLTLVPWERGRALLWDATCVDTLAPSHVRETALKAGAAAEKAESTKRHKYSSLIPNYIFVPFAVETLGPWSSSAKKFLIEITPRLIASTGDKRAGAFFAQRIGIAIQRGNAASILGTIPRGHDLYQNYL

SEQ ID NO: 17209 - protein, 952 aa, Nymphalis polychloros
MSCSNNFNNSVPSQPDLLSCYQCCNGRIFKSQKGLKIHTTRCHSLPLGHSSNFIFNGPTVINSDTNSQLQFEQILAKYNQSIPLIKRIPRGARISLARSLSSVIQKCLSNSNSVWQNLFTLSYKFFHVDKAKNGYLSTKLKQNSLDTQISLPKFVSQPLNFDLKKNVENKAMDGDLKNAARILFSSDTLAPFNNKTLESLHEKHPLPNPASVLPNPPSQNNFLQVKDEDTYASIMSFSSGSAGGIDGITPQHLKDLVSASAGDAGRALLGDITKLCNFMLSGKVISSFLPHLYGARLCAFNKKDGSIRPIAIGSTFRRLASKLACRHIVSTLKTKFQPTQLGFGSRGGCEAVVHSTRTFLKGNEAEVLLKVDVKNAFNSIDRATLLNEVSSYLPEIYPYVWQCYSSPSKLFFGEKTINSNVGVQQGDPLGPALFSLGIHNYISDLKSKLNIWYLDDGTIRGKVDDVIEDLIKITERFDKVGLKLNFSKCEIFFTNTLSSNDIYSATELFYKIAPNIKILHKNTLCLLGAPLFDEGIEPVLNDKIKIFLDNVDRLGVLNSHIAYTILKHCLFVPKLMYILRASPVWKFPGLTNKIDAILKDSLEKILNLSLDEYSWTQATLPIRHGGIGVRKISSVALPAFLSSVHSITGLCSHILKSNTLKITNVTEAIENWNVKCPKDDIPKEVTKQKLWDSPLVHVTQQSLNQKLTSANNRARLLALSTKESGHWLHAVPSKNLGTLLDNECFRIAIGLRLGTQLCIEHRCPCGKEVDSFGLHGLSCPRSSGRLFRHSSLNDTIKRALATIDVTALIEPHGISRDDGKRPDSLTLVPWERGRALVWDATCVDTLAPSHIRETMLKAGAATEKAETNKRNKYSSLIQNYIFIPFAVETLGPWSNSAKNFIQNITPRLIASTGDRRAGSFFAQRIGIAIQRGNAASILATIPRGHDLYSKYF

SEQ ID NO: 17210 - protein, 950 aa, Mellicta athalia
MSNSFKTTNVSQPELFTCPECTNGRLFRGRKGLKIHTTRCHSDLLVHSLPIITDTSSTVTSDNNSVPFEKFILKCHQNIPLVKRVPRGARMSLARSLSAVIKKCISDTDSAWQNLFLFSYKFLHVDKTKNGSLSTKLKQNSLLDIPINIPKNCPRPSYSDSNKIIENKAMDGDLKNAARILFSSDTLAPFDNKTLEALREKHPLPNPASLLPSPPISNNVLQVKDEDTYAAIMSFTSGSASGIDGITPQHLKDLVSVSAGDAGRALLNDITILCNFMLSGKVTSSFLSHIYGARLCAFNKKDGSIRPIAIGTTFRRLASKLACRHIVSTLKSKFQPIQVGFGSKGGCEAAVHAARTFLKSNEAEVLLKVDVKNAFNSLDRATLLNEVSLHLPEIYPYVWQCYSSPSKLLFGENTILSNVGVQQGDPLGPALFSLGIHKCIANLKSKLNIWYLDDGTIGGKVDDVVEDLIKIKTEFDKIGLKLNFSKCEIFFTDLLSLSKINLATELFNKIAPNLKILQRSTLCLLGAPIFDEGIQPILDNKIKIFVENTDKLANLNSHIAYTILKYCLFVPKLMYILRASPIWKFPGLAEKLDATLKNSLEKILNLSFDENSWTQATLPIRDGGIGVRKISSVALPAFLASVHSIKGLCSDILKSNSVEITDATDAIENWKLRCSNGDIPKDVTKQKLWDMPIVHNTHINLTLNLTSDKNRARLLALSNKESGHWLHAMPSKNLGTLLDNESFRIAVGLRLGTPLCFEHRCPCGKEVDSFGLHGLSCNKSSGRFSRHGSLNDTIKRALATIDVPALIEPTGISRDDGKRPDGLTLVPWERGRALLWDATCVDTLAPSHIRETALKAGAAAEKAETTKRHKYSSLIPNYIFVPFAVETLGPWSSSAKKFLNEITPRLIASTGDKRAGAFFAQRIGIAIQRGNAASILGTIPRGHDLYHNYL

SEQ ID NO: 17211 - protein, 950 aa, Mellicta athalia
MSNSFKTTNVSQPELFTCPECTNERLFRGRKGLKIHTTRCHSDLLVHSLPIITDTSSTVTSDNNSVPFEKFILKCHQNIPLVKRVPRGARMSLARSLSAVIKKCISDTDSAWQNLFLFSYKFLHIDKTKNGSLSTKLKQNSYLDIPINIPKNCPRPLYSDSNKIIENKAMDGDLKNAARILFSSDTLAPFDNKTLEALREKHPLPNPASLLPSPPISNNVLQVKDEDTYAAIMSFTSGSASGIDGITPQHLKDLVSVSAGDAGRALLNDITILCNFMLSGKVTSSFLSHIYGARLCAFNKKDGSIRPIAIGTTFRRLASKLACRHIVSTLKSKFQPIQVGFGSKGGCEAAVHAARTFLKSNEAEVLLKVDVKNAFNSLDRATLLSEVSLHLPEIYPYVWQCYSSPSKLLFGENTILSNVGVQQGDPLGPALFSLGIHKCIANLKSKLNIWYLDDGTIGGKVDDVVEDLIKIKNEFDKIGLKLNFSKCEIFFTDLLSLSKIKLATELFNKIAPNLKILQRSTLCLLGAPIFDEGIEPILDSKIKIFVENTDKLANLNSHIAYTILKYCLFVPKLMYILRASPIWKFPELTEKLDATLKNSFEKILNLSFDENSWTQATLPIRDGGIGVRKISSVALPAFLASVHSIKGLCSDILKSNSVEITDATDAIENWKLRCPNGDIPKDVTKQKLWDMPIVHNNHINLTLNLTSDKNRARLLALSNKESGHWLHAMPSKNLGTLLDNESFRVAVGLRLGTPLCFEHRCPCGKEVDSFGLHGLSCNKSSGRFSRHGSLNDTIKRALATIDVPALIEPTGISRDDGKRPDGLTLVPWERGRALLWDATCVDTLAPSHVRETALKAGAAAEKAETTKRHKYSSLIPNYIFVPFAVETLGPWSSSAKNFLNEITPRLIASTGDKRAGAFFAQRIGIAIQRGNAASILGTIPRGHDLYQNYL

SEQ ID NO: 17212 - protein, 950 aa, Mellicta athalia
MSNSFKTTNVSQPELFTCPECTNGRLFRGRKGLKIHTTRCHSDLLVHSLPIITDTSSTVTSDNNSVPFEKFILKCHQNIPLVKRVPRGARMSLARSLSAVIKKCISDTDSAWQNLFLFSYKFLHVDKTKNGSLSTKLKQNSLLDIPINIPKNCPRPLYSDSNKIIENKAMDGDLKNAARILFSSDTLAPFDNKTLEALREKHPLANPASLLPSPPISNNVLQVKDEDTYAAIMSFTSGSASGIDGITPQHLKDLVSVSAGDAGRALLNDITILCNFMLSGKVTSSFLSHIYGARLCAFNKKDGSIRPIAIGTTFRRLASKLACRHIVSTLKSKFQPIQVGFGSKGGCEAAVHAARTFLKSNEAEVLLKVDVKNAFNSLDRATLLNEVSLHLPEIYPYVWQCYSSPSKLLFGENTILSNVGVQQGDPLGPALFSLGIHKCIANLKSKLNIWYLDDGTIGGKVDDVVEDLIKIKNEFDKIGLKLNFSKCEIFFTDLLSLSKINLATELFNKIAPNLKILQRSTLCLLGAPIFDEGIQPILDNKIKIFVENTDKLANLNSHIAYTILKYCLFVPKLMYILRASPIWKFPGLTEKLDATLKNSLEKILNLSFDENSWTQATLPIRDGGIGVRKISSVALPAFLASVHSIKGLCSDILKSNSVEITDATDAIENWKLRCPNGDIPKDVTKQKLWDMPIVHNTHINLTLNLTSDKNRARLLALSNKESGHWLHAMPSKNLGTLLDNESFRVAVGLRLGTPLCFEHRCPCGKEVDSFGLHGLSCNKSSGRFSRHGSLNDTIKRALATIDVPALIEPTGISRDDGKRPDGLTLVPWERGRALLWDATCVDTLAPSHVRETALKAGAAAEKAETMKRHKYSSLIPNYIFVPFAVETLGPWSSSAKKFLNEITPRLIASTGDKRAGAFFAQRIGIAIQRGNAASILGTIPRGHDLYQNYL

SEQ ID NO: 17213 - protein, 950 aa, Mellicta athalia
MSNSFKTTNVSQPELFTCPECTNGRLFRGRKGLKIHTTRCHSDLLVHSLPIITDTSSTVTSDNNSVPFEKFILKCHQNIPLVKRVPRGARMSLARSLSAVIKKCISDTDSAWQNLFLFSYKFLHVDKTKNGSLSTKLKQNSLLDIPINIPKNCPRPLYSDSNKIIENKAMDGDLKNAARILFSSDTLAPFDNKTLEALREKHPLPNPASLLPSPPISNNVLQVKDEDTYAAIMSFTSGSASGIDGITPQHLKDLVSVSAGDAGRALLNDITILCNFMLSGKVTSSFLSHIYGARLCAFNKKDGSIRPIAIGTTFRRLASKLACRHIVSTLKSKFQPIQVGFGSKGGCEAAVHAARTFLKSNEAEVLLKVDVKNAFNSLDRATLLNEVSLHLPEIYPYVWQCYSSPSKLLFGENTILSNVGVQQGDPLGPALFSLGIHKCIANLKSKLNIWYLDDGTIGGKVDDVVEDLIKIKTEFDKIGLKLNFSKCEIFFTDLLSLSKINLATELFNRIASNLKILQRSTLCLLGAPIFDEGIQPILDNKIKIFVENTDKLANLNSHIAYTILKYCLFVPKLMYILRASPIWKFPGLTEKLDATLKNSLEKILNLSFDENSWTQATLPIRDGGIGVRKISSVALPAFLASVHSIKGLCSDILKSNSVEITDATDAIENWKLRCSNGDIPKDVTKQKLWDMPIVHNTHINLTLNLTSDKNRARLLALSNKESGHWLHAMPSKNLGTLLDNESFRIAVGLRLGTPLCFEHRCPCGKEVDSFGLHGLSCNKSSGRFSRHGSLNDTIKRALATIDVPALIEPTGISRDDGKRPDGLTLVPWERGRALLWDATCVDTLAPSHVRETALKAGAAAEKAETTKRHKYSSLIPNYIFVPFAVETLGPWSSSAKKFLNEITPRLIATTGDKRAGAFFAQRIGIAIQRGNAASILGTIPRGHDLYHNYL

SEQ ID NO: 17214 - protein, 930 aa, Nymphalis polychloros
MSCSNNFNNSVPSQPDLLSCYQCCNGRIFKSQKGLKIHTTRCHSLPLGHSSNFIFNGPTVINSDTNSQLQFEQILAKYNQSIPLIKRIPRGARISLARSLSSVIQKCLSNSNSEWQNLFTFSYNFFHVDKAKNGSLSTKLKQNSLDTQISLPKFVSRPLNFDLKKNVENKAMDGDLKNAARILFSSDALAPFNNKTLESLHEKHPLPNPASVLPNPPSQNTFLQVKDEDTYASIMSFSSGSAGGIDGITPQHLKDLVSASAGDAGRALLGDITKLCNFILSGKVISSFLPHLYGARLCAFNKKDGSIRPIAIGSTFRRLASKLACRHIVSTLKTKFQSTQLGFGSRGGCEAAVHSTRTFLKGNEAEVLLKVDVKNAFNSIDRATLLNEVSSYLPEIYPYVWQCYSSPSKLFFGEKTINSNVGVQQGDPLGPALFTLGIHNYISDLKSKLNIWYLDDGTIGGKVDDVIEDLIKITERFDKVGLKLNFSKCEIFFTNTLSSNDIYSATELFYKIAPNIKILHKNTLCLLGAPLFDEGIEPVLNDKIKIFLDNVDRLGFLNSHIAYTILKHCLFVPKLMYILRASQVWKFPGLTNKIDAILKDSLEKILNLSLDEYSWTQATLPICHGGIGVWKISSVALPAFLSSVHSITGLCSHILKSNTLKITNVTEAIENWKVKCPNDDIPKEVTKQKLWDSPLVHVTQQSLNQNLTSANNRARLLALSTKESGHWLHAVPSKNLGTLLNNECFRIAIGLRLGTQLCIEHRCPCGKEVDSFGLHGLSCPRSSGRLFRDSSLNDTIKRALATIDVPALIEPHGISSDDGKRPDGLTLVPWERGRPLVWDATCVDTLAPSHIRETMLKAGAAAEKAETNKRNKYSSLIQNYIFIPFAVETLGPWSNSAKNFIQNITPRLIASTGDHAVTICIVNIFNFHLY

SEQ ID NO: 17215 - protein, 950 aa, Mellicta athalia
MSNSFKTTNVSQPELFTCPECTNGRLFRGRKGLKIHTTRCHSDLLVHSLPIITDTSSTVTSDNNSVPFEKFILKCHQNIPLVKRVPRGARMSLARSLSAVIKKCISDTDSAWQNLFLFSYKFLHVDKTKNGSLSTKLKQNSLLDIPINIPKNCPRPLYSDSNKIIENKAMDGDLKNAARILFSSDTLAPFDNKTLEALREKHPLPNPASLLPSPPISNNVLQVKDEDTYAAIMSFTSGSASGIDGITPQHLKDLVSVSAGDAGRALLNDITILCNFMLSGKVTSSFLSHIYGARLCAFNKKDGSIRPIAIGTTFRRLASKLACRHIVSTLKSKFQPIQVGFGSKGGCEAAVHAARTFLKSNEAEVLLKVDVKNAFNSLDRATLLNEVSLHLPEIYPYVWQCYSSPSKLLFGENTILSNVGVQQGDPLGPALFSLGIHKCIANLKSKLNIWYLDDGTIGGKVDDVVEDLIKIKNEFEKIGLKLNFSKCEIFFTDLLSLSKINLATELFNKIAPNLKILQRSTLCLLGAPIFDEGIQPILDNKIKIFVENTDKLANLNSHIAYTILKYCLFVPKLMYILRASPIWKFPGLTEKLDATLKNSLEKILNLSFDENSWTQATLPIRDGGIGVRKISSVALPAFLASVHSIKGLCSDILKSNSVEITDATDAIENWKLRCPNGDIPKDVTKQKLWDMPIVHNTHINLTLNLTSDKNRARLLALSNKESGHWLHAMPSKNLGTLLDNESFRVAVGLRLGTPLCFEHRCPCGKEVDSFGLHGLSCNKSSGRFSRHGSLNDTIKRALATIDVPALIEPTGISRDDGKRPDGLTLVPWERGRALLWDATCVDTLAPSHVRETALKAGAAAEKAETMKRHKYSSLIPNYIFVPFAVETLGPWSSSAKKFLNEITPRLIASTGDKRAGAFFAQRIGIAIQRGNAASILGTIPRGHDLYQNYL

SEQ ID NO: 17216 - protein, 950 aa, Mellicta athalia
MSNSFKTTNVSQPELFTCPECTIGRLFRGRKGLKIHTTRCHSDLLVHSLPIITDTSSTVTSDNNSVPFEKFILKCHQNIPLVKRVPRGARMSLARSLSAVIKKCISDTDSAWQNLFLFSYKFLHVDKTKNGSLSTKLKQNSLLDIPINIPKNCPRPLYSDSNKIIENKAMDGDLKNAARILFSSDTLAPFDNKTLEALREKHPLPNPASLLPSPPISNNVLQVKDEDTYAAIMSFTSGSASGIDGITPQHLKDLVSVSAGDAGRALLNDITILCNFMLSGKVTSSFLSHIYGARLCAFNKKDGSIRPIAIGTTFRRLASKLACRHIVSTLKSKFQPIQVGFGSKGGCEAAVHAARTFLKSNEAEVLLKVDVKNAFNSLDRATLLNEVSLHLPEIYPYVWQCYSSPSKLLFGENTILSNVGVQQGDPLGPALFSLGIHKCIANLKSKLNIWYLDDGTIGGKVDDVVEDLIKIKNEFDKIGLKLNFSKCEIFFTDLLSLSKINLATELFNKIAPNLKILQRSTLCLLGAPIFDEGIQPILDNKIKIFVENTDKLANLNSHIAYTILKYCLFVPKLMYILRASPIWKFPGLTEKLDATLKNSLEKILNLSFDENSWTQATLPIRDGGIGVRKISSVALPAFLASVHSIKGLCSDILKSNSVEITDATDAIENWKLRCPNGDIPKDVTKQKLWDMPIVHNTHINLTLNLTSDKNRARLLALSNKESGHWLHAMPSKNLGTLLDNESFRVAVGLRLGTPLCFEHRCPCGKEVDSFGLHGLSCNKSSGRFSRHGSLNDTIKRALATIDVPALIEPTGISRDDGKRPDGLTLVPWERGRALLWDATCVDTLAPSHVRETALKAGAAAEKAETMKRHKYSSLIPNYIFVPFAVETLGPWSSSAKKFLNEITPRLIASTGDKRAGAFFAQRIGIAIQRGNAASILGTIPRGLDLYQNYL

SEQ ID NO: 17217 - protein, 950 aa, Mellicta athalia
MSNSFKTTNVSQPELFTCPECTNGRLFRGRKGLKIHTTRCHSDLLVHSLPIITDTSSTVTSDNNSVPFETFILKCHQNIPLVKRVPRGARMSLARSLSAVIKKCISDTDSAWQNLFLFSYKFLHVDKTKNGSLSTKLKQNSLLDIPINIPKNCPRPLYSDSNKIIENKAMDGDLKNAARILFSSDTLAPFDNKTLEALREKHPSPNPASLLPSPPISNNVLQVKDEDTYAAIMSFTSGSASGIDGITPQHLKDLVSVSAGDAGRALLNDITILCNFMLSGKVTSSFLSHIYGARLCAFNKKDGSIRPIAIGTTFRRLASKLACRHIVSTLKSKFQPIQVGFGSKGGCEAAVHAARTFLKSNEAEVLLKVDVKNAFNSLDRATLLNEVSLHLPEIYPYVWQCYSSPSKLLFGENTILSNVGVQQGDPLGPALFSLGIHKCIANLKSKLNIWYLDDGTIGGKVDDVVEDLIKIKTEFDKIGLKLNFSKCEIFFTDLLSLSKINLATELFNKIAPNLKILQRSTLCLLGAPIFDEGIQPILDNKIKIFVENTDKLANLNSHIAYTILKYCLFVPKLMYILRASPIWKFPGLTEKLDATLKNSLEKILNLSFDENSWTQATLPIRDGGIGVRKISSVALPAFLASVHSIKGLCSDILKSNSVEITDATDAIENWKLRCSNGDIPKDVTKQKLWDMPIVHNTHINLTLNLTSDKNRARLLALSNKESGHWLHAMPSKNLGTLLDNECFRIAVGLRLGTPLCFEHRCPCGKEVDSFGLHGLSCNKSSGRFSRHGSLNDTIKRALATIDVPALIEPTGISRDDGKRPDGLTLVPWERGRALLWDATCVDTLAPSHVRETALKAGAAAEKAETTKRHKYSSLIPNYIFVPFAVETLGPWSSSAKKFLNEITPRLIASTGDKRAGAFFAQRIGIAIQRGNAASILGTIPRGHDLYHNYL

SEQ ID NO: 17218 - protein, 950 aa, Mellicta athalia
MSNSSKTTNVSQPELFTCPECTNGKLFRGRKGLKIHTTRCHSDLLVHSLPIITDTSSTVTSDNNSVPFEKFILKCHQNIPLVKRVLRGARMSLARSLSAVIKKCISDTDSAWQNLFLFSYKFLHVDKTKNGSLSTKLKQNSLLDIPINIPKNCPRPLYSDSNKIIENKAMDGDLKNAARILFSSDTLAPFDNKTLEALREKHPLPNPASLLPSPPISNNVLQVKDEDTYAAIMSFTSGSASGIDGITPQHLKDLVSVSAGDAGRALLNDITILCNFMLSGKVTSSFLSHIYGARLCAFNKKDSSIRPIAIGTTFRRLASKLACRHIVSTLKSKFQPIQVGFGSKGGCEAAVHAARTFLKSNEAEVLLKVDVKNAFNSLDRATLLNEVSLHLPEIYPYVWQCYSSPSKLLFGENTILSNVGVQQGDPLGPALFSLGIHKCIANLKSKLNIWYLDDGTIGGKVDDVVEDLIKIKTEFDKIGLKLNFSKCEIFFTDLLSLSKINLATELFNKIAPNLKILQRSTLCLLGAPIFDEGIQPILDNKIKIFVENTDKLANLNSHIAYTILKYCLFVPKLMYILRASPIWKFPGLTEKLDATLKNSLEKILDLSFDENSWTQATLPIRDGGIGVRKISSVALPAFLASVHSIKGLCSDILKSNSVEITDATDAIENWKLRCSNGDIPKDVTKQKLWDMPIVHNTHINLTLNLTSDKNRARLLALSNKESGHWLHAMPSKNLGTLLDNESFRIAVGLRLGTPLCFEHRCPCGKEVDSFGLHGLSYNKSSGRFSRHGSLNDTIKRALATIDVPALIEPTGISRDDGKRPDGLTLVPWERGRALLWDATCVDTLAPSHVRETALKAGAAAEKAETTKRHKYSSLIPNYIFVPFAVETLGPWSSSAKKFLNEITPRLIASTGDKRAGAFFAQRIGIAIQRGNAASILGTIPRGHDLYHNYL

SEQ ID NO: 17219 - protein, 860 aa, Mellicta athalia
MSLARSLSAVIKKCISDTDSAWQNLFLFSYKFLHVDKTKNGSLSTKLKQNSLLDIPIIIPKNCPRPLYSDSNKIIENKAMDGDLKNAARILFSSDTLAPFDNKTLEALREKHPLPNPESLLPSQPISNNVLQVKDEDTYAAIMSFTSGSASGIDGITPQHLKDLVSVSAGDAGRALLNDITNLCNFMLTGKVTSSFVSHIYGARLCAFNKKDGSIRPIAIGTTFRCLASKLACRHIVSTLKTKFQPIQVGFGSKGGCEAAVHAARTFLKSNEAEVLLKVDVKNAFNSLDRATLLNEVSSHLPEIYPNVWQCYSSPSKLLFGENTIFSNVGVQQGDPLGPALFSLGIHKCISNLKSKLNIWYLDDGTIGGKVDDVVEDLIKIKNEFDKIGLKLNFSKCEIFFTDLLSLSKINLATELFNKIAPNLKILQRSTLCLLGAPIFDEGIQPILDNKIKIFVENTDKLGTLNSHIAYTILKYCLFVPKLMYILRTSPIWKFPGLTEKLDATLKNSLEKILNLSFDENSLTQATLPIRDGGIGVRKISSVALPAFLASVHSIKGLCSDILKSNSVEITDATDAIENWKLRCPNGDIPKDVTKQKLWDMPIVHNTHINLTLNLTSDKNRARLLALSNKESGHWLHAMPSKNLGTLLDNESFRIAVGLRLGTPLCFEHRCPCGKEVDSFGLHGLSCNKSSGRFSRHGSLNDTIKRALATIDVPALIEPTGISRDDGKRPDGLTLVPWERGRALLWDATCVDTLAPSHVRETALKAGAAAEKAESTKRHKYSSLIPNYIFVPFAVETLGPWSSSAKKFLIEITPRLIASTGDKRAGAFFAQRIGIAIQRGNAASILGTIPRGHDLYQNYL

SEQ ID NO: 17220 - protein, 947 aa, Melitaea cinxia
MSNSFKTTNVSQPELFTCPECTNGKLFRGRKGLKIHTTRCHSDPLVHSLPILTDTSSIVTSDCDSVPFEKFILKCHQNIPLVKRVPRGARMSLARSLSSVIKKCISDTDSAWQNLFLFSYKFLYVDKTKSGSLSTKLKQNSLLDIPIIIPKNPRPLYSDSSKIIENKAMDGDLKNAARILFSSDTLAPFDNKTLEALREKHPLPNPASLLPSPPIFNNVLQVKDEDTYAAIMSFTSGSASGIDGITPQHLKDLVSISAGDAGRALLNDITNLCNFMLSGKVSSSFLSHIYGARLCAFNKKDGSIRPIAIGTTFRRLASKLACRHIVSSLKTKFQPIQLGFGSKGGCEAAVHAARTFLKSNEAEVLLKVDVKNAFNSLDRATLLNEVSLHLPEIYPYVWQCYSSPSKLLFDENTIFSNVDVQQGDPLGPALFSLGIHKCISNLKSKLNIWYLDDGTIGGKVDDVVEDLIKIKNEFDKIGLKLNFSKCEIFFTDLLSLSKINLATELFNKIAPNLKILQRSTLCLLGAPLFDEGIQPILDNKIKIFVENTDKLGTLNSHIAYTILKYCLFVPKLMYILRASPIWKFPGMTEKLDAKNSLEKILNLSFDENSWTQATLPIRDGGIGVRKISSVALPAFLASVHSIKGLCSDILKSNSVQITDATDAIENWKLMCPNGDIPKDVTKQKLWDIPIVHNTHISLTQNLTSDKNRARLLAVSNKESGHWLHAMPSKNLGTLLDNESFRIALGLRLGAPLCFEHRCPCGKEVDSFGLHGLSCNKSSGRFSRHGSLNDTIKRALATIDVPALIEPTGISRNDGKRPDGLTLVPWERGRALLWDATCVDTLAPSHVRETALKAGAAAEKAETAKRHKYSSLIPNYIFVPFAVETLGPWSSSAKNFLNEITPRLIASTGDKRAGAFFAQRIGIAIQRGNAASILGTIPRGHDLYQNYL

SEQ ID NO: 17221 - protein, 952 aa, Fabriciana adippe
MSCNTNSVRSVVSQSELLECPQCANGRLFKGQKGLKIHISRSHGLPSSVQTVPVNSSVSDSSNQNYKNPFEILIPKCHQSIPLIKRIPRGARISLARSLSSAIQKCISFNSNSSWQNLFLFAYTHLHVDKNQNGSLCSKLKQNSSTVLNEIRTPNYNSRPRNFDLKKIVENKAMDGDLKNAARILFSSDTLAPFDNDTLQVLHDKHPSPNSDPSLPIPLPDYSQTLQIKDEDTFAAIMSFTSGSAGGIDGITPQHLKDLVSASAGDAGRVLLGDITKLCNFMLSGKVISSFTQYLYGARLCAFNKKDGGIRPIAVGSTFRRLVSKLACRRIVCNLKAKFQPIQLGFGSKGGCEAAVHATRTFLAKGEEEVLLKVDVKNAFNSLDRAALLNETHSNLPEIYPYIWQCYNTPSKLLFGDKTIISNVGVQQGDPLGPALFSLGIHKYISNLQSKLNIWYLDDGTIGGKANDVLKDFLFLKENFGKIGLELNLSKCEIFFTDNISIEKLSLARDIFRKIAHNIKIVDKSTLCLLGAPLLDESIPLVVEEKIKTFLDSTLKLGSLNSHIAFTILKYCLFVPKLTYILRSSPIWKFPGLTDKMDAILKNSLEKILNLSFDECSWTQASLPIRNGGIGVRQISSIALPAFLASEHSVRELCSQILKSNQNITDAAEALEKWKSKCPNVDIPKEVSMQKLWDAPLVHSIFQNLAQNLSSDVNRARLLASSAKESGHWLHALPSTNLGTLLDNDSFRIALGLRLGTPLCTEHRCPCGKEVDCYGLHGLSCRRSSGRLFRHSSLNDTIKRALATIDIPALIEPSGISRDDGKRPDGLSLVPWERGRALLWDATCVDTLAPSHVRETASKVGAAAEMAELLKLRKYASLSQNYVFIPFAVETLGPWSQSAKHFLKDITPRLIASTGDRRAGAFFAQRIGIAIQRGNAASILATIPRGHDLYSN

SEQ ID NO: 17222 - protein, 952 aa, Fabriciana adippe
MSCNTNSVRSVVSQSELLECPQCANGRLFKGQKGLKIHISRSHGLPSSVQTVPVNSLVSDSSNQNYKNPFEILIPKCHQSIPLIKRIPRGARISLARSLSSAIQKCISFNSNSSWQNLFLFAYTHLHVDKNQNGSLCSKLKQNSSTVLNEIRTPNYNSRPRNFDLKKIVENKAMDGDLKNAARILFSSDTLAPFDNDTLQVLHDKHPSPNSDPSLPIPLPDYSQTLQIKDEDTFAAIMSFTSGSAGGIDGITPQHLKDLVSASAGDAGRVLLGDITKLCNFMLSGKVISSFTQYLYGARLCAFNKKDGGIRPIAVGSTFRRLVSKLACRRIVCNLKAKFQPIQLGFGSKGGCEAAVHATRTFLAKGEEEVLLKVDVKNAFNSLDRAALLNEAHSNLPEIYPYIWQCYNTPSKLLFGDKTIISNVGVQQGDPLGPALFSLGIHKYISNLQSKLNIWYLDDGTIGGKANDVLKDFLFLKENFGKIGLELNLSKCEIFFTDNISIEKLSLARDIFRKIAHNIKIVDKSTLCLLGAPLLDESIPLVVEEKIKTFLDSTLKLGSLNSHIAFTILKYCLFVPKLTYILRSSPIWKFPGLTDKMDATLKNSLEKILNLSFDECSWTQASLPIRNGGIGVRQISSIALPAFLASEHSVRELCSQILKSNQNITDAAEALEKWKSKCPNVDIPKEVSMQKLWDAPLVHSIFQNLAQNLSSDVNRARLLASSAKESGHWLHALPSTNLGTLLDNDSFRIALGLRLGTPLCTEHRCPCGKEVDCYGLHGLSCRRSSGRLFRHSSLNDTIKRALATIDIPALIEPSGISRDDGKRPDGLSLVPWERGRALLWDATCVDTLAPSHVRETASKVGAAAEMAELLKLRKYASLSQNYVFIPFAVETLGPWSQSAKHFLKDITPRLIASTGDRRAGAFFAQRIGIAIQRGNAASILATIPRGHDLYSN

SEQ ID NO: 17223 - protein, 952 aa, Fabriciana adippe
MSCNTNSVRSVVSQSELLECPQCANGRLFKGQKGLKIHISRSHGLPSSVQTVPVNSSVSDSSNQNYKDPFEILIPKCHQSIPLIKRIPRGARISLARSLSSAIQKCISFNSNSSWQNLFLFAYTHLHVDKNQNGSLCSKLKQNSSTVLNEIRTPNYNSRPRNFDLKKFVENKAMDGDLKNAARILFSSDTLAPFDNDTLQVLHDKHPSPNSDPSLPIPLPDYSQTLQIKDEDTFAAIMSFTSGSAGGIDGITPQHLKDLVSASAGDAGRVLLGDITKLCNFMLSGKVISSFTQYLYGARLCAFNKKDGGIRPIAVGSTFRRLVSKLACRRIVCNLKAKFQPIQLGFGSKGGCEAAVHATRTFLAKGEEEVLLKVDVKNAFNSLDRAALLNEAHSNLPEIYPYIWQCYNTPSKLLFGDKTIISNVGVQQGDPLGPALFSLGIHKYISNLQSKLNIWYLDDGTIGGKANDVLKDFLFLKENFGKIGLELNLSKCEIFFTDNISIEKLSLARDIFRKIAHNIKIVDKSTLCLLGAPLLDESIPLVVEEKIKTFLDSTLKLGSLNSHIAFTILKYCLFVPKLTYILRSSPIWKFPGLTDKMDATLKNSLEKILNLSFDECSWTQASLPIRNGGIGVRQISSIALPAFLASEHSVRELCSQILKSKQNITDAAEALEKWKSKCPNVDIPKEVSMQKLWDAPLVHSIFQNLAQNLSSDVNRARLLASSAKESGHWLHALPSTNLGTLLDNDSFRIALGLRLGTPLCTEHRCPCGKEVDCYGLHGLSCRRSSGRLFRHSSLNDTIKRALATIDIPALIEPSGISRDDGKRPDGLSLVPWERGRALLWDATCVDTLAPSHVRETASKVGAAAEMAELLKLRKYASLSQNYVFIPFAVETLGPWSQSAKHFLKDITPRLIASTGDRRAGAFFAQRIGIAIQRGNAASILATIPRGHDLYSN

SEQ ID NO: 17224 - protein, 952 aa, Fabriciana adippe
MSCNTNSVRSVVSQSELLECPQCANGRLFKGQKGLKIHISRSHGLPSSVQTVPVNSSVSDSSNQNYKNPFEILIPKCHQSIPLIKRIPRGARISLARSLSSAIQKCISFNSNSSWQNLFLFAYTHLHVDKNQNGSLCSKLKQNSSTVLNEIRTPNYNSRPRNFDLKKIVENKAMDGDLKNAARILFSSDTLAPFDNDTLQVLHDKHPSPNSDPSLPIPLPDYSQTLQIKDEDTFAAIMSFTSGSAGGIDGITPQHLKDLVSASAGDAGRVLLGDITKLCNFMLSGKVISSFTQYLYGARLCAFNKKDGGIRPIAVGSTFRRLVSKLACRRIVCNLKAKFQPIQLGFGSKGGCEAAVHATRTFLAKGEEEVLLKVDVKNAFNSLDRAALLNEAHSNLPEIYPYIWQCYNTPSKLLFGDKTIISNVGVQQGDPLGPALFSLGIHKYISNLQSKLNIWYLDDGTIGGKANDVLKDFLFLKENFGKIGLELNLSKCEIFFTDNISIEKLSLARDIFRKIAHNIKIVDKSTLCLLGAPLLDESIPLVVEEKIKTFLDSTLKLGSLNSHIAFTILKYCLFVPKLTYILRSSPIWKFPGLTDKMDATLKNSLEKILNLSFDECSWTQASLPIRNGGIGVRQISSIALPAFLASEHSVRELCSQILKSNQNITDAAEALEKWKSKCPNVDIPKEVSMQKLWDAPLVHSIFQNLAQNLSSDVNRARLLASSAKESGHWLHALPSTNLGTLLDNDSFRIALGLRLGTPLCTEHRCPCGKEVDCYGLHGLSCRRSSGRLFRHSSLNDTIKRALATIDIPALIEPSGISRDDGKRPDGLSLVPWERGRALLWDATCVDTLAPSHVRETASKVGAAAEMAELLKLRKYASLSQNYVFIPFAVETLGPWSQSAKHFLKDITPRLIASTGDRRAGAFFAQRIGIAIQRGNAASILATIPRGHDLYSN

SEQ ID NO: 17225 - protein, 952 aa, Fabriciana adippe
MSCNTNSVRSVVSQSELLECPQCANGRLFKGQKGLKIHISRSHGLPSSVQTVPVNSSVSDSSNQNYKNSFEILIPKCHQSIPLIKRIPRGARISLARSLSSAIQKCISFNSNSSWQNLFLFAYTHLHVDKNQNGSLCSKLKQNSSTVLNEIRTPNYNSRPRNFDLKKIVENKAMDGDLKNAARILFSSDTLAPFDNDTLQVLHDKHPSPNSDPSLPIPLPDYSQTLQIKDEDTFAAIMSFTSGSAGGIDGITPQHLKDLVSASAGDAGRVLLGDITKLCNFMLSGKVISSFTQYLYGARLCAFNKKDGGIRPIAVGSTFRRLVSKLACRRIVCNLKAKFQPIQLGFGSKGGCEAAVHATRTFLAKGEEEVLLKVDVKNAFNSLDRAALLNEAHSNLPEIYPYIWQCYNTPSKLLFGDKTIISNVGVQQGDPLGPALFSLGIHKYISNLQSKLNIWYLDDGTIGGKANDVLKDFLFLKENFGKIGLELNLSKCEIFFTDNISIEKLSLARDIFRKIAHNIKIVDKSTLCLLGAPLLDESIPLVVEEKIKTFLDSTLKLGSLNSHIAFTILKYCLFVPKLTYILRSSPIWKFPGLTDKMDATLKNSLEKILNLSFDECSWTQASLPIRNGGIGVRQISSISLPAFLASEHSVRELCSQILKSNQNITDAAEALEKWKSKCPNVDIPKEVSMQKLWDAPLVHSIFQNLAQNLSSDVNRARLLASSAKESGHWLHALPSTNLGTLLDNDSFRIALGLRLGTPLCTEHRCPCGKEVDCYGLHGLSCRRSSGRLFRHSSLNDTIKRALATIDIPALIEPSGISRDDGKRPDGLSLVPWERGRALLWDATCVDTLAPSHVRETASKVGAAAEMAELLKLRKYASLSQNYVFIPFAVETLGPWSQSAKHFLKDITPRLIASTGDRRAGAFFAQRIGIAIQRGNAASILATIPRGHDLYSN

SEQ ID NO: 17226 - protein, 948 aa, Vanessa cardui
MLYSNNDRTIINSQPDLLTCPQCTNGRLFRSQKGLKIHTTRCHSLPLEKSNDTFSILPTNSNSDTDSINFENILTKCHKNIPLVKRIPRGARISLARSLSIVLQNCLSNSNSAWQNLFTFSFKFFHVDKTKNGSLSTKLKQNSLLDKQISIPKYSSRPQKFDIKKNVENKAMDGDFKNAARLLFSSDTIAPFNDITLETLQEKHPLPYPTTVLPPPPTQNNFLQVKDEDTYAAIMSFSSGSASGIDGITPQHLKDLVSASAGDAGRALLSDITNLCNFMLSGKVISSFLPHLYGARLCAFNKKDGSIRPIAIGTTFRRLASKLACRHIVSTLKTKFQPIQLGFGSRGGCEAAVHSTRTFLKGNEAEVLLKVDVKNAFNSLDRGTLLNEVFSNLPEIYPYVWQCYSSPSKLFFGEDTIHSNVGVQQGDPLGPALFSLGIHSCISNLKSKLNVWYLDDGTIGGKVDDVIEDLIKIKEQFDKIGLKLNFSKCEIFFTDNLTHKNISLAIDKFNKIAPNIKILHKDTLCLLGAPLFDEGIEPSLNEKIKIFSDNFDRLGILNSHIAYTILKHCLFVPKLMYILRASPIWKYPSLTNQIDATLEKALEKILNLSLDEYSWTQATLPIPFGGIGVRKISSVALPAFLSSVHSISDLCSEILKSKSVKIMNVTEAIETWKVKCPNDDIPKEVTKLWDSSLVHATLHSLTQNLTSAQDRARLLALSSKESSHWLNSLPSKNLGTLLDNECFRISIGLRLGTPLCSEHRCPCGKEVDSFGLHGLSCPRSSGRLFRHGSLNDIIKRALATIDVPALTEPRGISRDDGKRPDGLTLVPWERGRALVWDATCVDTLAPSHIRETMLRAGAAAEKAEAKKITKYSCIMSNYFFVPFAVETLGPWSSGAKSFIKSITPRLIASTGDRRAGSFFAQRIGIAIQRGNAASILATIPRGQDLYSN

SEQ ID NO: 17227 - protein, 951 aa, Mellicta athalia
MSNSFKTTNVSQPELFTCPECTNGRLFRGRKGLKIHTTRCHSDLLVHSLPIITDTSSTVTSDNNSVPFEKFILKCHQNIPLVKRVPRGARMSLARSLSAVIKKCISDTDSAWQNLFLFSYKFLHVDKTKNGSLSTKLKQNSLLDIPINIPKNCPRPLYSDSNKIIENKAMDGDLKNAARILFSSDTLAPFDNKTLEALREKHPLPNPASLLPSPPISNNVLQVKDEDTYAAIMSFTSGSASGIDGITPQHLKDLVSVSAGDAGRALLNDITILCNFMLSGKVTSSFLSHIYGARLCAFNKKDGSIRPIAIGTTFRRLASKLACRHIVSTLKSKFQPIQVGFGSKGGCEAAVHAARTFLKSNEAEVLLKVDVKNAFNSLDRATLLNEVSLHLPEIYPYVWQCYSSPSKLLFGENTILSNVGVQQGDPLGPALFSLGIHKCIANLKSKLNIIWYLDDGTIGGKVDDVVEDLIKIKTEFDKIGLKLNFSKCEIFFTDLLSLSKINLATELFNKIAPNLKILQRSTLCLLGAPIFDEGIQPILDNKIKIFVENTDKLANLNSHIAYTILKYCLFVPKLMYILRASTIWKFPGLTEKLDATLKNSLEKILNLSFDENSWTQATLPIRDGGIGVRKISSVALPAFLASVHSIKGLCSDILKSNSVEITDATDAIENWKLRCSNGDIPKDVTKQKLWDMPIVHNTHINLTLNLTSDKNRARLLALSNKESGHWLHAMPSKNLGTLLDNESFRIAVGLRLGTPLCFEHRCPCGKEVDSFGLHGLSCNKSSGRFSRHGSLNDTIKRALATIDVPALIEPTGISRDDGKRPDGLTLVPWERGRALLWDATCVDTLAPSHVRETALKAGAAAEKAETTKRHKYSSLIPNYIFVPFAVETLGPWSSSAKKFLNEITPRLIASTGDKRAGAFFAQRIGIAIQRGNAASILGTIPRGHDLYHNYL

SEQ ID NO: 17228 - protein, 951 aa, Mellicta athalia
MSNSFKTTNVSQPELFTCPECTNGRLFRGRKGLKIHSTRCHSDPLVHSLPILTDTSSTVTSDNNSVPFEKFILKCHQNIPLVKRVPRGARMSLARSLSAVIKKCISDTDSAWQNLFLFSYKFLHVDKTKNGSLSTKLKQNSLLDIPIIIPKNCPRPLYSDSNKIIENKAMDGDLRNAARILFSSDTLAPFDNKTLEALREKHPLPNPESLLPSQPISNNVLQVKDEDTYAAIMSFTSGSASGIDGITPQHLKDLVSVSAGDAGRALLNDITNLCNFMLSGKVTSSFVSHIYGARLCAFNKKDGSIRPIAIGTTFRRLASKLACRHNIVSTLKTKFQPIQVGFGSKGGCEAAVHAARTFLKSNEAEVLLKVDVKNAFNSLDRATLLNEVSSHLPEIYPYVWQCYSSPSKLLFGENTIFSNVGVQQGDPLGPALFSLGIHKCISNLKSKLNIWYLDDGTIGGKVDDVVEDLIKIKNEFDKIGLKLNFSKCEIFFTDLLSLSKINLATELFNKIAPNLKILQRSTLCLLGAPIFDEGIQPILDNKIKIFVENTNKLGTLNSHIAYTILKYCLFVPKLMYILRTSPIWKFPGLTEKLDATLKNSLEKILNLSFDENSWTQATLPIRDGGIGVRKISSVALPAFLASVHSIKGLCSDILKSNSVEITDATDAIENWKLRCPNGDIPKDVTKQKLWDMPIVHNTHINLTLNLTSDKNRARLLALSNKESGHWLHAMPSKNLGTLLDNESFRIAVGLRLGTPLCFEHRCPCGKEVDSFGLHGLSCNKSSGRFSRHGSLNDTIKRALATIDVPALIEPTGISRDDGKRPDGLTLVPWERGRALLWDATCVDTLAPSHVRETALKAGAAAEKAESTKRHKYSSLIPNYIFVPFAVETLGPWSSSAKKFLNEITPRLIASTGDKRAGAFFAQRIGIAIQRGNAASILGTIPRGHDLYQNYL

SEQ ID NO: 17229 - protein, 926 aa, Vanessa cardui
MYVRGRLFRSQKGLKIHTTRCHSLPLEKSNDTFSILPTNSNSDTDSINFENLLTKCHKNIPLVKRIPRGARISLARSLSIVLQNCLSNSNSAWQNLFTFSFKFFHVDKTKNGTLSTKLKQNSLLDKQISIPKYSSRPQKFDLKKNVENKAMDGDFKNAARILFSSDTIAPFNDITLESLQEKHPLPYPTTVLPPPPTQNNFLQVKDEDTYAAIMSFSSGSASDIDGITPQHLKDLVSASAGDAGRALLSDITNLCNFMLSGKVISSFLPHLYGARLCAFNKKDGSIRPIAIGTTFRRLASKLACRHIVSTLKTKFQPIQLGFGSRGGCEAAVHSTRTFLKGNEAEVLLKVDVKNAFNSLDRGTLLNEVFSNLPEIYPYVWQCYSSPSKLFFGEDTIHSNVGVQQGDPLGPALFSLGIHSCISNLKSKLNVWYLDDGTIGGKVDDVIEDLIKIKEQFDKIGLKLNFSKCEIFFTDNLTHKNISLAIDKFNKIAPNIKILHKDTLCLLGAPLFDEGIEPSLKEKIKIFSDNFDRLGILNSHIAYTILKHCLFVPKLMYILRASPIWKYPSLTNQIDATLKKALEKILNLSLDEYSWTQATLPIPFGGIGVRKISSVALPAFLSSVQDLCSEILKSKSVKIMNVTEAIETWKVKCPNDDIPKEVTKQKLWDSSLVHATLHSLTQNLTSAQDRARLLALSSKESSHWLNSLPSKNLGTLLDNECFRISIGLRLGTPLCSEHRCPCGKEVDSFGLHGLSCPRSSGRLFRHGSLNDIIKRALATIDVPALTEPRGISRDDGKRPDGLTLVSWERGRALVWDATCVDTLAPSHIRETMLRAGAAAEKAEAKKITKYSCIMSNYFFVPFAVETLGPWSSGAKSFIKSITPRLIASTGDRRAGSFFAQRIGIAIQRGNAASILATIPRGQDLYSN

SEQ ID NO: 17230 - protein, 894 aa, Maniola hyperantus
MCDQTQSGSDNQVPFEILLSKYSQNIPLIKRIPRGARISLARSLSHTIQNVLSNSLLDWQNLFFFAYRHFYVNKSEIGSLCTKLKKNSLADRVFPIPDCSFRTQNYNLKKIVENKVMDGDLKNAARILFSSDTLAPFNDITLEALRDKHPLPNTDSVLPDPPSNTSYLQIKDEETYAAIMSFSSGSAGGMDGITPQHLKDLVGVTAGDAGKALLSDITRLCNFMLSGEVNSSFLPFLYGARLCAFNKKDGGIRPIAVGCTFRRLASKLACSHIVSTLKDKFQPIQVGFGSKGGCEAAVHSARTFLTNGEVEVLLKVDVKNAFNSLDRATLLTEVSTQLPEIYPYVWQCYSSASKLFFGDSDIKSSVGVQQGDPLGPALFSLGIHNHISNLTSKFNIWYLDDGTIGGNVDDVLKDLNHIKQQFGKIGLELNFSKCELFFTEKLSQERILLASELFNEISPNIKILDKRSLCLLGAPLYNESIQPLLDQKVRTFSANTDKLGTLNSHIAFSILKYCLFVPKLIYILRASPIWKFHGLLDNMDATLKSTLEQILNLTFDEHSWNQATLPVKYGGIGVRKISSVALPAFLSSVHSIKELSSQILKSNSSLTYATEALESWKVRCPNVDIPKERTTQKLWDLPLVQLTHTNLVQNLTSDRDRARLLALSEKESGYWLHALPSKNLGTLLDNESFRVALGLRLGTPLCHQHRCPCGKEVDKFGIHGLSCQRSSGRLFRHGSLNDTIKRALATINIPALIEPAGISRDDGKRPDGLTLVPWERGRALMWDATCVDTLAPCHIRKTASRPGAAAETAENGKRRKYASLIESYIFVPFAVETLGPWSLSAKNFLRDISPRLIASTGDRRAGSFFAQRISLAVQRGNAASILGTIPRGHDLYSN

SEQ ID NO: 17231 - protein, 942 aa, Maniola hyperantus
MNPSASQGEYLECPHCSDGRQFKGRKGLNIHITRCHGPPTRPLTCPNLMCDQTQSGSDNQVPFEILLSKYSQNIPLIKRIPRGARISLARSLSHTIQNVLSNSLLDWQNLFFFAYRHFYVNKSEIGSLCTKLKKNSLADRVFPIPDCSFRTQNYNLKKIVENKVMDGDLKNAARILFSSDTLAPFNDITLEALRDKHPLPNTDSVLPDPPSNTSYLQIKDEETYAAIMSFSSGSAGGMDGITPQHLKDLVGVTAGDAGKALLSDITRLCNFMLSGEVNSSFLPFLYGARLCAFNKKDGGIRPIAVGCTFRRLASKLACSHIVSTLKDKFQPIQVGFGSKGGCEAAVHSARTFLTNGEVEVLLKVDVKNAFNSLDRATLLTEVSTQLPEIYPYVWQCYSSASKLFFGDSDIKSSVGVQQGDPLGPALFSLGIHNHISNLTSKFNIWYLDDGTIGGNVDDVLKDLNHIKQQFGKIGLELNFSKCELFFTEKLSQERILLASELFNEISPNIKILDKRSLCLLGAPLYNESIQPLLDQKVRTFSANTDKLGTLNSHIAFSILKYCLFVPKLIYILRASPIWKFHGLLDNMDATLKSTLEQILNLTFDEQSWNQATLPVKYGGIGVRKISSVALPAFLSSVHSIKELSSQILKSNSSLTYATEALESWKVRCPNVDIPKERTTQKLWDLPLVQLTHTNLVQNLTSDRDRARLLALSEKESGYWLHALPSKNLGTLLDNESFRVALGLRLGTPLCHQHRCPCGKEVDKFGIHGLSCQRSSGRLFRHGSLNDTIKRALATINIPALIEPAGISRDDGKRPDGLTLVPWERGRALMWDATCVDTLAPCHIRKTASRPGAAAETAENGKRRKYASLIESYIFVPFAVETLGPWSLSAKNFLRDISPRLIASTGDRRAGSFFAQRISLAVQRGNAASILGTIPRGHDLYSN

SEQ ID NO: 17232 - protein, 942 aa, Maniola hyperantus
MNPSASQGEYLECPHCSDGRQFKGRKGLNIHIARCHGPPTRPLTCPNLMCDQTQSGSDNQVPFEILLSKYSQNIPLIKRIPRGARISLARSLSHTIQNVLSNSLLDWRNLFFFAYRHFYVNKSEIGSLCTKLKKNSLADRVFPIPDCSFRTQNYNLKKIVENKVMDGDLKNAARILFSSDTLAPFNDITLEALRDKHPLPNTDSVLPDPPSNTSYLQIKDEETYAAIMSFSSGSAGGMDGITPQHLKDLVGVTAGDAGKALLSDITRLCNFMLSGEVNSSFLPFLYGARLCAFNKKDGGIRPIAVGCTFRRLASKLACSHIVSTLKDKFQPIQVGFGSKGGCEAAVHSARSFLTNGEVEVLLKVDVKNAFNSLDRATLLTEVSTQLPEIYPYVWQCYSSASKLFFGDSDIKSSVGVQQGDPLGPALFSLGIHNHISNLTSKFNIWYLDDGTIGGNVDDVLKDLNHIKQQFGKIGLELNFSKCELFFTEKLSQERILLASELFNEISPNIKILDKRSLCLLGAPLYNESIQPLLDQKVRTFSANTDKLGTLNSHIAFSILKYCLFVPKLIYILRASPIWKFHGLLDNMDATLKSTLEQILNLTFDEHSWNQATLPVKYGGIGVRKISSVALPAFLSSVHSIKELSSQILKSNSSLTYATEALESWKVRCPNVDIPKERTTQKLWDLPLVQLTHTNLVQNLTSDRDRARLLALSEKESGYWLHALPSKNLGTLLDNESFRVALGLRLGTPLCHQHRCPCGKEVDKFGIHGLSCQRSSGRLFRHGSLNDTIKRALATINIPALIEPAGISRDDGKRPDGLTLVPWERGRALMWDATCVDTLAPCHIRKTASRPGAAAETAENGKRRKYASLIESYIFVPFAVETLGPWSLSAKNFLRDISPRLIASTGDRRAGSFFAQRISLAVQRGNAASILGTIPRGHDLYSN

SEQ ID NO: 17233 - protein, 942 aa, Maniola hyperantus
MNPSASQGEYLECPHCSDGRQFKGRKGLNIHITRCHGPPTRPLTCPNLMCDQTQSGSDNQVPFEILLSKYSQNIPLIKRIPRGARISLARSLSHTIQNVLSNSLLDWQNLFFFAYRHFYVNKSEIGSLCTKLKKNSLADRVFPIPDCSFRTQNYNLKKIVENKVMDGDLKNAARILFSSDTLAPFNDITLEALRDKHPLPNTDSVLPDPPSNTSYLQIKDEETYAAIMSFSSGSAGGMDGITPQHLKDLVGVTAGDAGKALLSDITRLCNFMLSGEVNSSFLPFLYGARLCAFNKKDGGIRPIAVGCTFRRLASKLACSHIVSTLKDKFQPIQVGFGSKGGCEAAVHSARTFLTNGEVEVLLKVDVKNAFNSLDRATLLTEVSTQLPEIYPYVWQCYSSASKLFFGDSDIKSSVGVQQGDPLGPALFSLGIHNHISNLTSKFNIWYLDDGTIGGNVDDVLKDLNHIKQQFGKIGLELNFSKCELFFTEKLSQERILLASELFNEISPNIKILDKRSLCLLGAPLYNESIQPLLDQKVRTFSANTDKLGTLNSHIAFSILKYCLFVPKLIYILRASPIWKFHGLLDNMDATLKSTLEQILNLTFDEHSWNQATLPVKYGGIGVRKISSVALPAFLSSVHSIKELSSQILKSNSSLTYATEALESWKVRCPNVDIPKERTTQKLWDLPLVQLTHTNLVQNLTSDRDRARLLALSEKESGYWLHALPSKNLGTLLDNESFRVALGLRLGTPLCHQHRCPCGKEVDKFGIHGLSCQRSSGRLFRHGSLNDTIKRALATINIPALIEPAGISRDDGKRPDGLTLVPWERGRALMWDATCVDTLAPCHIRKTASRPGAAAETAENGKRRKYASLIESYIFVPFAVETLGPWSLSAKNFLRDISPRLIASTGDRRAGSFFAQRISLAVQRGNAASILGTIPRGHDLYSN

SEQ ID NO: 17234 - protein, 942 aa, Maniola hyperantus
MNPSASQGEYLECPHCSDGRQFKGRKGLNIHIARCHGPPTRPLTCPNLMCDQTQSGSDNQVPFEILLSKYSQNIPLIKRIPRGARISLARSLSHTIQNVLSNSLLDWQNLFFFAYRHFYVNKSEIGSLCTKLKKNSLADRVFPIPDCSFRTQNYNLKKIVENKVMDGDLKNAARILFSSDTLAPFNDITLEALRDKHPLPNTDSVLPDPPSNTSYLQIKDEETYAAIMSFSSGSAGGMDGITPQHLKDLVGVTAGDAGKALLSDITRLCNFMLSGEVNSSFLPFLYGARLCAFNKKDGGIRPIAVGCTFRRLASKLACSHIVSTLKDKFQPIQVGFGSKGGCEAAVHSARTFLTNGEVEVLLKVDVKNAFNSLDRATLLTEVSTQLPEIYPYVWQCYSSASKLFFGDSDIKSSVGVQQGDPLGPALFSLGIHNHISNLTSKFNIWYLDDGTIGGNVDDVLKDLNHIKQQFGKIGLELNFSKCELFFTEKLSQERILLASELFNEISPNIKILDKRSLCLLGAPLYNESIQPLLDQKVRTFSANTDKLGTLNSHIAFSILKYCLFVPKLIYILRASPIWKFHGLLDNMDATLKSTLEQILNLTFDEHSWNQATLPVKYGGIGVRKISSVALPAFLSSVHSIKELSSQILKSNSSLTYATEALESWKVRCPNVDIPKERTTQKLWDLPLVQLTHTNLVQNLTSDRDRARLLALSEKESGYWLHALPSKNLGTLLDNESFRVALGLRLGTPLCHQHRCPCGKEVDKFGIHGLSCQRSSGRLFRHGSLNDTIKRALATINIPALIEPAGISRDDGKRPDGLTLVPWERGRALMWDATCVDTLAPCHIRKTASRPGAAAETAENGKRRKYASLIESYIFVPFAVETLGPWSLSAKNFLRDISPRLIASTGDRRAGSFFAQRISLAVQRGNAASILGTIPRGHDLYSN

SEQ ID NO: 17235 - protein, 942 aa, Maniola hyperantus
MNPSASQGEYLECPHCSDGRQFKGRKGLNIHIARCHGPPTRPLTCPNLMCDQTQSGSDNQVPFEILLSKYSQNIPLIKRIPRGARISLARSLSHTIQNVLSNSLLDWQNLFFFAYRHFYVNKSEIGSLCTKLKKNSLADRVFPIPDCSFRTQNYNLKKIVENKVMDGDLKNAARILFSSDTLAPFNDITLEALRDKHPLPNTDSVLPDPPSNTSYLQIKDEETYAAIMSFSSGSAGGMDGITPQHLKDLVGVTAGDAGKALLSDITRLCNFMLSGEVNSSFLPFLYGARLCAFNKKDGGIRPIAVGCTFRRLASKLACSHIVSTLKDKFQPIQVGFGSKGGCEAAVHSARTFLTNGEVEVLLKVDVKNAFNSLDRATLLTEVSTQLPEIYPYVWQCYSSASKLFFGDSDIKSSVGVQQGDPLGPALFSLGIHNHISNLTSKFNIWYLDDGTIGGNVDDVLKDLNHIKQQFGKIGLELNFSKCELFFTEKLSQERILLASELFNEISPNIKILDKRSLCLLGAPLYNESIQPLLDQKVRTFSANTDKLGTLNSHIAFSILKYCLFVPKLIYILRASPIWKFHGLLDNMDATLKSTLEQILNLTFDEHSWNQATLPVKYGGIGVRKISSVALPAFLSSVHSIKELSSQILKSNSSLTYAAEALESWKVRCPNVDIPKERTTQKLWDLPLVQLTHTNLVQNLTSDRDRARLLALSEKESGYWLHALPSKNLGTLLDNESFRVALGLRLGTPLCHQHRCPCGKEVDKFGIHGLSCQRSSGRLFRHGSLNDTIKRALATINIPALIEPAGISRDDGKRPDGLTLVPWERGRALMWDATCVDTLAPCHIRKTASRPGAAAETAENGKRRKYASLIESYIFVPFAVETLGPWSLSAKNFLRDISPRLIASTGDRRAGSFFAQRISLAVQRGNAASILGTIPRGHDLYSN

SEQ ID NO: 17236 - protein, 929 aa, Maniola hyperantus
MNPSASQGEYLECPHCSDGRQFKGRKGLNIHIARCHAPPTRPLTCPNLMCDQTQSGSDNQVPFEILLSKYSQNIPLIKRIPRGARISLARSLSHTIQNVLSNSLLDWQNLFFFAYRHFYVNKSEIGSLCTKLKKNSLADRVFPIPDCSFRTQNYNLKKIVENKVMDGDLKNAARILFSSDTLAPFNDITLEALRDKHPLPNTDSVLPDPPSNTSYLQIKDEETYAAIMSFSSGSAGGMDGITPQHLKDLVGVTAGDAGKALLSDITRLCNFMLSGEVNSSFLPFLYGARLCAFNKKDGGIRPIAVGCTFRRLASKLACSHIVSTLKDKFQPIQVGFGSKGGCEAAVHSARTFLTNGEVEVLLKVDVKNAFNSLDRATLLTEVSTQLPEIYPYVWQCYSSASKLFFGDSDIKSSVGVQQGDPLGPALFSLGIHNHISNLTSKFNIWYLDDGTIGGNVDDVLKDLNHIKQQFGKIGLELNFSKCELFFTEKLSQERILLASELFNEISPNIKILDKRSLCLLGAPLYNESIQPLLDQKVRTFSANTDKLGTLNSHIAFSILKYCLFVPKLIYILRASPIWKFHGLLDNMDATLKSTLEQILNLTFDEHSWNQATLPVKYGGIGVRKISSVALPAFLSSVHSIKELSSQILKSNSSLTYAAEALESWKVRCPNVDIPKERTTQKLWDLPLVQLTHTNLVQNLTSDRDRARLLALSEKESGYWLHALPSKNLGTLLDNESFRVALGLRLGTPLCHQHRCPCGKEVDKFGIHGLSCQRSSGRLFRHGSLNDTIKRALATINIPALIEPAGISRDDGKRPDGLTLVPWERGRALMWDATCVDTLAPCHIRKTASRPGAAAETAENGKRRKYASLIESYIFVPFAVETLGPWSLRANFTNVRYVSSESKFDILAGFLYKSCHYVQFISRLNVTGRW

SEQ ID NO: 17237 - protein, 942 aa, Maniola hyperantus
MNPSASQGEYLECPHCSDGRQFKGRKGLNIHIARCHGPPTRPLTCPNLMCDQTQSGSDNQVPFEILLSKYSQNIPLIKRIPRGARISLARSLSHTIQNVLSNSLLDWQNLFFFAYRHFYVNKSEIGSLCTKLKKNSLADRVFPIPDCSFRTQNYNLKKIVENKVMDGDLKNAARILFSSDTLAPFNDITLEALRDKHPLPNTDSVLPDPPSNTSYLQIKDEETYAAIMSFSSGSAGGMDGITPQHLKDLVGVTAGDAGKALLSDITRLCNFMLSGEVNSSFLPFLYGARLCAFNKKDGGIRPIAVGCTFRRLASKLACSHIVSTLKDKFQPIQVGFGSKGGCEAAVHSARTFLTNGEVEVLLKVDVKNAFNSLDRATLLTEVSTQLPEIYPYVWQCYSSASKLFFGDSDIKSSVGVQQGDPLGPALFSLGIHNHISNLTSKFNIWYLDDGTIGGNVDDVLKDLNHIKQQFGKIGLELNFSKCELFFTEKLSQERILLASELFNEISPNIKILDKRSLCLLGAPLYNESIQPLLDQKVRTFSANTDKLGTLNSHIAFSILKYCLFVPKLIYILRASPIWKFHGLLDNMDATLKSTLEQILNLTFDEHSWNQATLPVKYGGIGVRKISSVALPAFLSSVHSIKELSSQILKSNSSLIYAAEALESWKVRCPNVDIPKERTTQKLWDLPLVQLTHTNLVQNLTSDRDRARLLALSEKESGYWLHALPSKNLGTLLDNESFRVALGLRLGTPLCHQHRCPCGKEVDKFGIHGLSCQRSSGRLFRHGSLNDTIKRALATINIPALIEPAGISRDDGKRPDGLTLVPWERGRALMWDATCVDTLAPCHIRKTASRPGAAAETAENGKRRKYASLIESYIFVPFAVETLGPWSLSAKNFLRDISPRLIASTGDRRAGSFFAQRISLAVQRGNAASILGTIPRGHDLYSN

SEQ ID NO: 17238 - protein, 942 aa, Maniola hyperantus
MNPSASQGEYLECPHCSDGRRFKGRKGLNIHIARCHGPPTRPLTCPNLMCDQTQSGSDSQVPFEILLSKYSQNIPLIKRIPRGARISLARSLSHTIQNVLSNSLLDWQNLFFFSYRHFYVNKSEIGSLCTKLKKNSLADRVFPIPDCSFRTQNYNLKKIVENKVMDGDLKNAARILFSSDTLARFNDITLEALREKHTLPNTDSVLPDPPSNTSYLQIKDEETYAAIMSFSSGSAGGMDGITPQHLKDLVGVTAGDAGKALLSDITRLCNLMLSGEVNSSFLPFLYGARLCAFNKKDGGIRPIAVGCTFRRLASKLACSHIVSTLKDKFQPIQVGFGSKGGCEAAVHSARTFLTNGEVEVLLKVDVKNAFNSLDRATLLTEVSTQLPEIYPYVWQCYSSASKLFFGDSDIKSSVGVQQGDPLDPALFSLGIHNHISNLTSKFNIWYLDDGTIGGNVDDVLKDLNHIKQQFGKIGLELNFSKCELFFTEKLSQERILLASELCNEISPNIKILDKLSLCLLGAPLYNESIQPLLDQKVRTFSANTDKLGTLNSHIAFSILKYCLFVPKLIYILRASPIWKFHGLLDNMDATLKSKLEQILNLTFDEHSWNQATLPVKYGGIGVRKISSVALPAFLSSVHSIKELSSQILKSNSSLTYATEALDSWKVRCPNVDIPKERTTQKLWDLPLVQLTHTNSVQNLTSDRDRARLLALSEKESGYWLHALPSKNLGTLLDNESFRVALGLRLGTPLCHQHRCPCGKEVDKFGIHGLSCQRSSGRLFRHGSLNDIIKRALATINIPALIEPAGISRDDGKRPDGLTLVPWERGRALMWDATCVDTLAPCHIRKTASRLGAAAETAENGKRRKYASLIESYIFVPFAVETLGPWSLSAKKFLRDISPRLIASSGDRRAGSFFAQRISLAVQRGNAASILGTIPRGHDLYSN

SEQ ID NO: 17239 - protein, 942 aa, Maniola hyperantus
MNPSASQGEYLECPHCSDGRQFKGRKGLNIHIARCHGPPTRPLTCPNLMCDQTQSGSDNQVPFEILLSKYSQNIPLIKRIPRGARISLARSLSHTIQNVLSNSLLDWQNLFFFAYRHFYVNKSEIGSLCTKLKKNSLADRVFPIPDCSFRTQNYNLKKIVENKVMDGDLKNAARILFSSDTLAPFNDITLEALRDKHPLPNTDSVLPDPPSNTSYLQIKDEETYAAIMSFSSGSAGGMDGITPQHLKDLVGVTAGDAGKALLSDITRLCNFMLSGEVNSSFLPFLYGARLCAFNKKDGGIRPIAVGCTFRRLASKLACSHIVSTLKDKFQPIQVGFGSKGGCEAAVHSARTFLTNGEVEVLLKVDVKNAFNSLDRATLLTEVSTQLPEIYPYVWQCYSSASKLFFGDSDIKSSVGVQQGDPLGPALFSLGIHNHISNLTSKFNIWYLDDGTIGGNVDDVLKDLNHIKQQFGKIGLELNFSKCELFFTEKLSQERILLASELFNEISPNIKILDKRSLCLLGAPLYNESIQPLLDQKVRTFSANTDKLGTLNSHIAFSILKYCLFVPKLIYILRASPIWKFHGLLDNMDDTLKSTLEQILNLTFDEHSWNQATLPVKYGGIGVRKISSVALPAFLSSVHSIKELSSQILKSNSSLTYAAEALESWKVRCPNVDIPKERTTQKLWDLPLVQLTHTNLVQNLTSDRDRARLLALSEKESGYWLHALPSKNLGTLLDNESFRVALGLRLGTPLCHQHRCPCGKEVDKFGIHGLSCQRSSGRLFRHGSLNDTIKRALATINIPALIEPAGISRDDGKRPDGLTLVPWERGRALMWDATCVDTLAPCHIRKTASRPGAAAETAENGKRRKYASLIESYIFVPFAVETLGPWSLSAKNFLRDISPRLIASTGDRRAGSFFAQRISLAVQRGNAASILGTIPRGHDLYSN

SEQ ID NO: 17240 - protein, 942 aa, Maniola hyperantus
MNPSASQGEYLECPHCSDGRQFKGRKGLNIHIARCHGPPTRPLTCPNLMCDQTQSGSDNQVPFEILLSKYSQNIPLIKRIPRGARISLARSLSHTIQNVLSNSLLDWQNLFFFAYRHFYVNKSEIGSLCTKLKKNSLADRVFPIPDCSFRTQNYNLKKIVENKVMDGDLKNAARILFSSDTLAPFNDITLEALRDKHPLPNTDSVLPDPPSNTSYLQIKDEETYAAIMSFSSGSAGGMDGITPQHLKDLVGVTAGDAGKALLSDITRLCNFMLSGEVNSSFLPFLYGARLCAFNKKDGGIRPIAVGCTFRRLASKLACSHIVSTLKDKFQPIQVGFGSKGGCEAAVHSARTFLTNGEVEVLLKVDVKNAFNSLDRATLLTEVSTQLPEIYPYVWQCYSSASKLFFGDSDIKSSVGVQQGDPLGPALFSLGIHNHISNLTSKFNIWYLDDGTIGGNVDDVLKDLNHIKQQFGKIGLELNFSKCELFFTEKLSQERILLASELFNEISPNIKILDKRSLCLLGAPLYNESIQPLLDQKVRTFSANTDKLDTLNSHIAFSILKYCLFVPKLIYILRASPIWKFHGLLDNMDATLKSTLEQILNLTFDEHSWNQATLPVKYGGIGVRKISSVALPAFLSSVHSIKELSSQILKSNSSLTYATEALESWKVRCPNVDIPKERTTQKLWDLPLVQLTHTNLVQNLTSDRDRARLLALSEKESGYWLHALPSKNLGTLLDNESFRVALGLRLGTPLCHQHRCPCGKEVDKFGIHGLSCQRSSGRLFRHGSLNDTIKRALATINIPALIEPAGISRDDGKRPDGLTLVPWERGRALMWDATCVDTLAPCHIRKTASRPGAAAETAENGKRRKYASLIESYIFVPFAVETLGPWSLSAKNFLRDISPRLIASTGDRRAGSFFAQRISLAVQRGNAASILGTIPRGHDLYSN

SEQ ID NO: 17241 - protein, 942 aa, Maniola hyperantus
MNPSASQGEYLECPHCSDGRQFKGRKGLNIHIARCHGPPTRPLTCPNLMCDQTQSGSDNQVPFEILLSKYSQNIPLIKRIPRGARISLARSLSHTIQNVLSNSLLDWQNLFFFAYRHFYVNKSEIGSLCTKLKKNSLADRVFPIPDCSFRTQNYNLKKIVENKVMDGDLKNAARILFSSDTLAPFNDITLEALRDKHPLPNTDSVLPDPPSNTSYLQIKDEETYAAIMSFSSGSAGGMDGITPQHLKDLVGVTAGDAGKALLSDITRLCNFMLSGEVNSSFLPFLYGARLCAFNKKDGGIRPIAVGCTFRRLASKLACSHIVSTLKDKFQPIQVGFGSKGGCEAAVHSARTFLTNGEVEVLLKVDVKNAFNSLDRATLLTEVSTQLPEIYPYVWQCYSSASKLFFGDSDIKSSVGVQQGDPLGPALFSLGIHNHISNLTSKFNIWYLDDGTIGGNVDDVLKDLNHIKQQFGKIGLELNFSKCELFFTEKLSQERILLASELFNEISPNIKILDKRSLCLLGAPLYNESIQPLLDQKVRTFSANTDKLGTLNSHIAFSILKYCLFVPKLIYILRASPIWKFHGLLDNMDATLKSTLEQILNLTFDEHSWNQATLPVKYGGIGVRKISSVALPAFLSSVHSIKELSSQILKSNSSLTYATEALESWKVRCPNVDIPKERTTQKLWDLPLVQLTHTNLVQNLTSDRDRARLLALSEKESGYWLHALPSKNLGTLLDNESFRVALGLRLGTPLCHQRRCPCGKEVDKFGIHGLSCQRSSGRLFRHGSLNDTIKRALATINIPALIEPAGISRDDGKRPDGLTLVPWERGRALMWDATCVDTLAPCHIRKTASRPGAAAETAENGKRRKYASLIESYIFVPFAVETLGPWSLSAKNFLRDISPRLIASTGDRRAGSFFAQRISLAVQRGNAASILGTIPRGHDLYSN

SEQ ID NO: 17242 - protein, 942 aa, Maniola hyperantus
MNPSASQGEYLECPHCSDGRQFKGRKGLNIHIARCHGPPTRPLTCPNLMCDQTQSGSDNQVPFEILLSKYSQNIPLIKRIPRGARISLARSLSHTIQNVLSNSLLDWQNLFFFAYRHFYVNKSEIGSLCTKFKKNSLADRVFPIPDCSFRTQNYNLKKIVENKVMDGDLKNAARILFSSDTLAPFNDITLEALRDKHPLPNTDSVLPDPPSNTSYLQIKDEETYAAIMSFSSGSAGGMDGITPQHLKDLVGVTAGDAGKALLSDITRLCNFMLSGEVNSSFLPFLYGARLCAFNKKDGGIRPIAVGCTFRRLASKLACSHIVSTLKDKFQPIQVGFGSKGGCEAAVHSARTFLTNGEVEVLLKVDVKNAFNSLDRATLLTEVSTQLPEIYPYVWQCYSSASKLFFGDSDIKSSVGVQQGDPLGPALFSLGIHNHISNLTSKFNIWYLDDGTIGGNVDDVLKDLNHIKQQFGKIGLELNFSKCELFFTEKLSQERILLASELFNEISPNIKILDKRSLCLLGAPLYNESIQPLLDQKVRTFSANTDKLGTLNSHIAFSILKYCLFVPKLIYILRASPIWKFHGLLDNMDATLKSTLEQILNLTFDEHSWNQATLPVKYGGIGVRKISSVALPAFLSSVHSIKELSSQILKSNSSLTYATEALESWKVRCPNVDIPKERTTQKLWDLPLVQLTHTNLVQNLTSDRDRARLLALSEKESGYWLHALPSKNLGTLLDNESFRVALGLRLGTPLCHQHRCPCGKEVDKFGIHGLSCQRSSGRLFRHGSLNDTIKRALATINIPALIEPAGISRDDGKRPDGLTLVPWERGRALMWDATCVDTLAPCHIRKTASRPGAAAETAENGKRRKYASLIESYIFVPFAVETLGPWSLSAKNFLRDISPRLIASTGDRRAGSFFAQRISLAVQRGNAASILGTIPRGHDLYSN

SEQ ID NO: 17243 - protein, 943 aa, Maniola jurtina
MNPSASQGEYLECSHYSDGRRFKGRKGLNIHIARCHGPPTRPLTCPNLMCDQTQSGSDNQVPFEIVLSKYSQNIPLVKRIPRGARISLARSLSHTIQNVLSNSLLDWQNLFFFAYRHFYVNKTESGSLCSKLKKNSLANRFFSIPDCSFRTQNYNLKKIVENKVMDGDLKNAARILFSNDTLAPFNDITLEALREKHPLPNIDSLLPDPPSNTSHLQIKDEDTYAAIMSFSSGSAGGMDGITPQHLKDLVGVTAGDAGRALLSDITRLCNLMLSGEVNSSFLPFLYGARLCAFNKKDGGIRPIAVGCTFRRLASKLACKHIVSTLKDKFQPIQVGFGSKGGCEAAVHSARTFLANGEVEVLLKVDVKNAFNSLDRATLLTEVSTQLPEIYPYVWQCYSSASKLFFGDSDIKSSVGVQQGDPLGPALFSLGIHNHISNLTSKFNIWYLDDGTIGGNVDDVLKDLNHIKQQFGKIGLELNFSKCELFFTEKLSQDRIRLASDLFNEITPSIKILDKHSLCLLGAPLYNESIQPLLDQKIRTFSANTDKLGALNSHIAFSILKYCLFVPKLIYILRASPIWKFPGLLDNMDATLKSTLEQILNLTFDEHSWNQATLPVKYGGIGVRKISSVALPAFLSSVHSIRELSSQILKSNSISLTYATEALESWKVRCPNVDIPKERSTQKLWDLPLVQLTHSNLLQNLTSDRDQARLLALSEKESGYWLHALPSKNLGTLLDNESFRVALGLRLGTPLCHQHRCPCGKEVDKFGIHGLSCQRSAGRLFRHGSLNDTIKRALATIDVPALIEPTGISRDDGKRPDGLTLVPWERGRALMWDATCVDTLAPCHIRETVSRPGAAAEMAENGKRRKYASLIESYIFVPFAVETLGPWSLSAKKFLRDISPRLIASSGDRRAGSFFAQRISLAVQRGNAASILGTIPRGHDLYSN

SEQ ID NO: 17244 - protein, 941 aa, Bicyclus anynana
MNPSASQVDCLECPHCNDGRLFKGRRGLNIHIARCHGPPTQSLTCPNFTSDQTSSDNQVPFEILLCKYSQNIPLVKCIPRGARISLARSLSQTIQNVLSNSLSAWQNLFLFSYKHFYVNKTESGSLCAKLKKNSLDDRVFSIPDYSFRTQNYNLKKIVENKVMDGDLKNGARILFSNDTLAPFNEVTLEALNEKHPSPNTNTLLPDPPLKRSFLQIKDEETYAAIMSFSSGSAGGMDGITPQHLKDLVAVTSGDAGRALLSDITRLCNLMLSGEVNSSFLPFLYGARLCAFNKKDGGIRPIAVGCTFRRLAAKLACRHIVTTLKEKFQPIQVGFGSKGGCEAAVHSARTFLKNGEVEVLLKVDVKNAFNSLDRATLLNEVSTHLPEIYPYVWQCYSSDTKLFFGNNGIKSSVGVQQGDPLGPALFSLGIHSHISNLTSKFNIWYLDDGTIGGNVIDVLKDLNEVKQKFSQIGLELNYSKCELFFTERLSQERQLLAFELFNRIAPNIKIVNKQSLCLLGAPLYDEAIQPNLDQKLKTFSANTDKLGSLNSHIAFSILKHCLFVPKLMYVLRSSPIWKFPGQLENMDATLRITLEKILNLHFDNQSWNQATLPVKYGGIGVRKISSVALPAFLSSVHSIKELSSRILNSNSVCITYATEALESWKVRCPNVDIPKERTTQKLWDAPLVQLTHENLVQNLTSAVDRARLLALSEKESGYWLHALPSKNLGTLLDNESFRVALGLRLGTPLCLEHKCPCGKEVSKFGIHGLSCQRSGGRLFRHGSLNDIIKRALATINIPALIEPLGISRDDGKRPDGLTLVPWEMGRALMWDATCVDTLAPCHIRETESRPGAAAEKAETGKWLKYASLTESYIFVPFAVETLGPWSRSAKKFFRTISPRLVASTGDRRAGSFFAQRISLAVQRGNAASILATIPRGHDLYSY

SEQ ID NO: 17245 - protein, 949 aa, Melitaea cinxia
MSNSFKTTNVSQPELFTCPECTNGKLFRGRKGLKIHTTRCHSDPLVHSLPILTDTSSTVTSDNNSVPFEKFILKCHQNIPLVKRAPRGARMSLARSLSSVIKKCISDTDSAWQNLFLFSYKFLHVDKTKNGSLSTKLKQNSLLDIPIIIPKNPRPLYSDSSKIIENKAMDGDLKNAARILFSSDTLAPFDNKTLEALREKHPLPNPASLLPSPPIFNNVLQVEDEDTYAAIMSFTNGSASGIDGITPQHLKDLVSVSAGDAGRALLNDITNLCNFMLSGKISSSFLSHIYGARLCAFNKKDGSIRPIAIGTTFRRLASKLACRHIVSSLKTKFQPIQLGFGSKGGCEAAVHAARTFLKSNEAEVLLKVDVKNAFNSLDRATLLNEVSLHLPEIYPYVWQCYSSLSKLLFGENTIFSNVGVQQGDPLGPALFSLGIHKCISNLKSKLNIWYLDDGTIGGKVDDVVEDLIKIKNEFDKIGLKLNFSKCEIFFTDILSLSKINLATELFNKIAPNLKILQRSTLCLLGAPLFDEGIQPILDNKIKIFVENTDKLGTLNSHIAYTILKYCLFVPKLMYILRASPIWNFPGMTEKLDATLKNSLEKILNLSFDENSWTQATLPIRDGGIGVRKISSVALPAFLASVHSIKGLCSDILKSNSVQITDATDAIENWKLMCPNGDIPKDVTKQKLWDIPIVHNTHISLTQNLTSDKNRARLLAVSNKESGHWLHAMPSKNLGTLLDNESFRIALGLRLGAPLCFEHRCPCGKEVNSFGLHGLSCNKSSGRFSRHGSLNDIIKRALATIDVPALIEPTGISRNDGKRPDGLTLVPWERGRALLWDATCVDTLAPSHVRETALKVGAAAEKAETTKRHKYSSLIPNYIFVPFAVETLGPWSSSAKKFLNEITPRLIATTGDKRAGAFFAQRIGIAIQRGNAASILATIPRGHDLYQNYL

SEQ ID NO: 17246 - protein, 943 aa, Maniola jurtina
MNPSASQGEYLECSHCSDGRRFKGRKGLNIHIARCHGPPTRPLTCPNLMCDQTQSGSDNQVPFEILLSKYSQNIPLVKRIPRGARISLARSLSHTIQNVLSNSLLDWQNLFFFAYRHFYVNKTESGSLCSKLKKNSLANRVFPIPDCSFRTQNYNLKKIVENKVMDGDLKNAARILFSNDTLAPFNDITLEALREKHPLPNIDSLLPDPPSNTSHLQIKDEDTYAAIMSFSSGSAGGMDGITPQHLKDLVGVTAGDAGRALLSDITRLCNLMLSGEVNSSFLPFLYGARLCAFNKKDGGIRPIAVGCTFRRLASKLACKHIVSTLKDKFQPIQVGFGSKGGCEAAVHSARTFLANGEVEVLLKVDVKNAFNSLDRATLLTEVSTQLPEIYLYVWQCYSSASKLFFGDSDIKSSVGVQQGDPLGPALFSLGIHNHISNLTSKFNIWYLDDGTIGGNVDDVLKDLKHIKQQFGKIGLELNFSKCELFFTEKLSQDRIRLASELFNEITPSIKILDKHSLCLLGAPLYNESIQPLLDQKIRTFSANTDKLGALNSHIAFSILKYCLFVPKLIYILRASPIWKFPGLLDNMDAILKSTLEQILNLTFDEHSWNQATLPVKYGGIGVRKISSVALPAFLSSVHSIRELSSQILKSNSISLTYATEALESWKVRCPNVDYPKERSTQKLWDLPLVQLTHSNLLQNLTSDRDQARLLALSEKESGYWLHALPSRNLGTLLDNESFCVALGLRLGTPLCHQHRCPCGKEVDKFGIHGLSCQRSAGRLFRHGSLNDTIKRALATIDVPALIEPAGISRDDGKRPDGLTLVPWERGRALMWDATCVDTLAPCHIRETVSRPGAAAEMAENGKRRKYASLIESYIFVPFAVETLGPWSLSAKKFLRDISPRLIASSGDRRAGSFFAQRISLAVQRGNAASILGTIPRGHDLYSN

SEQ ID NO: 17247 - protein, 943 aa, Maniola jurtina
MNPSASQGEYLECSHCSDGRRFKGRKGLNIHIARCHGPPTRPLTCPNLMCDQTQSGSDNQVPFEIVLSKYSQNIPLVKRIPRGARISLARSLSHTIQNVLSNSLLDWQNLFFFAYRHFYVNKTESGSLCSKLKKNSLANRVFPIPDCSFRTQNYNLKKIVENKVMDGDLKNAARILFSNDTLAPFNDITLEALREKHPLPNIDSLLPDPPSNTSHLQIKDEDTYAAIMSFSSGSAGGMDGITPQHLKDLVGVTAGDAGRALLSDITRLCNLMLSGEVNSSFLPFLYGARLCAFNKKDGGIRPIAVGCTFRRLASKLACKHIVSTLKDKFQPIQVGFGSKGGCEAAVHSARTFLANGEVEVLLKVDVKNAFNSLDRATLLTEVSTQLPEIYPYVWQCYSSASKLFFGDSDIKSSVGVQQGDPLGPALFSLGIHNHISNLTSKFNIWYLDDGTIGGNVDDVLKDLNHIKQQFGKIGLELNFSKCELFFTEKLSQDRIRLASDLFNEITPSIKILDKHSLCLLGAPLYNESIQPLLDQKIRTFSANTDKLGALNSHIAFSILKYCLFVPKLIYILRASPIWKFPGLLDNMDATLKSTLEQILNLTFDEHSWNQATLPVKYGGIGVRKISSVALPAFLSSVHSIRELSSQILKSNSISLTYATEALESWKVRCPNVDIPKERSTQKLWDLPLVQLTHSNLLQNLTSDRDQARLLALSEKESGYWLHALPSKNLGTLLDNESFRVALGLRLGTPLCHQHRCPCGKEVDKFGIHGLSCQRSAGRLFRHGSLNDTIKRALATIDVPALIEPAGISRDDGKRPDGLTLVPWERGRALMWDATCVDTLAPCHIRETVSRPGAAAEMAENGKRRKYASLIESYIFVPFAVETLGPWSLSAKKFLRDISPRLIASSGDRRAGSFFAQRISLAVQRGNAASILGTIPRGHDLYSN

SEQ ID NO: 17248 - protein, 895 aa, Maniola jurtina
MCDQTQSGSDNQVPFEILLSKYSQNIPLVKRIPRGARISLARSLSHTIQNVLSNSLLDWQNLFFFAYRHFYVNKTESGSLCSKLKKNSLANRVFPIPDCSFRTQNYNLKKIVENKVMDGDLKNAARILFSNDTLAPFNDITLEALREKHPLPNIDSLLPDPPSNTSHLQIKDEDTYAAIMSFSSGSAGGMDGITPQHLKDLVGVTAGDAGRALLSDITRLCNLMLSGEVNSSFLPFLYGARLCAFNKKDGGIRPIAVGCTFRRLASKLACKHIVSTLKDKFQPIQVGFGSKGGCEAAVHSARTFLANGEVEVLLKVDVKNAFNSLDRATLLTEVSTQLPEIYLYVWQCYSSASKLFFGDSDIKSSVGVQQGDPLGPALFSLGIHNHISNLTSKFNIWYLDDGTIGGNVDDVLKDLKHIKQQFGKIGLELNFSKCELFFTEKLSQDRIRLASELFNEITPSIKILDKHSLCLLGAPLYNESIQPLLDQKIRTFSANTDKLGALNSHIAFSILKYCLFVPKLIYILRASPIWKFPGLLDNMDAILKSTLEQILNLTFDEHSWNQATLPVKYGGIGVRKISSVALPAFLSSVHSIRELSSQILKSNSISLTYATEALESWKVRCPNVDYPKERSTQKLWDLPLVQLTHSNLLQNLTSDRDQARLLALSEKESGYWLHALPSRNLGTLLDNESFCVALGLRLGTPLCHQHRCPCGKEVDKFGIHGLSCQRSAGRLFRHGSLNDTIKRALATIDVPALIEPAGISRDDGKRPDGLTLVPWERGRALMWDATCVDTLAPCHIRETVSRPGAAAEMAENGKRRKYASLIESYIFVPFAVETLGPWSLSAKKFLRDISPRLIASSGDRRAGSFFAQRISLAVQRGNAASILGTIPRGHDLYSN

SEQ ID NO: 17249 - protein, 891 aa, Maniola jurtina
MIPQFSQVPTRGVILVITIICRVSILYIYIGARISLARSLSHTIQNVLSNSLLDWQNLFFFAYRHFYVNKTESGSLCSKLKKNSLANRVFPIPDCSFRTQNYNLKKIVENKVMDGDLKNAARILFSNDTLAPFNDITLEALREKHPLPNIDSLLPDPPSNTSHLQIKDEDTYAAIMSFSSGSAGGMDGITPQHLKDLVGVTAGDAGRALLSDITRLCNLMLSGEVNSSFLPFLYGARLCAFNKKDGGIRPIAVGCTFRRLASKLACKHIVSTLKDKFQPIQVGFGSKGGCEAAVHSARTFLANDEVEVLLKVDVKNAFNSLDRATLLTEVSTQLPEIYLYVWQCYSSASKLFFGDSDIKSSVGVQQGDPLGPALFSLGIHNHISNLTSKFNIWYLDDGTIGGNVDDVLKDLKHIKQQFGKIGLELNFSKCELFFTEKLSQDRIRLASELFNEITPSIKILDKHSLCLLGAPLYNESIQPLLDQKIRTFSTNTDKLGALNSHIAFSILKYCLFVPKLIYILRASPIWKFPGLLDNMDAILKSTLEQILNLTFDEHSWNQATLPVKYGGIGVRKISSVALPAFLSSVHSIRELSSQILKSNSISLTYATEALESWKVRCPNVDYPKERSTQKLWDLPLVQLTHSNLLQNLTSDRDQARLLALSEKESGYWLHALPSRNLGTLLDNESFCVALGLRLGTPLCHQHRCPCGKEVDKFGIHGLSCQRSAGRLFRHGSLNDTIKRALATIDVPALIEPAGISRDDGKRPDGLTLVPWERGRALMWDATCVDTLAPCHIRETVSRPGAAAEMAENGKRRKYASLIESYIFVPFAVETLGPWSLSAKKFLRDISPRLIASSGDRRAGSFFAQRISLAVQRGNAASILGTIPRGHDLYSN

SEQ ID NO: 17250 - protein, 943 aa, Maniola jurtina
MNPNASQGEYLECSHCSDGRRFKGRKGLNIHITRCHGPPTRPLTCPNLMCDQTQSGSDNQVPFEIVLSKYSQNIPLVKRIPRGARISLARSLSHTIQNVLSNSLLDWQNLFFFAYRHFYVNKTESGSLCSKLKKNSLANRVFPIPDCSFRTQNYNLKKIVENKVMDGDLKNAARILFSNDTLAPFNDITLEALREKHPLPNIDSLLPDPPSNTSHLQIKDEDTYAAIMSFSSGSAGGMDGITPQHLKDLVGVTAGDAGRALLSDITRLCNLMLSGEVNSSFLPFLYGARLCAFNKKDGGIRPIAVGCTFRRLASKLACKHIVSTLKDKFQPIQVGFGSKGGCEAAVHSARTFLANGEVEVLLKVDVKNAFNSLDRATLLTEVSTQLPEIYPYVWQCYSSASKLFFGDSDIKSSVGVQQGDPLGPALFSLGIHNHISNLTSKFNIWYLDDGTIGGNVDDVLKDLNHIKQQFGKIGLELNFSKCELFFTEKLSQDRIRLASDLFNEITPSIKILDKHSLCLLGAPLYNESIQPLLDQKIRTFSANTDKLGALNSHIAFSILKYCLFVPKLIYILRASPIWKFPGLLDNMDATLKSTLEQILNLTFDEHSWNQATLPVKYGGIGVRKISSVALPAFLSSVHSIRELSSQILKSNSISLTYATEALESWKVRCPNVDIPKERSTQKLWDLPLVQLTHSNLLQNLTSDRDQARLLALSEKESGYWLHALPSKNLGTLLDNESFRVALGLRLGTPLCHQHRCPCGKEVDKFGIHGLSCQRSAGRLFRHGSLNDTIKRALATIDVPALIEPAGISRDDGKRPDGLTLVPWERGRALMWDATCVDTLAPCHIRETVSRPGAAAEMAENGKRRKYASLIESYIFVPFAVETLGPWSLSAKKFLRDISPRLIASSGDRRAGSFFAQRISLAVQRGNAASILGTIPRGHDLYSN

SEQ ID NO: 17251 - protein, 943 aa, Maniola jurtina
MNPSASQGEYLECSHCSDGRRFKGRKGLNIHIARCHGPPTRPLTCPNLMCDQTQSGSDNQVPFEIVLSKYSQNIPLVKRIPRGARISLARSLSHTIQNVLSNSLLDWQNLFFFAYRHFYVNKTESGSLCSKLKKNSLANRVFPIPDCSFRTQNYNLKKIVENKVMDGDLKNAARILFSNDTLAPFNDITLEALREKHPLPNIDSLLPDPPSNTSHLQIKDEDTYAAIMSFSSGSAGGMDGITPQHLKDLVGVTAGDAGRALLSDITRLCNLMLSGEVNSSFLPFLYGARLCAFNKKDGGIRPIAVGCTFRRLASKLACKHIVSTLKDKFQPIQVGFGSKGGCEAAVHSARTFLANGEVEVLLKVDVKNAFNSLDRATLLTEVSTQLPEIYPYVWQCYSSASKLFFGDSDIKSSVGVQQGDPLGPALFSLGIHNHISNLTSKFNIWYLDDGTIGGNVDDVLKDLNHIKQQFGKIGLELNFSKCELFFTEKLSQDRIRLASDLFNEITPSIKILNKHSLCLLGAPLYNESIQPLLDQKIRTFSANTDKLGALNSHIAFSILKYCLFVPKLIYILRASPIWKFPGLLDNMDATLKSTLEQILNLTFDEHSWNQATLPVKYGGIGVRKISSVALPAFLSSVHSIRELSSQILKSNSISLTYATEALESWKVRCPNVDIPKERSTQKLWDLPLVQLTHSNLLQNLTSDRDQARLLALSEKESGYWLHALPSKNLGTLLDNESFRVALGLRLGTPLCHQHRCPCGKEVDKFGIHGLSCQRSAGRLFRHGSLNDTIKRALATIDVPALIEPAGISRDDGKRPDGLTLVPWERGRALMWDATCVDTLAPCHIRETVSRPGAAAEMAENGKRRKYASLIESYIFVPFAVETLGPWSLSAKKFLRDISPRLIASSGDRRAGSFFAQRISLAVQRGNAASILGTIPRGHDLYSN

SEQ ID NO: 17252 - protein, 943 aa, Maniola jurtina
MNPSASQGEYLECSHCSDGRRFKGRKGLNIHIARCHGPPTRPLTCPNLMCDQTQSGSDNQVPFEIVLSKYSQNIPLVKRIPRGARISLARSLSHTIQNVLSNSLLDWQNLFFFAYRHFYVNKTESGSLCSKLKKNSLANRVFPIPDCSFRTQNYNLKKIVENKVMDGDLKNAARILFSNDTLAPFNDITLEALREKHPLPNIDSLLPDPPSNTSHLQIKDEDTYAAIMSFSSGSAGGMDGITPQHLKDLVGVTAGDAGRALLSDITRLCNLMLSGEVNSSFLPFLYGARLCAFNKKDGGIRPIAVGCTFRRLASKLACKHIVSTLKDKFQPIQVGFGSKGGCEAAVHSARTFLANGEVEVLLKVDVKNAFNSLDRATLLTEVSTQLPEIYPYVWQCYSSASKLFFGDSDIKSSVGVQQGDPLGPALFSLGIHNHISNLTSKFNIWYLDDGTIGGNVDDVLKDLNHIKQQFGKIGLELNFSKCELFFTEKLSQDRIRLASDLFNEITPSIKILDKHSLCLLGAPLYNESIQPLLDQKIRTFSANTDKLGALNSHIAFSILKYCLFVPKLIYILRASPIWKFPGLLDNMDTTLKSTLEQILNLTFDEHSWNQATLPVKYGGIGVRKISSVALPAFLSSVHSIRELSSQILKSNSISLTYATEALESWKVRCPNVDIPKERSTQKLWDLPLVQLTHSNLLQNLTSDRDQARLLALSEKESGYWLHALPSKNLGTLLDNESFRVALGLRLGTPLCHQHRCPCGKEVDKFGIHGLSCQRSAGRLFRHGSLNDTIKRALATIDVPALIEPAGISRDDGKRPDGLTLVPWERGRALMWDATCVDTLAPCHIRETVSRPGAAAEMAENGKRRKYASLIESYIFVPFAVETLGPWSLSAKKFLRDISPRLIASSGDRRAGSFFAQRISLAVQRGNAASILGTIPRGHDLYSN

SEQ ID NO: 17253 - protein, 943 aa, Maniola jurtina
MNPSASQGEYLECSHCSDGRRFKGRKGLNIHIARCHGPPTRPLTCPNLMCDQTQSGSDNQVPFEIVLSKYNQNIPLVKRIPRGARISLARSLSHTIQNVLSNSLLDWQNLFFFAYRHFYVNKTESGSLCSKLKKNSLANRVFPIPDCSFRTQNYNLKKIVENKVMDGDLKNAARILFSNDTLAPFNDITLEALREKHPLPNIDSLLPDPPSNTSHLQIKDEDTYAAIMSFSSGSAGGMDGITPQHLKDLVGVTARDAGRALLSDITRLCNLMLSGEVNSSFLPFLYGARLCAFNKKDGGIRPIAVGCTFRRLASKLACKHIVSTLKDKFQPIQVGFGSKGGCEAAVHSARTFLANGEVEVLLKVDVKNAFNSLDRATLLTEVSTQLPEIYPYVWQCYSSASKLFFGDSDIKSSVGVQQGDPLGPALFSLGIHNHISNLTSKFNIWYLDDGTIGGNVDDVLKDLNHIKQQFGKIGLELNFSKCELFFTEKLSQDRIRLASDLFNEITPSIKILDKHSLCLLGAPLYNESIQPLLDQKIRTFSTNTDKLGALNSHIAFSILKYCLFVPKLIYILRASPIWKFPGLLDNMDATLKSTLEQILNLTFDEHSWNQATLPVKYGGIGVRKISSVALPAFLSSVHSIRELSSQILKSNSISLTYATEALESWKVRCPNVDIPKERSTQKLWDLPLVQLTHSNLLQNLTSDRDQARLLALSEKESGYWLHALPSKNLGTLLDNESFRVALGLRLGTPLCHQHRCPCGKEVDKFGIHGLSCQRSAGRLFRHGSLNDTIKRALATIDVPALIEPAGISRDDGKRPDGLTLVPWERGRALMWDATCVDTLAPCHIRETVSRPGAAAEMAENGKRRKYASLIESYIFVPFAVETLGPWSLSAKKFLRDISPRLIASSGDRRAGSFFAQRISLAVQRGNAASILGTIPRGHDLYSN

SEQ ID NO: 17254 - protein, 943 aa, Maniola jurtina
MNPSASQGEYLECSHCSDGRRFKGRKGLNIHIARCHGPPTRPLTCPNLMCDQTQSGSDNQVPFEIVLSKYNQNIPLVKRIPRGARISLARSLSHTIQNVLSNSLLDWQNLFFFAYRHFYVNKTESGSLCSKLKKNNLANRVFPIPDCSFRTQNYNLKKVVENKVMDGDLKNAARILFSNDTLAPFNDITLEALREKHPLPNIDSLLPDPPSNTSHLQIKDEDTYAAIMSFSSGSAGGMDGITPQHLKDLVGVTAGDAGRALLSDITRLCNLMLSGEVNSSFLPFLYGARLCAFNKKDGGIRPIAVGCTFRRLASKLACKHIVSTLKDKFQPIQVGFGSKGGCEAAVHSARTFLANGEVEVLLKVDVKNAFNSLDRATLLTEVSTQLPEIYPYVWQCYSSASKLFFGDSDIKSSVGVQQGDPLGPALFSLGIHNHISNLTSKFNIWYLDDGTIGGNVDDVLKDLNHIKQQFGKIGLELNFSKCELFFTEKLSQDRIRLASDLFNEITPSIKILDKHSLCLLGAPLYNESIQPLLDQKIRTFSTNTDKLGALNSHIAFSILKYCLFVPKLIYILRASPIWKFPGLLDNMDATLKSTLEQILNLTFDEHSWNQATLPVKYGGIGVRKISSVALPAFLSSVHSIRELSSQILKSNSISLTYATEALESWKVRCPNVDIPKERSTQKLWNLPLVQLTHSNLLQNLSSDRDQARLLALSEKESGYWLHALPSKNLGTLLDNESFRVALGLRLGTPLCHQHRCPCGKEVDKFGIHGLSCQRSAGRLFRHGSLNDTIKRALATIDVPALIEPAGISRDDGKRPDGLTLVPWERGRALMWDATCVDTLAPCHIRETVSRPGAAAEMAENGKRRKYASLIESYIFVPFAVETLGPWSLSAKKFLRDISPRLIASSGDRRAGSFFAQRISLAVQRGNAASILGTIPRGHDLYSN

SEQ ID NO: 17255 - protein, 943 aa, Maniola jurtina
MNPSASQGEYLECSHCSDGRRFKGRKGLNIHIARCHGPPTRPLTCPNLMCDQTQSGSDNQVPFEIVLSKYSQNIPLVKRIPRGARISLARSLSHTIQNVLSNSLLDWQNLFFFAYRHFYVNKTESGSLCSKLKKNSLANRVFPIPDCSFRTQNYNLKKIVENKVMDGDLKNAARILFSNDTLAPFNDITLEALREKHPLPNIDSLLPDPPSNTSHLQIKDEDTYAAIMSFSSGSAGGMDGITPQHLKDLVGVTAGDAGRALLSDITRLCNLMLSGEVNSSFLPFLYGARLCAFNKKDGGIRPIAVGCTFRRLASKLACKHIVSTLKDKFQPIQVGFGSKGGCEAAVHSARTFLANGEVEVLLKVDVKNAFNSLDRATLLTEVSTQLPEIYPYVWQCYSSASKLFFGDSDIKSSVGVQQGDPLGPALFSLGIHNHISNLTSKFNIWYLDDGTIGGNVDDVLKDLNHIKQQFGKIGLELNFSKCELFFTEKLSQDRIRLASDLFNEITPSIKILDKHSLCLLGAPLYNESIQPLLDQKIRTFSTNTDKLGALNSHIAFSILKYCLFVPKLIYILRASPIWKFPGLLDNMDATLKSTLEQILNLTFDEHSWNQATLPVKYGGIGVRKISSVALPAFLSSVHSIRELSSQILKSNSISLTYATEALESWKVRCPNVDIPKERSTQKLWDLPLVQLTHSNLLQNLTSDRDQARLLALSEKESGYWLHALPSKNLGTLLDNESFRVALGLRLGTPLCHQHRCPCGKEVDKFGIHGLSCQRSAGRLFRHGSLNDTIKRALATIDVPALIEPAGISRDDGKRPDGLTLVPWERGRALMWDATCVDTLAPCHIRETVSRPGAAAEMAENGKRRKYASLIESYIFVPFAVETLGPWSLSAKKFLRDISPRLIASSGDRRAGSFFAQRISLAVQRGNAASILGTIPRGHDLYSN

SEQ ID NO: 17256 - protein, 957 aa, Spilosoma lubricipeda
MSLAPIQFSCPHCPGSPRTFSEHGLRVHVGRMHREVRRACASSRVSPGHTFPSCPSEQVAQTLLPDRTSLDGLARLKGSVPVLRHVPRGARNQAAGGLCNVIDLCLASNGIDEWSELLCFAYSALRVPAKELPGNMTSKVKANINSFRSWRGEGLSDARVSFGSRSTGKIIEARVFEGDLRGAARLLLSDDSFARRDRDTLDALKAMHPEPSRPLGFPSDLDLMFPALSVTAADVVTALGSFHGGSAGGLDGIRPTHLRELTSVSAGDNGRRLLECISRLVNFLLSGQLNPLVCPYLYGASLFALVKKDGGIRPIAVGSIFRRLVAKLACRDVRETMSGYLQPHQLGFGTQSGCEAAIHATRAFVMSPECEGSILLKLDIRNAFNTLERDVLLREVKERIPSLFPYLHQVYSHPSNLFFDENLIVSQVGAQQGDPLGPLVFSLAIHKVITEIKSPFNVWYLDDGTIGGKPEDVLQDLEILIPRFKDLGLEVNSSKCEFFQCGVGARSNLSRLATVLPGLRELSSRDFTLLGSPIFHCAVPGAIASRTQLLFTTHERLKDLSAHVAIVLLRTCFALPKISYLLRTTPTWLCPEEVASFDKALKSVVESVLNVSMDERQWGQASLPIRCGGLGVRGMRDVGLSAFLASAHGVANLVTVLLGIHGGEVSIPFLVDATSAWLALSPGEACPGAAHMQRAWDDVGVGRIYGALLEGSSGVDMARLRAVSRAEAGAWLHALPSPHLGTLLDDGSLRIAVALRLGCKVCERHVCTCGSMVEADGHHALSCRRCSGRFPRHHALNDVVRRALISANIPCLLEPPGLSRSHCKRPDGLTLVPWKNGRCLIWDATCVSTFAASHLGRTVRFPSAAAEDACYRKKQKYAALEQLYYFVLVAVETMGGWAADTLRFVGKLGRRLAEIKGDSRSGSFLVQRLAIAIQRGNAASLMGTFPPEAIRNGLNDL

SEQ ID NO: 17257 - protein, 958 aa, Spilarctia lutea
MSLAPIQLSCPHCPESPRTFSEHGLRVHVGRMHRGVRQACAGSQVSPALTFASCPSGQTAQTFLPDRASLERLAYLKKCVPVLRHVPRGARNQAAGRLCDVIDLCLANNGIDEWSELLCFAYSALRVPAKELPGNMTSKVKANINSSRHWRGEGLADPGSSFGSRSVGKIIEARVFEGDLRGAARLLLSDDTFARRDRDTLDALKEKHPEPSRPLSFPSVLDLTIPALSVTAEDVVTALTSFYGGSAGGLDGIRPAHLRELTSVAAGDNGRRLLECITRLVNFLLSGRLNPLICPYLYGASLCALVKRDGGIRPIAVGSIFRRLVAKLACRAVRENMSCYLQPHQLGFGTRLGCEAAIHATRAFVMNQENEGSILLKLDIRNAFNTLERDVLLREVKEHIPSLFPFLHQVYSHPSNLFFDDNLIISQVGAQQGDPLGPLVFSLAIHKVVTEIKSPLNVWYLDDGTIGGKPEDVLQDLEILIPRFRDLGLEVNSSKCEFFPCGGGGRTQLSRLAAVLPGLRELSSLDFTLLGSPIFLCAVPGAIDSRTRLLLTTHERLGDLSAHVAIVLLRTCFALPKINYLLRTTPTWLCPEEVSSFDRALKSVVESVLNVSMDERQWSQAGLPIRCGGLGVRSMRGVDLPAFLASAHGVANLVTVLLGSHGGGVSIPFLVDATSAWLDLNSGEACPGAAHMQRSWDEVGVKRIQGDLLEGSSGADMARLRAVSRSEAGAWLHALPSPYLGTLLDDNSLRIAVALRLGCKACERHVCTCGSMVEADGHHALSCRRCSGRFSRHHALNDVVRRALISAGIPCLLEPPGLSRSDGKRPDGLTLVPWRNGRCLIWDATCVSTVAASHLSRTICSPSAAAEDACYKKRQKYAALEQQYYFVPVAVETMGSWAADTLRFVGELGRRLALLSGDSRSGSFLVQRLAIAIQRGNAASLMGTFPPEAIRDGLSGDL

SEQ ID NO: 17258 - protein, 822 aa, Spilosoma lubricipeda
MTSKVKANINSFRSWRGEGLSDARVSFGSRSTGKIIEARVFEGDLRGAARLLLSDDSFARRDRDTLDALKAMHPEPSRPLGFPSDLDLTFPALSVTAADVVTALGSFHGGSAGGLDGIRPTHLRELTSVSAGDNGRRLLECITRLVNFLLSGQLNPLVCPYLYGASLFALVKKDGGIRPIAVGSIFRRLVAKLACRAVRETMSGYLQPHQLGFGTQSGCEAAIHATQAFVMSPECEGSILLKLDIRNAFNTLERDVLLREVKERIPSLFPYLHQVYSRPSNLFFDENLIVSQVGAQQGDPLGPLVFSLAIHKVITEIKSPFNVWYLDDGTIGGKPEDVLQDLEILIPRFKDLGLEVNSSKCEFFQCGVGARSHLSRLATVLPGLRELSSRDFTLLGSPIFHCAVPGAIAFRTQLLLTTHERLKDLSAHVAIVLLRTCFALPKISYLLRTTPTWLCPEEVASFDKALKSVVESVLNVSMDERQWDQVSLPIRCGGLGVRGMRDVGLSAFLASAHDVANLVTVLLGIHGGEVSIPFLVDATSAWLALSPGEACPGAAHMQRAWDDVGVGRIYGALLEGSSGVDMAGLRAVSRAEAGAWLHALPSPHLGTLLDDGSLRIAVALRLGCKVCERHVCTCGSMVEADGHHALSCRRCSGRFPRHHALNDVVRRALISANIPCLLEPPGLSRSDGKRPDGLTLVPWKNGRCLIWDATCVSTFAASHLGRTVRFPSAAAEDACYRKKQKYAALEQLYYFVPVAVETMGGWAADTLRFVGELGRRLAEIKGDSRSGSFLVQRLAIAIQRGNASSLMGTVPPEAIRNGLNDL

SEQ ID NO: 17259 - protein, 957 aa, Spilosoma lubricipeda
MSLAPIQFSCPHCPGSPRTFSEHGLRVHVGRMHREVRRACASSRVSPAHTFPSCPSEQVAQTLLPDRTSLDGLARLKGSVPVLRHVPRGARNQAAGGLCNVIDLCLASNGIDEWSELLCFAYSALRVPAKELPGNMTSKVKANINSFRSWRGEGLSDARVSFGSRSTGKIIEARVFEGDLRGAARLLLSDDSFARRDRDTLDALKAMHPEPSRPLGFPSDLDLTFPALSVTAADVVTALGSFHGGSAGGLDGIRPTHLRELTSVSAGDNGRRLLECITRLVNFLLSGQLNPLVCPYLYGASLFALVKKDGGIRPIAVGSIFRRLVAKLACRAVRETMSGYLQPHQLGFGTQSGCEAAIHATRAFVMSPECEGSILLKLDIRNAFNTLERDVLLREVKERIPSLFPYLHQVYSRPSNLFFDENLIVSQVGAQQGDPLGPLVFSLAIHKVITEIKSPFNVWYLDDGTIGGKPEDVLQDLEILIPRFKDLGLEVNSSKCEFFQCGVGARSHLSRLATILPGLRELSSRDFTLLGSPIFHCAVPGAIASRTQLLLTTHERLKDLSAHVAIVLLRTCFALPKISYLLRTTPTWLCPEEVASFDKALKSVVESVLNVSMDERQWGQASLPIRCGGLGVRGMRDVGLSAFLASAHGVANLVTVLLGIHGGEVSIPFLMDATSAWLALSPGEACPGAAHMQRAWDDVGVRRIYGALLEGSSGGDMARLRAVSRAEAGAWLHALPSPHLGTLLDDGSLRIAVALRLGCKVCERHVCTCGSMVEADGHHALSCRRCSGRFPRHHALNDVVRRALISANIPCLLEPPGLSRSDGKRPDGLTLVPWKNGRCLIWDATCVSTFAASHLGRTVRFPSAAAEDACYRKKQKYAALEQLYYFVPVAVETMGGWAADTLRFVGELGRRLAEIKGDSRSWSFLVQRLAIAIQRGNAASLMGTFPPEAIRNGLNDL

SEQ ID NO: 17260 - protein, 968 aa, Mythimna impura
MILPSFLTCPHCPGSSRVFSAHGLKVHIGRMHKHALRSGAVSQVPPVGTVNIPSSGQVTPAHSPTQSPLDGLASCKASIPVLRHIPKGARNQAAGKLCDIIDSCVANNGVDEWSALLSFAYTSLRVPAKELPGNVTSKVKANIMSPGHCLNGVVDAGKRSGSRSIKKSIETKVFEGDLRGAVRILMSEDSFARGDADTLASLKLKHPDPSRPLSFPPDPDPSFTALLVTVEDVVSALGSFYTGSAAGLDGIRPGHLKELISVSAGENGRRLVGVLTRLANFLLSGQLNPRVCPFLYGASLFALEKKDGGIRPIAVGSVFRRLTAKLACRAVKEDMSRYLQPHQLGFGTRLGCEAAIHATRAFVMDPENEDSILLKLDIRNAFNTLERDVLLNEVKEKIPSLYPFLHQVYRLPSNLFSDNSLILSKVGAQQGDPLGPLVFSLAIHKTIVELKSGLNVWYLDDGTIGGRPEEVFQDLEALVPRLRDLGLEVNPSKCEFFPCSTEARTHFSRFNSFLPGLRELSCSDFNLLGSPIFFGAVPDAITSRTRLLLSAYERLKDLSAHVAIVLLRMCFALPKITYLLRTTPTWLCPEEVSSFDNALKVVVESVLNVSLDGPQWRQAALPIRCGGLGVRCARDVGLPAFLASAHGVANLVTVLLNTNGDGGSMPFVSDAVSAWLTLNSGAAIPESEHVQRAWDDIGVKLLQEQLLEGALGVDKARLRAMSQPESGAWLQAIPSPHLGTLLDDDSLRVTVALRLGCKACEPNICTCGSLVEADGHHALSCRRCTGRFPRHHALNDIVRRALISANIPCVLEPPGLSRSDGKRPDGLTLVPWKNGKCLIWDATCVSTVAASHLSRTMHTASAAAEDACSKKKLKYASLGQLYHFVPVAVETLGSWSTEAKCFVGDLGRRLGEATGDSRSGSFLVQRMAIAIQRGNAASVMGTFAPGTIRGGLFIDILYNCKMIIYLYT

SEQ ID NO: 17261 - protein, 960 aa, Mesoligia furuncula
MYKDAQMSALSAMLSCPHCPGSSRTFSSHGLKVHIGRMHRNARQPVATPRTSSTVTDSQPVSQVPPVLRPCPLERLSALKVSTPILRHVPKGARNQAAGKLCDIIDKCVSCNGVEDWGALLTFAFGGLRVPSRDAPGNMTAKVKANVESVGADQFVDESGCVAGVAKSRGIRKPIESKVFEGDLRGAVRLLVSDDSFAQHDPDTLSALTVKHPNPSRPLNFPLAPDLSCPRVTASVEDVALALSSFYSGSAAGLDGIRPGHLKELTSGSAGENGRRLLECLTKLANFLMSGQLNPVVCPYLYGASLCALKKKDGGLRPIAIGSVFRRLTAKVACRSVRVAMSEYLQPHQLGFGTPRGCEAAIHATRTFVMDPKNSDCVVLKLDIRNAFNTLERDVLLSEVKDKIPSLYPFLYQVYYSPSNLFYHDSLISSQVGAQQGDPLGPLVFSLAIHKVISGLKSSLNLWYLDDGIIGGSPEEVCQDLEVLVPQLKELGLEVNPSKCEFFPCGVGARTHFSRFGSHLPGLKELSSHNFSLLGSPIFLDGVPEAISSRKQLLLNARERLKDLSAHVAILLLRMCFALPKVTYLLRTAPTWLCPEEVCSFDCALKSTVESILNVSFNDAQWRQAALPIRYGGLGVRCVHDVGLPAFLASTHGVADLVTVILDSNGDGANIPFMLDAGSAWSVLNMGAASPDATHVQRAWDDVTSKLIQEQMLVGSSGADLARLRAVSQPESGAWLHALPSPHLGTLLDDDSLRVAVALRLGCKVCEPHRCTCGSMVEADGHHALSCRRCSGRFPRHHALNDIVRRAFVSADVPCVLEPPGLCRTDGKRPDGLTLVPWRNGKCLIWDATCVSTVAASHLCRTVHSPSAAAEDAAERKRVKYAPLVDRYLFVPIAVETMGAWGTEARKLISEIGHKLRDKTGDSRSGSFLVQRLAIAIQRGNAASVLGTFSPGTVRGGLFD

SEQ ID NO: 17262 - protein, 960 aa, Mesoligia furuncula
MYKDAQMSALSAMLSCPHCPGSSRTFSSHGLKVHIGRMHRNARQPVATPRTSSTVTDSQPVSQVPPVLRPCPLERLSALKVSTPILRHVPKGARNQAAGKLCDIIDKCVSCNGVEDWGALLTFAFGGLRVPSRDAPGNMTAKVKANVESVGADQFVDESGCVAGVAKSRGIRKSIESKVFEGDLRGAVRLLVSDDSFVQHDPDTLSALTVKHPNPSRPLNFPLAPDLSCPRVTASVEDIALALSSFYNGSAAGLDGIRPGHLKELTSGSAGENGRRLLECLTKLANFLMSGQLNPVVCPYLYGASLCALKKKDGGLRPIAIGSVFRRLTAKVACRSVRVAMSEYLQPHQLGFGTPRGCEAAIHATRTFVMDPKNSDCVVLKLDIRNAFNTLERDVLLSEVKDKIPSLYPFLYQVYYSPSNLFYHDSLISSQVGAQQGDPLGPLVFSLAIHKVISGLKSSLNLWYLDDGIIGGSPEEVCQDLEVLVPQLKELGLEVNPSKCEFFPCGVGARTHFSRFGSHLPGLKELFSHNFSLLGSPIFLDGVPEAISSRKQLLLNARERLKDLSAHVAILLLRMCFALPKVTYLLRTAPTWLCPEEVCSFDCALKSTVESILNVSFNDAQWRQAALPIRYGGLGVRCVHDVGLPAFLASTHGVADLVTVILDSNGDGTNIPFMLDAGSAWSVLNMGAASPDATHVQRAWDDVTSKLIQEQMLVGSSGADLARLRAVSQPESGAWLHALPSPHLGTLLDDDSLRVAVALRLGCKVCEPHRCTCGSMVEADGHHALSCRRCSGRFPRHHALNDIVRRAFVSADVPCVLEPPGLCRTDGKRPDGLTLVPWRNGKCLIWDATCVSTVAASHLCRTVHSPSAAAEDAAERKRVKYAPLVDRYLFVPIAVETMGAWGTEARKLISEIGHKLRDKTGDSRSGSFLVQRLAIAIQRGNAASVLGTFSPGTVRGGLFD

SEQ ID NO: 17263 - protein, 965 aa, Busseola fusca
MSVNAQMSALSTMLPCPHCPGSSRTFSSHGLRVHVGRMHRGAGRPVAAPRTVSIVTDSQKVSQGPLVSSPCPLERLSALKVSTPVLRHIPKGARNRAAGKLSDVIDRCVSCNGVEDWGALLTFAFGGLRVPSRDAPGNMTAKVKANVESVGADQFGIEPGNGAGLSRSCGIRKAIESKVFEGDLRGAVRLLVSDDSFARYDPDTLSALAVKHPSPSRPLKFPSAPDSSFPRVTVSVEDVALALGSFYSGSAAGLDGIRPGHLKELTSGSAGESGRRLLECLTKLVNFLMSGQLNPVVCPYLYGASLCALRKKDGGLRPIAIGSVFRRLTAKLACRSVKVAMAEYLQPHQLGFGTRLGCEAAIHATRAFVMDSGHSDCVVLKLDIRKAFNTLERDVLLSEVKEKIPSLYPFLYQVYYSPSNLFFSDNLILSQVGAQQGDPLGPLVFSLAIHKVISGLKSSLNLWYLDDGIIGGSPEEVFQDLEVLVPQLKELGLEVNPSKCEFFSCGVGARAHFSRFGSYLPGLKELSPLSFSLLGSPIFPDGVPEAISSRKQLLLNAQERLKDLSAHVALSLLRMCFALPRITYLLRTTPTWLCPGEVCSFDCTLKATVESILNVSLNDAQWRQASLPIRYGGLGVRCVRDVGLPAFLASTHGVADLVTVILNSNGDGANIPFMLDAGSAWSVLSMGAAGPGAVHVQRAWDDITSELTREQLLGGFSGADLARLRAVSQPEAGAWLHALPSPHLGTLLDDDSLRVAVALRLGCKVCEPHRCTCGSMVEADGHHALSCRRCSGRFPRHHALNDIVRRAFASADVPCVLEPSGLCRTDGKRPDGLTLVPWKNGKCLIWDATCVSTVAASHLGRTIVSPSAAAEEAAVRKRVKYAPLVDRYHFVPIAVETMGSWGTEAKKLISEIGHKLRDKTGDSRSGSFLVQRLAIAIQRGNAASVAGTFAPGTVRGGLYDLTSLN

SEQ ID NO: 17264 - protein, 957 aa, Eilema depressum
MSVNATPALTCPHCPGSSRAFSARGLKVHIGRMHKRVQRSDAVSLVSPADAYATTSAEQGLPAAPPPSQGVLERLASFRGSVPVLRHIPKGARNQAAGKLCAIVDACVACNGVDEWGALFSFAYTALRVPAKESPGNVTSKVKANVLSAGHNDFEMAAPLAVTGSHSLKKRIEAKVFEGDLRGAVRLVVSDDSLAQRDPGTLAALQDKHPAPSRPLSFPPDPGVPIAAVNVTVEDVSSALGSFYAGSAAGLDGIRPGHLKELTSVSAGENGRRLLESLTSLVNFLLSGQLNLQVCPYLYGASLFALAKKDGGLRPIAVGSVFRRLVAKLACRAVKEEMAEYLQPHQLGFGTRLGCEAAIHATRAFVMNPRNEGSILLKLDIRNAFNTLERDVLLSEAKENIPSLYPFLHQVYRLPSNLFFDDKLILSEVGAQQGDPLGPLVFSLAIHKAIRDLKSTFNIWYLDDGTIGGKPEDVFQDLEALIPSLRNLGLEVNPSKCEFFPCGTEARTHYSHFNSLLPGLKELSSSDFSLLGSPIFLAAVPEAITTRKQLLLTAHERLKGLSAHVAIVLLRMCFALPKVTYLMRTAPTWLCPEEVSSFDAALRSVVESVLNVSLDETQWIQAALPIRCGGLGVRRVRDVGLPAFLASAHGVETLVTTLLNSNGDGEIMPFVSGAMSAWSALNAGASIPEAMRLQRAWDEVGVKRLQGKLLGDATGADKARLRAVSQLESGAWLQALPSPHLGTLLDDDSLRVAVAFRLGCKVCEPHICTCGSTVEADGHHALSCRRCTGRFPRHHALNDIVRRALISANVPCVLEPPGLSRSDGKRPDGLTLVPWKNGKCLIWDATCVSTVAASHLSRTVHSPCAAAEDASLKKRLKYADLEPLYNFVPVAVETLGSWGREARAFVKELGQRLNETTGDCRSGSFLVQRLAIAIQRGNAASVMGTFPRGTVTDGLFN

SEQ ID NO: 17265 - protein, 956 aa, Apamea monoglypha
MSLPSLSACPHCPGSSRVFSAHGLRVHVGRMHKHAMRSGAVSQALPVDEVNTLSSGQVSPAHSPPQGSLDRLSGFKASVPVLRHIPKGARNQAAGKLCDIMNSCIAVNGVDEWSALLSFGYTALRVPAKELPGNVTSKVKANISSPVRCHDGVLDAGRRSGPRSIKSSIEAKVFEGDLRGAVRLLMSDDSFVRGDADTLASLKLKHPDPSRPLSFPPDPDPSLTALSVTEGDVMSALGSFYAGSAAGLDGIRPGHLKELTSVSAGENGKRLVGCLTRLANFLLCGRLDPCICPYLYGASLFALAKKGGGVRPIAVGSVFRRLTAKLACRAVKEDMAKYLQPNQLGFGTRLGCEAAIHATRTFVMNPENEDSILLKLDIRNAFNTLERDVLLSEVKENIPSLYPFLHQVYRMPSNLFFDNSLILSKVGAQQGDPLGPLVFSLAIHKAIVELNSSLNVWYLDDGTIGGRPEDVFQDLEALVPRLRDLGLEVNSAKCEFFPCSTEARTHFSRFESFLPGLREISCSDFNLLGSPIFLSAVPEAIFSREQLLLSAHERLKDLSAHVAIILLRMCYALPKMTYLLRTTPTWLCPEEVSSFDNALKSVVESVLNVSLDGPHWIQAALPIRCGGLGVRCARDVGLPAFLASAHGVANLVTVLLKTNGDGGSMPFVSDAVSAWLTLNPDAAIPEATHVQRAWDDIGVGLLQERLLEGASGVVRARLRAVSQPESGAWLQAIPSPHLGTLLDDDSLRVAVALRLGCKVCEPHICTCGSTVEADGHHALSCRRCTGRFPRHHALNDIVRRALISANVPCVLEPAGLSRCDGKRPDGLTLVPWKNGKCLIWDATCVSTVAASHLSRTAHTASAAAEDACSVKRLKYASLEQPYYFVPVAVETLGCWSKAAKVFVAELGRKLREATGDSRSGSFLVQRLAIAIQRGNAASVMGTFAPGAIRGGLFCDI

SEQ ID NO: 17266 - protein, 955 aa, Ochropleura plecta
MSVTITNLSCPHCPGSTRTFSDHGLKVHVGRMHKHTVRPQLAVSRVCPGDTLNHASPAPPHAQSTLERLAVMKGGVPILRHIPKNARNQAAFKLCDIIDACVDHNGVEEWSTFLTFAYTALKVPSKNLPGNMTAKVKTNILASGRCGPDEEIEIASERNSPRLRSNKKVIESKVFDGDLRGAVRLLMTEDSFAERDPDTLAAMKLKHPSSSRPLNFPVDPDLSCSPVSVTADDVVSALGSFYSGSAAGLDGVRPGHLKELTSVSAGENGRRLLGCLAKLVKFLISGQLNPLVCPYLYGASLFALAKKDGGLRPIAVGSVFRRLTAKLACRTVRDEMAEYLRPHQLGFGTHLGCEAAIHATRAFVMDLKNEGSIILKLDISNAFNTLERDVLLREVKEKIPSLYPFLHQVYRLPSNLFYDSNLILSQVGAQQGDPLGPLVFSLAIHRVLVELKSPLNVWYLDDGTIGGKPEDVLQDLEALIPRLRELGLEANPSKCEFFPCSIGARKHFSRFDTLLPGLKELTPSNFSLLGSPIFLTAVPEAINSKIRLLLTAHERLKDLSAHVAIVLLRMCFALPKIAYLLRTTPTWLCSEEVSSFDKVLKSIVESILNVSLGDTQWSQAALPVRCGGLGVRRAGDVGLPAFLASAHGVASLVTVLLSPNGDEVGIPFVSDAVSAWSALNPSATIPAALHVQRAWDDEGVKGAQGNLLGEASGADMARLRAVSQPESGAWLHALPSPHLGTLLDDDSLRVAVAFRLGCKVCEPHVCTCGSMVEADGHHALSCRRCTGRFPRHHALNDIVRRALVSANVPCRLEPPGLSRSDGKRPDGLTLVPWRNGKCLIWDATCVCTVASSHLCRTVHSPSAAAEDAASKKRLKYAPLEPLYHFVPMAVETMGSWGKDARDFVQDLGHRLNILSGDSRSSRFLAQRLSIAIQRGNAASVMGTFAPGMVRGGLFK

SEQ ID NO: 17267 - protein, 960 aa, Apamea monoglypha
MYKDAQMSALSAMLSCPHCPGSSRAFSSHGLKVHIGRMHRNARQPVVAPRTSSTVTDSQLVSQVPPVSRPCPLERLSALKVSTPVLRHVPKGARNQAAGKLCDIIDKCISCNGVGDWGALLTFAFGGLRVPSRDAPGNMTAKVRANVESVGSDQFVDESDCVAGVTKSRGIRKAIESKVFEGDLRGAVRLLVSDDSFVQHDPDTLSALTVKHPSPSRPLNFPSAPDLSFPRMTASVEDVALALGSFYSGSAAGLDGIRPAHLKELTSGSAGENGRRLLECLTKLANFLMSGQLNPVVCPYLYGASLCALKKKDGGLRPIAIGSVFRRLTAKLACRSVRVAMSEYLQPHQLGFGTRRGCEAAIHATRAFVMNPENSDCLVLKLDIRNAFNTLERDVLLSEVKDKIPSLYPFLYQVYYYPSNLFFSDSLISSQVGAQQGDPLGPLVFSLAIHKVISGLKSSLNLWYLDDGIIGGSPEEVCQDLELLVPQLKELGLEVNPSKCEFFPCGVGARTHFSRFGSHLPGLKELSPLSFSLLGSPIFLDGVPEAISSRKQLLLSARERLKDLSAHVAILLLRMCFALPKVTYLLRTAPTWLCPEEVCSFDCALKSTVESILNVSFNDAQWRQAALPIRYGGLGVRCVHDVGLPAFLASTHGVADLVTVILDSNGDGANIPFMLDAGSAWFVLSMGAARPDATHIQRAWDDVASRLIQEQMLVGSSGADLARLRAVSQPESGAWLHALPSPHLGTLLDDDSLRVAVALRLGCKVCEPHRCTCGSMVEADGHHALSCRRCSGRFPRHHALNDIVRRAFVSADVPCLLEPPGLCRTDGKRPDGLTLVPWRDGKCLIWDATCVSTVAASHLGRTVHSPSAAAEDAAERKRVKYAPLVDRYHFVPIAVETMGAWGAEARNLISEIGHKLRDKTGDSRSGSFLVQRLAIAIQRGNAASVLGTFAPGTVRGGLFD

SEQ ID NO: 17268 - protein, 813 aa, Mythimna ferrago
MSPLHCHGGEVDAGRRSGSRSIKNSIETKVFEGDLRGAVRLMMSDDSFARGDADTLASLKLKHPDPSRPLSFPPDPDPSFTALSVTVEDVVSALGSFYSGSAAGLDGIRPGHLKELISVSAGENGRRLVGSLTRLVNFLLSGQLNPCVCPFMYGASLFALKKKDGGVRPIAVGSVFRRLTAKLACRAVKEDMARYLQPHQMGFGTRLGCEAAIHATRAFVMDPENEDSILLKLDIRNAFNTLERDVLLSEVKEKIPSLYPFLHQVYRLPSNLFSDNSLIPSKVGAQQGDPLGPLVFSLAIHKTIVELKSSLNVWYLDDGTIGGRPEDVFQDLETLVPRLRDLGLEVNPSKCEFFPCSTEARTHFSRFDSFLPGLRELSRSDFNLLGSPIFLIAVPEAITSRTQLLLSAHERLKDLSAHVAIVLLRMCFALPKIAYLLRTTPTWLCPEEVSSFDNALKSVVESVLNVSLDGPQWRQAALPIRCGGLGVRCARDVGLPAFLASAHGVANLVTVLLNTNGDGGSIPFASDAVSAWWTLNPGATIPESEHVQRAWDDGGVILLQEQLLEGALGVDRARLRAVSQPESGAWLQAIPSPHLGTLLDDDSLRVAVALRLGCKVCEPHTCTCGSMVEADGHHALNCRRCTGRFPRHHALNDIVRRALISANIPCVLEPSGLSRSDGKRPDGLTLVPWKNGKCLIWDATCVSTVAASHLSRTMHTASAAAEDACSKKRLKYAALEQLYHFVPVAVETLGSWSTEARSFVRDLGRRLGEATGDSRSRSFLVQRMAIAIQRGNAASVMGTFAPGTIRGGLFIDI

SEQ ID NO: 17269 - protein, 954 aa, Eilema sororculum
MSVSSAQLLCPHCPGSSRVFSARGLRVHIGRMHKDVLRLGTVSPVSLTNAGTSMGQSLSTPSSAESSLDRLASLRGNVPVLRHIPKGARSQAAGRLCDIIDSCIGRNGVDEWATLLLFAYTALRVPARESSGNMTTKVKNNILSSDHGDDFEISASKARTGPRSLQKNIESKVFEGDLRGAVRLLMSDDSFANRDHGTMTALELKHPGPSRPLNFPPDPGLSFTPVTVTTGDVISAVGSFYAGSAAGLDGIRPGHLKELTSVSAGESGRRLVGCLTGLVNFLLSGQLNPLVCPYLYGASLFALAKKDGGLRPIAVGSVFRRLTAKLACCAVKEEMADYLQPHQLGFGTRLGCEAAIHATRAFVMDPKNEGAILLKLDIRNAFNTLERDVLLSEVKEKIPSLYPFLHQVYRLPSNLFYENNLLLSKVGAQQGDPLGPLVFSLAIHKAVQSLKSALNVWYLDDGTIGGKPEDVVQDLEALVPSLRDLGLEVNPSKCEFFSCGTEARTCFSRLSTILPGLKELSPSDFYLLGSPIFLSAVPKAISVRKHLLLAAHERLKGLPAHVAIVLLRMCFALPKIAYLLRTTPIWLCPEEVSSFDDALKSVVESVLNVNLDGTQWSQATLPIRSGGLGVRCVRDVGLPAFLASAQGVASLVTTLLNPNGDGASVPFVSDAVSAWSALNGGASIPELGHLQRAWDEVGVRRLQAQLLDGAAGVDKARLRAVSQPESGAWLQALPSPHLGTLLDGDSLRVAVALRLGCKVCEPHICTCGSMVEADGHHALSCRRCTGRFPRHHALNDIVRRALISANVPCVLEPPGLSRSDGKRPDGLTLVPWKNGKCLLWDATCVSTVAASHLSRTIHSPSAAADDASSRKRLKYAELEPQYYFVPIAVETLGSWGRDAKSLIKAIGQRLIEATGDSRSGSFLVQRMAVAIQRGNAASVMGTFAPGAIRGGLFD

SEQ ID NO: 17270 - protein, 956 aa, Mythimna ferrago
MSIPSFLTCPHCPGSSRVFSAHGLKVHIGRMHKHVLRSGAVSQVSPVDTVNTSASGQIPPAHSLTQSPLDRLAAWKASVPVLRHIPKGARNQAAGKLCEIIDSCVTNNGVDEWSALLSFAYTSLRVPAKELPGNVTSKVKANIMSPAYCHDGEVDASRRLSSRSLKKRIEAKVFEGDLRGAVRLLMSDDSLARGDADTLASLKLKHPDPSRPLSFPPDPDPSFTSLSVTVEDVVSALGSFYSGSAAGLDGIRPGHLKELISVSAGENGRRLVGGLTRLANFLLSGQLNPCVCPFMYGASLFALEKKDGGVRPIAVGSVFRRLTAKLACHAVKEDMARYLQPHQLGFGTRLGCEAAIHATRAFVMDPGNEDSILLKLDIRNAFNTLERDVLLSEVKEKIPSLYPFLHQVYRLPSNLFSDNTLIPSKVGAQQGDPLGPLVFSLAIHKTIVELKSGLNVWYLDDGTIGGRPEDVFQDLETLVPRLRDLGLEVNPSKCEFFPCSTEARTHFSRFDSFLPGLRELSRSDLNLLGSPIYLSALPEAITARTQLLLSAHERLKDLSAHVAIVLLRMCFALPKITYLLRTTPTWLCPEEVSLFDNALKSVVESVLNVSLDGPQWRQAALPIRCGGLGVRCARDVGLPAFLASAHGVANLVTVLLNINGDGGSIPFVSDAVSAWLTLNSGATIPESEHVQRAWDDRGVMLLQEQLLEGALGVDRARLRAVSQPESGAWLQAIPSPHLGTLLDDDSLRVAVALRLGCKVCEPHTCTCGSLVEADGHHALNCRRCTGRFPRHHALNDIVRRALISANVPCVLEPSGLSRSDGKRPDGLTLVPWKNGKCLIWDATCVSTVAPSHLSRTMHTASAAAEDACSKKRLKYASLEQLYHFVPVAVETLGSWSTEARSFVRDLGRRLGEATGDSRSRSFLVQRMAIAIQRGNAASVMGTFAPGTIRGGLFIDI

SEQ ID NO: 17271 - protein, 912 aa, Eilema sororculum
MNLYIDVSRQMHAEAVPPLRSPLEKLATLREGIPVMRHIPKGARNQAACKLSDAMDRCVSSNSVEDWYALLSFAYSTLRVPSKSLPGNMTSKVKANIDSSGSHRFEDEYDSPVASRGSYSMKKKIESKVFEGDLRGAVRLLMSDDKFAQSSPETLAALKLKHPGPSRPLSPSPEPDTSCTPVTATPDDVAKALSSFYSGSAAGLDGIRPGHLKELTSRAAGENGQRLLGSLTKLSNFLLGGQLNSEVCPFMYGASLCALNKKDGGIRPIAVGSTYRRLTAKLACYSVRKEMSEHLQPRQVGFGTPRGCEAAIHATRAYVMEPQNAHCVVLKIDIRNAFNTLERDVLLSAVKEKSPSLYPFLFQVYHSPSNLFLNKDLVLSQVGAHQGDPLGPLVFSLAIHETISELESPLNLWYLDDGTIGGEPGVVARDLEALIPRLKGLGLEVNPAKCEFFPCSTEARKHFTHFNTLVPGLSELTTGTFSLLGSPIFPEAVPEAITSRQLLLLAAREQLKNLSAHVAVLLLRMCFAVPKITYLLRTTPTWLCPEAVSAFDSTLRDTAESILNVSLDERQWLQASLPIRRGGLGLRRVTDVGLPAFLASAHGVADLVTIMLSTDGARVSIPYMYEALSAWSALNPNKPCPGTPNVQRAWDEIGAEGAMSDMLDRATGVDLARLRAVSQLEAGAWLHALPSPHLGTLLDDDSLRVAVALRLGCKVCESHRCICGSMVERDGHHALSCRRCTGRFPRHHALNDIVRRALISANVPCVLEPPGLDRSDGKRPDGLTLVPWKHGKCLVWDATCVSTVAATHLSRTVNAPAAAAEDAASRKRSKYAAMEPQYYFVPIAVETLGSWGSEAKRLIAEIGRRIHDQGGDSRSGSFLGQRMAIAIQRGNAASIMGTFAPGTIRGGLFDTT

SEQ ID NO: 17272 - protein, 954 aa, Eilema sororculum
MSVSSAQLLCPHCPGSSRVFSARGLRVHIGRMHKDVLRLGTVSPVSLTNAGTSMGQSLSTPSSAESSLDRLASLRGNVPVLRHIPKGARSQAAGRLCDIIDSCIGRNGVDEWATLLLFAYTALRVPARESSGNMTTKVKNNILSSDHGDDFEISASKACSGPRSLQKNIESKVFEGDLRGAVRLLMSDDSFANRDHGTMTALELKHPGPSRPLNFPPDPGLSFTPVTVTTGDVISAVGSFYAGSAAGLDGIRPGHLKELTSVSAGESGRRLVGCLTGLVNFLLSGQLNPLVCPYLYGASLFALAKKDGGLRPIAVGSVFRRLTAKLACRAVKEEMADYLQPHQLGFGTRLGCEAAIHAARAFVMDPKNEGAILLKLDIRNAFNTLERDVLLSEVKEKIPSLYPFLHQVYRLPSNLFYENNLLLSKVGAQQGDPLGPLVFSLAIHKAVQSLKSALNVWYLDDGTIGGKPEDVVQDLEALVPSLRDLGLEVNPSKCEFFSCGTEARTCFSRLSTILPGLKELSPSDFYLLGSPIFLSAVPKAISVRKHLLLAAHERLKGLSAHVAIVLLRMCFALPKIAYLLRTTPIWLCPEEVSSFDDALKSVVESVLNVNLDGTQWSQATLPIRSGGLGVRCVRDVGLPAFLASAQGVASLVTTLLNPNGDGASVPFVSDAVSAWSALNGGASIPELGHLQRAWDEVGVRRLQAQLLDGAAGVDKARLRAVSQPESGAWLQALPSPHLGTLLDGDSLRVAVALRLGCKVCEPHICTCGSMVEADGHHALSCRRCTGRFPRHHALNDIVRRALISANVPCVLEPPGLSRSDGKRPDGLTLVPWKNGKCLLWDATCVSTVAASHLSRTIHSPSAAADDASSRKRLKYAELEPQYYFVPIAVETLGSWGRDAKSLIKAIGQRLIEATGDSRSGSFLVQRMAVAIQRGNAASVMGTFAPGAIRGGLFD

SEQ ID NO: 17273 - protein, 954 aa, Eilema sororculum
MSVSSAQLLCPHCPGSSRVFSARGLRVHIGRMHKDVLRLGTVSPVSLTNAGTSMGQSLSTPSSAESSLDRLASLRGNVPVLRHIPKGARSQAAGRLCDIIDSCIGRNGVDEWATLLLFAYTALRVPARESSGNMTTKVKNNILSSDHGDDFEISASKACTGPRSLQKNIESKVFEGDLRGAVRLLMSDDSFANRDHGTMTALELKHPGPSRPLNFPPDPGLSFTPVIVTTGDVISAVGSFYAGSAAGLDGIRPGHLKELTSVSAGESGRRLVGCLTGLVNFLLSGQLNPLVCPYLYGASLFALAKKDGGLRPIAVGSVFRRLTAKLACRAVKEEMADYLQPHQLGFGTRLGCEAAIHATRAFVMDPKNEGAILLKLDIRNAFNTLERDVLLSEVKEKIPSLYPFLHQVYRLPSNLFYENNLLLSKVGAQQGDPLGPLVFSLAIHKAVQSLKSALNVWYLDDGTIGGKPEDVVQDLEALVPSLRDLGLEVNPSKCEFFSCGTEARTCFSRLSTILPGLKELSPSDFYLLGSPIFLSAVPKAISVRKHLLLAAHERLKGLSAHVAIVLLRMCFALPKIAYLLRTTPIWLCPEEVSSFDDALKSVVESVLNVNLDGTQWSQATLPIRSGGLGVRCVRDVGLPAFLASAQGVASLVTTLLNPNGDGASVPFVSDAVSAWSALNGGASIPELGHLQRAWDEVGVRRLQAQLLDGAAGVDKARLRAVSQPESGAWLQALPSPHLGTLLDGDSLRVAVALRLGCKVCEPHICTCGSMVEADGHHALSCRRCTGRFPRHHALNDIVRRALISANVPCVLEPPGLSRSDGKRPDGLTLVPWKNGKCLLWDATCVSTVAASHLSRTILSPSAAADDASSRKRLKYAELEPQYYFVPIAVETLGSWGRDAKSLIKAIGQRLIEATGDSRSGSFLVQRMAVVIQRGNAASVMGTFAPGAIRGGLFD

SEQ ID NO: 17274 - protein, 1010 aa, Cosmia trapezina
MPSLHFFFLCCKIMLDIFLCKENHYYYFLVVILLVSSFYLLYLLLMRVLYFLDAQMSALSTMLSCPHCPGSSRTFSSHGIKIHIGRMHKHMQQPVATPQTSSTVTDSQPMSQVPLVSRPCPLERLSALKMCTPVLRHIPKGSRNQAAGKLCDILDKCVSCNGVDEWGALLTFAFVGLRVPSRVAPGNMTTKVKANIESVGADRFVDESSCVADFSKPRGIRKAIESKVFEGDLRGAVRLLVSDDSFAQHNPGTLDALTVKHPSPSRPLNFPSAPDSSFPRVTASVEDVTLALRSFNSGSAAGMDGIRPGHLKELTSGSAGENGRRLLESLTKLVNFLMSGQLNPVVCPYLYGASLCALKKKDGGLRPIAIGSVFRRLSAKLACRSVRVDMAEYFQPHQLGFGTPRGCEAAIHATRAFVMDPKNSDCVVLKLDIRNAFNTLERDVLLSEVKDKIPSLYPFLYQVYYSPSNLFFNDSLISSQVGAQQGDPLGPLVFNLAIHKVISGLKSSLNLWYLDDGIIGGSLEEVCQDLEVLVPQLKELGLEVNPSKCEFFPCGFGARSHFSLFGCLLPGLKELSPLSFSLLGSPIFLDGVPEAISSRTQLLLNARERLKDLSAHVAILLLRMCFALPKITYLLRTAPTWLCPEEVCSFDCALKSTVESILNVSFNDTQWKQAALPIRHGGLGVRCVHDVGLPAFLASTHGVADLVTVILDSNGDGANIPFMLDAGSAWSVLNMGAASPDATHVQRAWDDVSSRLIQEQMMVGSSGADLARLRAVSQPESGAWLHALPSPHLGTLLDDDSLRVAVALRLGCKVCEPHRCTCGSTVEADGHHALSCRRCSGRFPRHHALNDIVRRAFVSADVPCVLEPPGLSRSDGKRPDGLTLVPWKNGKCLIWDATCVSTVAASHLGRTVLSSSAAAEDAAERKRVKYAPLATRYHFVPIAVETMGCWGTEAKKLIGEIGHKLREKTGDSRSGSFLVQRLAIAIQRGNAASVMGTFAPGTVRGGFFEN

SEQ ID NO: 17275 - protein, 953 aa, Ennomos quercinarius
MSVPSAPLTCPHCPGSTRTFSLHGLKIHIGCKHKGVLHPPITLQTTRPAAAVIQQTHPVPAPQRCPLEGLASLRESVPVLRHVPKGARSQAAGKLCEIIDKCVDCNGVEEWWSLLSFVFSALRVPSKELPGNMTTKVKANIESSGLYLFEECDGLVGNSRSRSIQKTIESKVFEGDLRGAVRLLVSDDTFAQRGPDTLAALKLKHPCPSRPLNSPPAPDASYTTASVTVSDVSQALSTFYSGSAAGLDGIRPGHLKKLTSVSAGENGHRLMECLTRLCNFLLSGQLNIEVCPYLYGAALCALAKKDGGVRPIAVGSTFRRLTAKLACRAVKGEMAEYLQPHQLGFGTRRGCEAAIHATRTFVLDAANSNCVVLKLDICNAFNTLERDVLLNEVKDNIPSLYPFLHQIYQSPSKLFFDNNLILSQVGAQQGDPLGPLVFSLAIHKIILELKSHLNLWYLDDGTIGGKPEVVAQDLRVLVPRLRKLGLVINSSKCEIFPCSAEAGIHFDHFSAILPGLRELSPNTFNLLGSPIFPEAVPEAITSRKQLLLAAQERLNNLSAHVALILLRMCFALPKVTYLLRTTPTWLCPEEVSSFDSTLKSAVESILNVSLNELQWDQAALPIRLGGLGVRRVLDVGLPAFLASAHGVADLVTNILYTNGDRASVPYLSDAVSAWSAVNQGAPNPEALHVQRAWDEVGAKRNLQQMLDSATGADLARLKAVSESESGAWLHALPSPHLGTLLDDDSLRVTVALRLGCKVCEPHNCTCGAMVEADGHHALSCRRCTGRFPRHHALNDIIRRAFISANVPCVLEPPGLCRSDGKRPDGLTLVPWKNGKCLVWDATCVSTVTATHLSRTVHKAAAAAEDAASKKRLKYATMEPHYYFVPIAVETMGSWGAEAKTLVSEIGRRIRDKGGDSRSGSFLVQRLAIAIQRGNAASIMGTFAPRTVRGGLFE

SEQ ID NO: 17276 - protein, 954 aa, Laspeyria flexula
MSETITSLSCPHCPGSTRTFSEHGLKVHIGRMHKHNIVQLQDAASPVRSADTMIHASPAPSHAQCPLDGLAAMKECIPILRHIPKNARNQAAGRLCDVIDTCVDLNGLDEWSTLLTFAYTALKVPSKNSPGNMTAKVKANILASGQGGHGEEITVERSSSKLRSSKKIIESKVFDGDLRGAVRLLMTEDSFAERSPDTLAAMRLKHPCSSRTLDFPASPDPSYTPVSVTVGDVVLALGSFHSGSAAGLDGFRPGHFKELTSASAGENGRRLLGCLAKLVHFLLSGQLNPLVCPYLYGASLFALAKKGGGLRPIAVGSVFRRLTAKIACRVVRDEMAEYLGPHQLGFGTHLGCEAAIHTTRAFVMDSENKDSIILKLDIRNAFNTLERDVLLREVKDKIPSLYPFLHQVYRLPSNLYFNNNLILSQVGAQQGDPLGPLVFSLAIHRVIVDLKSHLNVWYLDDGTIGGKPEDVLQDLETLIPHLRELGLEVNPSKCEFFPCSIDARKHFSDFSTHLPGLKELTSSDFHLLGSPIFLNAVPEAINYRKHILLTAHERLKDLSAHVAIILLRMCFALPKISYLLRTTPTWLCPEEVSSFDETLKSVVESIINVSLNETQWSQAALPVRNGGLGVRRACDVGLPAFLSSAHGVASLVTVLLNPNGDEVSMPFVSSAVSAWLALNPSATIPVGAHVQRAWDGEGVKRIQGKLIEEASGADMARLRAVSQSESGAWLLALPSPHMGTLLDDDSLRIAVALRLGCRVCEPHVCTCGSRVETDGHHALSCRRCSGRFSRHHALNDIVRRALVSANVPCMLEPPGLSRSDGKRPDGLTLVPWKNGKCLIWDVTCVSTVAASHLSRTARFPSAAAEDAASKKRLKYAALEPMYDFVPIAVETMGSWGKDARNFIQALGRRLNNICGDSRSGSFLVQRLAIAIQRGNAASVVGTFAPGATRGGLFD

SEQ ID NO: 17277 - protein, 960 aa, Apamea monoglypha
MYKDAQMSALSAMLSCPHCPGSSRAFSSHGLKVHIGRMHRNARQPVVAPRTSSTVTDSQLVSQVPPVSRPCPLERLSALKVSTPVLRHVPKGARNQAAGKLCDIINKCISCNGVGDWGALLTFAFGGLRVPSRDAPGNMTAKVRANVESVGSDQFVDESDCVAGVTKSRGIRKAIESKVFEGDLRGAVRLLVSDDSFAQHDPDTLSALTVKHPSPSRPLNFPSAPDLSFPRMTASVEDVALALGSFYSGSAAGLDGIRPAHLKELTSGSAGENGRRLLECLTKLANFLMSGQLNPVVCPYLYGASLCALKKKDGGLRPIAIGSVFRRLTAKLACRSVRVAMSEYLQPHQLGFGTRRGCEAAIHATRAFVMNPENSDCLVLKLDIRNAFNTLERDVLLSEVKDKIPSLYPFLYQVYYYPSNLFFSDSLISSQVGAQQGDPLGPLVFSLAIHKVISGLKSSLNLWYLDDGIIGGSPEEVCQDLELLVPQLKELGLEVNPSKCEFFPCGVGARTHFSRFGSHLPGLKELSPLSFSLLGSPIFLDGVPEAISSRKQLLLSARERLKDLSAHVAILLLRMCFALPKVTYLLRTAPTWLCPEEVCSFDCALKSTVESILNVSFNDAQWRQAALPIRYGGLGVRCVHDVGLPAFLASTHGVADLVTVILDSNGDGANIPFMLDAGSAWSVLSMGAASPDATHIQRAWDDVASRLIQEQMLVGSSGADLARLRAVSQPESGAWLHALPSPHLGTLLDDDSLRVAVALRLGCKVCEPHRCTCGSMVEADGHHALSCRRCSGRFPRHHALNDIVRRAFVSADVPCLLEPPGLCRTDGKRPDGLTLVPWRDGKCLIWDATCVSTVAASHLGRTVHSPSAAAEDAAERKRVKYAPLVDRYHFVPIAVETMGAWGAEARNLISEIGHKLRDKTGDSRSGSFLVQRLAIAIQRGNAASVLGTFAPGTVRGGLFD

SEQ ID NO: 17278 - protein, 954 aa, Eilema sororculum
MSVSSAQLLCPHCPGSSRVFSARGLRVHIGRMHKDVLRLGTVSPVSLTNAGTSMGLSLSTPSSAESSLDRLASLRGNVPVLRHIPKGARSQAAGRMCDIIDSCIGRNGVDEWATLLLFAYTALRVPARESSGNMTTKVKNNILSSDHGDDFEISASKACTGPRSLQKNIESKVFEGDLRGAVRLLMSDDSFANRDHGTMTALELKHPGPSRPLNFPPDPGLSFTPVTVTTGDVISAVGSFYAGSAAGLDGIRPGHLKELTSVSAGESGRRLVGCLTGLVNFLLSGQLNPLVCPYLYGASLFALAKKDGGLRPIAVGSVFRRLTAKLACRAVKEEMADYLRPHQLGFGTRLGCEAAIHATRAFVMDPKNEGAILLKLDIRNAFNTLERDVLLSEVKEKIPSLYPFLHQVYRLPSNLFYENNLLLSKVGAQQGDPLGPLVFSLAIHKAVQSLKSALNVWYLDDGTIGGKPEDVVQDLEALVPSLRDLGLEVNPSKCEFFSCGTEARTCFSRLSTILPGLKELSPSDFYLLGSPIFLSAVPKAISVRKHLLLAAHERLKGLSAHVAIVLLRMCFALPKIAYLLRTTPIWLCPEEVSSFDDALKSVVESVLNVNLDGTQWSQATLPIRSGGLGVRCVRDVGLPAFLASAQGVASLVTTLLNPNGDGASVPFVSDAVSAWSALNGGASIPELGHLQRAWDEVGVRRLQAQLLDGAAGVDKARLRAVSQPESGAWLQALPSPHLGTLLDGDSLRVAVALRLGCKVCEPHICTCGSMVEADGHHALSCRRCTGRFPRHHALNDIVRRALISANVPCVLEPPGLSRSDGKRPDGLTLVPWKNGKCLLWDATCVSTVAASHLSRTIHSPSAAADDASSRKRLKYAELEPQYYFVPIAVETLGSWGRDAKSLIKAIGQRLIEATGDSRSGSFLVQRMAVAIQRGNAASVMGTFAPGAIRGGLFD

SEQ ID NO: 17279 - protein, 909 aa, Erannis defoliaria
MSALPAHSICPHCPESTRTFSVHGLKVHIGRVHKDVRLAVATPKSSPAVLDAQRANLASQTPCSTPLDRLSALKVSTPVLRHIPKGARNQAAGKLCEVIDKCVSCNGVEDWCALLTFAYGALRVPLKDAPGNMTAKVKANIELSKPDLTMESDSTGINFRSRSFRKTVESKVFEGDLRGAVRLLVSEDSFAQHDPDTLAALELKHPGPSRPLNFPSEPDATYSTESVVVEDVALALSSFYSGSAAGLDGIRPGHLKELTSGSAGENGPRLLECLTKLVNFLLSGQLNPVVCPYLYGASLCALTKKDGGVRPIAIGSVFRRLTAKLACRSVGGAMSEYLQPCQLGFGTRRGCEAAIHATRAFVMDPANSNCVVLKLDIRNAFNILERDVLLSEVKENVPSLYPFLHQVYHSPSNLFFNDRLILSQVGAQQGDPLGPLVFSLAIHKVISELKSSLNLWYLDDGTVGGAPEDVYQDLEALVPRLRKLGLEVNPSKYEFFPCSIEARKHFSRFDALFPGLKELSSHTFSLLGSPIFLEAVPEAINSRRQLLLTAQERLKELSAHVTMVLLRMCFALPKITYLLRTTPTWLCHEEVSSFDDSLRSAVQSTLNVSLNDSQWTQAASPIRYGGLGVRCARDVGLPAFLASAHGVADLVAVILRLNGDKASIPFVSEAISAWSALNPGVANPVSPQVQRAWDEVGAKRIHKQALDGAAGADLARLRAVSQPESGAWLHALPSPHLGTLLDDDSLRVAVALRLGCKVCEPHRCTCGSMVEADGHHALSCRRCAGRFSRHHALNDIVRRAFVSAGVPCVLEPPGFSRTDGKRPDGLTLVPWKNGRCLVWDATCVSTVAASHLGRTVCSPAAAAEDAASKKSLKYLNCMRINIFKPKPFFWKLVLYVPITVLYSAVFNLM

SEQ ID NO: 17280 - protein, 956 aa, Hecatera dysodea
MSLPSCLTCPHCPGSSRVFSAHGLKVHIGRMHKHALRSGAVSQVPPVDTVNASSSGEVPPVLAPAQSPLDKLAASKASIPVLRHIPKGARNQAAGKLCDIVDACVASNGVDEWSALLSFAYTSLRVPAKELPGNVTSKVKANIMSPVHCLDDEVVASRRSGSRSIKKSIETKVFEGDMRGAVWLLMSDDSFARGDADTLASLKLKHPDPSRPLSFPPDPDPSFTALSVTVEDVVSALGSFYTGSAAGLDGIRPGHLKELISVTAGENGKRLVGGLTRLANFLLSGQLNPCVCPFLYGASLFALEKKDGGVRPIAVGSVFRRLTAKLACRAVKEDMARYLQPHQLGFGIRLGCEAAIHATRTFVMDPENEDSILLKLDIRNAFNSLERDVLLSEVKDKIPSLYPFLHQVYRLPSNLFSGNNLILSKVGAQQGDPLGPLVFSLAIHKAIVGLKSGLNVWYLDDGTIGGRPEDVFQDLEALVPRLRDLGLEVNPSKCEFFPCGTEARTHFSRCNSFLPGLRKLSCSDFNLLGSPIFLSAVPEAITSRTRLLLSAHERLKDLSAHVAIVLLRMCFALPKITYLLRTAPTWLCPEEVSSFDNALKSVVESVLNVSLDEPQWRQATLPIRCGGLGVRCARDVGLPAFLASAHGVANLVTVLLNINGDGGSMPFVSDAVSVWLTLNSGAAIPESENVQRAWDDIGVKLIQEHLLANAMRVDRARLRAVSQPESGAWLQAIPSPHLGTLLDNDSLRVAVALRLGCKVCEPHTCTCGSMVEADGHHALSCRRCTGRFPRHHALNDIVRRALVSANVPCVLEPPGLNRSDGKRPDGLTLVPWKNGKCLIWDATCVSTVAASHLSRTMHTASAAAEEACSKKRLKYASLVQLYHFVPVAVETLGSWSTEAKCFVRDLGHRLGEATGDSRSGSFLVQRMAIAIQRGNAASVMGTFAPGTIRGGLFIDL

SEQ ID NO: 17281 - protein, 955 aa, Mesoligia furuncula
MSLPSLSTCPHCPGSSRFFSAHGLKVHIGRMHKHAIRSGAVSQALLVDAVNTSSSGQVPPAHSPAQGPLDRLAGFKASVPVLRHIPKGARNQAAGKLCDIIESCIVSNGVDEWSALLSFGYTALRVPAKELPGNVTSKVKANIMSPVQCHDSVLDAGRRSGSRSMKNSIEAKVFEGDLRGAVRLLMSDDSFVQGDADTLASLKLKHPDPSRPLSFPPDPDPLLTALSVTEEDVLSALGSFYAGSAAGLDGIRPGHLKELTSMSAGENGKRLVGCLTRLANFLLCGRLNPRICPYLYGASLFALAKKGGGVRPIAIGSVFRRLTAKLACRAVKEDMAKYLQPNQLGFGTRLGCEAAIHATRTFVMNPENEDSILLKLDIRNAFNTLERDVLLSEVKENIPSLYPFLHQVYRMPSNLFFDNSLILSKVGAQQGDPLGPLVFSLAIHKAIVELNSGLNVWYLDDGTIGGRPEDVFQDLEALVPRLRDLGLEVNPAKCEFFPCSTGARTHFSRFESFLPGLREISCSDFNLLGSPIFLSAVPEAIFSRKQLLLSAHERLKDLSAHVAIILLRMCYALPKMTYLLRTTPTWLCPEEVSSFDNALKSVVESILNVSLDGPQWKQAALPIRCGGLGVRCARDVGLPAFLASAHGVANLVTLLLNTNGDGGSMPFVSDAVSAWLTLNTGATIPEATHVQRAWDDIGVGLLQEQLLEGSSGVVKARLLAVSQPESGAWLQAIPSPHLGTLLDDDSLRVAVALRLGCKVCEPHICTCGTMVEADGHHALSCRRCTGRFPRHHALNDIVRRALISANVPCVLEPTGLSRCDGKRPDGLTLVPWKNGKCLIWDATCVSTVAASHLSRTTHTASAAAEDACSSKRLKYASLEQPYYFVPVAVETLGSWSREAKVFVAELGRKLREATGDNRSGSFLVQRLAIAIQRGNAASVMGTFAPGTIRGGLFCD

SEQ ID NO: 17282 - protein, 953 aa, Ephestia elutella
MSSLSPMLTCPHCPGSLRTFSSHGLKIHIGRKHKGISSIVAPRPADAGVSGISLGQSTPSASPRQCPLDALAGLKGSTQVLRHVPKGARNQAAGKLSEIVDRCVESNEVDDWFALLSFAYTALRVPSKALPGNMTFKVKSNIESSGNNKFEDVSDIAAEGFRPRSTRKIIESKVFEGDLRGAVRLLVSDDTLAKRGPDTLAALKLKHPGPSRPLSSPPAPDTSYTPESFTVDDVTLALTSFYSGSAAGSDGIRPGHLKELTSSCAGENGRRLMESLTRLSNFMLSGRVNIQVCPYLYGAALCALSKKDGGLRPIAIGSVFRRLAAKLACRAVKEIMSEYLQPHQLGFGTRLGCEAAIHSTRAFVADADNAKCVVLKLDIYNAFNTLERDVLLCEVRDKLPSLYPFLYQVYQSPSNLVYNNNLILSQVGAQQGDPLGPLVFSLAIHKIVSDLKSPLNIWYLDDGTLGGEPETVYGDLLTLIPRFKELGLEVNTSKCEYFPCSSEARSHSAHFFTSLPGLRELSKTNFSLLGSPIFVEAVPEAINSRRQLLLMAKERLQNISAHVALILLRTCFALPKISFLLRTAPTWLCSKEISDFDGSLKSTVESILNVQLDGTQWKQAALPIRLGGIGVRCAHDVGMPAFLASAHGVAGLVAIILSSKGSKVSIPYVSDAELAWAADNLGAPSPISLSVQRAWDDVGSEKVHKELLGTASGADLARLKAVSQPESGAWLHALPSPYLGTLLDDDSMRVAVALRLGSRVCEPHKCVCGSMVESDGYHALSCRRCSGRFPRHHALNDIVRRAFVTANVPCMLEPPGLSRSDGKRPDGLTLVPWRHGRCLIWDATCVSTVAISHIRRTACTAAAAAEDAANKKREKYAAMEPKYIFVPIAVETMGSWGSDAKRLLKEIGQRIAVNTGDSRSGSFLVQRMAIAIQRGNAASVLGTFAPETLRGGL

SEQ ID NO: 17283 - protein, 947 aa, Eilema depressum
MSTTQLTCPHCPGSLRIFSSHGLKVHIGRMHKRAPVSPADTDTTAPAGQGQSAPALAQTTLDRLATFRGSIPVLRHIPKGARNQAAGKLCDIVDACVTNNGVEEWGALLAFAYTALRVPARESPGNMTSKVKVNVLQSDHFDNIELPASSVRTGSRSVIKNIESKVFEGDLRGAVRLLMSDDSFARRDPGTMAALELKHPSPSRQLNFPPDPGLQCTTAAVTVGDVISALGSFYAGSAAGLDGIRPVHLKELTSVSAGENGRRLLGCLTRLVNFLLSGQVHPQVCPYLYGASLFALAKKDGGLRPIAVGSVFRRLTAKLACRAVKEEMAEYLQPHQLGFGTCLGCEAAIHATRAFVMDPRNEGSILLKLDIRNAFNTLERDVLLSEARERIPSLYPFLHQAYKLPSNLFFDNNLITSKVGAQQGDPLGPLVFSLAIHRAIRGLKSALNVWYLDDGTIGGKPEDVLHDLEALVPSLKDLGLEVNPSKCEFFPCGTEARTHFAQLNSFLPGLKELSSSNFNLLGSPIFLSAVPEAITARKQLLLTAHERLRGLSAHVAIVLLRMCFALPKINYLLRSTPTWLCPEEVSSFDDALKSVVESVLNVSLDGTQWSQAAQPIRCGGLGVRRVRDVGLPAFLASAHGVANLVTSLLNPNGDGGIIPFASDAMLAWSALSAGAAIPEPVHLQRAWDDVGVKRLQVQLLDGAAGADKARLRAVSQPESGAWLQALPSPHLGTLLDDDSLRVAVAFRLGCKVCEPHICTCGSMVEADGHHALSCRRCTGRFPRHHALNDIVRRALVSANVPCVLEPPGLSRSDGKRPDGLTLVPWKNGKCLLWDATCVSTVAASHLSRTVHSPSAAAEDASSRKRLKYADLEPLYYFVPVAVETLGSWGKEAKGLIKEIGQRLNEATGDFRSGSFLVQRLAIAIQRGNAASVMGTFAPGAIRGGLFD

SEQ ID NO: 17284 - protein, 962 aa, Erannis defoliaria
MSALSATRTCPHCPGSTRSFCEHGLKVHIGRMHKDILHPTASCCTVAQSTPTPSFDTRQVQQATPTAPGARACPLDLLAALKQRTPVVRHIPKGARNQAAGKLCEIIGKCVETNGVDDWCSLLAFAFIALKVPARQLPGNMTAKVKANIESSGSYRLDDEFGSAEANFRSSPVHKIIESKVFEGDLKGAVRLLVSEDSFARHGPDTLAALKSKHPCPSRPLTFPPGPDLSYAAVTATVEEVALALSSFYSGSAAGLDGIRPGHLKELTSGSAGENGPRLLESLTKLSNFLLSGQLNPEVCPYLYGASLCALDKKDGGVRPIAVGSVFRRLAAKLACRAVREGMAQYLQPHQLGFGTRLGCEAAIHATRTYVGDPANSNCVVLKLDISNAFNTLERDVLLSEVKDHIPSLYPFLHQIYQSPSNLFFNNNLILSQVGAQQGDPLGPLVFSLAIHKAIVDLRSSLNIWYLDDGTIGGKPETVFQDLEALIPRLKELGLEVNPSKCEFFPCCTEARTHFVQFNSLLPGLRELSTSTFYLLGSPIFLDALPEAIVSRNRLLLAAQQRLQHLSAHVALVLLRMCFAVPKVTYLLRTTPTWLCPGEISCIDGTLKSTVESILNVSLNESQWNQAVQPVRYGGLGVRRVRDIALPAFLASAHGVESLVTLILHSDGDRVSIPYVSDAVAAWSVLNSGALGPAASHVQRAWDDVGAKRMQEEMLSMATGVDLARLRAVSQSESGAWLQALPSPHLGSLLDDNSLRVAIALRLGCKVCEPHRCTCGSMVEADGHHALSCRRCTGRFSRHHALNDIVRRAFVSANVPCMLEPPGLSRTDGKRPDGLTLVPWKSGKCLVWDATCVSTVAASHLSRSIHSPGAAAEDAAKGKRQKYAAMEPNYLFVPIAVETMGCWGADAKTLVREIGRRIKEATGDSRSGSFLVQRLAIAIQRGNAASVMGTFAPGAIRGGLFD

SEQ ID NO: 17285 - protein, 954 aa, Erannis defoliaria
MSDLSVQLTCPYCPGSTRAFSAHGLKVHIGRKHKDVRRPVAASQVLPADTVTASGQAQPSPASHQCPLERLVNLRGRVPVLRHVPKGARNQAAGKLCDIIDTCVDCNGVEDWSTLLSFAYVALRVPAKDLPGNVTTKVKANIMSSGSNHVDEVGSGLANHRLRSTKKVIESKVFECDLRGAVRLLMSDDTYAEQGPDTLAALRLKHPAPSRSLDFPSDPDISYTSLTVTVEDVVSGLGSFYSGSAAGLDGLRPGHLKDLASVSAGENGRRLLGCLTRLVNFLLSGQLNPLVCPYLYGASLCALDKKDGGMRPIAVGSVFRRLTAKLACRAVKDDMSGYLQLHQLGFGTRLGCEAAIHATRMFVMDPENVDGILLKLDIRNAFNSLERDVLLSEVKENIPALYPFLHQVYRYPSNLFFNNTLILSQVGAQQGDPLGPLVFGLAIHKVLLEVKSSLNVWYLDDGTIGGKPDDVLQDLEALIPRLKVLGLEVNPSKCELFPCSNLSRLHFTRFSTLLPGLKEISTSDFNLLGSPIFLDAVPEAVTSRKQLLLTAHERLKDLSAHVAIILLRMCFALPKINYLLRTTPTWLCPEEISSFDIALKTVVESVLNVSLEERQWDQASLPIRYGGLGVRRARDVGLPAFLASAHGVANLVTVLLCSDGVEASIPFVSGARSAWLALNSGAIIPEKTHVQRVWDEVGAKRLQEQLLEDATGANMARLRAVSQPESGAWLHALPSPHLGTLLDDDSLRVAVALRLGCKVCEPHKCTCGSLVEADGHHALSCRRCTGRFPRHHALNDIVRRALVSANIPCVLEPPGLCRSDGKRPDGLTLVPWKNGKCLVWDATCVSTVAASHLSRTIHSPSAAAEDAGLKKRLKYAAMEPLYHFVPIAVETLGCWGIEAKELIREIGQRLNIKTGDSRSGSFLVQRLAIAIQRGNAASVMGTFAPGTVRGGLFD

SEQ ID NO: 17286 - protein, 956 aa, Mythimna impura
MSLPSILTCPHCPGSSRVFSAHGLKVHIGRMHKHALRSGAVSQVPPIDTVNTSSSGQVRPAHSPTQSPLDRLASCKASIPVLRHIPKGARNQAAGKLCDILDSCVASNGVDEWSALLSFAYTSLRVPAKELPGNMTSKVKANIMSPVHYHEEEVDANSRSGSRSIKKSIETKVFEGDLKGAVRLLMSDDTFARGDADTLASLKLKHPDPSRPLSFPPDPDPSFTALSVTVEDVISALGSFYTGSAAGLDGIRPGHLKELISVSAGENGRRLVGGLTRLANFLLSGQLNPCVCPFLYGASLFALEKKDGGIRPIAVGSVFRRLTAKLACRAVKEDMAHYLQPHQLGFGTRLGCEAAIHATRAFVMDPENEDSILLKLDIRNAFNTLERDVLLSEVKEKIPSLYPFLHQVYRLPSNLFSDNSLILSKVGAQQGDPLGPLVFSLAIHKAIIELKSGLNVWYLDDGTIGGKPEDVFQDLEALVPRLRDLGLEVNPSKCEFFPCSTEARTHFSRFNSFLPGLRELSCSDFNLLGSPIFLGAVPEAITSRTRLLLSAHERLKDLSAHVAIVLLRMCFALPKITYLLRTTPTWLCPEEVSSFDNALKLVVESVLNVSLDGPQWRQAALPIRYGGLGVRCARDVGLPAFLASAHGVANLVTVLLNTNGDGGSMPFVSDAVSAWLTLNSGATIPDSVHVQRAWDDRGVKLLQEQLLEGALGVDKARLRAVSQPESGAWLQAIPSPHLGTLLDDDSLRVAVALRLGCKVCEPHTCTCGSMVEADGHHALNCRRCTGRFPRHHALNDIVRRALISANVPCVLEPPGLSRSDGKRPDGLTLVPWKNGKCLIWDATCVSTVAASHLSRTMHTASAAAEDACSKKRLKYAALDQLYHFVPVAVETLGSWSTEAKCFVGDLGRRLAEATGDSRSRSFLVQRMAIAIQRGNAASVMGTFAPGTIRGGLFIDD

SEQ ID NO: 17287 - protein, 951 aa, Ephestia elutella
MSAQSSTLTCPHCPGSSRVFGQHGLKIHIGRKHKGLATSPRTITATADTEQTNAPGLELLRSRCSLDSLAALRESTPVLRHVPKGARNQAAGKLSSIINACVECNQVGDWFSLLSFAFTALRVPLRTLPGNMTSKVKANIESLHLDELDGDLSVTAKRSGPGGSRKIIESKVFEGDLRGAVRLLVSDDTFAEKGPETLAALRLKHPSPSRPLGSPSAPDTSYSPASVSEDNVMLALNAFYTGSSAGLDGIRAGHLKELVSNSAGDNGRRLRESLTRLSNFMLSGSVNPEVCPYLYGATLCALSKKDGGLRPIAIGSVFRRLTARLACRSVKEEIADYLQPHQLGVGTRLGCEAAIHATRTFVADPGNAKHVVLKLDIKNAFNSLERDVLLSEVKERTPSLYPFVLQMYESPTNLFFNNNLILSQVGAQQGDPLGPLVFSLAIHKIIKELKSPLNVWYLDDGTLGGKPETVRQDLEVLIPRFREIGLDVNPSKCEFFPCSTEARSHFSLLSDVLPGIREITQSTFNLLGSPIFLESVPDAIATRRRLLLTAQERLRNLPAHVGLVLLRSCFALPKINFLLRTTPTWLCPEEISAFDGVLKSAVESILNVSLNETQWSQASLPIRLGGLGLRRARDVGLPAFLASAHGVAGLVAVILSSNGDRVSIPHVPGAESAWSAVNPGMSFPQALSNQRAWDDTGAKRTFAALLGDAAGADCARLRAAATPESGAWLHALPSPQLGTFLDNDSLRVAVALRLGCRVCEPHRCTCGSMVEADGYHALSCRRCAGRFPRHHALNNIVRRAFVSAGVPCVLEPPGLSRSDGKRPDGLTLVPWQCGKCVVWDATCVNTVATSHLGRTMVAASAAAEDAAERKRAKYAALEPHYIFVPIAVETMGCWGIDAKRLLRELGRRIAQITCDPRSFSFLVQRMAIAIQRGNAASILGTFAPETLGGGL

SEQ ID NO: 17288 - protein, 962 aa, Marasmia exigua
MSTNSVTPTHLACPYCPESSRPRAFSPHGLKVHVGRMHRSGRSPSRASQASSVALAVSARRASPSPAPADCPLSRLASYKRSIPVLRHVPKGARNQAAGKLCDIIDSCMSGNGIDEWSVLLSFAYTALRVPAKESPGNMTAKVKANIGSSVPGPVADIAASGVTPMSRSKKKVIESKVFEGDLRGAVRLLMSDDCFAQRDPDTLAALKLKHPSPSRPLIFSTEPDLSFPVASVVREDVVSALGSFYSGSAAGLDGIRPGHLKELTSVSAGENGVRLLSCLTRLSNFLLSGQLNPLVCPYLYGASLMALQKKDGGVRPIAIGSVFRRLTAKLACCAVREDMARYLQPHQLGFGTRLGCEAAIHATRAFVMNPENKGSILLKLDIRNAFNTLERDVLLNEVRENIPSLYPFLHQVYKHPTNLFYDSELILSQVGAQQGDPLGPLLFSLAIHRPIQELKSSLNVWYLDDGTIAGRPEDVLQDLETLIPRLGVLGLEVNPSKCEFFPCSDEARTHFTQISAFLPGLRELGCSELYLLGSPIFPIAVPDAISSRIEFLINAQERLKDLSAHVAIVLLRMCFAVPKIAYLLRTSPTWICPREVISFDRALKSVVESILNVSLGEAQWSQATLPIRYGGLGVRCAGDVGLPAFLASAHGVASLVTVILGSNGGEVSIPFVSGAISAWSALCPGAEIPEATHVQWAWDDIRMKRIQEGFLEGAAGADVARLRAVAQTEAGAWLHALPSPHLGTLLDNCSLRVAVALRLGCKVCEPHKCTCGSMVGVDGHHALSCRRCAGRFPRHHALNDIICRALRSANVPCVLEPPGLSRTDGKRPDGLTLVPWKNGKCLVWDATCVSTVAASHLSRTVHSPSAAAEDASSKKRLKYANLEPLYQFVPVAVETMGCWGSEARDFVWEIGRRLCEVTGDSRSGSFLVQRLAIAIQRGNAASVMGTFASEAGGGELPVFGR

SEQ ID NO: 17289 - protein, 956 aa, Mythimna ferrago
MSIPSFLTCPHCPGSSRVFSAHGLKVHIGRMHKHVLRSGAVSQVSPVDTVNTSASGQIPPAHSLTQSPLDRLAAWKASVPVLRHIPKGARNQAAGKLCEIIDSCVTNNGVDEWSALLSFAYTSLRVPAKELPGNVTSKVKANIMSPAYCHDGEVDASRRLSSRSLKKRIEAKVFEGDLRGAVRLLMSDDSLARGDADTLASLKLKHPDPSRPLSFPPDPDPSFTSLSVTVEDVVSALGSFYSGSAAGLDGIRPGHLKELISVSAGENGRRLVGGLTRLANFLLSGQLNPCVCPFMYGASLFALEKKDGGVRPIAVGSVFRRLTAKLACHAVKEDMARYLQPHQLGFGTRLGCEAAIHATRAFVMDPGNEDSILLKLDIRNAFNTLERDVLLSEVKEKIPSLYPFLHQVYRLPSNLFSDNTLIPSKVGAQQGDPLGPLVFSLAIHKTIVELKSGLNVWYLDDGTIGGRPEDVFQDLETLVPRLRDLGLEVNPSKCEFFPCSTEARTHFSRFDSFLPGLRELSRSDLNLLGSPIYLSALPEAITARTQLLLSAHERLKDLSAHVAIVLLRMCFALPKITYLLRTTPTWLCPEEVSLFDNALKSVVESVLNVSLDGPQWIQAALPIRCGGLGVRCARDVGLPAFLASAHGVANLVTVLLNINGDGGSIPFVSDAVSAWLTLNSGATIPESEHVQRAWDDIGVMLLQEQLLEGALGVDRARLRAVSQPESGAWLQAIPSPHLGTLLDDDSLRVAVALRLGCKVCEPHTCTCGSLVEADGHHALNCRRCTGRFPRHHALNDIVRRALISANVPCVLEPSGLSRSDGKRPDGLTLVPWKNGKCLIWDATCVSTVAPSHLSRTMHTASAAAEDACSKKRLKYASLEQLYHFVPVAVETLGSWSTEARSFVRDLGRRLGEATGDSRSRSFLVQRMAIAIQRGNAASVMGTFAPGTIRGGLFIDI

SEQ ID NO: 17290 - protein, 957 aa, Eilema depressum
MSTRPTELTCPHCPGSSRVFSVHGLRVHVGRMHKRVLHPGGAVSLVSPHDAGIAAPVGQEAPAPPSAPGSLDKLASVRGVIPVLRHIPKGARNQAAGRLSDIIESCVAHNGVDEWSGLLSFAYSALRVPARESPGNMTSKVKANVLSSCHFDDIEVVASTSVSATRTIKKHIESKVFEGDLRGAVRLLMSDDSFAQRDPDTLAALELKHPSPSRPLSFPPDPGLPCTVATVTIEDVSSALASFYAGSAAGLDGIRPGHLKELTSVSAGENGKRLLGCLTELVNFLLSGQLNPLVCPYLYGASLFALAKKDGGVRPIAVGSVFRRLTAKLACRGVKEDMAGYLQPHQLGFGTRLGCEAAIHATRAFVMDPKNEGSVVLKLDICNAFNTLERDVLLREVKEKIPSLYPFLHQVYRLPSNLFLDNNLILSKVGAQQGDPLGPLVFSLAIHKAIRDLRSSLNIWYLDDGTIGGKPEEVLQDLEVLVPSLRDLGLEVNPSKCEFFPCGTGARTHFSHFHSVLPGLKELSLSNFYLLGSPIFLSAVPEAINARKQLLLAAHERLKGLSAHVALVLLRLCFAVPKITYLLRTTPTWLCPDEVVCFDDSLKSVVESVLNVSLDDTQWSQVALPISCGGLGIRRARDVGLPAFLASAHGVANLVTRLLTANGDGAVIPFALDAVSAWSVLNAGASIPEDVHLQRSWDDEGVRRLQNLLLECAAGADKARLRAVSQPESGAWLQALPSPHLGTLLDDDSLRVAVAFRLGCKVCEPHVCTCGSMVEADGHHALSCRRCTGRFPRHHALNDIVRRALVSANVPCVLEPPGLSRSDGKRPDGLTLVPWQNGKCLIWDATCVNTVAASLLSRTVHSPSAAAEDASYKKTLKYADLKPLYHFVPIAVETLGSWSKEAKILVRDIGSRLIETTGDSRSGAFLVQRLAIAIQRGNAASVMGTFAPGAVRGGLFD

SEQ ID NO: 17291 - protein, 956 aa, Cosmia trapezina
MSALSTMLSCPHCPGSSRTFSSHGIKIHIGRMHKHVQQPVATPQTSSTVTDSQPVSQVPLVSHPCPLERLSALKMCTPVLRHIPKGSRNQAAGKLCDILDKCVSCNGVDEWGALLTFAFVGLRVPSRVAPGNMTTKVKANIESVGADRFVDESSCVADFSKPRGIRKAIESKVFEGDLRGAVRLLVSDDSFAQHDPGTLDALTVKHPSPSRPLNFPSAPDSSFPRVTASVEDVTLALRSFNSGSAAGMDGIRPGHLKELTSGSAGENGRRLLESLTKLVNFLMSGQLNPVVCPYLYGASLCALKKKDGGLRPIAIGSVFRRLSAKLACRSVRVAMSEYFQPHQLGFGTPRGCEAAIHATRAIVMDPKNSDCVVLKLDIRNAFNTLERDVLLSEVKDKIPSLYPFLYQVYYSPSNLFFNDSLISSQVGAQQGDPLGPLVFNLAIHKVISGLKSSLNLWYLDDGIIGGSLEEVCQDLEVLVPQLKELGLEVNPSKCEFFPCGFGARSHFSLFGCLLPGLKELSPLSFSLLGSPIFHDGVPEAISSRTQLLLNARERLKDLSAHVAILLLRMCFALPKITYLLRTAPTWLCPEEVCSFDCALKSTVESILNVSFNDTQWRQAALPIRHGGLGVRCVHDVGLPAFLASTHGVADLVTVILDSNGDGANIPFMLDAGSAWSVLNMGAASPDATHVQRAWDDVSSRLIQEQMMVGSSGADLARLRAVSQPESGAWLHALPSPHLGTLLDDDSLRVAVALRLGCKVCEPHRCTCGSTVEADGHHALSCRRCSGRFPRHHALNDIVRRAFVSADVPCVLEPPGLSRSDGKRPDGLTLVPWKNGKCLIWDATCVSTVAASHLGRTVLSPSAAAEDAAERKRVKYAPLATRYHFVPIAVETMGCWGTEARKLIGEIGHKLREKTGDSRSGSFLVQRLAIAIQRGNAASVMGTFAPGTVRGGFFENW

SEQ ID NO: 17292 - protein, 958 aa, Spilarctia lutea
MSLAPIQLSCPHCPESPRTFSEHGLRVHVGRMHRGVRQACAGSQVSPALTFASCPSGQTAQTFLPDRASLERLAYLKKCVPVLRHVPRGARNQAAGRLCDVIDLCLANNGVDEWSELLCFAYSALRVPAKELPGNMTSKVKANINSSRHWRGEGLADPGSSFGSRSVGKIIEARVFEGDLRGAARLLLSDDTFARRDRDTLDALKEKHPEPSRPLSFPSVLDLTIPALSVTAEDVVTALTSFYGGSAGGLDGIRPAHLRELTSVAAGDNGRRLLECITRLVNFLLSGRLNPLICPYLYGASLCALVKRDGGIRPIAVGSIFRRLVAKLACRAVRENMSCYLQPHQLGFGTRLGCEAAIHATRAFVMNQENEGSILLKLDIRNAFNTLERDVLLREVKEHIPSLFPFLHQVYSHPSNLFFDDNLIISQVGAQQGDPLGPLVFSLAIHKVVTEIKSPLNVWYLDDGTIGGKPEDVLQDLEILIPRFRDLGLEVNSSKCEFFPCGGGGRTQLSRLAAVLPGLRELSSLDFTLLDSPIFLCAVPGAIDSRTRLLLTTHERLGDLSAHVAIVLLRTCFALPKINYLLRTTPTWLCPEEVSSFDRALKSVVESVLNVSMDERQWSQAGLPIRCGGLGVRSMRGVDLPAFLASAHGVANLVTVLLGSHGGGVSIPFLVDATSAWLDLNSGEACPGAAHMQRSWDEVGVKRIQGDLLEGSSGADMARLRAVSRSEAGAWLHALPSPYLGTLLDDNSLRIAVALRLGCKACERHVCTCGSMVEADGHHALSCRRCSGRFSRHHALNDVVRRALISAGIPCLLEPPGLSRSDGKRPDGLTLVPWRNGRCLIWDATCVSTVAASHLSRTICSPSAAAEDACYKKRQKYAALEQQYYFVPVAVETMGSWAADTLRFVGELGRRLALLSGDSRSGSFLVQRLAIAIQRGNAASLMGTFPPEAIRDGLSGDL

SEQ ID NO: 17293 - protein, 955 aa, Eilema depressum
MSVNPTPALTCPHCPGSARAFSARGLKVHIGRMHKRAQRSDAVSLVSPADAYATTSAEQGLPAAPPSQSVLERLASFRGSVPVLRHIPKGARNQAAGKLCAIVDACVACNGVDEWGALLSFAYTALRVPAKESPGNVTSKVKANVLSAGHNDFEIAAPSAVTGSYSLKKRIEAKVFEGDLRGAVRLVVSDDSFAQRDPGTLAALQDKHPAPSRPLSFPPDPGVPIAAVNVAVEDVSSALGSFYAGSAAGLDGIRPGHLKELTSVSAGENGRRLLESLTSLVNFLLSGQLNLQVCPYLYGASLFALAKKDEGLRPIAVGSVFRRLVAKLACRAVKEEMAEYLQPHQLGFGTRLGCEAAIHATRAFVMNPRNEGSILLKLDIRNAFNTLERDVLLSEAKENIPSLYPFLHQVYRLPSNLFFDDKLILSEVGAQQGDPLGPLVFSLAIHKAIRDLKSTFNIWYLDDGTIGGKPEDVFQDLEALIPSLRNLGLEVNPSKCEFFPCGTEARTHYSHFNSLLPGLKELSSSDFSLLGSPIFLAAVPEAITTRKQLLLTAHERLKGLSAHVAIVLLRMCFALPKVTYLMRTAPTWLCPEEVSSFDAALKSVVESVLNVSLDESQWIQAALPIRCGGLGVRRVRDVGLPAFLASAHGVETLVTTLLNSNGDGEIMPFVSGAMSAWSALSAGASIPEGMHLQRAWDEVGVKRLQGKLLEDATGADKARLRAVSQPESGAWLQALPSPHLGTLLDDDSLRVAVAFRLGCKVCEPHICTCGSTVEADGHHALSCRRCTGRFPRHHALNDIVRRALISANVPCVLEPPGLSRSDGKRPDGLTLVPWKNGKCLIWDATCVSTVAASHLSRTVHSPSAAAEDASLKKRLKYADLEPLYNFVPVAVETLGSWGKEAKAFVKELGQRLNETTGDCRSGSFLVQRMAVAIQRGNAASVMGTFPRGTVTDGLL

SEQ ID NO: 17294 - protein, 955 aa, Biston betularia
MPTFQICPHCPGSARTFSAHGLKVHIGRMHKDARHQVTAPWVCSADSMDAPVAAAAHHLPSTPPPAPCPLDRVSNMKACVPVLRHIPKNARNQAAEKLCDIIDSCVSCNGVDEWSALLSFAYTALRVPSKELPGNMTAKVKANILSAGFCHSDDFASTRAYSGSRSNKKTIESKVFEGDLRGAVRLLMSEDSFAQRDPDTIAALKLKHPSSSRPLIFPSDPDSSCAAVLVTEEDVISALGSFYSGSAAGLDGIRPGHLKELTSVSAGENGRRLLGSLTSLANFLLSGQLNPLVCPYLYGASLLALKKKDGGIRPIAVGSVFRRLAAKLACRAVRDDMAEYLQPHQLGFGTRLGCEAAIHATRTFVMNPENADCILLKLDVRNAFNTLERDVLLGEVKEKIPSLYPFLHQAYKIPSNLFFDNNLILSQVGAQQGDPLGPLVFSLAIHKAILELKSALNVWYLDDGTIGGKPDDVLQDLEALIPRLKDLGLEVNPSKCEFFPCSVEARIHFTRFGTLLPGLRELSSSNFNLLGSPIFLDAVPEAITARKLLLFTAHERLKDLSAHVATVLLRMCFALPKITYLLRTAPTWLCPEEVSSFDDALKSVVESILNVSLDERQWGQAALPIRYGGLGVRCARDVGLPAFLASAHGVADLVTVLLHSNGDRESIPFVSSALSAWLARSSGATIPEAAHVQRAWDDAGAERFQKRLLEGATGVSLARLRAVSQPESGAWLHALPSPHLGTLLDDDSLRVAVALRLGCSVCEPHRCTCGSMVEADGHHALSCRRCTGRFPRHHALNDIVRRALVSANMPCVLEPPGLSRSDGKRPDGMTLVPWKNGKCLVWDATCVDTVAASHLSRTVHSPSAAAEDAANRKRLKYASIEPGYFFVPVAVETLGCWGTEAKKFISEIGHRLRDRTGDSRSGSFLVQRLAIAIQRGNAASVMGTFAPGTVRGGLF

SEQ ID NO: 17295 - protein, 923 aa, Spilarctia lutea
MSLAPIQLSCPHCPESPRTFSEHGLRVHVGRMHRGVRQACAGSQVSPALTFASCPSGQTAQTFLPDRASLERLAYLKKCVPVLRHVPRGARNQAAGRLCDVIDLCLANNGVDEWSELLCFAYSALRVPAKELPGNMTSKVKANINSSRHWRGEGLADPGSSFGSRSVGKIIEARVFEGDLRGAARLLLSDDTFARRDRDTLDALKEKHPEPSRPLSFPSVLDLTIPALSVTAEDVVTALTSFYGGSAGGLDGIRPAHLRELTSVAAGDNGRRLLECITRLVNFLLSGRLNPLICPYLYGASLCALVKRDGGIRPIAVGSIFRRLVAKLACRAVRENMSCYLQPHQLGFGTRLGCEAAIHATRAFVMNQENEGSILLKLDIRNAFNTLERDVLLREVKEHIPSLFPFLHQVYSHPSNLFFDDNLIISQVGAQQGDPLGPLVFSLAIHKVVTEIKSPLNVWYLDDGTIGGKPEDVLQDLEILIPRFRDLGLEVNSSKCEFFPCGGGGRTQLSRLAAVLPGLRELSSLDFTLLGSPIFLCAVPGAIDSRTRLLLTTHERLGDLSAHVAIVLLRTCFALPKINYLLRTTPTWLCPEEVSSFDRALKSVVESVLNVSMDERQWSQAGLPIRCGGLGVRSMRGVDLPAFLASAHGVANLVTVLLGSHGGGVSIPFLVDATSAWLDLNSGEASPGAPHMQRSWDEVGVKRIQGDLLEGSSGADMARLRAVSRSEAGAWLHALPSPYLGTLLDDNSLRIAVALRLGCKACERHVCTCGSMVEADGHHALSCRRCSGRFSRHHALNDVVRRALISAGIPCLLEPPGLSRSDGKRPDGLTLVPWRNGRCLIWDATCVSTVAASHLSRTICSPSAAAEDACYKKRQKYAALEQQYYFVPVAVETIYIYTYTYIYYIYTLFVVTTLFAILNFICY

SEQ ID NO: 17296 - protein, 954 aa, Griposia aprilina
MSALSAMLSCPHCPGSSRKFGSHGLKVHIGRMHGSARRPVVTLRTLSSVTDSQPVSQVPLVPRPCPLERLSALKVSTPVLRHVPKGARNQAAGKLCGIIDKCVSCNGVEDWGALLTFAFDGLRVPSRDAPGNMTAKVKANVESVGAVQFVDESDCVAGVAKSRGVRKAIESKVFEGDLRGAVRLLVSDDSFAHHDPDTLSALTAKHPGPSRPLDFPSAPDLSFPRVTASVEDVALALGSFYSGSAAGLDGIRPGHLKELTSSSAGENGRRLLECLTKLANFLMSGQLNPVVCPYLYGASLCALKKKDGGLRPIAIGSVFRRLTAKLACRSVRVAMSEYLQPHQLGFGTRRGCEAAIHATRGFVMNPENSDCVVLKLDIRNAFNTLERDVLLSEVKDKIPSLYPFLYQVYHSPSNLFFSDSLISSQVGAQQGDPLGPLVFSLAIHKVISGLKSSLNLWYLDDGIIGGSPEEVCQDLEVLVPQLKELGLEVNPSKCEFFPCGVAARSHFSRFGFLLPGLKELSPLSFSLLGSPIFLVGVPEAISFRKQLLLNARERLKDLSAHVAILLLRMCFALPKGTYLLRTAPTWLCPEEVCSFDCALKSTVESILNVSSNDVQWRQAALPIRYGGLGVRCVHDVGLPAFLASAHGVADLVTVILDSNGGGANIPFMLDAGSAWSVLSSGAASPDAAHIQRAWDDVTSRLIQEQMLVGSSGVDLARLRAVSQPESGAWLHALPSPHLGTLLDDDSLRVAVALRLGCKVCEPHRCTCGSMVEADGHHALSCRRCSGRFPRHHAINDVVRRAFVSADVPCLLEPPGLCRTDGKRPDGLTLVPWRNGKCLIWDATCVSTVAASHLGRTVHSSSAAAEDAAERKRSKYAPLVDRYHFVPIAVETMGAWGTEARKLIGEIGHRLRDKTGDSRSGSFLVQRLAIAIQRGNAASVLGTFAPGTVRGGLFD

SEQ ID NO: 17297 - protein, 960 aa, Apamea monoglypha
MYKDAQMSALSAMLSCPHCPGSSRAFSSHGLKVHIGRMHRNARQPVVAPRTSSTVTDSQLVSQVPPVSRPCPLERLSALKVSTPVLRHVPKGARNQAAGKLCDIIDKCISCNGVGDWGALLTFAFGGLRVPSRDAPGNMTAKVRANVESVGSDQFVDKSDCVAGVTKSRGIRKAIESKVFEGDLRGAVRLLVSDDSFAQHDPDTLSALTVKHPSPSRPLNFPSAPDLSFPRMTASVEDVALALGSFYSGSAAGLDGIRPAHLKELTSGSAGENGRRLLECLTKLANFLMSGQLNPVVCPYLYGASLCALKKKDGGLRPIAIGSVFRRLTAKLACRSVRVAMSEYLQPHQLGFGTRRGCEAAIHATRAFVMNPENSDCLLLKLDIRNAFNTLERDVLLSEVKDKIPSLYPFLYQVYYYPSNLFFSDSLISSQVGAQQGDPLGPLVFSLAIHKVISGLKSSLNLWYLDDGIIGGSPEEVCQDLELLVPQLKELGLEVNPSKCEFFPCGVGARTHFSRFGSHLPGLKELSPLSFSLLGSPIFLDGVPEAISSRKQLLLSARERLKDLSAHVAILLLRMCFALPKVTYLLRTAPTWLCPEEVCSFDCALKSTVESILNVSFNDAQWRQAALPIRYGGLGVRCVHDVGLPAFLASTHGVADLVTVILDSNGDGANIPFMLDAGSAWSVLSMGAARPDATHIQRAWDDVASRLIQEQMLVGSSGADLARLRAVSQPESGAWLHALPSPHLGTLLDDDSLRVAVALRLGCKVCEPHRCTCGSMVEADGHHALSCRRCSGRFPRHHALNDIVRRAFVSADVPCLLEPPGLCRTDGKRPDGLTLVPWRDGKCLIWDATCVSTVAASHLGRTVHSPSAAAEDAAERKRVKYAPLVDRYHFVPIAVETMGAWGAEARNLISEIGHKLRDKTGDSRSGSFLVQRLAIAIQRGNAASVLGTFAPGTVRGGLFD

SEQ ID NO: 17298 - protein, 956 aa, Mythimna ferrago
MSLPSFLTCPHCPGSSRVFSAHGLKVHIGRMHKHARHSSAVSQVPTAATVDTFSSVQVAPAHSPTQSPLDGLAACKASIPVLRHIPKGARNQAAGKLCDLIDSCVASNGVEEWSALLSFAYTSLRVPAKELPGNVTSKVKANIMSPLHCHGGEVDAGRRSGSRSIKKSIETKVFEGDLRGAVRLMMSDDSFARGDADTLASLKLKHPDPSRPLSFPPDPDPSFTALSVTVEDVVSALGSFYSGSAAGLDGIRPGHLKELISVSAGENGRRLVGSLTRLVNFLLSGQLNPCVCPFMYGASLFALKKKDGGVRPIAVGSVFRRLTAKLACRAVKEDMARYLQPHQLGFGTRLGCEAAIHATRAFVMDPENEDSILLKLDIRNAFNTLERDVLLSEVKEKIPSLYPFLHQVYRLPSNLFSDNNLIPSKVGAQQGDPLGPLVFSLAIQKTIVELKSGLNVWYLDDGTIGGRPEDVFQDLETLVPRLRDLGLEVNPSKCEFFPCSTEARTHFSRFDSFLPGLRELSRSDFNLLGSPIFLSAVPEAITSRTQLLLSAHERLKDLSAHIAIVLLRMCFALPKITYLLRTTPTWLCPEEVSSFDNALKSVVESVLNVSLDGPQWTQAALPIRCGGLGVRCARDVGLPAFLASAHGVANLVTVLLNTNGDGGSIPFASDAVSAWLALNPGAAIPESQHVQRAWDDGGVILLQEQLLEGALGVDRARLRAVSQPESGAWLQAIPSPHLGTLLDDDSLRVAVALRLGCKVCEPHTCTCGSMVEADGHHALNCRRCTGRFPRHHALNDIVRRALISANIPCVLEPSGLSRSDGKRPDGMTLVPWKNGKCLIWDATCVSTVATSHLSRTMHTASAAAEDACSKKRLKYATLEQLYHFVPVAVETLGSWSTEARSFVRDLGRRLGEATGDSRSKSFLVQRMAIAIQRGNAASVMGTFAPGTIRGGLFIDI

SEQ ID NO: 17299 - protein, 954 aa, Eilema sororculum
MSVSSAQLLCPHCPGSSRVFSARGLRVHIGRMHKDVLRLGTVSPVSLTNAGTSMGRSLSTPSSAESSLDRLASLRGNVPVLRHIPKGARSQAAGRLCDIIDSCIGRNGVDEWATLLLFAYTALRVPARESSGNMTTKVKNNILSSDHGDDFEISASKARTGPRSLQKNIESKVFEGDLRGAVRLLMSDDSFANRDHGTMTALELKHPGPSRPLNFPPDPGLSFTPVTVTTGDVISAVGSFYAGSAAGLDGIRPGHLKELTSVSAGESGRRLVGCLTGLVNFLLSGQLNPLVCPYLYGASLFALAKKDGGLRPIAVGSVFRRLTAKLACCAVKEEMADYLQPHQLGFGTRLGCEAAIHATRAFVMDPKNEGAILLKLDIRNAFNTLERDVLLSEVKEKIPSLYPFLHQVYRLPSNLFYENNLLLSKVGAQQGDPLGPLVFSLAIHKAVQSLKSALNVWYLDDGTIGGKPEDVVQDLEALVPSLRDLGLEVNPSKCEFFSCGTEARTCFSRLSTILPGLKELSPSDFYLLGSPIFLSAVPKAISVRKHLLLAAHERLKGLPAHVAIVLLRMCFALPKIAYLLRTTPIWLCPEEVSSFDDALKSVVESVLNVNLDGTQWSQATLPIRSGGLGVRCVRDVGLPAFLASAQGVASLVTTLLNPNGDGASVPFVSDAVSAWSALNGGASIPELGHLQRAWDEVGVRRLQAQLLDGAAGVDKARLRAVSQPESGAWLQALPSPHLGTLLDGDSLRVAVALRLGCKVCEPHICTCGSMVEADGHHALSCRRCTGRFPRHHALNDIVRRALISANVPCVLEPPGLSRSDGKRPDGLTLVPWKNGKCLLWDATCVSTVAASHLSRTIHSPSAAADDASSRKRLKYAELEPQYYFVPIAVETLGSWGRDAKSLIKAIGQRLIEATGDSRSGSFLVQRMAVAIQRGNAASVMGTFAPGAIRGGLFD

SEQ ID NO: 17300 - protein, 955 aa, Biston betularia
MPTFQICPHCPGSARTFSAHGLKVHIGRMHKDARHQVTAPWVCSADSMDAPVAAAAHHLPSTPPPAPCPLDRVSNMKACVPVLRHIPKNARNQAAEKLCDIIDSCVSCNGVDEWSALLSFAYTALRVPSKELPGNMTAKVKANILSAGFCHSDDFASTRAYSGSRSNKETIESKVFEGDLRGAVRLLMSEDSFAQRDPDTIAALKLKHPSSSRPLIFPSDPDSSCAAVLVTEEDVISALGSFYSGSAAGLDGIRPGHLKELTSVSAGENGRRLLGCLTSLANFLLSGQLNPLVCPYLYGASLLALKKKDGGIRPIAVGSVFRRLAAKLACRAVRDDMAEYLQPHQLGFGTRLGCEAAIHATRTFVMNPENADCILLKLDVRNAFNTLERDVLLGEVKEKIPSLYPFLHQAYKIPSNLFFDNNLILSQVGAQQGDPLGPLVFSLAIHKAILELKSALNVWYLDDGTIGGKPDDVLQDLEALIPRLKDLGLEVNPSKCEFFPCSVEARIHFTRFGTLLPGLRELSSSNFNLLGSPIFLDAVPEAITARKLLLFTAHERLKDLSAHVATVLLRMCFALPKITYLLRTAPTWLCPEEVSSFDDALKSVVESILNVSLDERQWGQAALPIRYGGLGVRCARDVGLPAFLASAHGVADLVTVLLHSNGDRESIPFVSSALSAWLARSSGATIPEAAHVQRAWDDAGAERFQKRLLEGATGVSLARLRAVSQPESGAWLHALPSPHLGTLLDDDSLRVAVALRLGCSVCEPHRCTCGSMVEADGHHALSCRRCTGRFPRHHALNDIVRRALVSANMPCVLEPPGLSRSDGKRPDGMTLVPWKNGKCLVWDATCVDTVAASHLSRTVHSPSAAAEDAANRKRLKYASIEPGYFFVPVAVETLGCWGTEAKKFISEIGHRLRDRTGDSRSGSFLVQRLAIAIQRGNAASVMGTFAPGTARGGLF

SEQ ID NO: 17301 - protein, 900 aa, Hecatera dysodea
MSLPSCLTCPHCPGSSRVFSAHGLKVHIGRMHKHALRSGAVSQVPPVDTVNASSSGEVPPVLAPAQSPLDKLAASKASIPVLRHIPKGARNQAAGKLCDIVDACVASNGVDEWSALLSFAYTSLRVPAKELPGNVTSKVKANIMSPVHCLDDEVVASRRSGSRSIKKSIETKVFEGDMRGAVRLLMSDDSFARGDADTLASLKLKHPDPSRPLSFPPDPDPSFTALSVTVEDVVSALGSFYTGSAAGLDGIRPGHLKELISVTAGENGKRLVGGLTRLANFLLSGQLNPCVCPFLYGASLFALEKKDGGVRPIAVGSVFRRLTAKLACRAVKEDMARYLQPHQLGFGIRLGCEAAIHATRTFVMDPENEDSILLKLDIRNAFNSLERDVLLSEVKDKIPSLYPFLHQVYRLPSNLFSGNNLILSKVGAQQGDPLGPLVFSLAIHKAIVGLKSGLNVWYLDDGTIGGRPEDVFQDLEALVPLLRDLGLEVNPSKCEFFPCGTEARTHFSRCNSFLPGLRKLSCSDFNLLGSPIFLSAVPEAITSRTRLLLSAHERLKDLSAHVAIVLLRMCFALPKITYLLRTAPTWLCPEEVSSFDNALKSVVESVLNVSLDEPQWRQATLPIRCGGLGVRCARDVGLPAFLASAHGVANLVTVLLNINGDGGSMPFVSDAVSVWLTLNSGAAIPESENVQRAWDDIGVKLIQEHLLANAMRVDRARLRAVSQPESGAWLQAIPSPHLGTLLDNDSLRVAVALRLGCKVCEPHTCTCGSMVEADGHHALSCRRCTGRFPRHHALNDIVRRALVSANVPCVLEPPGLNRSDGKRPDGLTLVPWKNGKCLIWDATCVSTVAASHLSRTMHTASAAAEEACSKKRLKYASLVQLYHFVPVAVETLGSWSTEAK

SEQ ID NO: 17302 - protein, 956 aa, Mythimna impura
MSLPSILTCPHCPGSSRVFSAHGLKVHIGRMHKHALRSGAVSQVPPIDTVNTSSSGQVRPAHSPTQSPLDRLASCKASIPVLRHIPKGARNQAAGKLCDILDSCVASNGVDEWSALLSFAYTSLRVPAKELPGNMTSKVKANIMSPVHYHEEEVDANRRSGSRSIKKSIETKVFEGDLKGAVRLLMSDDTFARGDADTLASLKLKHPDPSRPLSFPPDPDPSFTALSVTVEDVISALASFYTGSAAGLDGILPGHLKELISVSAGENGRRLVGGLTRLANFLLSGQLNPCVCPFLYGASLFALEKKDGGIRPIAVGSVFRRLTAKLACRAVKEDMAHYLQPHQLGFGTRLGCEAAIHATRAFVMDPENEDSILLKLDIRNAFNTLERDVLLGEVKEKIPSLYPFLHQVYRLPSNLFSDNSLILSKVGAQQGDPLGPLVFSLAIHKAIIELKSGLNVWYLDDGTIGGKPEDVFQDLEALVTRLRDLGLEVNPSKCEFFPCSTEARTHFSRFNSFLPGLRELSCSDFNLLGSPIFLGAVPEAITSRTRLLLSAHERLKDLSAHVAIVLLRMCFALPKITYLLRTTPTWLCPEEVSSFDNALKLVVESVLNVSLDEPQWRQAALPIRYGGLGVRCARDVGLPAFLASAHGVANLVTVLLNTNGDGGSMPFVSDAVSAWLTLNSGATIPDSVHVQRAWDDRGVKLLQEQLLGGALGVDKARLRAVSQPESGAWLQAIPSPHLGTLLDDDSLRVAVALRLGCKVCEPHTCTCGSMVEADGHHALNCRRCTGRFPRHHALNDIVRRALISANVPCVLEPPGLSRSDGKRPDGLTLVPWKNGKCLIWDATCVSTVAASHLSRTMHTASAAAEDACSKKRLKYAALDQLYHFVPVAVETLGSWSTEARCFVGDLGRRLGEATGDSRSRSFLVQRMAIAIQRGNAASVMGTFAPGTIRGGLFIDD

SEQ ID NO: 17303 - protein, 998 aa, Cosmia trapezina
MLDIFLCKENHYYYFLVVILLVSSFYLLYLLLMRVLYFLDAQMSALSTMLSCPHCPGSSRTFSSHGIKIHIGRMHKHMQQPVATPQTSSTVTDSQPMSQVPLVSRPCPLERLSALKMCTPVLRHIPKGSRNQAAGKLCDILDKCVSCNGVDEWGALLTFAFVGLRVPSRVAPGNMTTKVKANIESVGADRFVDESSCVADFSKPRGIRKAIESKVFEGDLRGAVRLLVSDDSFAQHNPGTLDALTVKHPSPSRPLNFPSAPDSSFPRVTASVEDVTLALRSFNSGSAAGMDGIRPGHLKELTSGSAGENGRRLLESLTKLVNFLMSGQLNPVVCPYLYGASLCALKKKDGGLRPIAIGSVFRRLSAKLACRSVRVDMAEYFQPHQLGFGTPRGCEAAIHATRAFVMDPKNSDCVVLKLDIRNAFNTLERDVLLSEVKDKIPSLYPFLYQVYYSPSNLFFNDSLISSQVGAQQGDPLGPLVFNLAIHKVISGLKSSLNLWYLDDGIIGGSLEEVCQDLEVLVPQLKELGLEVNPSKCEFFPCGFGARSHFSLFGCLLPGLKELSPLSFSLLGSPIFLDGVPEAISSRTQLLLNARERLKDLSAHVAILLLRMCFALPKITYLLRTAPTWLCPEEVCSFDCALKSTVESILNVSFNDTQWKQAALPIRHGGLGVRCVHDVGLPAFLASTHGVADLVTVILDSNGDGANIPFMLDAGSAWSVLNMGAASPDATHVQRAWDDVSSRLIQEQMMVGSSGADLARLRAVSQPESGAWLHALPSPHLGTLLDDDSLRVAVALRLGCKVCEPHRCTCGSTVEADGHHALSCRRCSGRFPRHHALNDIVRRAFVSADVPCVLEPPGLSRSDGKRPDGLTLVPWKNGKCLIWDATCVSTVAASHLGRTVLSSSAAAEDAAERKRVKYAPLATRYHFVPIAVETMGCWGTEAKKLIGEIGHKLREKTGDSRSGSFLVQRLAIAIQRGNAASVMGTFAPGTVRGGFFENW

SEQ ID NO: 17304 - protein, 955 aa, Spodoptera frugiperda
MNMPVLTCPHCPGSARVFSVHGLKVHIGRMHKHASRSGAVSQLSPVITVDTSSSGRGPPPHSPVQGPLDRLAAFKASIPVLRHIPKGARNQAAGKLCDIIDSCVANNGVDEWSALLSFAYTALRVPAKELPGNMTSKVKANIMSPVNFHDNELYASRRSDSRSNKKNIETKVFEGDLRGAVRLLMSDDSFARGDADTFASLKLKHPDPSRPLSFPPEPDPSFTVLSVTVEDVLSALASFYSGSAAGLDGIRPGHLKELTSVSAGDNGKRLVGGLARLANFLLSGQLNPCVCPFLYGASLFALEKKDGGLRPIAVGSVFRRLAAKLACRAVKEDMARYLQPHQLGFGTRLGCEAAIHATRTFVMDPENEDAVVLKLDIRNAFNTLERDVLLSEVREKIPSLYPFLHQVYRLPSNLFSNNSLILSKVGAQQGDPLGPLVFSLAIHKAIVELKSGLNVWYLDDGTIGGRPEDVYQDLQALIPRLRDLGLEVNPSKCEFFPCSTAARTHFSRFHSSLPGLRELSCSNFNLLGSPIFPSAVPEAIAARTRLLLSTRERLKDLSAHVAIILLRMCFALPKITYLLRTTPTWLCPEEVSSLDNALKSVVESILNVSLDGPQWRQAALPIRCGGLGVRCARDVGLPAFLASAHGVADLVTVLLATNGDGGSLPFVSDAVSAWLTLNSGAAIPESKHVQRAWDDIGVKQLQEQLLEGAVGVEKARLRAVSQPESGAWLQAIPSPHLGTLLDDDSLRVAVALRLGCKVCEPHTCTCSSMVEADGHHALNCRRCTGRFPRHHALNDIIRRALISANIPCVLEPPGLSRSDGKRPDGLTLVPWKNGKCLIWDATCVSTVAASHLSRTMHTASAAAEEACSKKRLKYALLGQLYHFVPVAVETLGCWSAEAKSFVGDLGRRLEEATGDSRSRSFLVQRMAIAIQRGNAASVMGTFAPGTIRGGLFNDS

SEQ ID NO: 17305 - protein, 925 aa, Cosmia trapezina
MHKHTQQPVATPQTSSTVTDSQPMSQVPLVSRPCPLERLSALKMCTPVLRHIPKGSRNQAAGKLCDILDKCVSCNGVDEWGALLTFAFVGLRVPSRVAPGNMTTKVKANIESIGADRFVDESSCVADFSKPRGIRKAIESKVFEGDLRGAVRLLVSDDSFAQHDPGTLDALTVKHPSPSRPLNFPSAPDSSFPRVTASVEDVTLALRSFNSGSAAGMDGIRPGHLKELTSGSAGENGRRLLESLTKLVNFLMSGQLNPVVCPYLYGASLCALKKKDGGLRPIAIGSVFRRLSAKLACRSVRVAMAEYFQPHQLGFGTPRGCEAAIHATRAFVMDPKNSDCVVLKLDIRNAFNTLERDVLLSEVKDKIPSLYPFLYQVYYSPSNLFFNDSLISSQVGAQQGDPLGPLVFNLAIHKVISGLKSSLNLWYLDDGIIGGSLEEVCQDLEVLVPQLKELGLEVNPSKCEFFPCGFGARSHFSLFGCLLPGLKELSPLSFSLLGSPIFLDGVPEAISSRTQLLLNARERLKDLSAHVAILLLRMCFALPKITYLLRTAPTWLCPEEVCSFDCALKSTVESILNVSFNDTQWKQAALPIRHGGLGVRCVHDVGLPAFLASTHGVADLVTVILDSNGDGANIPFMLDAGSAWSVLNMGAASPDATHVQRAWDDVSSRLIQEQMMVGSSGADLARLRAVSQPESGAWLHALPSPHLGTLLDDDSLRVAVALRLGCKVCEPHRCTCGSTVEADGHHALSCRRCSGRFPRHHALNDIVRRAFVSADVPCVLEPPGLSRSDGKRPDGLTLVPWKNGKCLIWDATCVSTVAASHLGRTVLSSSAAAEDAAERKRVKYAPLATRYHFVPIAVETMGCWGTEAKKLIGEIGHKLREKTGDSRSGSFLVQRLAIAIQRGNAASVMGTFAPGTVRGGFFENW

SEQ ID NO: 17306 - protein, 954 aa, Griposia aprilina
MSALSAMLSCPHCPGSSRKFGSHGLKVHIGRMHGSARRPVVTPRTLSSVTDSQPVRQVPLVPRPCPLERLSALKVSTPVLRHVPKGARNQAAGKLCGIIDKCVSCNGVEDWGALLTFAFDGLRVPSRDAPGNMTAKVKANVESVGAVQFVDESDCVAGVAKSRGVRKAIESKVFEGDLRGAVRLLVSNDSFAHHDPDTLSALTAKHPSPSRPLDFPSAPDLSFPRVTASVEDVALTLGSFYSGSVAGLDGIRPGHLKELTSGSAGENGRRLLECLTKLANFLLSGQLNPVVCPSLYGASLCALKKKDVGLRPIAIGSVFRRLTAKLACRSVRVAMSEYLQPHQLGFRTRRGCEAAIHATRGFVMNPENSDCVVLKLDIRNAFNTLERDVLLNEVKDKTPSLYPFLYQVFHSPSNLFFSDSLISSQVGAQQGDPLGPLVFSLAIHKVISGLKSSLNLWYLDDGIIGGSPEEVCQDLEVLVPQLKELGLEVNPSKCDFFPCGVGARSHFSRFGFHLPGLKELSPLSFSLLGSPIFLVGVPEAISSRKRLLLNARERLKDLSAHIAILLLRMCFALPKVTYLLRTAPTWLCPEEVYSFDCALKSTVESILNVSFNDVQWRQAALPIRYGGLGVRCVHDVGLPAFLASAHGVADLVTVILDSNGGGANIPFMLDVRSAWSALSSGAASPDAAHIQRAWDDATSRLIQEQMLVGSSGADLARLKAVSQPESGAWLHALPSPHLGTLLDDDSLRVAMALRLGCKVCEPHRCTCGSMVEADGHHALSCRRCSGRFPRHHALNDIVRRAFVSAVVPCLLEPPGLCSTDGKRPDGLTLVPWRNGKCLIWDATCVSTVAASHLGRTVHSSSAAAEDAAERKRTKYAPLVDRYHFVPIAAETMGAWGTEARKLIGEIGHKLRDKTGDSRSGSFLVQRLAIAIQRGNAASVLGTFAPGTVRGGLFD

SEQ ID NO: 17307 - protein, 897 aa, Eilema sororculum
MGQSLSTPSSAESSLDRLASLRGNVPVLRHIPKGARSQAAGRLCDIIDSCIGRNGVDEWATLLLFAYTALRVPARESSGNMTTKVKNNILSSDHGDDFDISASKACTGPRSLQKNIESKVFEGDLRGAVCLLMSDDSFANRDHGTMTALELKHPGPSRPLNFPPDPGLSFTPVTVTIGDVISAVGSFYAGSAAGLDGIRPGHLKELTSVSAGESGRRLVGCLTGLVNFLLSGQLNPLVCPYLYGASLFALVKKDGGLRPIAVGSVFRRLTAKLACRAVKEEMADYLQPHQLGFGTRLGCEAAIHATRAFVMDPKNEGAFLLKLDIRNAFNTLERDVLLSEVKEKIPSLYPFLHQVYRLPSNLFYENNLLLSKVGAQQGDPLGPLVFSLAIHKAVQSLKSALNVWYLDDGTIGGKPEDVVQDLEALVPSLRDLGLEVNPSKCEFFSCGTEARTCFSRLSTILPGLKELSPSDFYLLGSPIFLSAVPKAISVRKHLLLAAHERLKGLSAHVAIVLLRMCFALPKIAYLLRTTPIWLCPEEVSSFDDALKSVVESVLNANLDGTQWSQATLPIRSGGLGVRCVRDVGLPAFLASAQGVASLVTTLLNPNGDGASVPFVSDAVSAWSALNGGASIPELGHLQRAWDEVGVRRLQAQLLDGAAGVDKARLRAVSQPESGAWLQALPSPHLGTLLDGDSLRVAVALRLGCKVCEPHICTCGSMVEADGHHALSCRRCTGRFPRHHALNDIVRRALISANVPCVLEPPGLSRSDGKRPDGLTLVPWKNDKCLLWDATCVSTVAASHLSRTIHSPPAAADDASSRKRLKYAELEPQYYFVPIAVETLGSWGRDAKSLIKAIGQRLIEATGDSRSGSFLVQRMAVAIQRGNAASVMGTFEPGSGAG

SEQ ID NO: 17308 - protein, 957 aa, Spilosoma lubricipeda
MSLAPLQFSCPHCPGSPRTFSEHGLRVHVGRMHREVRRACASSRVSPAHTFPSCPSEQVAQTLLPDRTSLDGLARLKGSVPVLRHVPRGARNQAAGGLCNVIDLCLASNGIDEWSELLCFAYSALRVPAKELPGNMTSKVKANINSFKSWRGEGLSDARVSFGSRSTGKIIEARVFEGDLRGAARLLLSDDSFARRDRDTLDALKAMHPEPSRPLGFPSDLDLTFPALSVTAADVVTALGSFHGGSAGGLDGIRPTHLRELTSVSAGDNGRRLLECITRLVNFLLSGQLNPLVCPYLYGASLFALVKKDGGIRPIAVGSIFRRLVAKLACRAVRETMSGYLQPHQLGFGTQSGCEAAIHATRAFVMSPECEGSILLKLDIRNAFNTLERDVLLREVKERIPSLFPYLHQVYSRPSNLFFDENLIVSQVGAQQGDPLGPLVFSLAIHRVITEIKSPFNVWYLDDGTIGGKPEDVLQDLEILIPRFKDLGLEVNSSKCEFFQCGVGARSHLSRLATVLPGLRELSSHDFTLLGSPIFHCAVPGAIASRTQLLLTTHERLKDLSAHVAIVLLRTCFALPKISYLLRTTPTWLCPEEVASFDKALKSVVESVLNVSMDERQWGQASLPIRCGGLGVRGMRDVGLSAFLASAHGVANLVTVLLGIQGGEVSIPFLMDATSAWLALSPGEACPGAAHMQRAWDDVGVRRIYGALLDGSSGVDMARLRAVSRAEAGAWLHALPSPHLGTLLDDGSLRIAVALRLGCKVCERHVCTCGSMVEADGHHALSCRRCSGRFPRHHALNDVVRRALISANIPCLLEPPGLSRSDGKRPDGLTLVPWKNGRCLIWDATCVSTFAASHLGRTVRFPSAAAEDACYRKKQKYAALEQLYYFVPVAVETMGGWAAETLGFVGELGRRLAEIKGDSRSGSFLVQRLAIAIQRGNAASLMGTFPPEAIRNGLNDL

SEQ ID NO: 17309 - protein, 955 aa, Ochropleura plecta
MSVTITNLSCPHCPGSTRTFSDHGLKVHVGRMHKHTVRPQLAVSRVCPGDTLNHASPAPPHAQSSLERLAVMKGGVPILRHIPKNARNQAAFKLCDIIDACVDHNGVEEWSTFLTFAYTALKVPSKNLPGNMTAKVKANILASGRCGPDEEIEIASERNSHRLRSNKKVIESKVFDGDLRGAVRLLMTEDSFAERDPDTLAAMKLKHPSSSRPLNFPVDPDLSCSPVSVTVDDVVSALGSFYSGSAAGLDGFRPGHLKELTSVSAGENGRRLLGCLAKLVNFLISGQLNPLVCPYLYGASLFALAKKDGGLRPIAVGSVFRRLTAKLACRTVRDEMAEYLRPHQLGFGTHLGCEAAIHATRAFVMDLKNEGSIILKLDISNAFNTLERDVLLREVKEKIPSLYPFLHQVYRLPSNLFYDSNLILSQVGAQQGDPLGPLVFSLAIHRVLVELKSPLNVWYLDDGTIGGKPEDVLQDLEALIPRLRELGLEANPSKCEFFPCSIGARKHFSRFDTLLPGLKELTPSNFSLLGSPIFLTAVPEAINSKIHLLLTAHERLKDLSAHVAIVLLRMCFALPKIAYLLRTTPTWLCSEEVSSFDKVLKSIVESILNVSLGDTQWRQAALPVRCGGLGVRRAGDVGLPAFLASAHGVASLVTVLLSPNGDEVGIPFVSDAVSAWSALNPSAAIPAALHVQRAWDDEGVKGAQGNLLGEASGADMARLRAVSQPESGAWLHALPSPHLGTLLDDDSLRVAVAFRLGCKVCEPHVCTCGSMVEADGHHALSCRRCTGRFPRHHALNDIVRRALVSANVPCRLEPPGLSRSDGKRPDGLTLVPWRNGKCLIWDATCVCTVASSHLCRTVHSPSAAAEDAASKKRLKYAPLEPLYHFVPMAVETMGSWGKDAKDFVQDLGHRLNIVSGDSRSSRFLAQRLSIAIQRGNAASVMGTFAPGMVRGGLFN

SEQ ID NO: 17310 - protein, 956 aa, Hecatera dysodea
MSLPSCLTCPHCPGSSRVFSAHGLKVHIGRMHKHALRSGAVSQVPPVDTVNASSSGEVPPVLAPAQSPLDKLAASKASIPVLRHIPKGARNQAAGKLCDIVDACVASNGVDEWSALLSFAYTSLRVPAKELPGNVTSKVKANIMSPVHCLDDEVVASRRSGSRSIKKSIETKVFEGDMRGAVRLLMSDDSFARGDADTLASLKLKHPDPSRPLSFPPDPDPSFPALSVTVEDVVSALGSFYTGSAAGLDGIRPGHLKELISVTAGENGKRLVGGLTRLANFLLSGQLNPCVCPFLYGASLFALEKKDGGVRPIAVGSVFRRLTAKLACRAVKEDMARYLQPHQLGFGIRLGCEAAIHATRTFVMDPENEDSILLKLDIRNAFNSLERDVLLSEVKDKIPSLYPFLHQVYRLPSNLFSGNNLILSKVGAQQGDPLGPLVFSLAIHKAIVGLKSGLNVWYLDDGTIGGRPEDVFQDLEALVPRLRDLGLEVNPSKCEFFPCGTEARTHFSRCNSFLPGLRKLSCSDFNLLGSPIFLSAVPEAITSRTRLLLSAHERLKDLSAHVAIVLLRMCFALPKITYLLRTAPTWLCPEEVSSFDNALKSVVESVLNVSLDEPQWRQATLPIRCGGLGVRCARDVGLPAFLASAHGVANLVTVLLNINGDGGSMPFVSDAVSVWLTLNSGAAIPESENVQRAWDDIGVKLIQEHLLANAMRVDRARLRAVSQPESGAWLQAIPSPHLGTLLDNDSLRVAVALRLGCKVCEPHTCTCGSMVEADGHHALSCRRCTGRFPRHHALNDIVRRALVSANVPCVLEPPGLNRSDGKRPDGLTLVPWKNGKCLIWDATCVSTVAASHLSRTMHTASAATEEACSKKRLKYASLVQLYHFVPVAVETLGSWSTEAKCFVRDLGHRLGEATGDSRSGSFLVQRMAIAIQRGNAASVMGTFAPGTIRGGLFIDL

SEQ ID NO: 17311 - protein, 960 aa, Apamea monoglypha
MYKDAQMSALSAMLSCPHCPGSSRAFSSHGLKVHIGRMHRNARQPVVAPRTSSTVTDSQLVSQVPPVSRPCPLERLSALKVSTPVLRHVPKGARNQAAGKLCDIIDKCISCNGVGDWGALLTFAFGGLRVPSRDAPGNMTAKVRANVESVGSDQFVDESDCVAGVTKSRGIRKAIECKVFEGDLRGAVRLLVSDDSFAQHDPDTLSALTVKHPSPSRPLNFPSAPDLSFPRMTASVEDVALALGSFYSGSAAGLDGIRPAHLKELTSGSAGENGRRLLECLTKLANFLMSGQLNPVVCPYLYGASLCALKKKDGGLRPIAIGSVFRRLTAKLACRSVRVAMSEYLQPHQLGFGTRRGCEAAIHATRAFVMNPENSDCLVLKLDIRNAFNTLERDVLLSEVRDKIPSLYPFLYQVYYYPSNLFFSDSLISSQVGAQQGDPLGPLVFSLAIHKVISGLKSSLNLWYLDDGIIGGSPEEVCQDLELLVPQLKELGLEVNPSKCEFFPCGVGARTHFSRFGSHLPGLKELSPLSFSLLGSPIFLDGVPEAISSRKQLLLSARERLKDLSAHVAILLLRMCFALPKVTYLLRTAPTWLCPEEVCSFDCALKSTVEFILNVSFNDAQWRQAALPIRYGGLGVRCVHDVGLPAFLASTHGVADLVTVILDSNGDGANIPFMLDAGSAWSVLSMGAARPDATHIQRAWDDVASRLIQEQMLVGSSGADLARLRAVSQPESGAWLHALPSPHLGTLLDDDSLRVAVALRLGCKVCEPHRCTCGSMVEADGHHALSCRRCSGRFPRHHALNDIVRRAFVSADVPCLLEPPGLCRTDGKRPDGLTLVPWRDGKCLIWDATCVSTVAASHLGRTVHSPSAAAEDAAERKRVKYAPLVDRYHFVPIAVETMGAWGAEARNLISEIGHKLRDKTGDSRSGSFLVQRLAIAIQRGNAASVLGTFAPGTVRGGLFD

SEQ ID NO: 17312 - protein, 953 aa, Ephestia elutella
MSSLSPMLTCPHCPGSLRTFSSHGLKIHIGRKHKGISSIVAPRPADAGVSGISLGQSTPSASPRQCPLDALAGLKGSTQVLRHVPKGARNQAAGKLSEIVDRCVESNEVDDWFALLSFAYTALRVPSKALPGNMTFKVKSNIESSGNNKFEDVSDIAAEGFRPRSTRKIIESKVFEGDLRGAVRLLVSDDTLAKRGPDTLAALKLKHPGPSRPLSSPPAPDTSYTAESFTVDDVTLALTSFYSGSAAGSDGIRPGHLKELTSSCAGENGRRLMESLTRLSNFMLSGRVNVQVCPYLYGAALCALSKKDGGLRPIAIGSVFRRLAAKLACRAVKEIMSEYLQPHQLGFGTRLGCEAAIHSTRAFVADADNAKCVVLKLDIYNAFNTLERDVLLCEVRDKLPSLYPFLYQVYQSPSNLVYNNNLILSQVGAQQGDPLGPLVFSLAIHKIVSDLKSPLNIWYLDDGTLGGEPETVYGDLLTLIPRFKELGLEVNTSKCEYFPCSSEARSHSAHFFTLLPGLRELSKTNFSLLGSPIFVEAVPEAINSRRQLLLMAKERLQNISAHVALILLRTCFALPKISFLLRTAPTWLCSKEISDFDGSLKSTVESILNVQLDGTQWKQAALPIRLGGIGVRCARDVGMPAFLASAHGVAGLVAIILSSKGSKVSIPYVSDAELAWAADNLGAPSPISLSVQRAWDDVGSEKVHKELLGTASGADLARLKAVSQPESGAWLHALPSPYLGTLLDDDSMRVAVALRLGSRVCEPHKCVCGSMVESDGYHALSCRRCSGRFPRHHALNDIVRRAFVTANVPCMLEPPGLSRSDGKRPDGLTLVPWRHGRCLIWDATCVSTVAISHIGRTACTAAAAAEDAANKKREKYAAMEPKYIFVPIAVETMGSWGSDAKRLLKEIGQRIAVNTGDSRSGSFLVQRMAIAIQRGNAASVLGTFAPETLRGGL

SEQ ID NO: 17313 - protein, 955 aa, Eilema depressum
MSTSATQLSCPHCPGTSRVFTARGLKVHIGRMHKRVLRPETVSPVSPTDAGTAAGQSPLAQSVPNRNSLDRLACLRGNIPVLRHIPKGARNQAAGKLCDVIDSCIGSNGVDEWAALLSFAYTALRVPARESSGNMTSKVKANILSSDHFDDTEISASTAGTGSRSIKKSIESKVFEGDLRGAVRLLMSDDSFARRDPGTMAALELKHPGPSRPLNFPPDPGLPFTPAKVAIGDVISAVGSFYAGSAAGLDGIRPGHLKELTSVSAGESGKRLLGCLTGMVNFLLSGQLNPLVCPYLYGASLFALTKKDGGLRPIAVGSVFRRLTAKLACRAVKEEMADYLQPHQLGFGTRLGCEAAIHATRAFVMDPRNGESIVLKLDIRNAFNTLERDVLLSEIKEKIPSLYPFLHQVYRLPSNLFYENNLILSKVGAQQGDPLGPLVFSLAIHKAIRGLKSSLNVWYLDDGTIGGKPEDVLQDLEGLVPSLRDLGLEVNPSKCEFFSCGTESRTYFRQLSTILPGLKELSPSDFNLLGSPIFLSAVPNAITARKQLLLAAHERLKGLSAHVAIVLLRMCFALPKIAYLLRTTPTWLCPEEVSSFDDALKSVIESVLNVSLDGNQWSQATLPIRSGGLGIRCVRDVGLPAFLASAQGVSNLVTILLNPNGDGGNVPFVSDAVSAWSALNGGVSIPELRHLQRAWDEVGVRRLQAQLLEGATGADKARLRAVSQPESGAWLQALPSPHVGTLLDDDSLRVAVALRLGCKVCEPHICTCGSMVEADGHHALSCRRCNGRFPRHHALNEIIRRALVSANVPCVLEPPGLSRSDGKRPDGLTLVPWKNGKCLLWDATCVSTVAASHLGRTIHSPSAAADDAGLRKRLKYAELEPLYHFVPVAVETLGSWGKEAKSLIREIGQRLIEATGDSRSGSFLVQRMAVAIQRGNAASVMGTFAPGAIRGGLFD

SEQ ID NO: 17314 - protein, 964 aa, Agriopis aurantiaria
MLIYKRPNTMEVSASLTCPHCPGSARTFSLHGLKIHIGRMHKIGSHTLPVDIPLTTHSATVSQSLRTGTVISHQCPLERLAVLKGSIPVLRHVPKGARNQAAGKMCDIIVKCVDCNGVEDWWSLLSFAFSALRVPSKVSPGNMTSKVKANIESSGFHQFDDEFDRPSSNPRSRSVRKTIESKVYEGDLRGAVRLLMSNDTFAQRGPDTLAALKLKHPGPSRPLSSPSVPDASYTTVSVTVEDVALALGSFYSGSAAGLDGIRPGHLKELTSAAAGENGHRLMECLAKLSNFLLSGQLNPEVCPYLYGASLCALAKKDGGVRPIAVGSTFRRLTAKLACRAVKEELSEYLQPHQLGFGTRRGCEAAIHATRTYAMESASSNCVILKLDICNAFNTLERDVLLGEVKDKIPSLYPFLHQVYQSPSNLFFNGDLILSQVGAQQGDPLGPLVFSLAIHKIISELKSPLNLWYLDDGTIGGSPEVVDQDLRVLVPRLRELGLEVNTAKCEFFPCSDEARTHFDHFSALFPGLRELTPTTFSLLGSPIFLDAVPEAIISRQKLLLAAQERLKNLSAHVAMLLLRMCFAAPKVTYLLRTTPTWLCPEEVSSFDGALKDTVESILNISLSESQWTQAALPIRHGGLGFRRVRDVGLPAFLASAHGVADLVAIILSTNGDRASIPYLAEAASAWSTLSVDVPNPLTPHVQRAWDDVGAKRILMQMSENVTGADLARLKAVSQSESGAWLHALPSPHLGTLLDDDSLRVAVALRLGCKVCEPHRCTCGSMVEADGHHALSCRRCMGRFPRHHALNDIVRRAFISANVPCVLEPPGLIRSDGKRPDGLTLVPWKNGKCLVWDATCVSTVAATHLSRTVHTPAAAAEDAACRKRQKYAAMEPQYYFVPIAVETMGSWGTEAKSLISEVGRRIRDNGGDSRSGSFLVQRLAIAIQRGNAASVMGTFAPGTIRGGLFD

SEQ ID NO: 17315 - protein, 998 aa, Cosmia trapezina
MLDIFLCKENHYYYFLVVILLVSSFYLLYLLLMRVLYFLDAQMSALSTMLSCPHCPGSSRTFSSHGIKIHIGRMHKHMQQPVATPQTSSTVTDSQPMSQVPLVSRPCPLERLSALKMCTPVLRHIPKGSRNQAAGKLCDILDKCVSCNGVDEWGALLTFAFVGLRVPSRVAPGNMTTKVKANIESVGADRFVDESSCVADFSKPRGIRKAIESKVFEGDLRGAVRLLVSDDSFAQHNPGTLDALTVKHPSPSRPLNFPSAPDSSFPRVTASVEDVTLALRSFNSGSAAGMDGIRPGHLKELTSGSAGENGRRLLESLTKLVNFLMSGQLNPVVCPYLYGASLCALKKKDGGLRPIAIGSVFRRLSAKLACRSVRVDMAEYFQPHQLGFGTPRGCEAAIHATRAFVMDPKNSDCVVLKLDIRNAFNTLERDVLLSEVKDKIPSLYPFLYQVYYSPSNLFFNDSLISSQVGAQQGDPLGPLVFNLAIHKVISGLKSSLNLWYLDDGIIGGSLEEVCQDLEVLVPQLKELGLEVNPSKCEFFPCGFGARSHFSLFGCLLPGLKELSPLSFSLLGSPIFLDGVPEAISSRTQLLLNARERLKDLSAHVAILLLRMCFALPKITYLLRTAPTWLCPEEVCSFDCALKSTVESILNVSFNDTQWKQAALPIRHGGLGVRCVHDVGLPAFLASTHGVADLVTVILDSNGDGANTPFMLDAGSAWSVLNMGAASPDATHVQRAWDDVSSRLIQEQMMVGSSGADLARLRAVSQPESGAWLHALPSPHLGTLLDDDSLRVAVALRLGCKVCEPHRCTCGSTVEADGHHALSCRRCSGRFPRHHALNDIVRRAFVSADVPCVLEPPGLSRSDGKRPDGLTLVPWKNGKCLIWDATCVSTVAASHLGRTVLSSSAAAEDAAERKRVKYAPLATRYHFVPIAVETMGCWGTEAKKLIGEIGHKLREKTGDSRSGSFLVQRLAIAIQRGNAASVMGTFAPGTVRGGFFENW

SEQ ID NO: 17316 - protein, 960 aa, Apamea monoglypha
MYKDAQMSALSAMLSCPHCPGSSRAFSSHGLKVHIGRMHRNARQPVVAPRTSSTVTDSQLVSQVPPVSRPCPLERLSALKVSTPVLRHVPKGARNQAAGKLCDIIDKCISCNGVGDWGALLTFAFGGLRVPSRDAPGNMTAKVRANVESVGSGQFVDESDCVAGVTKSRGIRKAIESKVFEGDLRGAVRLLVSDDSFAQHDPDTLSALTVKHPSPSRPLNFPSAPDLSFPRMTASVEDVALALGSFYSGSAAGLDGIRPAHLKELTSGSAGENGRRLLECLTKLANFLMSGQLNPVVCPYLYGASLCALKKKDGGLRPIAIGSVFRRLTAKLACRSVRVAMSEYLQPHQLGFGTRRGCEAAIHATRAFVMNPENSDCLVLKLDIRNAFNTLERDVLLSEVKDKIPSLYPFLYQVYYYPSNLFFSDSLISSQVGAQQGDPLGPLVFSLAIHKVISGLKSSLNLWYLDDGIIGGSPEEVCQDLELLVPQLKELGLEVNPSKCEFFPCGVGARTHFSRFGSHLPGLKELSPLSFSLLGSPIFLDGVPEAISSRKQLLLSARERLKDLSAHVAILLLRMCFALPKVTYLLRTAPTWLCPEEVCSFDCALKSTVESILNVSFNDAQWRQAALPIRYGGLGVRCVHDVGLPAFLASTHGVADLVTVILDSNGDGANIPFMLDAGSAWSVLSMGAARPDATHIQRAWDDVASRLIQEQMLVGSSGADLARLRAVSQPESGAWLHALPSPHLGTLLDDDSLRVAVALRLGCKVCEPHRCTCGSMVEADGHHALSCRRCSGRFPRHHALNDIVRRAFVSADVPCLLEPPGLCRTDGKRPDGLTLVPWRDGKCLIWDATCVSTVAASHLGRTVHSPSAAAEDAAERKRVKYAPLVDRYHFVPIAVETMGAWGAEARNLISEIGHKLRDKTGDSRSGSFLVQRLAIAIQRGNAASVLGTFAPGTVRGGLFD

SEQ ID NO: 17317 - protein, 821 aa, Ennomos quercinarius
MTTKVKANIESSGLYLFEECDGLVGNSRSRSIQKTIESKVFEGDLRGAVRLLVSDDTFAQRGPDTLAALKLKHPCPSRPLNSPPAPDASYTTASVTVSDVSQALSTFYSGSAAGLDGIRPGHLKELTSVSAGENGHRLMECLTRLCNFLLSGQLNIEVCPYLYGAALCALAKKDGGVRPIAVGSTFRRLTAKLACRAVKGEMAEYLQPHQLGFGARRGCEAAIHATRTFVLDAANSNCVVLKLDICNAFNTLEKDVLLNEVKDNIPSLYPFLHQIYQSPSNLFFDNNLILSQVGAQQGDPLGPLVFSLAIHKIILELKSHLNLWYLDDGTIGGKPEVVAQDLRVLVPRLRELGLVINSSKCEIFPCSAEAGIHFDHFSAILPGLRELSPNTFNLLGSPIFPEAVPEAITSRKQLLLAAQERLNNLSAHVALILLRMCFALPKVTYLLRTTPTWLCPEEVSSFDSTLKSAVESILNVSLNELQWDQAALPIRLGGLGVRRVLDVGLPAFLASAHGVADLVTNILYTNGDRASVPYLSDAVSAWSAVNQGAPNPEALHVQRAWDEVGAKRNLQQMLDSATGADLARLKAVSESESGAWLHALPSPHLGTLLDDDSLRVTVALRLGCKVCEPHNCTCGAMVEADGHHALSCRRCTGRFPRHHALNDIIRRAFISANVPCVLEPPGLCRSDGKRPDGLTLVPWKNGKCLVWDATCVSTVAATHLSRTVHKAAAAAEDAASKKRRKYATMEPHYYFVPIAVETMGSWGAEAKTLVSEIGRRIRDKGGDSRSGSFLVQRLAIAIQRGNAASIMGTFAPRTVRGGLFE

SEQ ID NO: 17318 - protein, 954 aa, Eilema sororculum
MSVSSAQLLCPHCPGSSRVFSARGLRVHIGRMHKDVLRLGTVSPVSLTNAGTSMGQSLSTPSSAESSLDRLASLRGNVPVLRHIPKGARSQAAGRLCDIIDSCIGRNGVDEWATLLLFAYTALRVPARESSGNMTTKVKNNILSSDHGDDFEISASKACTGPRSLQKNIESKVFEGDLRGAVRLLMSDDSFANRDHGTMTALELKHPGPSRPLNFPPDPGLSFTPVTVTTGDVISAVGSFYAGSAAGLDGIRPGHLKELTSVSAGESGRRLVGCLTGLVNFLLSGQLNPLVCPYLYGASLFALAKKDGGLRPIAVGSVFRRLTAKLACRAVKEEMADYLQPHQLGFGTRLGCEAAIHATRAFVMDPKNEGAILLKLDIRNAFNTLERDVLLSEVKEKIPSLYPFLHQVYRLPSNLFYENNLLLSKVGAQQGDPLGPLVFSLAIHKAVQSLKSALNVWYLDDGTIGGKPEDVVQDLEALVPSLRDLGLEVNPSKCEFFSCGTEARTCFSRLSTILPGLKELSPSDFYLLGSPIFLSAVPKAISVRKHLLLAAHERLKGLSAHVAIVLLRMCFALPKIAYLLRTTPIWLCPEEVSSFDDALKSVVESVLNVNLDGTQWSQATLPIRSGGLGVRCVRDVGLPAFLASAQGVASLVTTLLNPNGDGASVPFVSDAVSAWSALNGGASIPELGHLQRAWDEVGVRRLQAQLLDRAAGVDKARLRAVSQPESGAWLQALPSPHLGTLLDGDSLRVAVALRLGCKVCEPHICTCGSMVEADGHHALSCRRCTGRFPRHHALNDIVRRALISANVPCVLEPPGLSRSDGKRPDGLTLVPWKNGKCLLWDATCVSTVAASHLSRTIHSPSAAADDASSRKRLKYAELEPQYYFVPIAVETLGSWGRDAKSLIKAIGQRLIEATGDSRSGSFLVQRMAVAIQRGNAASVMGTFAPGAIRGGLFD

SEQ ID NO: 17319 - protein, 947 aa, Eilema depressum
MSTTQLTCPHCPGSLRIFSSHGLKVHIGRMHKRAPVSPADTDTTAPAGQGQSAPALAQTTLDRLATFRGSIPVLRHIPKGARNQAAGKLCDIVDACVTNNGVEEWGALLAFAYTALRVPARESPGNMTSKVKVNVLQSDHFDNIELPASSVRTGSRSVLKNIESKVFEGDLRGAVRLLMSDDSFARRDPGTMAALELKHPSPSRQLNFPPDPGLQCTTAAVTVGDVISALGSFYAGSAAGLDGIRPVHLKELTSVSAGENGRRLLGCLTRLVNFLLSGQVHPQVCPYLYGASLFALAKKDGGLRPIAVGSVFRRLTAKLACRAVKEEMAEYLQPHQLGFGTCLGCEAAIHATRAFVMDPRNEGSILLKLDIRNAFNTLERDVLLSEARERIPSLYPFLHQAYKLPSNLFFDNNLITSKVGAQQGDPLGPLVFSLAIHRAIRGLKSALNVWYLDDGTIGGKPEDVLHDLEALVPSLKDLGLEVNPSKCEFFPCGTEARTHFAQLNSFLPGLKELSSSNFNLLGSPIFLSAVPEAITARKQLLLTAHERLRGLSAHVAIVLLRMCFALPKINYLLRSTPTWLCPEEVSSFDDALKSVVESVLNVSLDGTQWSQAAQPIRCGGLGVRRVRDVGLPAFLASAHGVANLVTSLLNPNGDGGIIPFASDAMLAWSALSAGAAIPEPVHLQRAWDDVGVKRLQVQLLDGAAGADKARLRAVSQPESGAWLQALPSPHLGTLLDDDSLRVAVAFRLGCKVCEPHICTCGSMVEADGHHALSCRRCTGRFPRHHALNDIVRRALVSANVPCVLEPPGLSRSDGKRPDGLTLVPWKNGKCLLWDATCVSTVAASHLSRTVHSPSAAAEDASSRKRLKYADLEPLYYFVPVAVETLGSWGKEAKGLIKEIGQRLNEATGDFRSGSFLVQRLAIAIQRGNAASVMGTFAPGAIRGGLFD

SEQ ID NO: 17320 - protein, 955 aa, Eilema depressum
MDSGSAPGPCPYCLQSSRVFSARGLKIHISRMHKGTRPVAASSCASPTASGPQLPGRSDQAPLVSDAGVFGRVSYLKASTAVLRHIPKGARSQAAGKLADIINECVDRNGVEEWSALLTFAYGALRVPLRDAPGNATAKVKANILSLGTDETSGESITSRRSGPRGKRKAVEAKVFEGDLRGAVRLLVSSESFAQHNADALNALELKHPSPSRSLSFPPAPDASFVGLSVSMEDVSSALYSFYSGSAAGLDGLRPGHLKELTSGSAGDNGRRLMACLTKMANFLLSGQLNPAVCPYLYGGSLCALGKKDGGIRPIAIGSVFRRLSARLACRAVRDEMAEYLRPHQLGFGTSRGCEAAIHATRAFVMDPVHCDSVVLKLDIRNAFNSLERDVLLTEVREKIPSLYPFLHQVYYSPSNLFFGVSLISSQVGAQQGDPLGPLVFSLALHRVITDLKSELNLWYLDDGTLGGSPQDVYQDLEILIPRLKALGLEVNPSKCELFPCNAEARAHLERFNSLLPDIKELSQTSFFLLGSPIFPEGLPEAIFSRRDLLLAAQEHLKDLSAHVALVLLRMCFALPKLTYLLRTTPTWLCPAEVAEFDDTLRSITESILNVALDGTQWRQATLPIRYGGVGVRCARDVGVPAFLASANGVSSLVTLILGNNGDGARVPFAADAESVWAARVSGVGSPTSRSVQRAWDDVVAGQVGAQLLEGASGADVARLRAVAQPESGAWLHALPSPHLGTLLDDSSLRVAVALRLGCRVCEPHGCTCGSTVEADGHHALSCRRCAGRFSRHHALNDIIRRALVSVDVPCVLEPPGLSRSDGKRPDGMTLVPWRCGKCLLWDATCVSTVAPSHLGRTVRSAAAAAEAAADGKRLKYEALQARYLFVPFAVETLGCWSVEAKRFVEDIGRRIREKSGDSRAGSYLVQRLAIAIQRGNAASVMGTFAVGTGLGAPS

SEQ ID NO: 17321 - protein, 956 aa, Mythimna impura
MSLPSILTCPHCPGSSRVFSAHGLKVHIGRMHKHALRSGAVSQVPPIDTVNTSSSGQVRPAHSPTQSPLDRLASCKASIPVLRHIPKGARNQAAGKLCDILDSCVASNGVDEWSALLSFAYTSLRVPAKELPGNMTSKVKANIMSPVHYHEEEVDANRRSGSRSIKKSIETKVFEGDLKGAVRLLMSDDTFARGDADTLASLKLKHPDPSRPLSFPPDPDPSFTALSVTVEDVISALGSFYTGSAAGLDGIRPGHLKELISVSAGENGRRLVGGLTRLANFLLSGQLNPCVCPFLYGASLFALEKKDGGIRPIAVGSVFRRLTAKLACRAVKEDMAHYLQPHQLGFGTRLGCEAAIHATRAFVMDPENEDSILLKLDIRNAFNTLERDVLLSEVKEKIPSLYPFLHQVYRLPSNLFSDNSLILSKVGAQQGDPLGPLVFSLAIHKAIIELKSGLNVWYLDDGTIGGKPEDVFQDLEALVPRLRDLGLEVNPSKCEFFPCSTEARTHFSRFNSFLPGLRELSCSDFNLLGSPIFLGAVPEAITSRTRLLLSAHERLKDLSAHVAIVLLRMCFALPKITYLLRTTPTWLCPEEVSSFDNALKLVVESVLNVSLDGPQWRQAALPIRYGGLGVRCARDVGLPAFLASAHGVANLVTVLLNTNGDGGSMPFVSDAVSAWLTLNSGATIPDSVHVQRAWDDRGVKLLQEQLLEGALGVDKARLRAVSQPESGAWLQAIPSPHLGTLLDDDSLRVAVALRLGCKVCEPHTCTCGSMVEADGHHALNCRRCTGRFPRHHALNDIVRRALISANVPCVLEPPGLSRSDGKRPDGLTLVPWKNGKCLIWDATCVSTVAASHLSRTMHTASAAAEDACSKKRLKYAALDQLYHFVPVAVETLGSWSTEAKCFVGDLGRRLAEATGDSRSRSFLVQRMAIAIQRGNAASVMGTFAPGTIRGGLFIDD

SEQ ID NO: 17322 - protein, 955 aa, Mesoligia furuncula
MSLPSLSTCPHCPGSSRVFSAHGLKVHIGRMHKHAIRSGAVSQALLVDAVNTSSSGQVPPAHSPAQGPLDRLAGFKASVPVLRHIPKGARNQAAGKLCDIIESCIVSNGVDEWSALLSFGYTALRVPAKELPGNVTSKVKANIMSAVQCHDSVLDAGRRSGSRSMKNSIEAKVFEGDLRGAVRLLMSDDSFVQGDADTLASLKLKHPDPSRPLSFPPDPDPLLTALSVTEEDVLAALGSFYAGSAAGLDGIRPGHLKELTSMSAGENGKRLVGCLTRLANFLLCGRLNPRICPYLYGASLFALAKKGGGVRPIAIGSVFRRLTAKLACRAVKEDMAKYLQPNQLGFGTRLGCEAAIHATRTFVMNPENEDSILLKLDIRNAFNTLERDVLLGEVKENIPSLYPFLHQVYRMPSNLFFDNSLILSKVGAQQGDPLGPLVFSLAIHKAIVELNSGLNVWYLDDGTIGGRPEDVFQDLEALVPRLRDLGLEVNPAKCEFFPCSTGARTHFSRFESFLPGLREISCSDFNLLGSPIFLSAVPEAIFSRKQLLLSAHERLKDLSAHVAIILLRMCYALPKMTYLLRTTPTWLCPEEVSSFDNALKSVVESILNVSLDGPQWKQAALPIRCGGLGVRCARDVGLPAFLASAHGVANLVTLLLNTNGDGGSMPFVSDAVSAWLTLNTGATIPEATHVQRAWDDRGVGLLQEQLLEGVSGVVKARLLAVSQPESGAWLQAIPSPHLGTLLDDDSLRVAVALRLGCKVCEPHICTCGTMVEADGHHALSCRRCTGRFPRHHALNDIVRRALISANVPCVLEPTGLSRCDGKRPDGLTLVPWKNGKCLIWDATCVSTVAASHLSRTTHTASAAAEDACSVKRLKYASLEQPYYFVPVAVETLGSWSREAKVFVAELGRKLREATGDNRSGSFLVQRLAIAIQRGNAASVMGTFAPGTIRGGLFCD

SEQ ID NO: 17323 - protein, 955 aa, Apodemia virgulti
MSTLATHVPCPHCPGSMRTFTAHGLKVHIGRIHKDLRYSSVVPRIPPADIVVPSSSLGSQVPSTSTPSLDRLACLKGSIPVLRHVPKGARYQAAGKLCDVIDSCVSNNGLDDWCSLLSFAYTALQIPTKQSPGNMTSKVKANILSSGNFHDVEALMGSPGPSSRSTKKVIEAKVFEGDLRGAARLLMSNDSFAGRDPNTLAALELKHPGPSRPLNFPPEPDKACMAASVTVEDVIWALSSFYTGSAAGLDGIRPGHLKELTSVSAGDNGKRLVGSLTRLANFLLGGQLNPLVCPYLYGAALFALAKKDGGLRPIAVGSVFRRLTAKLACRAVKDDMAGYLQPHQLGFGTRLGCEAAIHATRSFVMNSENEDCIVLKLDIRNAFNTLERDVLLREVMEKVPSLYPFLNQVYKLPSYLFFHNKLIESKVGAQQGDPLGPLVFSLAIHKAILQLKSPLNVWYLDDGTIGGKPEDVLQDLKALIPRLRVLGLEVNPSKCEFFPCGPEARTHFSYFNTLLPDLKELSPSNFNLLGAPIFLSAVPEAIFACIQLLLTAHERLKNLSAHVAIVLLRMCFGLPKFTYMLRTAPTWLCSEEVSSFDDALKSVVESVLNVSLDGTQWRQASLPIRCGGLGVRCVRDVGLPAFLASAHGVANLVTVLLDSNGDVGSIPFVSDAMIAWSALNSGAASPEVVHTQRAWDDVGMQRFKEQLINDAEGADRARLRAVSQPESGAWLQALPSPHLGTLLDDDSLRVAVALRLGCKVCEPHICTCGFMVEADGHHAMSCRRCSGRFPRHHALNDIIRRALISANVPCVLEPPGLCRTDGKRPDGLTLVPWKNGKCLIWDATCVSTVAASHLGRTVHSPSAAAEDACAKKRLKYAALESLYHFVPVAVETLGSWSVEAKGLIREIGRRLSEITGDSRSGSFLVQRLAIAIQRGNAASVMGTFAPGTIQVGLNS

SEQ ID NO: 17324 - protein, 954 aa, Laspeyria flexula
MSETITSLSCPHCPGSTRTFSEHGLKVHIGRMHKHNIVQLQDAASPVRSADTMIHASPAPSHAQCPLDGLAAMKECIPILRHIPKNARNQAAGRLCDVIDTCVDLNGLDEWSTLLTFAYTALKVPSKNSPGNMTAKVKANILASGQGGHGEEITVERSSSKLRSSKKIIESKVFDGDLRGAVRLLMTEDSFAERSPDTLAAMRLKHPCSSRTLDFPASPDPSYTPVSVTVGDVVLALGSFHSGSAAGLDGFRPGHFKELTSASAGENGRRLLGCLAKLVHFLLSGQLNPLVCPYLYGASLFALAKKGGGLRPIAVGSVFRRLTAKIACRVVRDEMAEYLGPHQLGFGTHLGCEAAIHTTRAFVMDSENKDSIILKLDIRNAFNTLERDVLLREVKDKIPSLYPFLHQVYRLPSNLYFNNNLILSQVGAQQGDPLGPLVFSLAIHRVIVDLKSHLNVWYLDDGTIGGKPEDVLQDLETLIPHLRELGLEVNPSKCEFFPCSIDARKHFSDFSTHLPGLKELTSSDFHLLGSPIFLNAVPEAINYRKHILLTAHERLKDLSAHVAIILLRMCFALPKISYLLRTTPTWLCPEEVSSFDETLKSVVESIINVSLNETQWSQAALPVRNGGLGVRRACDVGLPAFLSSAHGVASLVTVLLNPNGDEVSMPFVSSAVSAWLALNPSATIPVGAHVQRAWDGEGVKRIQGKLIEEASGADMARLRAVSQSESGAWLLALPSPHMGTLLDDDSLRIAVALRLGCRVCEPHVCTCGSRVETDGHHALSCRRCSGRFSRHHALNDIVRRALVSANVPCMLEPPGLSRSDGKRPDGLTLVPWKNGKCLIWDVTCVSTVAASHLSRTARFPSAAAEDAASKKRLKYAALEPMYDFVPIAVETMGSWGKDTRNFIQALGRRLNNICGDSRSGSFLVQRLAIAIQRGNAASVVGTFAPGATRGGLFD

SEQ ID NO: 17325 - protein, 960 aa, Apamea monoglypha
MYKDAQMSALSAMLPCPHCPGSSRAFSSHGLKVHIGRMHRNARQPVVAPRTSSTVTDSQLVSQVPPVSRPCPLERLSALKVSTPVLRHVPKGARNQAAGKLCDIIDKCISCNGVGDWGALLTFAFGGLRVPSRDAPGNMTAKVRANVESVGSDQFVDESDCVAGVTKSRGIRKAIESKVFEGDLRGAVRLLVSDDSFAQHDPDTLSALTVKHPSPSRPLNFPSAPDLSFPRMTASVEDVALALGSFYSGSAAGLDGIRPAHLKELTSGSAGENGRRLLECLTKLANFLMSGQLNPVVCPYLYGASLCALKKKDGGLRPIAIGSVFRRLTAKLACRSVRVAMSEYLQPHQLGFGTRRGCEAAIHATRAFVMNPENSDCLVLKLDIRNAFNTLERDVLLSEVKDKIPSLYPFLYQVYYYPSNLFFSDSLISSQVGAQQGDPLGPLVFSLAIHKVISGLKSSLNLWYLDDGIIGGSPEEVCQDLELLVPQLKELGLEVNPSKCEFFPCGVGARTHFSRFGSHLPGLKELSPLSFSLLGSPIFLDGVPEAISSRKQLLLSARERLKDLSAHVAILLLRMCFALPKVTYLLRTAPTWLCPEEVCSFDCALKSTVESILNVSFNDAQWRQAALPIRYGGLGVRCVHDVGLPAYLASTHGVADLVTVILDSNGDGANIPFMLDAGSAWSVLSMGAARPDATHIQRAWDDVASRLIQEQMLVGSSGADLARLRAVSQPESGAWLHALPSPHLGTLLDDDSLRVAVALRLGCKVCEPHRCTCGSMVEADGHHALSCRRCSGRFPRHHALNDIVRRAFVSADVPCLLEPPGLCRTDGKRPDGLTLVPWRDGKCLIWDATCVSTVAASHLGRTVHSPSAAAEDAAERKRVKYAPLVDRYHFVPIAVETMGAWGAEARNLISEIGHKLRDKTGDSRSGSFLVQRLAIAIQRGNAASVLGTFAPGTVRGGLFD

SEQ ID NO: 17326 - protein, 955 aa, Spodoptera frugiperda
MNMPVLTCPHCPGSARVFSVHGLKVHIGRMHKHASRSGAVSQLSPVITVDTSLSGQAPPPHSPVQSPLDRLAAFKASIPVLRHIPKGARNQAAGKLCDIIDSCIANNGVDEWSALLSFAYTALRVPAKELPGNMTSKVKANIMSPVNWHDNELYASRRSDSRSNKKNIERKVFEGDLRGAVRLLMSDDSFARGDADTLASLKLKHPDPSRPLSFPPEPDPSFAVLSVTVEDVLSALASFYSGSAAGLDGIRPGHLKELTSVSAGDNGKRLVGGLARLANFLLSGQLNPCVCPFLYGASLFALEKKDGGLRPIAVGSVFRRLTAKLACRAVKEDMARYLQPHQLGFGTCLGCEAAIHATRTFVMDPENEDAVVLKLDIRNAFNTLERDVLLSEVREKIPSLYPFLHQVYRLPSNLFSNNSLIFSKVGAQQGDPLGPLVFSLAIHKAIVELKSGLNVWYLDDGTIGGRPEDVYQDLEALIPRLRDLGLEVNPSKCEFFPCSTAARTHFSLFHSSLPGLRELSCSNFNLLGSPIFPSAVPEAITARTRLLLSTRERLKDLSAHVAIILLRMCFALPKITYLLRTTPTWLYPEEVSSLDNALKLVVESILNVSLDGPQWRQAALPIRCGGLGVRCARDVGLPAFLASAHGVADLVTVLLATNGDGGSLPFVSDAVSAWLTLNSGAAIPESKHIQRAWDDIGVKQLQEQLLEDAVGVEKARLRAVSQPESGAWLQAIPSPHLGTLLDDDSLRVAVALRLGCKVCEPHTCTCSSMVEADGHHALNCRRCTGRFPRHHALNDIIRRALISANIPCVLEPPGLSRSDGKRPDGLTLVPWKNGKCLIWDATCVSTVAASHLSRTMHTASAAAEEACSKKRLKYALLGQLYHFVPVAVETLGCWSAEAKSFVGDLGRRLEEATGDSRSRSFLVQRMAIAIQRGNAASVMGTFAPGTIRGGLFNDS

SEQ ID NO: 17327 - protein, 954 aa, Eilema sororculum
MSVSSAQLLCPHCPGSSRVFSARGLRVHIGRMHKDVLRLGTVSPVSLTNAGTSMGQSLSTPSSAESSLDRLASLRGNVPVLRHIPKGARSQAAGRLCDIIDSCIGRNGVDEWATLLLFAYTALRVPARESSGNMTTKVKNNILSSDHGDDFEISASKARTGPRSLQKNIESKVFEGDLRGAVRLLMSDDSFANRDHGTMTALELKHPGPSRPLNFPPDPGLSFTPVTVTTGDVISAVGSFYAGSAAGLDGIRPGHLKELTSVSAGESGRRLVGCLTGLVNFLLSGQLNPLVCPYLYGASLFALAKKDGGLRPIAVGSVFRRLTAKLACCAVKEEMADYLQPHQLGFGTRLGCEAAIHATRAFAMDPKNEGAILLKLDIRNAFNTLERDVLLSEVKEKIPSLYPFLHQVYRLPSNLFYENNLLLSKVGAQQGDPLGPLVFSLAIHKAVQSLKSALNVWYLDDGTIGGKPEDVVQDLEALVPSLRDLGLEVNPSKCEFFSCGTEARTCFSRLSTILPGLKKLSPSDFYLLGSPIFLSAVPKAISVRKHLLLAAHERLKGLPAHIAIVLLRMCFALPKIAYLLRTTPIWLCPEEVSSFDDALKSVVESVLNVNLDGTQWSQATLPIRSGGLGVRCVRDVGLPAFLASAQGVASLVTTLLNPNGDGASVPFVSDAVSAWSALNGGASIPELAHLQRAWDEVGVRRLQAQLLDGAAGVDKARLRAVSQPESGAWLQALPSPHLGTLLDGDSLRVAVALRLGCKVCEPHICTCGSMVEADGHHALSCRRCTGRFPRHHALNDIVRRALISANVPCVLEPPGLSRSDGKRPDGLTLVPWKNGKCLLWDATCVSTVAASHLSRTIHSPSAAADDASSRKRLKYAELEPQYYFVPIAVETLGSWGRDAKSLIKAIGQRLIEATGDSRSGSFLVQRMAVAIQRGNAASVMGTFAPRAIRGGLFD

SEQ ID NO: 17328 - protein, 918 aa, Eilema depressum
MHKRAPVSPVDTDTTAPAGQGQSAPALAQTTVDRLASFRGSIPVLRHIPKGARNQAAGKLCDIVDACVTCNGVEEWGALLAFAYTALRVPARESPGNMTSKVKVNVLQSDHFDNIELPASSVRTGSRSVIKNIESKVFEGDLRGAVRLLMSDDSFARRDPGTMAALELKHPSPSRPLNFPPDPGLQCTTATVTVGDVISALGSFYAGSAAGLDGIRPVHLKELTSVSAGENGRRLLGCLTRLVNFLLSGQVHPQVCPYLYGASLFALAKKDGGLRPIAVGSVFRRLTAKLACRAVKEEMAEYLQPHQLGFGTCLGCEAAIHATRAFVMDPRNEGSILLKLDIRNAFNTLERDVLLSEARERIPSLYPFLHQAYKLPSNLFFDNNLIISKVGAQQGDPLGPLVFSLAIHRAIRGLKSALNVWYLDDGTIGGKPEDVLHDLEALVPSLKDLGLEVNPSKCEFFPCGTEARTHFAQLNSFLPGLKELSSSNFNLLGSPIFLSAVPEVITARKQLLLTAHERLRGLSAHVAIVLLRMCFALPKINYLLRTTPTWLCPEEVSSFDDALKSVVESVLNVSLDGTQWSQAAQPIRCGGLGVRRVRDVGLPAFLASAHGVANLVTSLLYPNGDGGIIPFVSDAMLAWSALSAGVAVPEPVHLQRAWDDVGVKRLQVQLLDGATGADKARLRAVSQPESGAWLQALPSPHLGTLLDDDSLRVAVAFRLGCKVCEPHICTCGSMVEADGHHALSCRRCTGRFPRHHALNDIVRRALVSANVPCVLEPPGLSRSDGKRPDGLTLVPWKNGKCLLWDATCVSTVAASHLSRTVHSPSAAAEDASSRKRLKYADLEPLYYFVPVAVETLGSWGKEAKGLIKEIGQRLIEATGDFRSGSFLVQRLAIAIQRGNAASVMGTFAPGAIRGGFFD

SEQ ID NO: 17329 - protein, 947 aa, Eilema depressum
MSTTQLTCPHCPGSLRIFSSHGLKVHIGRMHKRAPVSPADTDTTAPAGQGQSAPALAQTTLDRLATFRGSIPVLRHIPKGARNQAAGKLCDIVDACVTNNGVEEWGALLAFAYTALRVPARESPGNMTSKVKVNVLQSDHFDNIELPASSVRTGSRSVIKNIESKVFEGDLRGAVRLLMSDDSFARRDPGTMAALELKHPSPSRQLNFPPDPGLQCTTAAVTVGDVISALGSFYAGSAAGLDGIRPVHLKELTSVSAGENGRRLLGCLTRLVNFLLSGQVHPQVCPYLYGASLFALAKKDGGLRPIAVGSVFRRLTAKLACRAVKEEMAEYLQPHQLGFGTCLGCEAAIHATRAFVMDPRNEGSILLKLDIRNAFNTLERDVLLSEARERIPSLYPFLHQAYKLPSNLFFDNNLITSKVGAQQGDPLGPLVFSLAIHRAIRGLKSALNVWYLDDGTIGGKPEDVLHDLEALVPSLKDLGLEVNPSKCEFFPCGTEARTHFAQLNSFLPGLKELSSSNFNLLGSPIFLSAVPEAITARKQLLLTAHERLRGLSAHVAIVLLRMCFALPKINYLLRTTPTWLCPEEVSSFDDALKSVVESVLNVSLDGTQWSQAAQPIRCGGLGVRRVRDVGLPAFLASAHGVANLVTSLLNPNGDGGIIPFASDAMLAWSALSAGAAIPEPVHLQRAWDDVGVKRLQVQLLDGAAGADKARLRAVSQPESGAWLQALPSPHLGTLLDDDSLRVAVAFRLGCKVCEPHICTCGSMVEADGHHALSCRRCTGRFPRHHALNDIVRRALVSANVPCVLEPPGLSRSDGKRPDGLTLVPWKNGKCLLWDATCVSTVAASHLSRTVHSPSAAAEDASSRKRLKYADLEPLYYFVPVAVETLGSWGKEAKGLIKEIGQRLNEATGDFRSGSFLVQRLAIAIQRGNAASVMGTFAPGAIRGGLFD

SEQ ID NO: 17330 - protein, 879 aa, Erannis defoliaria
MSTPVLRHIPRGARNQAAGKLCDVIDRCVTCNGVEDWGALLTFAFGALKVPSKDAPGNVTAKVKANIQSSGLDQLADETYVPGFSRSCGNRKAIESKVYDGDLRGAVRLLVSDDSFAHHDPVTLNALELKHPSPSRPLSFPPAPDTSFAAVTVSVEDVSLALSSFYSGSAAGLDGIRPGHLKELTSGSAGENSQRLLECLTRLVNFLLSGQINPVVCPYLYGATLCALTKKDGGIRPIAIGSVFRRLTAKLACRSVREAMSEYLQPHQLGFGTRQGCEAAIHATRAFVMDPDHSDCVVLKLDICNAFNTLERDVLLSEVKDLTPSLYPFLYQVYSSSSNLYFNDSLISSQVGAQQGDPLGPLVFSLAIHKVISELKSTLNLWYLDDGTLGGSPKDVYQDLEALISRLRDLGLEVNPSKCEFFPCSTGARTHFLQFSSLLPGLKELSSQSFTLLGSPIFPDGVPEAIFSRQKLLLTAQERLKDLSAHVAIVLLRMCFALPKLTYLLRTAPTWLCPVEVSAFDETLKAIVESILNVSLNQTQWIQATLPIRHGGIGIRCARDVGLPAFLASAHGVADLVTVILRSSGGGVSLPFVAGAESAWSVCSSGATNPVIPQVQRAWDDITARQIKERLRLDASGADLARLRAVSEPESGAWLHALPSPYLGNLLDDNSLRVAVALRLGCKVCEPHRCTCGSMVEADGHHALSCRRCTGRFPRHHALNDIVRRALVSADVPCLLEPPGLSRSDGKRPDGMTLVPWKNGRCLLWDATCVSTVAPSHLGRTVLSPAAAAEDAAVKKRLKYAALEGQYIFVPLAVETLGSWGIDAKNVVGEIGRRLKDKSGDPRSSSYLVQRLAIAIQRGNAASVMGTFAPGAVRGGLFD

SEQ ID NO: 17331 - protein, 960 aa, Mesoligia furuncula
MYKDAQMSALSAMLSCPHCPGSSRTFSSHGLKVHIGRMHRNARQPVATPRTSSTVTDSQPVSQVPPVLRPCPLERLSALKVSTPILRHVPKGARNQAAGKLCDIIDKCVSCNGVEDWGALLTFAFGGLRVPSRDAPGNMTAKVKANVESVGADQFVDESGCVAGVAKSRGIRKSIESKVFEGDLRGAVRLLVSDDSFAQHDPDTLSALTVKHPNPSRPLNFPLAPDLSCLRVTASVEDVALALSSFYSGSAAGLDGIRPGHLKELTSGSAGENGRRLLECLTKLANFLMSGQLNPVVCPYLYGASLCALKKKDGGLRPIAIGSVFRRLTAKVACRSVRVAMSEYLQPHQLGFGTPRGCEAAIHATRTFVMDPKNSDCVVLKLDIRNAFNTLERDVLLSEVKDKIPSLYPFLYQVYYSPSNLFYHDSLISSQVGAQQGDPLGPLVFSLAIHKVISGLKSSLNLWYLDDGIIGGSPEEVCQDLEVLVPQLKELGLEVNPSKCEFFPCGVGARTHFSRFGSHLPGLKELSSHNFSLLGSPIFLDGVPEAISSRKQLLLNARERLKDLSAHVAILLLRMCFALPKVTYLLRTAPTWLCPEEVCSFDCALKSTVESILNVSFNDAQWRQAALPIRYGGLGVRCVHDVGLPAFLASTHGVADLVTVILDSNGDGANIPFMLDAGSAWSVLNMGAASPDATHVQRAWDDVTSKLIQEQMLVGSSGADLARLRAVSQPESGAWLHALPSPHLGTLLDDDSLRVAVALRLGCKVCEPHRCTCGSMVEADGHHALSCRRCSGRFPRHHALNDIVRRAFVSADVPCVLEPPGLCRTDGKRPDGLTLVPWRNGKCLIWDATCVSTVAASHLCRTVHSPSAAAEDAAERKRVKYAPLVDRYLFVPIAVETMGAWGTEARKLISEIGHKLRDKTGDSRSGSFLVQRLAIAIQRGNAASVLGTFSPGTVRGGLFD

SEQ ID NO: 17332 - protein, 954 aa, Apamea monoglypha
MSALSAMLSCPHCPGSSRAFSSHGLKVHIGRMHRNARQPVVAPRTSSTVTDSQLVSQVPPVSRPCPLERLSALKVSTPVLRHVPKGARNQAAGKLCDIIDKCISCNGVGDWGALLTFAFGGLRVPSRDAPGNMTAKVRANVESVGSDQFVDESDCVAGVTKSRGIRKAIESKVFEGDLRGAVRLLVSDDSFAQHDPDTLSALTVKHPSPSRPLNFPSAPDLSFPRMTASVEDVALALGSFYSGSAAGLDGIRPAHLKELTSGSAGENGRRLLECLTKLANFLMSGQLNPVVCPYLYGASLCALKKKDGGLRPIAIGSVFRRLTAKLACRSVRVAMSEYLQPHQLGFGTRRGCEAAIHATRAFVMNPENSDCLVLKLDIRNAFNTLERDVLLSEVKDKIPSLYPFLYQVYYYPSNLFFSDSLISSQVGAQQGDPLGPLVFSLAIHKVISGLKSSLNLWYLDDGIIGGSPEEVCQDLELLVPQLKELGLEVNPSKCEFFPCGVGARTHFSRFGSHLPGLKELSPLSFSLLGSPIFLDGVPEAISSRKQLLLSARERLKDLSAHVAILLLRMCFALPKVTYLLRTAPTWLCPEEVCSFDCALKSTVESILNVSFNDAQWRQAALPIRYGGLGVRCVHDVGLPAFLASTHGVADLVTVILDSNGDGANIPFMLDAGSAWSVLSMGAARPDATHIQRAWDDVASRLIQEQMLVGSSGADLARLRAVSQPESGAWLHALPSPHLGTLLDDDSLRVAVALRLGCKVCEPHRCTCGSMVEADGHHALSCRRCSGRFPRHHALNDIVRRAFVSADVPCLLEPPGLCRTDGKRPDGLTLVPWRDGKCLIWDATCVSTVAASHLGRTVHSPSAAAEDAAERKRVKYAPLVDRYHFVPIAVETMGAWGVEARNLISEIGHKLRDKTGDSRSGSFLVQRLAIAIQRGNAASVLGTFAPGTVRGGLFD

SEQ ID NO: 17333 - protein, 959 aa, Arctia plantaginis
MSSLLSSQSTCPHCQGSARIFSSRGLKIHIARIHGHQPRTSPTDVQQDTSSSDVGQRPRPGVVPQHRCPLERLATCKSSIPVMRHIPKAARNLAAAKLSSIIDGCVDGNGVEDWFALLSFAFSALRVPSKSLPGNMTSKVKANINSSGFYQFEDECDGAPTNRRSCSIQKTIENKVFEGDLRGAVRLLMSNDKFAQGGSETLAALKLKHAGPSRPLKPQPAPDASCAFVTATPEDVAQALNSFYSGSAAGLDGIRPGHLKELTSRAAGENGQRLMGSLAKLCNFLLSGQLNPEVCPFMYGASLCALNKKDGGLRPIAVGSVFRRLTAKLACCSVREEMAEYLQPHQLGFGTRRGCEAAIHATRTYVMDPKNSRCVVLKLDIRNAFNTLERDVLLSAVKDEIPSLYPFLHQVYKSPSNLFYNKDLILSQVGAQQGDPLGPLVFSLAIHKIISKLESPLNLWYLDDGTIGGQPEVVAKDIMVLIPRLKELGLEVNPAKCEFFPCSTEARTHFTHFEMFFPGLSEITPGTFSLLGSPIFLEAVPEAIAARQNLLLATRERLKHLSPHVAVLLLRMCFAVPKITYLLRTTPTWLCPEAVSLFDGALRDTAESILNVSLDEHQWIQAALPIRYGGLGLRRVLDVGLPAFLASAHGVADLVAVTLSPNGDRASIPYVSEAVSAWSAVNAGEPFPVTLHVQRAWDDIGAKGLLKQMLDTAGGTDLARLRAVSQPESGAWLHALPSPHLGTLLDGDSLRVAVALRLGCRVCELHRCTCGSMVGADGLHALSCRRCAGRFSRHHALNDIVRRALISANVPCVLEPSGLSRSDGKRPDGLTLVPWKNGKCLVWDATCVSTVAASHLSRTVQAPAAAAEDAASRKRSKYAAMETHYYFVPIAVETLGSWGSEAKKLIAEIGRRVREKSGDSRSGSFLVQRMSVAIQRGNAASIMGTFAPGATRGGLYDLT

SEQ ID NO: 17334 - protein, 956 aa, Mythimna ferrago
MSMPSFLTCPHCPGSSRVFSAHGLKVHIGRMHKHVLRSGAVSQVSPVDTVNSSASGQIPPAHSLTQSPLDRLAAWKASVPVLRHIPKGARNQAAWKLCEIIDSCVTNNGVDEWSALLSFAYTSLRVPAKELPGNVTSKVKANIMSPAYCHDSEVDASRRLSSRSLKKRIEAKVFEGDLRGAVRLLMSDDSLARGDADTLASLKLKHPDPSRPLSFPPDPDPSFTSLSVTVEDVVSALGSFYSGSAAGLDGIRPGHLKELISVSAGENGRRLAGGLTRLANFLLSGQLNPCVCPFMYGASLFALEKKDGGVRPIAVGSVFRRLTAKLACHAVKEDMARYLQPHQLGFGTRLGCEAAIHATRAFVMDPENEDSILLKLDIRNAFNTLERDVLLSEVKEKIPSLYPFLHQVYRLPSNLFSDNSLIPSKVGAQQGDPLGPLVFSLAIHKTIVELKSGLNVWYLDDGTIGGRPEDVFQDLETLVPRLRDLGLEVNPSKCEFFPCSTEARTHFSRFDSFLPGLRELSRSDLNLLGSPIFLSALPEAITARTQLLLSAHERLKDLSAHVAIVLLRMCFALPKITYLLRTTPTWLCPEEVSLFDNALKSVVESVLNVSLDGPQWRQAALPIRCGGLGVRCARDVGLPAFLASAHGVANLVTVLLNINGDGGSIPFVSDAVSAWLTLNSGATIPESEHVQRAWDDRGVMLLQEQLLEGALGVDRARLRAVSQPESGAWLQAIPSPHLGTLLDDDSLRVAVALRLGCKVCEPHTCTCGSLVEADGHHALNCRRCTGRFPRHHALNDIVRRALISANVPCVLEPSGLSRSDGKRPDGLTLVPWKNGKCLIWDATCVSTVAPSHLSRTMHTASAAAEDACSKKRLKYASLEQLYHFVPVAVETLGSWSTEARSFVRDLGRRLGEATGDSRSRSFLVQRMAIAIQRGNAASVMGTFAPGTIRGGLFIDF

SEQ ID NO: 17335 - protein, 957 aa, Eilema depressum
MSTRPTELTCPHCPGSSRVFSVHGLRVHVGRMHKRVLHPGGAVSLVSPPDAGIAAPVGQGAPAPPSAPGSLDKLASVRGVIPVLRHIPKGARNQAAGRLSDIIESCVAHNGVDEWSGLLSFAYSALRVPARESPGNMTSKVKANVLSSCHFDDIEVVASTSVSASRTIKKHIESKVFEGDLRGAVRLLMSDDSFAQRDPDTLAALELKHPSPSRPLSFPPDPGLPCTVATVTIEDVSSALASFYTGSAAGLDGIRPGHLKELTSVSAGENGKRLLGCLTELVNFLLSGQLNPLVCPYLYGASLFALAKKDGGVRPIAVGSVFRRLTAKLACRGVKEDMAGYLQPHQLGFGTRLGCEAAIHATRAFVMDPKNEGSVVLKLDICNAFNTLERDVLLREVKEKIPSLYPFLYQVYRLPSNLFLDNNLILSKVGAQQGDPLGPLVFSLAIHKAIRDLRSSLNIWYLDDGTIGGKPEEVLQDLEVLVPSLRDLGLEVNPSKCELFPCGTGARTHFSHFHSVLPGLKELSLSNFYLLGSPIFLSAVPEAINARKQLLLAARERLKGLSAHVALVLLRMCFAVPKITYLLRTTPTWLCPDEVVCFDDSLKSVVESVLNVSLDDTQWSQVALPIRCGGLGVRRARDVGLPAFLASAHGVANLVTRLLTANGDGAVIPFALDAVSAWSVLNTGASIPEDVHLQRSWDDEGVRRLQNLLLECAAGADKARLRAVSQPESGAWLQALPSPHLGTLLDDDSLRVAVAFRLGCKVCEPHVCTCGSMVEANGHHALSCRRCTGRFPRHHALNDIVRRALVSANVPCVLEPPGLSRSDGKRPDGLTLVPWQNGKCLIWDATCVNTVAASHLSRTVHSPSAAAEDASYKKTLKYADLKPLYHFVPIAVETLGSWSKEAKILVRDIGSRLIETTGDSRSGAFLVQRLAIAIQRGNAASVMGTFAPGTVRGGLFD

SEQ ID NO: 17336 - protein, 955 aa, Biston betularia
MPTFQICPHCPGSARTFSAHGLKVHIGRMHKDARHQVTAPWVCSADSMDAPVAAAAHHLPSTPPPAPCPLDRVSNMKACVPVLRHIPKNARNQAAEKLCDIIDSCVSCNGVDEWSALLSFAYTALRVPSKELPGNMTAKVKANILSAGFCHSDDFASTRAYSGSRSNKKTIESKVFEGDLRGAVRLLMSEDSFAQRDPDTIAALKLKHPSSSRPLIFPSDPDSSCAAVLVTEEDVISALGSFYSGSAAGLDGIRPGHLKELTSVSAGENGRRLLGCLTSLANFLLSGQLNPLVCPYLYGASLLALKKKDGGIRPIAVGSVFRRLAAKLACRAVRDDMAEYLQPHQLGFGTRLGCEAAIHATRTFVMNPENADCILLKLDVRNAFNTLERDVLLGEVKEKIPSLYPFLHQAYKIPSNLFFDNNLILSQVGAQQGDPLGPLVFSLAIHKAILELKSALNVWYLDDGTIGGKPDDVLQDLEALIPRLKDLGLEVNPSKCEFFPCSVEARIHFTRFGTLLPGLRELSSSNFNLLGSPIFLDAVPEAITARKLLLFTAHERLKDLSAHVATVLLRMCFALPKITYLLRTAPTWLCPEEVSSFDDALKSVVESILNVSLDERQWGQAALPIRYGGLGVRCARDVGLPAFLASAHGVADLVTVLLHSNGDRESIPFVSSALSAWLARSSGATIPEAAHVQRAWDNAGAERFQKRLLEGATGVSLARLRAVSQPESGAWLHALPSPHLGTLLDDDSLRVAVALRLGCSVCEPHRCTCGSMVEADGHHALSCRRCTGRFPRHHALNDIVRRALVSANMPCVLEPPGLSRSDGKRPDGMTLVPWKNGKCLVWDATCVDTVAASHLSRTVHSPSAAAEDAANRKRLKYASIEPGYFFVPVAVETLGCWGTEAKKFISEIGHRLRDRTGDSRSGSFLVQRLAIAIQRGNAASVMGTFAPGTVRGGLF

SEQ ID NO: 17337 - protein, 960 aa, Mesoligia furuncula
MYKDAQMSALSAMLSCPHCPGSSRTFSSHGLKVHIGRMHRNARQPVAIPRTSSTVTDSQPVSQVPPVLRPCPLERLSALKVSTPILRHVLKGARNQAAGKLCDIIDKCVSCNGVEDWGALLTFAFGGLRVPSRDAPGNMTAKVKANVESVGADQFVDESGCVAGVAKSRGIRKSIESKVFEGDLRGAVRLLVSDDSFAQHDPDTLSALTVKHPNPSRPLNFPLAPDLSCPRVTASVEDVALALSSFYSGSAAGLDGIRPGHLKELTSGSAGENGRRLLECLTKLANFLMSGQLNPVVCPYLYGASLCALKKKDGGLRPIAIGSVFRRLTAKVACRSVRVAMSEYLQPHQLGFGTPRGCEAAIHATRTFVMDPKNSDCVVLKLDIRNAFNTLERDVLLSEVKDKIPSLYPFLYQVYYSPSNLFYHDSLISSQVGAQQGDPLGPLVFSLAIHKVISGLKSSLNLWYLDDGIIGGSPEEVCQDLEVLVLQLKELGLEVNPSKCEFFPCGVGARTHFSRFGSHLPGLKELSSHNFSLLGSPIFLDGVPEAISSRKQLLLNARERLKDLSAHVAILLLRMCFALPKVTYLLRTAPTWLCPEEVCSFDCALKSTVESILNVSFNDAQWRQAALPIRYGGRGVRCVHDVGLPAFLASTHGVADLVTVILDSNGDGANIPFMLDAGSAWSVLNMGAASPDATHVQRAWDDVTSKLIQEQMLVGSSGADLARLRAVSQPESGAWLHALPSPHLGTLLDDDSLRVAVALRLGCKVCEPHRCTCGSMVEADGHHALSCRRCSGRFPRHHALNDIVRRAFVSADVPCVLEPPGLCRTDGKRPDGLTLVPWRNGKCLIWDATCVSTVAASHLCRIVHSPSAAAEDAAERKRVKYAPLVDRYLFVPIAVETMGAWGTEARKLISEIGHKLRDKTGDSRSGSFLVQRLAIAIQRGNAASVLGTFSPGTVRGGLFD

SEQ ID NO: 17338 - protein, 956 aa, Apamea monoglypha
MSLPSLSACPHCPGSSRVFSAHGLRVHIGRMHKHAMRSGAVSQALPVDEVNTLSSGQVSPAHSPPQGSLDRLSGFKASVPVLRHIPKGARNQAAGKLCDIMNSCIAVNGVDEWSALLSFGYTALRVPAKELPGNVTSKVKANITSPVRCHDGVLDAGRRSGPRSIKSSIEAKVFEGDLRGAVRLLMSDDSFVRGDADTLASLKLKHPDPSRPLSFPPDPDPSLTALSVTEGDVMSALGSFYAGSAAGLDGIRPGHLKELTSVSAGENGKRLVGCLTRLANFLLCGRLDPCICPYLYGASLFALAKKGGGVRPIAVGSVFRRLTAKLACRAVKEDMAKYLQPNQLGFGTRLGCEAAIHATRTFVMNPENEDSILLKLDIRNAFNTLERDVLLSEVKENIPSLYPFLHQVYRMPSNLFFDNSLILSKVGAQQGDPLGPLVFSLAIHKAIVELNSSLNVWYLDDGTIGGRPEDVFQDLEALVPRLRDLGLEVNSAKCEFFPCSTEARTHFSRFESFLPGLREISCSDFNLLGSPIFLSAVPEAIFSREQLLLSAHERLKDLSAHVAIILLRMCYALPKMTYLLRTTPTWLCPEEVSSFDNALKSVVESVLNVSLDGPHWIQAALPIRCGGLGVRCARDVGLPAFLASAHGVANLVTVLLKTNGDGGSMPFVSDAVSAWLTLNPDAAIPEATHVQRAWDDIGVGLLQERLLEGASGVVKARLRAVSQPESGAWLQAIPSPHLGTLLDDDSLRVAVALRLGCKVCEPHICTCGSTVEADGHHALSCRRCTGRFPRHHALNDIVRRALISANVPCVLEPAGLSRCDGKRPDGLTLVPWKNGKCLIWDATCVSTVAASHLSRTAHTASAAAEDACSVKRLKYASLEQPYYFVPVAVETLGCWSKAAKVFVAELGRKLREATGDSRSGSFLVQRLAIAIQRGNAASVMGTFAPGAIRGGLFCDI

SEQ ID NO: 17339 - protein, 923 aa, Apamea monoglypha
MHRNARQPVVAPRTSSTVTDSQLVSQVPPVSRPCPLERLSALKVSTPVLRHVPKGARNQAAGKLCDIIDKCISCNGVGDWGALLTFAFGGLRVPSRDAPGNMTAKVRANVESVGSDQFVDESDCVAGVTKSRGIRKAIESKVFEGDLRGAVRLLVSDDSFAQHDPDTLSALTVKHPSPSRPLNFPSAPDLSFPRMTASVEDVALALGSFYSGSAAGLDGIRPAHLKELTSGSAGENGRRLLECLTKLANFLMSGQLNPVVCPYLYGASLCALKKKDGGLRPIAIGSVFRRLTAKLACRSVRVAMSEYLQPHQLGFGTRRGCEAAIHATRAFVMNPENSDCVVLKLDIRNAFNTLERDVLLSEVKDKIPSLYPFLYQVYYYPSNLFFSDSLISSQVGAQQGDPLGPLVFSLAIHKVISGLKSSLNLWYLDDGIIDGSPEEICQDLELLVPQLKELGLEVNPSKCEFFPCGVGARTHFSRFGSHLPGLKELSPLSFSLLGSPIFLDGVPEAISSRKQLLLSARERLKDLSAHAAILLLRMCFALPKVTYLLRTAPTWLCPEEVCSFDCALKSTVESILNVSFNDAQWRQAALPIRYGGLGVRCVHDVGLPAFLASTHGVADLVTVILDSNGDGVNIPFMLDAGSAWSVLSMGAASPDATHIQRAWDDVASRLIQEQMLVGSSGADLARLRAVSQPESGAWLHALPSPHLGTLLDDDSLRVAVALRLGCKVCEPHRCTCGSMVEADGHHALSCRRCSGRFPRHHALNDIVRRAFVSADVPCLLEPPGLCRTDGKRPDGLTLVPWRDGKCLIWDATCVSTVAASHLGRTVHSPSAAAEDAAERKRVKYAPLVDRYHFVPIAVETMGAWGAEARNLISDIGHKLRDKTGDSRSGSFLVQRLAIAIQRGNAASVLGTFAPGTVRGGLFD

SEQ ID NO: 17340 - protein, 953 aa, Ephestia elutella
MSFLSPMLTCPHCPGSLRTFSSHGLKIHIGRKHKGISSIVAPRPADAGITGISLGQSTPSASPRQCPLDALAGLKGSTQVLRHIPKGARNQAAGKLSEIVERCVESNEMDDWFALLSFAYTALRVPSKALPGNMTSKVKNNIESSGNNKFEDVSDIAAEGFKPRSTRKIIESKVFEGDLRGAVRLLVSDDTLAKQGPDTLAALKLKHPGPSRPLSSPPAPDTTYTPKSFTVDDVTLALTSFYSGSAAGSDGIRPGHLKELTSSCAGENGRRLMESLTRLSNFMLSGRVNVQVCPYLYGAALCALSKKDGGLRPIAIGSVFRRLAAKLACRAVKEIMSEYLQPHQLGFGTRLGCEAAIHSTRAFVADADNAKCVVLKLDIYNAFNTLERDVLLCEVRDKLPSLYPFLYQVYQSPSNLVYNNNLILSQVGAQQGDPLGPLVFSLAIHKIVSDLKSPLNIWYLDDGTLGGEPETVYGDLLTLIPRFKELGLEVNTSKCEYFPCSSEARSHSAHFSTLLPGLRELSKTNFSLLGSPIFVEAVPEAINSRRQLLLMAKERLQNISAHVALILLRTCFALPKISFLLRTAPTWLCSKEISDFDGSLKSTVESILNVQLDETQWKQAALPIRLGGIGVRCARDVGMPAFLASAHGVAGLVAIIISSKGSKVSIPYVSDAELAWAADNLGAPSPISLSVQRAWDDVGSEKVHKELLGTAAGADLARLKAVSQPESGAWLHALPSPHLGTLLDDDSMRVAVALRLGSRVCEPHKCVCGSMVESDGYHALSCRRCSGRFPRHHALNDIVRRAFVTANVPCMLEPPGLSRSDGKRPDGLTLVPWRHGRCLIWDATCVSKVAISHIGRTACTAAAAAEDAANKKREKYAAMEPKYIFVPIAVETMGSWGSDAKRLLKEIGQRIAVNTGDSRSGSFLVQRMAIAIQRGNAASVLGTFAPETLRGGL

SEQ ID NO: 17341 - protein, 980 aa, Arctia plantaginis
MCFFFLIYIYCIRVCFVGIINMSSLLSSQSTCPHCQGSARIFSSRGLKIHIARIHGHQPRTSPTDVQQDTSSSDVGQRPRPGVVPQHRCPLERLATCKSSIPVMRHIPKAARNLAAAKLSSIIDGCVDGNGVEDWFALLSFAFSALRVPSKSLPGNMTSKVKTNINSSGFYQFEDECDGAPTNRRSCSIQKTIENKVFEGDLRGAVRLLMANDKFAHGGSETLAALKLKHAGPSRPLKPPPAPDASCAFVTATPEDVAQALNSFYSGSAAGLDGIRPGQLKELTSRAAGENGQRLMGSLAKLCNFLLSGLLNPEVCPLMYGASLCALNKKDGGLRPIAVGSVFRRLTAKLACCSVREEMAEYLQPHQLGFGTRRGCEAAIHATRTYVMDPKNSRCVVLKLDIRNAFNTLERDVLLSAVKDEIPSLYPFLHQVYKSPSNLFYNKDLILSQVGAQQGDPLGPLVFSLAIHKIISKLESPLNLWYLDDGTIGGQPEVVAKDIMVLIPRLKELGLEVNPAKCEFFPCSTEARTHFTHFEMFFPGLSEITPGTFSLLGSPIFLEAVPEAIAARQNLLLATRERLKHLSPHVAVLLLRMCFAVPKITYLLRTTPTWLCPEAVSLFDGALRDTAESILNVSLDEHQWIQAALPIRYGGLGLRRVLDVGLPAFLASAHGVADLVAVTLSPNGDRASIPYVSEAVSAWSAVNAGEPFPVTLHVQRAWDDIGAKGLLKQMLDTAGGTDLARLRAVSQPESGAWLHALPSPHLGTLLDGDSLRVAVALRLGCRVCEPHRCTCGSMVGADGLHALSCRRCAGRFSRHHALNDIVRRALISANVPCVLEPSGLSRSDGKRPDGLTLVPWKNGKCLVWDATCVSTVAASHLSRTVQAPAAAAEDAASRKRSKYAAMETHYYFVPIAVETLGSWGSEAKKLIAEIGRRVREKSGDSRSGSFLVQRMSVAIQRGNAASIMGTFAPGATRGGLYDLT

SEQ ID NO: 17342 - protein, 954 aa, Erannis defoliaria
MSDLSVQLTCPYCPGSTRAFSAHGLKVHIGRKHKDVRRPVAASQVLPADTVTASGQAQPSPASHQCPLERLVNLRGRVPVLRHVPKGARNQAAGKLCDIIDTCVDCNGVEDWSTLLSFAYVALRVPAKDLPGNVTTKVKANIMSSGSNHVDEVGSGLANHRLRSTKKVIESKVFEGDLRGAVRLLMSDDTYAEQGPDTLAALRLKHPAPSRSLDFPSDPDISYTSLTVTVEDVVSGLGSFYSGSAAGLDGLRPGHLKDLASVSAGENGRRLLGCLTRLVNFLLSGQLNPLVCPYLYGASLCALDKKDGGMRPIAVGSVFRRLTAKLACRAVKDDMSGYLQPHQLGFGTRLGCEAAIHATRMFVMDPENVDGILLKLDIRNAFNSLERDVLLSEVKENIPALYPFLHQVYRYPSNLFFNNTLILSQVGAQQGDPLGPLVFGLAIHKVLLEVKSSLNVWYLDDGTIGGKPDDVLQDLEALIPRLKVLGLEDNPSKCELFPCSNLSRLHFTRFSTLLPGLKEISTSDFNLLGSPIFLDAVPEAVTSRKQLLLTAHERLKDLSAHVAIILLRMCFALPKINYLLRTTPTWLCPEEISSFDIALKTVVESVLNVSLEERQWDQASLPIRYGGLGVRRARDVGLPAFLASAHGVANLVTVLLCSDGVEASIPFVSGARSAWLALNSGAIIPEKTHVQRVWDEGGAKRLQEQLLEDATGANMARLRAVSQPESGAWLHALPSPHLGTLLDDDSLRVAVALRLGCKVCEPHKCTCGSLVEADGHHALSCRRCTGRFPRHHALNDIVRRALVSANMPCVLEPPGLCRSDGKRPDGLTLVPWKNGKCLVWDATCVSTVAASHLSRTIHSPSAAAEDAGLKKRLKYAAMEPLYHFVPIAVETLGCWGIEAKELIREIGQRLNIKTGDSRSGSFLVQRMAIAIQRGNAASVMGTFAPGTVRGGLFD

SEQ ID NO: 17343 - protein, 1003 aa, Cosmia trapezina
MCCKIMLDLFLCKEVHYYFFLVVILLVSSFFLLYLLLMRVLYFLDAQMSALSTMLSCPHCPGSSRTFNSHGIKIHIGRMHKHVQQPVATPQTSSTVTDSQPVSQVPLVSHPCPLERLSALKMCTPVLRHIPKGSRNQAAGKLCDILDKCVSCNGVDEWGALLTFAFVGLRVPSRVAPGNMTTKVKANIESVGADRFVDESSCVADFSKPRGIRKAIESKVFEGDLRGAVRLLVSDDSFAQHDPGTLDALTVKHPSPSRPLNFPSAPDSSFPRVTASVEDVTLALRSFNSGSAAGMDGIRPGHLKELTSGSAGENGRRLLESLTKLVNFLMSGQLNPVVCPYLYGASLCALKKKDGGLRPIAIGSVFRRLSAKLACRSVRVAMSEYFQPHQLGFGTPRGCEAAIHATRAFVMDPKNSDCVVLKLDIRNAFNTLERDVLLSEVKDKIPSLYPFLYQVYYSPSNLFFNDSLISSQVGAQQGDPLGPLVFNLAIHKVISGLKSSLNLWYLDDGIIGGSLEEVCQDLEVLVPQLKELGLEVNPSKCEFFPCGFGARSHFSLFGCLLPGLKELSPLSFSLLGSPIFLDGVPEAISSRTQLLLNARERLKDLSAHVAILLLRMCFALPKITYLLRTAPTWLCPEEVCSFDCALKSTVESILNVSFNDTQWRQAALPIRHGGLGVRCVHDVGLPAFLASTHGVADLVTVILDSNGDGANIPFMLDAGSAWSVLNMGAASPDATHVQRAWDDVSSRLIQEQMMVGSSGADLARLRAVSQPESGAWLHALPSPHLGTLLDDDSLRVAVALRLGCKVCEPHRCTCGSTVEADGHHALSCRRCSGRFPRHHALNDIVRKAFVSADVPCVLEPTGLSRSDGKRPDGLTLVPWKNGKCLIWDATCVSTVAASHLGRTVLSPSAAAEDAAERKRVKYAPLATRYHFVPIAVETMGCWGTEARKLIGEIGHKLREKTGDSRSGSFLVQRLAIAIQRGNAASVMGTFAPGTVRGGFFENW

SEQ ID NO: 17344 - protein, 955 aa, Biston betularia
MPTIQICPHCPGSARTFSAHGLKVHIGRMHKDARHQVTAPWVCSADSMDAPVAAAAHHLPSTPPPAPCPLDRVSNMKACVPVLRHIPKNAQNQAAEKLCDIIDSCVSCNGVVEWSALLSFAYTALRVPSKELPGNMTAKVKANILSAGFCHSDDFASTRAYSGSRSNKKTIESKVFEGDLRGAVRLLMSEDSFAQRDPDTIAALKLKHPSSSRPLIFPSDPDSSCAAVLVTEEDVISALGSFYSGSAAGLDGIRPGHLKELTSVSAGENGRRLLGCLTSLANFLLSGQLNPLVCPYLYGASLLALKKKDGGIRPIAVGSVFRRLAAKLACRAVRDDMAEYLQPHQLGFGTRLGCEAAIHATRTFVMNPENADCILLKLDVRNAFNTLERDVLLGEVKEKIPSLYPFLHQAYKIPSNLFFDNNLILSQVGAQQGDPLGPLVFSLAIHKAILELKSALNVWYLDDGTIGGKPDDVLQDLEALIPRLKDLGLEVNPSKCEFFPCSVEARIHFTRFGTLLPGLRELSSSNFNLLGSLIFLDAVPEAITARKLLLFTAHERLKDLSAHVATVLLRMCFALPKITYLLRTAPTWLCPEEVSSFDDALKSVVESILNVSLDERQWGQAALPIRYGGLGVRCARDVGLPAFLASAHGVADLVTVLLHSNGDRESIPFVSSALSAWLARSSGATIPEAAHVQRAWDDAGAERFQKRLLEGATGVTLARLRAVSQPESGAWLHALPSPHLGTLLDDDSLRVAVALRLGCSVCEPHRCTCGSMVEADGHHALSCRRCTGRFPRHHALNDIVRRALVSANMPCVLEPPGLSRSDGKRPDGMTLVPWKNGKCLVWDATCVDTVAASHLSRTVHSPSAAAEDAANRKRLKYASIEPGYFFVPVAVETLGCWGTEAKKFISEIGHRLRDRTGDSRSGSFLVQRLAIAIQRGNAASVMGTFAPGTVRGGLF

SEQ ID NO: 17345 - protein, 824 aa, Cnaphalocrocis medinalis
MTAKVKANVRSSAPYPIDDIAVPRATPVSRPRKKMIEAKVFEGDLRGAVRLLMSDDSFARRDPVTLAALKSKHPDPSRPLSFPSDPDSSVPVASVTVEDVSSALDSFYSGSAAGLDGIRPGHLKELTSVTAGENGGRLLGSLTRLSNFLLSGQLNPFVCPYLYGASLIALEKKDGGVRPIAIGSVFRRLTAKLACRAVKEDMAQYLQPHQLGFGTRLGCEAAIHATRAFVLDPENESSIVLKVDIRNAFNTLERDVLLSEVRENIPSLYPFLAQVYKLPANLFYDEDRILSQVGAQQGDPLGPLVFSLAIHKVIVELKSSLNVWYLDDGTIGGRAEDVLQDLEALIPRLRAMGLEVNPSKWEFFPCSDEARAHFTEFSAVLSGLKELSRTELNLLGSPIFPDAVPEAITSRIEFLVKARARLQDLSAHVAMVLLRMCFALPKVTYLLRTTPTWLCSAEVASFDRALKSVVESILNVSLGEVQWTQAALPIRCGGLGVRCMGDVGLPAFLASAHGVASLVTVLLNSNGGEVSIPFVSGALSAWSALCPGAAIPQATHVQRAWDDVRVEQVREGLLGGAVGADLARLHAVSQRESGAWLHALPSPHLGTLLDGDSLRVAVALRLGCKVCEPHRCTCGSMVGTDGHHALSCRRCAGRFPRHHALNDVIRRALVSANVPCVLEPPGLSRTDGKRPDGLTLVPWKNGKCLIWDATCVSTVAASHLSRTVHSPSAAAEDASSKKRLKYANLEPLYQFVPVAVETMGCWGSEARDFVSEIGRRLCEVTGDSRSGSFLVQRLAIAIQRGNAASVMGTFASEAGGGELPVFNR

SEQ ID NO: 17346 - protein, 955 aa, Agriopis aurantiaria
MSDLPLQLACPHCPGSSRTFSAHGLKVHIGRKHKDVRHSVATSQVLPANTGTPSANQALPSPASCRYPLDRLAGLRGSTPVLRHIPKGARNQAAERLCDIISACVDCNGVEDWGALLFFAYDALRVPAKDLPGNMTAKVKANIVAAGSNHHDEFGTTRANLGPRSTKKVIESKVFEGDLRGAVRLLMSDDTYAQQDPDTLAALRIKHPGPSRPLNFPADPDVSITTVSFTVEDVVSARGSFYSGSAAGLDGLRPGHLKELTSVSAGENGQRLLGGLTRLVNFLLSGQLNPLVCPYLYGASLCALAKKGGGVRPIAIGSVFRRLTAKLACRAVKNEMAGYLQPHQLGFGTHLGCEAAIHATRTFVMNAENTGCIVLKLDIRNAFNTLERDVLLGEVKEKVASLYPFLHQIYHSPSKLFFNNNLIPSQVGAQQGDPLGPLVFSLAIHKIILELRSPLNIWYLDDGTIGGKPEDVFQDLETLIPRLKDLGLEVNPTKCEFFPCSSEARTHFTRFSAILPGLRELSSCDFFLLGSPIFLDAIPEAITSRTQLLLTTQERLKDLSAHVAIVLLRMCFALPKITYLLRTTPTWNCPEQVSSFDEALKSVVESVLNVSFEDSQWSQAALPIRYGGLGVRCARDVGLPAFLASAHGVADLVATILHSNGDEDSIPYVSDALSAWAALNSGATSPEAVKVQRAWDDVGAKRIQGLLLARATGADMARLLAVSQPESGAWLHALPSPHLGTLLDDDSLRVAVALRLGCKVCEPHKCTCGSMVEADGYHALGCRRCAGRFPRHHALNEIVRKAFVSANVPCVLEPPGLCRSDGKRPDGLTLVPWKNGKCLIWDATCVSTVAASHLSRTVHSPSAAAEYAADKKRKKYAALEPRYNFVPVAVETMGCWGTEAKKLISEIGHRLEVKCGDSRSGSFLVQRLAIAIQRGNAASVLGTFAPGTVRGGLFE

SEQ ID NO: 17347 - protein, 957 aa, Spilosoma lubricipeda
MSLAPLQFSCPHCPGSPRTFSEHGLRVHVGRMHREVRRACASSRVSPAHTFPSCPSEQVAQTLLPDRTSLDGLARLKGSVPVLRHVPRGARNQAAGGLCNVIDLCLASNGIDEWSELLCFAYSALRVPAKELPGNMTSKVKANINSFRSWRGEGLSDARVSFGSRSTGKIIEARVFEGDLRGAARLLLSDDSFARRDRDTLDALKAMHPEPSRPLGFPSDLDLTFPALSVTAADVVTALGSFHGGSAGGLDGIRPTHLRELTSVSAGDNGRRLLECITRLVNFLLSGQLNPLVCPYLYGASLFALVKKDGGIRPIAVGSIFRRLVAKLACRAVRETMSGYLQPHQLGFGTQSGCEAAIHATRAFVMSPECEGSILLKLDIRNAFNTLERDVLLREVKERIPSLFPYLHQVYSRPSNLFFDENLIVSQVGAQQGDPLGPLVFSLAIHRVITEIKSPFNVWYLDDGTIGGKPEDVLQDLEILIPRFKDLGLEVNSSKCEFFQCGVGARSHLSRLATVLPGLRELSSHDFTLLGSPIFHCAVPGAIASRTQLLLTTHERLKDLSAHVAIVLLRTCFALPKISYLLRTTPTWLCPEEVASFDKALKSVVESVLNVSMDERQWGQASLPIRCGGLGVRGMRDVGLSAFLASAHGVANLVTVLLGIQGGEVSIPFLMDATSAWLALSPGEACPGAAHMQRAWDDVGVRRIYGALLDGSSGVDMARLRAVSRAEAGAWLHALPSPHLGTLLDDGSLRIAVALRLGCKVCERHVCTCGSMVEADGHHALSCRRCSGRFPRHHALNDVVRRALISANVPCLLEPPGLSRSDGKRPDGLTLVPWKNGRCLIWDATCVSTFAASHLGRTVRFPSAAAEDACYRKKQKYAALEQLYYFVPVAVETMGGWAADTLRFVGELGRRLAEIKGDSRSGSFLVQRLAIAIQRGNAASLMGTFPPEAIRYGLNDL

SEQ ID NO: 17348 - protein, 958 aa, Marasmia exigua
MSTNRVTPTHLACPYCPESSHARAFSPHGLKVHVGRMHRSGRSPGRASQASPVALVVSARRAPPSPAPADCPLSRLASYKKSIPVLRHVPKGARNQAAGKLCDIIDSCMSGNGIDEWSVLLSFAYTALRVPAKESPGNMTAKVKANIGSSVPGPVDDIAASGVTPMSRSKKKVIESKVFEGDLRGAVRLLMSDDCFAQRDPDTLAALKLKHPSPSRPLIFSAEPDLSFPVASVVREDVVSALGSFYSGSAAGLDGIRPGHLKELTSVSAGENGVRLLSCLTRLSNFLLSGQLNPLVCPYLYGASLMALQKKDGGVRPIAIGSVFRRLTAKLACCAVREDMARYLQPHQLGFGTRLGCEAAIHATRAFVMNPENKGSILLKLDIRNAFNTLERDVLLNEVRENIPSLYPFLHQVYKHPTNLFYDNELILSQVGAQQGDPLGPLLFSLAIHRPILELKSSLNVWYLDDGTIAGRPEDVLQDLETLIPRLKVLGLEVNPSKCEFFPCSDEARTHFTQISAFLPGLRELGCSELYLLGSPIFPIAVPEAISSRTDFLINAQERLKDLSAHVAIVLLRMCFAVPKIAYLLRTSPTWLCPREVISFDRALKSVVESILNVSLGEAQWSQATLPIRYGGLGVRCAGDVGLPAFLASAHGVASLVTIILGSNGGEVSIPFVSGAISAWSALCPGAEIPDATHVQWAWDDVRMKRIQEGLLEGAAGADMARLRAVSQTEAGAWLHALPSPHLGTLLDNCSLRVAVALRLGCKVCEPHKCTCGSMVGVDGHHALSCRRCAGRFPRHHALNDIICRALRSANVPCVLEPPGLSRTDGKRPDGLTLVPWKNGKCLVWDATCVSTVAASHLSRTVHSPSAAAEDASLKKRRKYANLEPLYEFVPVAVETMGCWGLEARVFVREIGRRINNVTGDSRSSSFLVQRLAIAIQRGNAASVMGSFGLGAYGEELI

SEQ ID NO: 17349 - protein, 952 aa, Eilema depressum
MSDLPQRACPHCPGSSRTFSSRGLKIHITRMHNTPPCNGPANVAPPITCSQQTHTGTVPAHWCQLEQLSTLKGGIPVMRHIPKGARNQAAGKLSNIIDRCVDGNSVGDWSALLSFAYSALRVPSKSQPGNMTSKVKANIDSSDSYRFEDECGGMLRGSYSARKRIESKVFEGDLRGAVRLLMSDDKFAQGGPETLAALKLKHAGPSRPLVPVPSPDASFTPITATPDDVAKALNSFYTGSAAGLDGIRPGHLKELTSRAAGENGQRLMESLTKLSNLLLSGQLNPEVCPFMYGASLCALNKKDGGIRPIAVGSAFRRLTARLACRAVKEEMSEYLQPHQLGFGTPRGCEAAIHATRAYVMEPQNTNCVVLKIDVRNAFNTLERDVLLSAVMEKTPSLYPFLHQVYHLPSNLFFNNDLILSQVGAQQGDPLGPLVFSLAIHEIISELKSPLNLWYLDDGTIGGEPDGVARDLEVLIPRLKALGLEVNPTKCEFFPCSTGARTHFPLFNTLFPGLSELTPNNFSLLGSPIFLEAVPEAISSRQLLLLSAREHLKNLSAHVAVLLLRMCFAVPKIMYLLRTTPSWLCPEAASSFDGTLRETAESILNVSLGERHWRQASLPIRYGGLGLRRVTDVGLPAFLASAHGVADLVANILSSNGDRVSIPYVCEALSAWSVLNPNEPRPAAPHVQRAWDSVGAGGVMRDLLGGAAGVDLARLRAVSQPESGAWLHALPSPHLGTLLDDDSLRVAVALRLGCKVCESHKCICGSTVEENGHHALSCSRCTGRFPRHHALNDIVRRALISANVPCTLEPPGLSRSDGKRPDGLTLVPWKNGRCLIWDATCVSTVAATHLSRTVSAPAAAAEDAASRKKIKYAAMEPQYYFVPIAVETLGSWGSEARSLIAEIGRRIHEQGGDSRSGSFLAQRMAIAIQRGNAASIMGTFPPGTIRGGLFDVT

SEQ ID NO: 17350 - protein, 960 aa, Mesoligia furuncula
MYKDAQMSALSAMLSCPHCPGSSRTFSSHGLKVHIGRMHRNARQPVATPRTSSTVTDSQPVSQVPPVLRPCPLERLSALKVSTPILRHVPKGARNQAAGKLCDIIDKCVSCNGVEDWGALLTFAFGGLRVPSRDAPGNMTAKVKANVESVGADQFVDESGCVAGVAKSRGIRKSIESKVFEGDLRGAVRLLVSDDSFAQHDPDTLSALTVKHPNPSRPLNFPLAPDLSCPRVTASVEDVALALSSFYSGSAAGLDGIRPGHLKELTSGSAGENGRRLLECLTKLANFLMSGQLNPVVCPYLYGASLCALKKKDGGLRPIAIGSVFRRLTAKVACRSVRVAMSEYLQPHQLGFGTPRGCEAAIHATRTFVMDPKNSDCVVLKLDIRNAFNTLERDVLLSEVKDKIPSLYPFLYQVYYSPSNLFYHDSLISSQVGAQQGDPLGPLVFSLAIHKVISGLKSSLNLWYLDDGIIGGSPEEVCQDLEVLVPQLKELGLEVNPSKCEFFPCGVGARTHFSRFGSHLPGLKELSSHNFSLLGSPIFLDGVPEAISSRKQLLLNARERLKDLSAHVAILLLRMCFALPKVTYLLRTAPTWLCPEEVCSFDCALKSTVESILNVSFNDAQWRQAALPIRYGGLGVRCVHDVGLPAFLASTHGVADLVTVILDSNGDGANIPFMLDAGSAWSVLNMGAASPDATHVQRAWDDVTSKLIQEQMLVGSSGADLARLRAVSQPESGAWLHALPSPHLGTLLDDDSLRVAVALRLGCKVCEPHRCTCGSMVEADGHHALSCRRCSGRFPRHHALNDIVRRAFVSADVPCVLEPPGLCRTDGKRPDGLTLVPWRNGKCLIWDATCVSTVAASHLCRTVHSPSAAAEDAAERKRVKYAPLVDRYLFVPIAVETMGAWGTEARKLISEIGHKLRDKTGDSRSGSFLVQRLAIAIQRGNAASVLGTFSPGTVRGGLFD

SEQ ID NO: 17351 - protein, 955 aa, Apodemia mormo; identical to SEQ ID NO: 17323

SEQ ID NO: 17352 - protein, 949 aa, Eilema sororculum
MSVSTTRLTCPHCLGSSRVFSSRGLKVHIGRMHKRVLVSQTVVDTAASAGLGRPASVLNQCSLDRLATFRRSIPVLRHIPKGARNQAAGKLCDIADACVTCNGVEEWSALLAFAYTALRVPARESSGNMTSKVKANILSSDQFDNIELSASSAGTGPRSLKKNIESKVFEGDLKGAVRLLMSDDSFAQRNPDTMVALELKHPSPSRPLNFPPDPGLEYTAGTVTVEDVISALGSFYAGSAAGLDGIRPGHLKELTSVSAGENGKRLLGCLTKLVNFLLSGRVNPLVCPYLYGASLFALAKKDGGLRPIAVGSVFRRLTAKLACRAVKEEMAKYLQPHQLGFGTRLGCEAAVHATRTFVMDPRNEGSILLKLDIRNAFNTLERDVLLSEAKEKIPSLYPFLHQAYKLPSNLFFENNLILSKVGAQQGDPLGPLVFSLAIHKAIRGLKSAFNVWYLDDGTIGGKPEDVLQDLEALIPSFKDLGLEVNPLKCEFFPCGTEARSHFAQLNSFLPGLKELSSSDFNLLGSPIFLSAVPEAITAQKQLLLTAQERLKGLSAHVAIILLRMCFALPKITYLLRTTPTWLCPEEVSSFDDALKSVVESVLNVSLDGTQWIQAAQPIRCGGLGVRCTRDVGLPAFLASAHGVANLVTNILNCSGDGGIIPFVSDAVLAWSALNAGASIPEPMHLQRAWDDVGVKRLQVQLLEGATGADKARLRAVSQPESGAWLQALPSPHLGTLLDDDSLRVAVAFRLGCKVCEPHICTCGSMVEADGHHALSCRRCTGRFPRHHALNDIIRRALVSANVPCVLEPPGLSRSDGKRPDGLTLVPWKNGKCLLWDATCVSTVAASHLSRTIHSPSAAAEDASSRKRLKYASLEPLYHFVPVAVETLGSWGKEAKGFIKEIGQRLTEATGDTRSGSFLVQRLAIAIQRGNAASLMGTFAPGAIRGGLFD

SEQ ID NO: 17353 - protein, 957 aa, Eilema depressum
MSTRPTELTCPHCPGSSRVFSVHGLRVHVGRMHKRVLHPGGAVSLVSPHDAGIAAPVGQEAPAPPSAPGSLDKLASVRGVIPVLRHIPKGARNQAAGRLSDIIESCVAHNGVDEWSGLLSFAYSALRVPARESPGNMTSKVKANVLSSCHFDDIEVVASTSVSATRTIKKHIESKVFEGDLRGAVRLLMSDDSFAQRDPDTLAALELKHPSPSRPLSFPPDPGLPCTVATVTIEDVSSALASFYAGSAAGLDGIRPGHLKELTSVSAGENGKRLLGCLTELVNFLLSGQLNPLVCPYLYGASLFALAKKDGGVRPIAVGSVFRRLTAKLACRGVKEDMAGYLQPHQLGFGTRLGCEAAIHATRAFVMDPKNEGSVVLKLDICNAFNTLERDVLLREVKEKIPSLYPFLHQVYRLPSNLFLDNNLILSKVGAQQGDPLGPLVFSLAIHKAIRDLRSSLNIWYLDDGTIGGKPEEVLQDLEVLVPSLRDLGLEVNPSKCEFFPCGTGARTHFSHFHSVLPGLKELSLSNFYLLGSPIFLSAVPEAINARKQLLLAAHERLKGLSAHVALVLLRLCFAVPKITYLLRTTPTWLCPDEVVCFDDSLKSVVESVLNVSLDDTQWSQVALPIRCGGLGIRRARDVGLPAFLASAHGVANLVTRLLTANGDGAVIPFALDAVSAWSVLNAGASIPEDVHLQRSWDDEGVRRLQNLLLECAAGADKARLRAVSQPESGAWSQALPSPHLGTLLDDDSLRVAVAFRLGCKVCEPHVCTCGSMMEADGHHALSCRRCTGRFPRHHALNDIVRRALVSANVPCVLEPPGLSRSDGKRPDGLTLVPWQNGKCLIWDATCVNTVAASHLSRTVHSPSAAAEDASYKKTLKYADLKPLYYFVPIAVETLGSWSKEAKILVRDIGSRLIETTGDSRSGAFLVQRLAIAIQRGNAASVMGTFAPGAVRGGLFD

SEQ ID NO: 17354 - protein, 954 aa, Erannis defoliaria
MSDLSVQLTCPYCPGSTRAFSAHGLKVHIGRKHKDVRRPVAASQVLPADTVTASGQAQPSPASHQCPLERLVNLRGRVPVLRHVPKGARNQAAGKLCDIIDTCVDCNGVEDWSTLLSFAYVALRVPAKDLPGNVTTKVKANIMSSGSNHVDEVGSGLANHRLRSTKKVIESKVFEGDLRGAVRLLMSDDTYAEQGPDTLAALRLKHPAPSRSLDFPSDPDISYTSLTVTVEDVVSGLGSFYSGSAAGLDGLRPGHLKDLASASAGENGRRLLGCLTRLVNFLLSGQLNPLVCPYLYGASLCALDKKDGGMRPIAVGSVFRRLTAKLACRAVKDDMSGYLQPHQLGFGTRLGCEAAIHATRMFVMDPENVDGILLKLDIRNAFNSLERDVLLSEVKENIPALYPFLHQVYRYPSNLFFNNTLILSQVGAQQGDPLGPLVFGLAIHKVLLEVKSSLNVWYLDDGTIGGKPDDVLQDLEALIPRLKVLGLEVNPSKCELFPCSNPSRLHFTRFSTLLPGLKEISTSDFNLLGSPIFLVAVPEAVTSRKQLLLTAHERLKDLSAHVAIILLRMCFALPKINYLLRTTPTWLCPEEISSFDIALKTVVESVLNVSLEERQWDQASLPIRYGGLGVRRARDVGLPAFLASAHGVANLVTVLLCSDGVEASIPFVSGARSAWLALNSGAIIPEKTHVQRVWDEVGAKRLQEQLLEDATGVNMARLRAVSQPESGAWLHALPTPHLGTLLDDDSLRVAVALRLGCKVCEPHKCTCGSLVEADGHHALSCRRCTGRFPRHHALNDIVRRALVSANIPCVLEPPGLCRSDGKRPDGLTLVPWKNGKCLVWDATCVSTVADSHLSRTIHSPSAAAEDAGLKKRLKYAAMEPLYHFVPIAVETLGCWGIEAKELIREIGQRLNIKTGDSRSGSFLVQRMAIAIQRGNAASVMGTFAPGTVRGGLFD

SEQ ID NO: 17355 - protein, 966 aa, Cosmia trapezina
MRVLYFLDAQMSALSTMLSCPHCPGSSRTFSSHGIKIHIGRMHKHMQQPVATPQTSSTVTDSQPMSQVPLVSRPCPLERLSALKMCTPVLRHIPKGSRNQAAGKLCDILDKCVSCNGVDEWGALLTFAFVGLRVPSRVAPGNMTTKVKANIESVGADRFVDESSFVADFSKPRGIRKAIESKVFEGDLRGAVRLLVSDDSFAQHNPGTLDALTVKHPSPSRPLNFPSAPDSSFPRVTASVEDVTLALRSFNSGSAAGMDGIRPGHLKELTSGSAGENGRRLLESLTKLVNFLMSGQLNPVVCPYLYGASLCALKKKDGGLRPIAIGSVFRRLSAKLACRSVRVDMAEYFQPHQLGFGTPRGCEAAIHATRAFVMDPKNSDCVVLKLDIRNAFNTLERDVLLSEVKDKIPSLYPFLYQVYYSPSNLFFNDSLISSQVGAQQGDPLGPLVFNLAIHKVISGLKSSLNLWYLDDGIIGGSLEEVCQDLEVLVPQLKELGLEVNPSKCEFFPCGFGARSHFSLFGCLLPGLKELSPLSFSLLGSPIFLDGVPEAISSRTQLLLNARERLKDLSAHVAILLLRMCFALPKITYLLRTAPTWLCPEEVCSFDCALKSTVESILNVSFNDTQWKQAALPIRHGGLGVRCVHDVGLPAFLASTHGVADLVTVILDSNGDGANIPFMLDAGSAWSVLNMGAASPDATHVQRAWDDVSSRLIQEQMMVGSSGADLARLRAVSQPESGAWLHALPSPHLGTLLDDDSLRVAVALRLGCKVCEPHRCTCGSTVEADGHHALSCRRCSGRFPRHHALNDIVRRAFVSADVPCVLEPPGLSRSDGKRPDGLTLVPWKNGKCLIWDATCVSTVAASHLGRTVLSSSAAAEDAAERKRVKYAPLATRYHFVPIAVETMGCWGTEAKKLIGEIGHKLREKTGDSRSGSFLVQRLAIAIQRGNAASVMGTFAPGTVRGGFFENW

SEQ ID NO: 17356 - protein, 955 aa, Mesoligia furuncula
MSLPSLSTCPHCPGSSRVFSAHGLKVHIGRMHKHAIRSGAVSQALLVDAVNTSSSGQVPPAHSPAQGPLDRLAGFKASVPVLRHIPKGARNQAAGKLCDIIESCIVSNGVDEWSALLSFGYTALRVPAKELPGNVTSKVKANIMSPVQCHDSVLDAGRRSGSRSMKNSIEAKVFEGDLRGAVRLLMSDDSFVQGDADTLASLKLKHPDPSRPLSFPADPDPLLTALSVTEEDVLTALGSFYAGSAAGLDGIRPGHLKELTSMSAGENGKRLVGCLTRLANFLLCGRLNPRICPYLYRASLFALAKKGGGVRPIAIGSVFRRLTAKLACRAVKGDMAKYLQPNQLGFGTRLGCEAAIHATRTFVMNPENEDSILLKLDIRNAFNTLERDVLLGEVKENIPSLYPFLHQVYRMPSNLFFDNSLILSKVGAQQGDPLGPLVFSLAIHIAIVELNSGLNVWYLDDGTIGGRPEDVFQDLEALVPRLRDLGLEVNPAKCEFFPCSTGARTHFSRFESFLPGLREISCSDFNLLGSPIFLSAVPEAIFSRKLLLLSAHERLKDLSAHVAIILLRMCYALPKMTYLLRTTPTWLCPEEVSSFDNALKSVVESILNVSLDGPQWKQAALPIRCGGLGVRCARDVGLPAFLASAHGVANLVTLLLNTNGDGGSMPFVSDAVSAWLTLNTGATIPEATHVQRAWDDRGVGLLQEQLLEGASGVVKARLLAVSQPESGAWLQAIPSPHLGTLLDDDSLRVAVALRLGCKVCEPHICTCGTMVEADGHHALSCRRCTGRFPRHHALNDIVRRALISANVPCVLEPTGLSRCDGKRPDGLTLVPWKNGKCLIWDATCVSTVAASHLSRTTHTASAAAEDACSVKRIKYDSLEQPYYFVPVAVETLDSWSREAKVFVAELGRKLREATGDNRSGSFLVQRLAIAIQRGNAASVMGTFAPGTIRGGLFCD

SEQ ID NO: 17357 - protein, 925 aa, Mesoligia furuncula
MHKHAIRSGAVSQALLVDAVNTSSSGQVPPAHSPAQGPLDRLAGFKASVPVLRHIPKGARNQAAGKLCDIIESCIVSNGVDEWSALLSFGYTALRVPAKELPGNVTSKVKANIMSPVQCHDSVLDAGRRSGSRSMKNSIEAKVFEGDLRGAVRLLMSDDSFVQGDADTLASLKLKHPDPSRPLSFPPDPDPLLTALSVTEEDVLSALGSFYAGSAAGLDGIRPGHLKELTSMSAGENGKRLVGCLTRLANFLLCGRLNPRICPYLYGASLFALAKKGGGVRPIAIGSVFRRLTAKLACRAVKEDMAKYLQPNQLGFGTRLGCEAAIHATRTFVMNPENEDSILLKLDIRNAFNTLERDVLLSEVKENIPPLYPFLHQVYRMPSNLFFDNSLILSKVGAQQGDPLGPLVFSLAIHKAIVELNSGLNVWYLDDGTIGGRPEDVFQDLKALVPRLRDLGLEVNPAKCEFFPCSTGARTHFSRFESFLPGLREISCSDFNLLGSPIFLSAVPEAIFSRKQLLLSAHERLKDLSAHVAIILLRMCYALPKMTYLLRTTPTWLCPEEVSSFDNALKSVVESILNVSLEGPQWKQAALPIRCGGLGVRCARDVGLPAFLASAHGVANLVTLLLNTNGDGGSMPFVSDAVSAWLTLNTGATIPEATHVQRAWDDIGVGLLQEQLLEGSSGVVKARLLAVSQPESGAWLQAIPSPHLGTLLDDDSLRVAVALRLGCKVCEPHICTCGTMVEADGHHALSCRRCTGRFPRHHALNDIVRRALISANVPCVLEPTGLSRCDGKRPDGLTLVPWKNGMCLIWDATCVSTVAASHLSRTTHTASAAAEDACSSKRLKYASLEQPYYFVPVAVETLGSWSREAKVFVAELGRKLREATGDNRSGSFLVQRLAIAIQRGNAASVMGTFAPGTIRGGLFCD

SEQ ID NO: 17358 - protein, 937 aa, Spilarctia lutea
MCTKFFLFIYTHRGVRQACAGSQVSPALTFASCPSGQTAQTFLPDRASLERLAYLKKCVPVLRHVPRGARNQAAGRLCDVIDLCLANNGIDEWSELLCFAYSALRVPAKELPGNMTSKVKANINSSRHWRGEGLADPGSSFGSRSVGKIIEARVFEGDLRGAARLLLSDDTFARRDRDTLDALKEKHPEPSRPLSFPSVLDLTIPALSVTAEDVVTALTSFYGGSAGGLDGIRPAHLRELTSVAAGDNGRPLLECITRLVNFLLSGRLNPLICPYLYGASLCALVKRDGGIRPIAVGSIFRRLVAKLACRAVRENMSCYLQPHQLGFGTRLGCEAAIHATRAFVMNQENEGSILLKLDIRNAFNTLERDVLLREVKEHIPSLFPFLHQVYSHPSNLFFDDNLIISQVGAQQGDPLGPLVFSLAIHKVVTEIKSPLNVWYLDDGTIGGKPEDVLQDLEILIPRFRDLGLEVNSSKCEFFPCGGGGRTQLSRLAAVLPGLRELSSLDFTLLGSPIFLCAVPGAIDSRTRLLLTTHERLGDLSAHVAIVLLRTCFALPKINYLLRTTPTWLCPEEVSSFDRALKSVVESVLNVSMDERQWSQAGLPIRCGGLGVRSMRGVDLPAFLASAHGVANLVTVLLGSHGGGVSIPFLVDATSAWLDLNSGEACPGAAHMQRSWDEVGVKRIQGDLLEGSSGADMARLRAVSRSEAGAWLHALPSPYLGTLLDDNSLRIAVALRLGCKACERHVCTCGSMVEADGHHALSCRRCSGRFSRHHALNDVVRRALISAGIPCLLEPPGLSRSDGKRPDGLTLVPWRNGRCLIWDATCVSTVAASHLSRTICSPSAAAEDACYKKRQKYAALEQQYYFVPVAVETMGSWAADTLRFVGELGRRLALLSGDSRSGSFLVQRLAIAIQRGNAASLMGTFPPEAIRDGLSGDL

SEQ ID NO: 17359 - protein, 960 aa, Apamea monoglypha
MYKDAQMSALSAMLSCPHCPGSSRAFSSHGLKVHIGRMHRNARQPVVAPRTSSTVTDSQLVSQVPPVSRPCPLERLSALKVSTPVLRHVPKGARNQAAGKLCDIIDKCISCNGVGDWGALLTFAFGGLRVPSRDAPGNMTAKVRANVESVGSDQFVDKSDCVAGVTKSRGIRKAIESKVFEGDLRGAVRLLVSDDSFAQHDPDTLSALTVKHPSPSRPLNFPSAPDLSFPRMTASVEDVALALGSFYSGSAAGLDGIRPAHLKELTSGSAGENGRRLLECLTKLANFLMSGQLNPVVCPYLYGASLCALKKKDGGLRPIAIGSVFRRLTAKLACRSVRVAMSEYLQPHQLGFGTRRGCEAAIHATRAFVMNPENSDCLVLKLDIRNAFNTLERDVLLSEVKDKIPSLYPFLYQVYYYPSNLFFSDSLISSQVGAQQGDPLGPLVFSLAIHKVISGLKSSLNLWYLDDGIIGGSPEEVCQDLELLVPQLKELGLEVNPSKCEFFPCGVGARTHFSRFGSHLPGLKELSPLSFSLLGSPIFLDGVPEAISSRKQLLLSARERLKDLSAHVAILLLRMCFALPKVTYLLRTAPTWLCPEEVCSFDCALKSTVESILNVSFNDAQWRQAALPIRYGGLGVRCVHDVGLPAFLASTHGVADLVTVILDSNGDGANIPFMLDAGSAWSVLSMGAARPDATHIQRAWDDVASRLIQEQMLVGSSGADLARLRAVSQPESGAWLHALPSPHLGTLLDDDSLRVAVALRLGCKVCEPHRCTCGSMVEADGHHALSCRRCSGRFPRHHALNDIVRRAFVSADVPCLLEPPGLCRTDGKRPDGLTLVPWRDGKCLIWDATCVSTVAASHLGRTVHSPSAAAEDAAERKRVKYAPLVDRYHFVPIAVETMGAWGAEARNLISEIGHKLRDKTGDSRSGSFLVQRLAIAIQRGNAASVLGTFAPGTVRGGLFD

SEQ ID NO: 17360 - protein, 948 aa, Spilosoma lubricipeda
MSLAPIQFSCPHCPGSPRTFSEHGLRVHVGRMHREVRRACASSRVYPAHTFPSCPSEQVAQTLLPDRTSLDGLARLKGSVPVLRHVPRGARNQAAGGLCNVIDLCLASNGIDEWSELLCFAYSALRVPAKELPGNMTSKVKANINSFRSWRGEGLSDARVSFGSRSTGKIIEARVFEGDLRGAARLLLSDDSFARRDRDTLDALKAMHPEPSRPLDFPSDLDLTFPALSVTAADVVTALGSFHGGSAGGLDGIRPTHLRELTSVSAGDNGRRLLECITRLNPLVCPYLYGASLFALVKKDGGIRPIAVGSIFRRLVAKLACRAVRETMSGYLQPHQLGFGTQSGCEAAIHATRAFVMSPECEGSILLKLDIRNAFNTLERDVLLREVKERIPSLFPYLHQVYSRPSNLFFDENLIVSQVGAQQGDPLGPLVFSLAIHKVITEIKSPFNVWYLDDGTIGGKPEDVLQDLEILIPRFKDLGLEVNSSKCEFFQCGVGARSHLSRLATVLPGLRELSSRDFTLLGSPIFHCAVPGAIASRTQLLLTTHERLKDLSAHVAIVLLRTCFALPKISYLLRTTPTWLCPEEVASFDKALKSVVESVLNVSMDERQWGQASLPIRCGGLGVRGMRDVGLSAFLASAHGVANLVTVLLGIHGGEVSIPFLVDATSAWLALSPGEACPGAAHMQRAWDDVGVRRIYGALLEGSSGVDMARLRAVSRAEAGAWLHALPSPHLGTLLDDGSLRIAVALRLGCKVCERHVCTCGSMVEADGHHALSCRRCSGRFPRHHALNDVVRRALISANIPCLLEPPGLSRSDGKRPDGLTLVPWKNGRCLIWDATCVSTFAASHLGRTVRFPSAAAEDASYRKKQKYAALEQLYYFVPVAVETMGGWAADTLRFVGELGRRLAEIKGDSRSGSFLVQRLAIAIQRGNAASLMGTFPPEAIRNGLNDL

SEQ ID NO: 17361 - protein, 908 aa, Biston betularia
MDAPVAAAAHHLPSTPPPAPCPLDRVSNMKACVPVLRHIPKNARNQAAEKLCDIIDSCVSCNGVDEWSALLSFAYTALRVPSKELPGNMTAKVKANILSAGFCHSDDFASTRAYSGSRSNKKTIESKVFEGDLRGAVRLLMSEDSFAQRDPDTIAALKLKHPSSSRPLIFPSDPDSSCAAVLVTEEDVISALGSFYSGSAAGLDGIRPGHLKELTSVSAGENGRRLLGCLTSLANFLLSGQLNPLVCPYLYGASLLALKKKDGGIRPIAVGSVFRRLAAKLACRAVRDDMAEYLQPHQLGFGTRLGCEAAIHATRTFVMNPENADCILLKLDVRNAFNTLERDVLLGEVKEKIPSLYPFLHQAYKIPSNLFFDNNLILSQVGAQQGDPLGPLVFSLAIHKAILELKSALNVWYLDDGTIGGKPDDVLQDLEALIPRLKDLGLEVNPSKCEFFPCSVEARIHFTRFGTLLPGLRELSSSNFNLLGSPIFLDAVPEAITARKLLLFTAHERLKDLSAHVATVLLRMCFALPKITYLLRTAPTWLCPEEVSSFDDALKSVVESILNVSLDERQWGQAALPIRYGGLGVRCARDVGLPAFLASAHGVADLVTVLLHSNGDRESIPFVSSALSAWLARSSGATIPEAAHVQRAWDNAGAERFQKRLLEGATGVSLARLRAVSQPESGAWLHALPSPHLGTLLDDDSLRVAVALRLGCSVCEPHRCTCGSMVEADGHHALSCRRCTGRFPRHHALNDIVRRALVSANMPCVLEPPGLSRSDGKRPDGMTLVPWKNGKCLVWDATCVDTVAASHLSRTVHSPSAAAEVAANRKRLKYASIEPGYFFVPVAVETLGCWGTEAKKFISEIGHRLRDRTGDSRSGSFLVQRLAIAIQRGNAASVMGTFAPGTVRGGLF

SEQ ID NO: 17362 - protein, 956 aa, Hecatera dysodea
MSLPSCLTCPHCPGSSRVFSAHGLKVHIGRMHKHALRSGAVSQVPPVDTVNASSSGEVPPVLAPAQSPLDKLAASKASIPVLRHIPKGARNQAAGKLCDIVDACVASNGVDEWSALLSFAYTSLRVPAKELPGNVTSKVKANIMSPVHCLDDEVVASRRSGSRSIKKSIETKVFEGDMRGAVRLLMSDDSFARGDADTLASLKLKHPDPSRPLSFPPDPDPSFTALSVTVEDVVSALGSFYTGSAAGLDGIRPGHLKELISVTAGENGKRLVGGLTRLANFLLSGQLNPCVCPFLYGASLFALEKKDGGVRPIAVGSVFRRLTAKLACRAVKEDMARYLQPHQLGFGIRLGCEAAIHATRTFVMDPENEDSILLKLDIRNAFNSLERDVLLSEVKDKIPSLYPFLHQVYRLPSNLFSGNNLILSKVGAQQGDPLGPLVFSLAIHKAIVGLKSGLNVWYLDDGTIGGRPEDVFQDLEALVPRLGDLGLEVNPSKCEFFPCGTEARTHFSRCNSFLPGLRKLSCSDFNLLGSPIFLSAVPEAITSRTRLLLSAHERLKDLSAHVAIVLLRMCFALPKITYLLRTAPTWLCPEEVSSFDNALKSVVESVLNVSLDEPQWRQATLPIRCGGLGVRCARDVGLPAFLASAHGVANLVTVLLNINGDGGSMPFVSDAVSVWLTLNSGAAIPESENVQRAWDDIGVKLIQEHLLANAMRVDRARLRAVSQPESGAWLQAIPSPHLGTLLDNDFLRVAVALRLGCKVCEPHTCACGSMVEADGHHALSCRRCTGRFPRHHALNDIVRRALVSANVPCVLEPPGLNRSDGKRPDGLTLVPWKNGKCLIWDATCVSTVAASHLSRTMHTASAAAEEACSKKRLKYASLVQLYHFVPVAVETLGSWSTEAKCFVRDLGHRLGEATGDSRSGSFLVQRMAIAIQRGNAASVMGTFAPGTIRGGLFIDL

SEQ ID NO: 17363 - protein, 956 aa, Hecatera dysodea
MSLPSCLTCPHCPGSSRVFSAHGLKVHIGRMHKHALRSGAVSQVPPVDTVNASSSGEVPPVLAPAQSPLDKLAASKASIPVLRHIPKGARNQAAGKLCDIVDACVASNGVDEWSALLSFAYTSLRVPAKELPGNVTSKVKANIMSPVHCLDDEVVASRRSGSRSIKKSIETKVFEGDMRGAVRLLMSDDSFARGDADTLASLKLKHPDPSRPLSFPPDPDPSFTALSVTVEDVVSALGSFYTGSAAGLDGIRPGHLKELISVTAGENGKRLVGGLTRLANFLLRGQLNPCVCPFLYGASLFALEKKDGGVRPIAVGSVFRRLTAKLACRAVKEDMARYLQPHQLGFGIRLGCEAAIHATRTFVMDPENEDSILLKLDIRNAFNSLERDVLLSEVKDKIPSLYPFLHQVYRLPSNLFSGNNLILSKVGAQQGDPLGPLVFSLAIHKAIVGLKSGLNVWYLDDGTIGGRPEDVFQDLEALVPRLRDLGLEVNPSKCEFFPCGTEARTHFSRCNSFLPGLRKLSCSDFNLLGSPIFLSAVPEAITSRTRLLLSAHERLKDLSAHVAIVPLRMCFALPKITYLLRTAPTWLCPEEVSSFDNALKSVVESVLNVSLDEPQWRQATLPIRCGGLGVRCARDVGLPAFLASAYGVANLVTVLLNINGDGGSMPFVSDAVSVWLTLNSGAAIPESENVQRAWDDIGVKLIQEHLLANAMRVDRARLRAVSQPESGAWLQAIPSPHLGTLLDNDSLRVAVALRLGCKVCEPHTCTCGSMVEADGHHALSCRRCTGRFPRHHALNDIVRRALVSANVPCVLEPPGLNRSDGKRPDGLTLVPWKNGKCLIWDATCVSTVAASHLSRTMHTASAAAEEACSKKRLKYASLVQLYHFVPVAVETLGSWSTEAKCFVRDLGHRLGEATGDSRSGSFLVQRMAIAIQRGNAASVMGTFAPGTIRGGLFIDL

SEQ ID NO: 17364 - protein, 955 aa, Endotricha flammealis
MTTLSPVLTCPHCPGSTRIFSSHGLKVHIGHKHKDRVRATDAPRVEPFVVPNSGQTEDDERLDRCPLDTLASLRRSTPVLRHVPKGARNQAAGKLCGIINRCVESNAVDDWFALFSFAYGALRVPSRSLSGNVTTKVKANIESCGSCQPDGEPQARSGGVVPRSDIKIIESKVFEGDLKGAVRLLMSDDTFAGHGPDTLAALKLKHPSPLRPLGSPPPLPDSSSNAVSVTEEDVWAALTSFYGGSAAGLDGIRPGHLKELTSSAAGENGRLLLESLTTLSNFMLSGQVNVEVCPYLYGAALCALTKKDGGLRPIAIGSVFRRLTAKLACRAVKDEMSEYLRPHQLGFGTRLGCEAAIHATRAFAMDAGNANCVIIKLDIRNAFNTLERDVLLSEAREKIPSLYPFILQMYQSPSNLFYNGDSILSQVGAQQGDPLGPLIFSLAIHKILLELESPLNVWYLDDGTLGGDPEIICRDLRVLIPRFKELGLEVNCSKCEVFPCSAGARSRLAPIQSLLPGLNELIPATFSLLGSPIFLEAVPEAIIARREFLLSARDRLKKLQAHVALVLLRMCFAMPKIGFLLRTTPTWLCPNEVSDFDGILKSTVESMLNVFLDESHWSQAALPIRLGGLGVRCARDVGLPAFLASAHGVASLVTVILSSNGDGVSIPFVSEAVSAWSALNSGAQTPEALSVQRAWDDVGAKRIQELLLAGAREEDKARLRAVSRPESGAWLHALPSPHLGSLLDDDSLRVAVALRLGSKVCEPHKCICGSMVGSDGHHALSCRRSTGRFPRHHALNEIVRRAFVSANVPCLLEPPGLSRSDGKRPDGLTLVPWNRGRCLVWDATCVSTVATSHLSRTVRAAAAAAEEAAERKRRKYAAMESHYIFVPIAVETLGCWCAEARTLIREIGHRIAARNGDPRSASFLMQRMAIAIQRGNAASVLGSFAPETLRGGFDI

SEQ ID NO: 17365 - protein, 954 aa, Mesoligia furuncula
MSALSAMLSCPHCPGSSRTFSSHGLKVHIGRMHRNARQPIATPRTSSTVTDSQPASQVPPVSRPCPLERLSALKVSTPILRHIPKGARNQAAGKLCDIIDKCVSCNGVEDWGALLTFAFGGLRVPSRDAPGNMTAKVKANVESVGADQFVDESGCVAGVAKSRGIRKSIESKVFEGDLRGAVRLLVSDDSFAQHDPDTLSALTVKHPNPSRPLNFPLAPDLSCPRVTASVEDVALALSSFYSGSAAGLDGIRPGHLKELTSGSAGENRRRLLECLTKLANFLMSGQLNPVVCPYLYGASLCALKKKDGGLRPIAIGSVFRRLTAKVACRSVRVAMSEYLQPHQLGFGTPRGCEAAIHATRAFVMDPKNADCVVLKLDIRNAFNTIERDVLLSEVKDKIPSLYPFLYQVYYSPSNLFYHDSLISSQVGAQQGDPLGPLVFSLAIHKVISGLKSSLNLWYLDDGIIGGSPEEVCQDLEVLVPQLKELGLEVNPSKCEFFPCGVGARTHFSRFGSHLPGLKELSSHNFSLLGSPIFLDGVPEAISSRKQLLLNARERLKDLSAHVAILLLRMCFALPKVTYLLRTAPTWLCPEEVCSFDCALKSTVESILNVSFNDAQWRQAALPIRYGGLGVRCVHDVGLPAFLASTHGVADLVTVILDSNGDGANIPFMLDAGSAWSVLNVGAASPDATHVQRAWDDVTSKLIQEQMLVGSSGADLARLRAVSQPESGAWLHALPSPHLGTLLDDDSLRVAVALRLGCKVCEPHRCTCGSMVEADGHHALSCRRCSGRFPRHHALNDIVRRAFVSADVPCVLEPPGLCRTDGKRPDGLTLVPWRNGKCLIWDATCVSTVAASHLCRTVHSPSAAAEDAAERKRVKYAPLVDRYLFVPIAVETMGAWGTEARKLISEIGHKLRDKTGDSRSGSFLVQRLAIAIQRGNAASVLGTFSPGTVRGGLFD

SEQ ID NO: 17366 - protein, 997 aa, Cosmia trapezina
MLDIFLCKEDHYYYFLVVILLVSSFYLLYLLLMRVLYFLDAQMSALSTMLSCPHCPGSSRTFSSHGIKIHIGRMHKHTQQPVATPQTSSTVTDSQPMSQVPLVSRPCPLERLSALKMCTPVLRHIPKGSRNQAAGKLCDILDKCVSCNGVDEWGALLTFAFVGLRVPSRVAPGNMTTKVKANIESIGADRFVDESSCVADFSKPRGIRKAIESKVFEGDLRGAVRLLVSDDSFAQHDPGTLDALTVKHPSPSRPLNFPSAPDSSFPRVTASVEDVTLALRSFNSGSAAGMDGIRPGHLKELTSGSAGENGRRLLESLTKLVNFLMSGQLNPVVCPYLYGASLCALKKKDGGLRPIAIGSVFRRLSAKLACRSVRVAMAEYFQPHQLGFGTPRGCEAAIHATRAFVMDPKNSDCVVLKLDIRNAFNTLERDVLLSEVKDKIPSLYPFLYQVYYSPSNLFFNDSLISSQVGAQQGDPLGPLVFNLAIHKVISGLKSSLNLWYLDDGIIGGSLEEVCQDLEVLVPQLKELGLEVNPSKCEFFPCGFGARSHFSLFGCLLPGLKELSPLSFSLLGSPIFLDGVPEAISSRTQLLLNARERLKDLSAHVAILLLRMCFALPKITYLLRTAPTWLCPEEVCSFDCALKSTVESILNVSFNDTQWKQAALPIRHGGLGVRCVHDVGLPAFLASTHGVADLVTVILDSNGDGANIPFMLDAGSAWSVLNMGAASPDATHVQRAWDDVSSRLIQEQMMVGSSGADLARLRAVSQPESGAWLHALPSPHLGTLLDDDSLRVAVALRLGCKVCEPHRCTCGSTVEADGHHALSCRRCSGRFPRHHALNDIVRRAFVSADVPCVLEPPGLSRSDGKRPDGLTLVPWKNGKCLIWDATCVSTVAASHLGRTVLSSSAAAEDAAERKRVKYAPLATRYHFVPIAVETMGCWGTEAKKLIGEIGHKLREKTGDSRSGSFLVQRLAIAIQRGNAASVMGTFAPGTVRGGFFEN

SEQ ID NO: 17367 - protein, 949 aa, Eilema sororculum
MSVSTTQLTCPHCLGSSRVFSSHGLKVHIGRMHKRMLVSPTVVDTAAPAGLGRPASVLNQCSLDRLATFRRGIPVLRHIPKGARNQAAGKLCDIADACVTCNGVEEWSALLAFAYTALRVPARESSGNMTSKVKANILSSDHFDNIELSESSAGTGSRSIKKNIESKVFEGDLKGAVRLLMSDDSFAQRNPGTMVALELKHPSPSRPLNFPPDPGLEFTAETVTVEDVISALGSFYAGSAAGLDGIRPGHLKELTSVSAGENGKRLLGCLTKLVNFLLSGRVNPIVCPYLYGASLFALAKKDGGLRPIAVGSVFRRLTAKLACRAVKEEMAKYLQPHQLGFGTRLGCEAAVHATRTFVMDPKNEGSILLKLDIRNAFNTLERDVLLSEVKEKIPSLYPFLHQAYKLPSNLFFENNLILSKVGAQQGDPLGPLVFSLAIHKAIRGLKSAFNVWYLDDGTNGGKPEDILQDLEALIPSLKDLGLEVNPLKCEFFPCGTEAPSHYAQLNSFLPGLKELSSSDFNLLGSPIFLLAVPEAITTQKQLLLTAQERLKGLSAHVAIILLRMCFALPKITYLLRTTPTWLCPEEVSSFDDALKSVVESVLNVSLDGTQWSQATQPIRCGGLGVRCTRDVGLPAFLASAHGVANLVTNILNPSGDGGIIPFVSDAVLAWSALNAGASIPEPMHLQRAWDDVGVKRLQVQLLEGTTGADKARLQAVSQPESGAWLQALPSPHLGTLLDDDSLRVAVAFRLGCKVCEPHICTCGSMVEADGHHALSCRRCTGRFPRHHALNDIIRRALVSANVPCVLEPPGLSRSDGKRPDGLTLVPWKNGKCLLWDATCVSTVAASHLSRTVHSPSAAAEDASSRKRLKYASMEPLYHFVPVAVETLGSWGKEAKGFIKEIGQRLTEATGDSRSGSFLVQRLAIAIQRGNAASLMGTFAPGTIRGGLFD

SEQ ID NO: 17368 - protein, 955 aa, Eilema depressum
MSVNTTQLSCPHCPGTSRVFTARGLKVHIGRMHKRVLRPEMVSPVSPTDTGTIAGRSPLAQSVPNRSSLDRLACLRGNIPVLRHIPKGARNQAAGKLCDVIDSCIGSNGVDEWAALLSFAYTALRVPARESSGNMTSKVKANILSSDHFDDTEISASTAGTGSRSIKKNIESKVFEGDLRGAVRLLMSDDSFARRDPGTMAALELKHPGPSRPLNFPPDPGLPFTPAKVAIGDVISAVGSFYAGSAAGLDGIRPGHLKELTSVSAGENGRRLLGCLTGMVNFLLSGQLNPLVCPYLYGASLFALTKKDGGLRPIAVGSVFRRLTAKLACRAVKEEMADYLQPHQLGFGTRLGCEAAIHATRAFVMDPRNGESIVLKLDIRNAFNTLERDVLLSEVKEKIPSLYPFLHQVYRLPSNLFYENNLILSKVGAQQGDPLGPLVFSLAIHKAIRGLKSSLNVWYLDDGTIGGKPEDVLQDLEDLVPSLRDLGLGVNPSKCEFFSCGTESRTYFRQLSTILPGLKELSPSDFNLLGSPIFLSAVPDAITARKQLLLAAHERLKGLSAHVAIVLLRMCFALPKIAYLLRTTPTWLCPEEVSSFDEALKSVIESVLNVSLAGNQWNQATLPIRSGGLGIRCVRDVGLPAFLASAQGVDNLVTILLNPNGGGGSVPFVSDAVSAWSALNGGVSIPELRHLQRAWDEVGVRRLQAQLLEGATGADKARLRAVSQPESGAWLQALPSPHLGTLLDDDSLRVAVALRLGCKVCEPHICTCGSMVEADGHHALSCRRCNGRFPRHHALNDIIRRALVSANVPCVLEPPGLSRSDGKRPDGLTLVPWKNGKCLLWDATCVSTVAASHLSRTIHSPSAAADDAGLRKRLKYAELEPLYHFVPVAVETLGSWGKEAKSLVRAIGQRLIEATGDSRSGSFLVQRMAVAIQRGNAASVMGTFAPGAIRGGLFD

SEQ ID NO: 17369 - protein, 955 aa, Mythimna impura
MSLPSILTCPHCPGSSRVFSAHGLKVHIGRMHKHALRSGAVSQVPPIDTVNTSSSGQVRPAHSPTQSPLDRLASCKASIPVLRHIPKGARNQAAGKLCDILDSCVASNGVDEWSALLSFAYTSLRVPAKELPGNMTSKVKANIMSPVHYHEEVDANRRSGSRSIKKSIETKVFEGDLKGAVRLLMSDDTFARGDADTLASLKLKHPDPSRPLSFPPDPDPSFTALSVTVEDVISALGSFYTGSAAGFDGIRPGHLKELISVSAGENGRRLVVGLTRLANFLLSGQLNPCVCPFLYGASLFALEKKDGGIRPIAVGSVFRRLTAKLACRAVKEDMAHYLQPHQLGFGTRLGCEAAIHATRAFVMDPENEDSILLKLDIRNAFNTLERDVLLSEVKEKIPSLYPFLHQVYRLPSNLFSDNSLILSKVGAQQGDPLGPLVFSLAIHKAIIELKSGLNVWYLDDGTIGGKPEDVFQDLEALVPRLRDLGLEVNPSKCEFFPCSTEARTHFSRFNSFLPGLRELSCSDFNLLGSPIFLGAVPEAITSRTRLLLSAHERLKDLSAHVAIVLLRMCFALPKITYLLRTTPTWLCPEEVSSFDNALKLVVESVLNVSLDGPQWRQAALPIRYGGLGVRCARDVGLPAFLASAHGVANLVTVLLNTNGDGGSMPFVSDAVSAWLTLNSGATIPDSVHVQRAWDDRGVKLLQEQLLEGALGVDKARLRAVSQPESGAWLQAIPSPHLGTLLDDDSLRVAVALRLGCKVCETHTCTCGSMVEADGHHALNCRRCTGRFPRHHALNDIVRRALISANVPCVLEPPGLSRSDGKRPDGLTLVPWKNGKCLIWDATCVSTVAASHLSRTMHTASAAAEDACSKKRLKYAALDQLYHFVPVAVETLGSWSMEAKCFVGDLGRRLGEATGDSRSRSFLVQRMAIAIQRGNAASVMGTFAPGTIRGGLFIDD

SEQ ID NO: 17370 - protein, 955 aa, Eilema depressum
MSVNTTQLSCPHCPGTSRVFTARGLKVHIGRMHKRVLRPEMVSPVSPTDTGTIAGRSPLAQSVPNRSSLDRLACLRGNIPVLRHIPKGARNQAAGKLCDVIDSCIGSNGVDEWAALLSFAYTALRVPARESSGNMTSKVKANILSSDHFDDTEISASTAGTGSRSIKKNIESKVFEGDLRGAVRLLMSDDSFARRDPGTMAALELKHPGPSRPLNFPPDPGLPFTPAKVAIGDVISAVGSFYAGSAAGLDGIRPGHLKELTSVSAGENGRRLLGCLTGMVNFLLSGQLNPLVCPYLYGASLFALTKKDGGLRPIAVGSVFRRLTAKLACRAVKEEMADYLQPHQLGFGTRLGCEAAIHATRAFVLDPRNGESIVLKLDIRNAFNTLERDVLLSEVKEKIPSLYPFLHQVYRLPSNLFYENNLILSKVGAQQGDPLGPLVFSLAIHKAIRGLKSSLNVWYLDDGTIGGKPEDVLQDLEDLVPSLRDLGLGVNPSKCEFFSCGTESRTYFRQLSTILPGLKELSPSDFNLLGSPIFLSAVPDAITARKQLLLAAHERLKGLSAHVAIVLLRMCFALPKIAYLLRTTPTWLCPEEVSSFDEALKSVIESVHNVSLAGNQWNQATLPIRSGGLGIRCVRDVGLPAFLASAQGVGNLVTILLNPNGGGGSVPFVSDAVSAWSALNGGVSIPELRHLQRAWDEVGVRRLQAQLLEGATGADKARLRAVSQPESGAWLQALPSPHLGTLLDDDSLRVAVALRLGCKVCEPHICTCGSMVEADGHHALSCRRCNGRFPRHHALNDIIRRALVSANVPCVLEPPGLSRSDGKRPDGLTLVPWKNGKCLLWDATCVSTVAASHLSRTIHSPSAAADDAGLRKRLKYAELEPLYHFVPVAVETLGSWGKEAKSLVRAIGQRLIEATGDSRSGSFLVQRMAVAIQRGNAASVMGTFAPGAIRGGLFD

SEQ ID NO: 17371 - protein, 957 aa, Spilosoma lubricipeda
MSLAPLQFSCPHCPGSPRTFSEHGLRVHVGRMHREVRRACASSRVSPAHTFPSCPSEQVAQTLLPDRTSLDGLARLKGSVPVLRHVPRGARNQAAGGLCNVIDLCLASNGIDEWSELLCFAYSALRVPAKELPGNMTSKVKANINSFRSWRGEGLSDARVSFGSRSTGKIIEARVFEGDLRGAARLLLSDDSFARRDRDTLDALKAMHPEPSRPLGFPSDLDLTFPALSVTAADVVTALGSFHGGSAGGLDGIRPTHLRELTSVSAGDNGRRLLECITRLVNFLLSGQLNPLVCPYLYGASLFALVKKDGGIRPIAVGSIFRRLVAKLACRAVRETMSGCLQPHQLGFGTQSGCEAAIHATRAFVMSPECEGSILLKLDIRNAFNTLERDVLLREVKERIPSLFPYLHQVYSRPSNLFFDENLIVSQVGAQQGDPLGPLVFSLAIHRVITEIKSPFNVWYLDDGTIGGKPEDVLQDLEILIPRFKDLGLEVNSSKCEFFQCGVGARSHLSRLATVLPGLRELSSHDFTLLGSPIFHCAVPGAIASRTQLLLTTHERLKDLSAHVAIVLLRTCFALPKISYLLRTTPTWLCPEEVASFDKALKSVVESVLNVSMDERQWGQASLPIRCGGLGVRGMRDVGLSAFLASAHGVANLVTVLLGIQGGEVSIPFLMDATSAWLALSPGEACPGAAHMQRAWDDVGVRRIYGALLDGSSGVDMARLRAVSRAEAGAWLHALPSPHLGTLLDDGSLRIAVALRLGCKVCERHVCTCGSMVEADGHHALSCRRCSGRFPRHHALNDVVRRALISANIPCLLEPPGLSRSDGKRPDGLTLVPWKNGRCLIWDATCVSTFAASHLGRTVRFPSAAAEDACYRKKQKYAALEQLYYFVPVAVETMGGWAAETLGFVGELGRRLAEIKGDSRSGSFLVQRLAIAIQRGNAASLMGTFPPEAIRNGLNDL

SEQ ID NO: 17372 - protein, 998 aa, Cosmia trapezina
MLDIFLCKENHYYYFLVVILLVSSFYLLYLLLMRVLYFLDAQMSALSTMLSCPHCPGSSRTFSSHGIKIHIGRMHKHMQQPVATPQTSSTVTDSQPMSQVPLVSRPCPLERLSALKMCTPVLRHIPKGSRNQAAGKLCDILDKCVSCNGVDEWGALLTFAFVGLRVPSRVAPGNMTTKVKANIESVSADRFVDESSCVADFSKPRGIRKAIESKVFEGDLRGAVRLLVSDDSFAQHNPGTLDALTVKHPSPSRPLNFPSAPDSSFPRVTASVEDVTLALRSFNSGSAAGMDGIRPGHLKELTSGSAGENGRRLLESLTKLVNFLMSGQLNPVVCPYLYGASLCALKKKDGGLRPIAIGSVFRRLSAKLACRSVRVDMAEYFQPHQLGFGTPRGCEAAIHATRAFVMDPKNSDCVVLKLDLRNAFNTLERDVLLSEVKDKIPSLYPFLYQVYYSPSNLFFNDSLISSQVGAQQGDPLGPLVFNLAIHKVISGLKSSLNLWYLDDGIIGGSLEEVCQDLEVLVPQLKELGLEVNPSKCEFFPCGFGARSHFSLFGCLLPGLKELSPLSFSLLGSPIFLDGVPEAISSRTQLLLNARERLKDLSAHVAILLLRMCFALPKITYLLRTAPTWLCPEEVCSFDCALKSTVESILNVSFNDTQWKQAALPIRHGGLGVRCVHDVGLPAFLASTHGVADLVTVILDSNGDGANIPFMLDAGSAWSVLNMGAASPDATHVQRAWDDVSSRLIQEQMMVGSSGADLARLRAVSQPESGAWLHALPSPHLGTLLDDDSLRVAVALRLGCKVCEPHRCTCGSTVEADGHHALSCRRCSGRFPRHHALNDIVRRAFVSADVPCVLEPPGLSRSDGKRPDGLTLVPWKNGKCLIWDATCVSTVAASHLGRTVLSSSAAAEDAAERKRVKYAPLATRYHFVPIAVETMGCWGTEAKKLIGEIGHKLREKTGDSRSGSFLVQRLAIAIQRGNAASVMGTFAPGTVRGGFFENW

SEQ ID NO: 17373 - protein, 960 aa, Mesoligia furuncula
MYKDAQMSALSAMLSCPHCPGSSRTFSSHGLKVHIGRMHRNARQPVATPRTSSTVTDSQPVSQVPPVLRPCPLERLSALKVSTPILRHVPKGARNQAAGKLCDIIDKCVSCNGVEDWGALLTFAFGGLRVPSRDAPGNMTAKVKANVESVGADQFVDESGCVAGVAKSRGIRKSIESKVFEGDLRGAVRLLVSDDSFAQHDPDTLSALTVKHPNPSRPLNFPLAPDLSCPRVTASVEDVALALSSFYSGSAAGLDGIRPGHLKELTSGSAGENGRRLLECLTKLANFLMSGQLNPVVCPYLYGASLCALKKKDGGLRPIAIGSVFRRLTAKVACRSVRVAMSEYLQPHQLGFGTPRGCEAAIHATRTFVMDPKNSDCVVLKLDIRNAFNTLERDVLLSEVKDKIPSLYPFLYQVYYSPSNLFYHDSLISSQVGAQQGDPLGPLVFSLAIHKVISGLKSSLNLWYLDDGIIGGSPEEVCQDLEVLVPQLKELGLEVNPSKCEFFPCGIGARTHFSRFGSHLPGLKELSSHNFSLLGSPIFLDGVPEAISSRKQLLLNARERLKDLSAHVAILLLRMCFALPKVTYLLRTAPTWLCPEEVCSFDCALKSTVESILKLSFNDAQWRQAALPIRYGGLGVRCVHDVGLPAFLASTHGVADLVTVILDSNGYGANIPFMLDAGSAWSVLNMGAASPDATHVQRAWDDVTSKLIQEQMLVGSSGADLARLRAVSQPESGAWLHALPSPHLGTLLDDDSLRVAVALRLGCKVCEPHRCTCGSMVEADGHHALSCRRCSGRFPRHHALNDIVRRAFVSADVPCVLEPPGLCRTDGKRPDGLTLVPWRNGKCLIWDATCVSTVAASHLCRTVHSPSAAAEDAAERKRVKYAPLVDRYLFVPIAVETMGAWGTEARKLISEIGHKLRDKTGDSRSGSFLVQRLAIAIQRGNAASVLGTFSPGTVRGGLFD

SEQ ID NO: 17374 - protein, 958 aa, Spilarctia lutea
MSLAPIQLSCPHCPESPRTFSEHGLRVHVGRMHRGVRQACAGSQVSPALTFASCPSGQTAQTFLPDRASLERLAYLKKCVPVLRHVPRGAHNQAAGRLCDVIDLCLANNGIDEWSELLCFAYSALRVPAKELPGNMTSKVKANINSSRHWRGEGLADPGSSFGSRSVGKIIEARVFEGDLRGAARLLLSDDTFARRDRDTLDALKEKHPEPSRPLSFPSVLDLTIPALSVTAEDVVTALTSFYGGSAGGLDGIRPAHLRELTSVTAGDNGRRLLECITRLVNFLLSGRLNPLICPYLYGASLCALVKRDGGIRPIAVGSVFRRLVAKLACRAVRENMSCYLQPHQLGFGTRLGCEAAIHATRAFVMNQENEGSILLKLDIRNAFNTLERDVLLREVKEHIPSLFPFLHQVYSHPSNLFFDDNLIISQVGAQQGDPLGPLVFSLAIHKVVTEIKSPLNVWYLDDGTIGGKPEDVLQDLEILIPRFRDLGLEVNSSKCEFFPCGGGGRTQLSRLAAVLPGLRELSSLDFTLLGSPIFLCAVPGAIDSRTRLLLTTHERLGDLSAHVAIVLLRTCFALPKINYLLRTTPTWLCPEEVSSFDRALKSVVESVLNVSMDERQWSQAGLPIRCGGLGVRSMRGVDLPAFLASAHGVANLVTVLLGSHGGGVSIPFLVDATSAWLDLNSGEACPGAAHMQRSWDEVGVKRIQGDLLEGSSGADMARLRAVSRSEAGAWLHALPSPYLGTLLDDNSLRIAVALRLGCKACERHVCTCGSMVEADGHHALSCRRCSGRFSRHHALNDVVRRALISAGIPCLLEPPGLSRSDGKRPDGLTLVPWRNGRCLIWDATCVSTVAASHLSRTICSPSAAAEDACYKKRQKYAALEQQYYFVPVAVETMGSWAADTLRFVGELGRRLALLSGDSRSGSFLVQRLAIAIQRGNAASLMGTFPPEAIRDGLSGDL

SEQ ID NO: 17375 - protein, 947 aa, Eilema depressum
MSTTQLTCPHCPGSLRIFSSHGLKVHIGRMHKRAPVSPADTDTTAPAGQGQSAPALAQTTLDRLATFRGSIPVLRHIPKGARNQAAGKLCDIVDACVTNNGVEEWGALLAFAYTALRVPARESPGNMTSKVKVNVLQSDHFDNIEIPASSVRTGSRSVIKNIESKVFEGDLRGAVRLLMSDDSFARRDPGTMAALELKHPSPSRQLNFPPDPGLQCTTAAVTVGDVISALGSFYAGSAAGLDGIRPVHLKELTSVSAGENGRRLLGCLTRLVNFLLSGQVHPQVCPYLYGASLFALAKKDGGLRPIAVGSVFRRLTAKLACRAVKEEMAEYLQPHQLGFGTCLGCEAAIHATRAFVMDPRNEGSILLKLDIRNAFNTLERDVLLSEARERIPSLYPFLHQAYKLPSNLFFDNNLITSKVGAQQGDPLGPLVFSLAIHRAIRGLKSALNVWYLDDGTIGGKPEDVLHDLEALVPSLKDLGLEVNPSKCEFFPCGTEARTHFAQLNSFLPGLKELSSSNFNLLGSPIFLSAVPEAITARKQLLLTAHERLRGLSAHVAIVLLRMCFALPKINYLLRTTPTWLCPEEVSSFDDALKSVVESVLNVSLDGTQWSQAAQPIRCGGLGVRRVCDVGLPAFLASAHGVANLVTSLLNPNGDGGIIPFASDAMLAWSALSAGAAIPEPVHLQRAWDDVGVKRLQVQLLDGAAGADKARLRAVSQPESGAWLQALPSPHLGTLLDDDSLRVAVAFRLGCKVCEPHICTCGSMVEADGHHALSCRRCTGRFPRHHALNDIVRRALVSANVPCVLEPPGLSRSDGKRPDGLTLVPWKNGKCLLWDATCVSTVAASHLSRTVHSPSAAAEDASSRKRLKYADLEPLYYFVPVAVETLGSWGKEAKGLIKEIGQRLNEATGDFRSGSFLVQRLAIAIQRGNAASVMGTFAPGAIRGGLFD

SEQ ID NO: 17376 - protein, 957 aa, Spilosoma lubricipeda
MSLAPIQFSCPHCPGSPRTFSEHGLRVHVGRMHREVRRACASSRVSPAHTFPSCPSEQVAQTLLPDRTSLDGLARLKGSVPVLRHVPRGARNQAAGGLCNVIDLCLASNGIDEWSELLCFAYSALRVPAKELPGNMTSKVKANINSFRSWRGEGLSDARVSFGSRSTGKIIEARVFEGDLRGAARLLLSDDSFARRDRDTLDALKAMHPEPSRPLGFPSDLDLTFPALSVTAADVVTALGSFHGGSAGGLDGIRPTHLRELTSVSAGDNGRRLLECITRLVNFLLSGQLNPLVCPYLYGASLFALVKKDGGIRPIAVGSIFRRLVAKLACRAVRETMSGYLQPHQLGFGTQSGCEAAIHATRAFVMSPECEGSILLKLDIRNAFNTLERDVLLREVKERIPSLFPYLHQVYSRPSNLFFDENLIVSQVGAQQGDPLGPLVFSLAIHKVITEIKSPFNVWYLDDGTIGGKPEDVLQDLEILIPRFKDLGLEVNSSKCEFFQCGVGARSHLSRLATILPGLRELSSRDFTLLGSPIFHCAVPGAIASRTQLLLTTHERLKDLSAHVAIVLLRTCFALPKISYLLRTTPTWLCPEEVASFDKALKSVVESVLNVSMDERQWGQASLPIRCGGLGVRGMRDVGLSAFLASAHGVANLVTVLLGIHGGEVSIPFLMEATSAWLALSPGEACPGAAHMQRAWDDVGVRRIYDALLEGSSGVDMARLRAVSRAEAGAWLHALPSPHLGTLLDDGSLRIAVALRLGCKVCERHVCTCGSMVEADGHHALSCRRCSGRFPRHHALNDVVRRALISANIPCLLEPPGLSRSDGKRPDGLTLVPWKNGRCLIWDATCVSTFAASHLGRTVRFPSAAAEDACYRKKQKYAALEQLYYFVPVAVETMGGWAADTLRFVGELGRRLAEIKGDSRSGSFLVQRLAIAIQRGNAASLMGTFPPEAIRNGLNDL

SEQ ID NO: 17377 - protein, 926 aa, Hecatera dysodea
MHKHALRSGAVSQVPPVDTVNASSSGEVPPVLAPAQSPLDKLAASKASIPVLRHIPKGARNQAAGKLCDIVDACVASNGVDEWSALLSFAYTSLRVPAKELPGNVTSKVKANIISPVHCLDDEVVASRRSGSRSIKKSIETKVFEGDMRGAVRLLMSDDSFARGDADTLASLKLKHPDPSRPLSFPPDPDPSFTALSVTVEDVVSALGSFYTGSAAGLDGIRPGHLKELISVTAGENGKRLVGGLTRLANFLLSGQLNPCVCPFLYGASLFALEKKDGGVRPIAVGSVFRRLTAKLACRAVKEDMARYLQPHQLGFGIRLGCEAAIHATRTFVMDPENEDSILLKLDIRNAFNSLERDVLLSEVKDKIPSLYPFLHQVYRLPSNLFSGNNLILSKVGAQQGDPLGPLVFSLAIHKAIVGLKSGLNVWYLDDGTIGGRPEDVFQDLEALVPRLRDLGLEVNPSKCEFFPCGTEARTHFSRCNSFLPGLRKLSCSDFNLLGSPIFLSAVPEAITSRTRLLLSAHERLKDLSAHVAIVLLRMCFALPKITYLLRTAPTWLCPEEVSSFDNALKSVVESVLNVSLDEPQWRQATLPIRCGGLGVRCARDVGLPAFLASAHGVANLVTVLLNINGDGGSMPFVSDAVSVWLTLNSGAAIPESENVQRAWDDIGVKLIQEHLLANAMRVDRARLRAVSQPESGAWLQAIPSPHLGTLLDNDSLRVAVALRLGCKVCEPHTCTCGSMVEADGHHALSCRRCTGRFPRHHALNDIVRRALVSANVPCVLEPPGLNRSDGKRPDGLTLVPWKNGKCLIWDATCVSTVAASHLSRTMHTASAAAEEACSKKRLKYASLVQLYHFVPVAVETLGSWSTEAKCFVRDLGHRLGEATGDSRSGSFLVQRMAIAIQRGNAASVMGTFAPGTIRGGLFIDL

SEQ ID NO: 17378 - protein, 960 aa, Mesoligia furuncula
MYKDAQMSALSAMLSCPHCPGSSRTFSSHGLKVHIGRMHRNARQPVATPRTSSTVTDSQPVSQVPPVLRPCPLERLSALKVSTPILRHVPKGARNQAAGKLCDIIDKCVSCNGVEDRGALLTFAFGGLRVPSRDAPGNMTAKVKANIESVGADQFVDESGCVAGVAKSRGIRKSIESKVFEGDLRGAVRLLVSDDSFAQHDPDTLSALTVKHPNPSRPLNFPLAPDLSCPRVTASVEDVALALSSFYSGSAAGLDGIRPGHLKELTSGSAGENGRRLLECLTKLANFLMSGQLNPVVCPYLYGASLCALKKKDGGLRPIAIGSVFRRLTAKVACRSVRVAMSEYLQPHQLGFGTPRGCEAAIHATRTFVMDPKNSDCVVLKLDIRNAFNTLERDVLLSEVKDKIPSLYPFLYQVYYSPSNLFYHDSLISSQVGAQQGDPLGPLVFSLAIHKVISGLKSSLNLWYLDDGIIGGSPEEVCQDLEVLVPQLKELGLEVNPSKCEFFPCGVGARTHFSRFGSHLPGLKELSSHNFSLLGSPIFLDGVPEAISSRKQLLLNARERLKDLSAHVAILLLRMCFALPKVTYLLRTAPTWLCPEEVCSFDCALKSTVESILNVSFNDAQWRQAALPIRYGGLGVRCVHDVGLPAFLASTYGVADLVTVILDSNGDGANIPFMLDAGSAWSVLNMGSASPDATHVQRAWDDVTSKLIQEQMLVGSSGADLARLRAVSQPESGAWLHALPSPHLGTLLDDDSLRVAVALRLGCKVCEPHRCTCGSMVEADGHHALSCRRCSGRFPRHHALNDIVRRAFVSADVPCVLEPPGLCRTDGKRPDGLTLVPWRNGKCLIWDATCVSTVAASHLCRTVHSPSAAAEDAAERKRVKYAPLVDRYLFVPIAVETMGAWGTEARKLISEIGHKLRDKTGDSRSGSFLVQRLAIAIQRGNAASVLGTFSPGTVRGGLFD

SEQ ID NO: 17379 - protein, 954 aa, Griposia aprilina
MSALSAMLSCPHCPGSSRKFGSHGLKVHIGRMHGSARRPVVTLRTLSSVTDSQPVSQVPLVPRPCPLERLSALKVSTPVLRHVPKGARNQAAGKLCGIIDKCVSCNGVEDWGALLTFAFDGLRVPSRDAPGNMTAKVKANVESVGAIQFVDESDCVAGVAKSRGVRKAIESKVFEGDLRGAVRLLVSDDSFAHHDPDTLSALTAKHPSPSRPLDFPSAPDMSFPGVTASVEDVTLALGSFYSGSAAGLDGIRPGHLKELTSSSAGENGRRLLECLTKLANFLMSGQLNPVVCPYLYGASLCALKKKDGGLRPIAIGSVFRRLTAKLACRSVRVAMSEYLQPHQLGFGTRRGCEAAIHATRGFVMNPENSDCVVLKLDIRNAFNTLERDVLLSEVKDKIPSLYPFLYQVYHSPSNLFFSDSFISSQVGAQQGDPLGPLVFSLAIHKVISGLKSSLNLWYLDDGIIGGSPEEVCQDLEVLVPQLKELGLEVNPSKCEFFPCGVAARSHFSRFGFHLPGLKELSPLSFSLLGSPIFLVGVPEAISSRKQLLLNARERLKDLSAHVAILLLRMCFALPKVTYLLRTAPTWLCPEEVCSFDCALKSTVESILNVSFNDVQWRQAALPIRYGGLGVRCVHDVGLPAFLASAHGVADLVTVILDSNGGGANIPFMLDAGSAWSVLSSGAASPVAAHIQRAWDDVTSRLIQEQMLVGSSGVDLARLKAVSQPESGAWLHALPSPHLGTLLDDDSLRVAVALRLGCKVCEPHRCTCGSMVEADGHHALSCRRCSGRFPRHHALNDVVRRAFVSADVPCLLEPPGLCRTDGKRPDGLTLVPWRNGKCLIWDATCVSTVAASHLGRTVHSSSAAAEDAAERKRTKYAPLVDRYHFVPIAVETMGAWGTEARKLIGEIGHRLRDKTGDSRSGSFLVQRLAIAIQRGNAASVLGTFAPGTVRGGLFD

SEQ ID NO: 17380 - protein, 956 aa, Apamea monoglypha
MSLPSLSACPHCPGSSRVFSAHGLRVHIGRMHKHAMRSGAVSQALPVDEVNTLSSGQVSPAHSPPQGSLDRLSGFKASVPVLRHIPKGARNQAAGKLCDIMNSCIAVNGVDEWSALLSFGYTALRVPAKELPGNVTSKVKANITSPVRCHDGLLDAGRRSGPRSIKSSIEAKVFEGDLRGAVRLLMSDDSFVRGDADTLASLKLKHPDPSRPLSFPPDPDPSLTALSVTEEDVMSALGSFYAGSAAGLDGIRPGHLKELTSVSAGENGKRLVGCLTRLANFLLCGRLDPCICPYLYGASLFALAKKGGGVRPIAVGSVFRRLTAKLACRAVKEDMAKYLQPNQLGFGTRLGCEAAIHATRTFVMNPENEDSILLKLDIRNAFNTLERDVLLREVKENIPSLYPFLHQVYRMPSNLFFDNSLILSKVGAQQGDPLGPLVFSLAIHKAIVELNSSLNVWYLDDGTIGGRPEDVFQDLEALLPRLRDLGLEVNSAKCEFIPCSTEARTHFSRFESFLPGLREISCSDFNLLGSPIFLSAVPEAIFSREQLLLSAHERLKDLSAHVAIILLRMCYALPKMTYLLRTTPTWLCPEEVSSFDNALKSVVESVLNVSLDGPHWIQAALPIRCGGLGVRCARDVGLPAFLASAHGVANLVTVLLKTNGDGGSMPFVSDAVSAWLTLNPDAAIPEATHVQRAWDDIGVGLLQERLLEGASGVVKARLRAVSQPESGAWLQAIPSPHLGTLLDDDSLRVAVALRLGCKVCEPHICTCGSTVEADGHHALSCRRCTGRFPRHHALNDIVRRALISANVPCVLEPAGLSRCDGKRPDGLTLVPWKNGKCLIWDATCVSTVAASHLSRTAHTASAAAEDACSVKRLKYASLEQPYYFVPVAVETLGCWSKAAKVFVAELGRKLREATGDSRSGSFLVQRLAIAIQRGNAASVMGTFAPGAIRGGLFCDI

SEQ ID NO: 17381 - protein, 976 aa, Marasmia exigua
MSTVNVTHLACPHCPGSSRTRTFSAHGLKVHIGRMHREVRSPSRGLQTSPADTTPSASASLAPPSPSPDIRSPSPDIRSPSPDISPLERLASFKRSIPVLRHVPKGARNQVAGRLCDIIDSCVARNGVDEWSALLSFAYTALRVPSKDSPGNVTAKVKANARSSGPGSIDDIAVPRATPVPRSRKKIIEAKVFEGDLRGAVRLLMSDDSFARRDPVTLAALKSKHPDPSRPLSFPTDPDSSVPVASVTQEDVSSALDSFYSGSAAGLDGFRPGHLKELTSVTAGENGGRLLGCLTRLSNFLLSGQLNPLVCPYLYGASLIALEKKDGGVRSIAIGSVFRRLTAKLACRAVKENMARYLQPHQVGFGTRLGCEAAIHATRAFVLDPENENSIVLKVDIRNAFNTLERDVLLGEVRENVPSLYPFLVQVYKLPANLFYDEDRILSQVGAQQGDPLGPLVFSLAIHKVIAELKSSLNVWYLDDGTIGGRAEEVLQDLEILIPRLKALGLEVNPSKCEFFPCSDEARTHFTEFSAILPGLKELSRTELNLLGSPIFPEAVPEAITSRTEFLDNARARLQDLSPHVAMVLLRMCFALPKVTYLLRTAPTWLCSVEVASFDRALKSVVESILNVSLEEVQWTQAALPIRCGGLGVRCMGDVGLPAFLASAHGVASLVTVLLNSNGGEVSIPFVSGAVSAWSALCPGAAIPQATQSQRGWDDVRVRRVQEELLGGAVGADLARLRAVSQRESGAWLHALPSPHLGTLLDGDSLRVAVALRLGCKVCEPHKCTCGSMVGTDGHHALSCRRCAGRFPRHHAMNDVIRRALVSANVPCVLEPPGLSRTDGKRPDGLTLVPWKNGKCLIWDATCVSTVAASHLSRTVHSPSAAAEDASSKKRLKYANLEPLYQFVPVAVETMGCWGSEARDFVWEIGRRLCEVTGDSRSGSFLVQRLAIAIQRGNAASVMGTFASEAGGGELPVFVR

SEQ ID NO: 17382 - protein, 953 aa, Ennomos quercinarius
MSVPSAPLTCPHCPGSTRTFRLHGLKIHIGRKHKGVLHPPITLQTTRPAAAVIQQTHPVPAPQRCPLEGLASLRESVPVLRHVPKGARSQAAGKLCEIIDKCVDCNGVEEWWSLLSFVFSALRVPSKELPGNMTTKVKANIESSGLYLFEECDGLVGNSRSRSIQKTIESKVFEGDLRGAVRLLVSDDTFAQRGPDTLAALKLKHPCPSRPLNSPPAPDASYTTASVTVSDVSQALSTFYSGSAAGLDGIRPGHLKELTSVSAGENGHRLMECLTRLCNFLLSGQLNIEVCPYLYGAALCALTKKDGGVRPIAVGSTFRRLTAKLACRAVKGEMAEYLQPHQLGFGTRRGCEAAIHATRTFVLDAANSNCVVLKLDICNAFNTLERDVLLNEVKDNIPSLYPFLHQIYQSPSKLFFDNNLILSQVGAQQGDPLGPLVFSLAIHKIILELKSHLNLWYLDDGTIGGKPEVVAQDLRVLVPRLRELGLVINSSKCEIFPCSAEAGIHFDHFSAILPGLRELSPNTFNLLGSPIFPEAVPEAITSRKQLLLAAQERLNNLSAHVALILLRMCFALPKVTYLLRTTPTWLCPEEVSSFDSTLKSAVESILNVSLNELQWDQAALPIRLGGLGVRRVLDVGLPAFLASAHGVADLVTNILYTNGDRASVPYLSDAVSAWSAVNQGAPNPEALHVQRAWDEVGAKRNLQQMLDSATGADLARLKAVSESESGAWLHALPSPHLGTLLDDDSLRVTVALRLGCKVCEPHNCTCGAMVEADGHHALSCRRCTGRFPRHHALNDIIRRAFISANVPCVLEPPGLCRSDGKRPDGLTLVPWKNGKCLVWDATCVSTVAATHLSRTVHKAAAAAEDAASKKRLKYATMEPHYYFVPIAVETMGSWGAEAKTLVSEIGRRIRDKGGDSRSGSFLVQRLAIAIQRGNAASIMGTFAPRTVRGGLFE

SEQ ID NO: 17383 - protein, 954 aa, Eilema sororculum
MSVSSAQLLCPHCPGSSRVFSARGLRVHIGRMHKDVLRLGTVSPVSLTNAGTSMGQSLSTPSSAESSLDRLASLRGNVPVLRHIPKGARSQAAGRLCDVIDSCIGRNGVDEWATLLLFAYTALRVPARESSGNMTTKVKNNILSSDHGDDFEISASKACSGPRSLQKNIESKVFEGDLRGAVRLLMSDDSFANRDHGTMTALELKHPGPSRPLNFPPDPGLSFTPVTVTTGDVISAVGSFYAGSAAGLDGIRPGHLKELTSVSAGESGRRLVGCLTGLVNFLLSGQLNPLVCPYLYGASLFALAKKDGGLRPIAVGSVFRRLTAKLACRAVKEEMADYLQPHQLGFGTRLGCEAAIHAARAFVMDPRNEGAILLKLDIRNAFNTLERDVLLSEVKEKIPSLYPFLHQVYRLPSNLFYENNLLLSKVGAQQGDPLGPLVFSLAIHKAVQSLKSALNVWYLDDGTIGGKPEDVVQDLEALVPSLRDLGLEVNPSKCEFFSCGTEARTCFSRLSTILPGLKELSPSDFYLLGSPIFLSAVPKAISVRKHLLLAAHERLKGLSAHVAIVLLRMCFALPKIAYLLRTTPIWLCPEEVSSFDDALKSVVESVLNVNLDGTQWSQATLPIRSGGLGVRCVRDVGLPAFLASAQGVASLVTTLLNPNGDGASVPFVSDAVSAWSALNGGASIPELGHLQRAWDEVGVRRLQAQLLDGAAGVDKARLRAVSQPESGAWLQALPSPHLGTLLDGDSLRVAVALRLGCKVCEPHICTCGSMVEADGHHALSCRRCTGRFPRHHALNDIVRRALISANVPCVLEPPGLSRSDGKRPDGLTLVPWKNGKCLLWDATCVSTVAASHLSRTIHSPSAAADDASSRKRLKYAELEPQYYFVPIAVETLGSWGRDAKSLIKAIGQRLIEATGDSRSGSFLVQRMAVAIQRGNAASVMGTFAPGAIRGGLFD

SEQ ID NO: 17384 - protein, 960 aa, Mesoligia furuncula
MYKDAQMSALSAMLSCPHCPGSSRTFSSHGLKVHIGRMHRNARQPVATPRTSSTVTDSQPVSQVPPVLRPCPLERLSALKVSTPILRHVPKGARNQAAGKLCDIIDKCVSCNGVEDWGALLTFAFGGLRVPSRDAPGNMTAKVKANVESVGADQFVDESGCVAGVAKSRGIRKSIESKVFEGDLRGAVRLLVSDDSFAQHDPDTLSALTVKHPNPSRPLNFPLAPDLSCPRVTASVEDVALALSSFYSGSAAGLDGIRPGHLKELTSGSAGENGRRLLECLTKLANFLISGQLNPVVCPYLYGAYLCALKKKDGGLRPIAIGSVFRRLTAKVACRSVRLAMSEYLQPHQLGFGTPRGCEAAIHATRTFVMDPKNSDCVLLKLDIRNAFNTLERDVLLSEVKDKIPSLYPFLYQVYYSPSNLFYHDSLISSQVGAQQGDPLGPLVFSLAIHKVISGLKSSLNLWYLDDGIIGGSPEQVCQDLEVLVPQLKELGLEVNPSKCEFFHCGVGARTHFSRFGSHLPGLKELSSHNFSLLGSPIFLDGVPEAISSRKQLLLNARERLKNLSAHVAILLLRMCFALPKVTYLLRTAPTWLCPEEVCSFDCALKSTVESILNVSFNDAQWRQAALPIRYGGLGVRCVHDVGLPAFLASTHGVADLVTVILDSNGDGSNIPFMLDAGSAWSVLNMGAASPDATHVQRTWDDVTSKLIQEQMLVGSSGADLARLRAVSQPESGAWLHALPSPHLGTLLDDDSLRVAVALRLGCKVCEPHRCTCGSMVEADGHHALSCRRCSGRFPRHHALNDIVRRAFVSADVPCVLEPPGLCRTDGKRPDGLTLVPWRNGKCLIWDATCVSTVAASHLCRTVHSPSAAAEDAAERKRVKYAPLVDRYLFVPIAVETMGAWGTEARKLISEIGHKLRDKTGDSRSGSFLVQRLAIAIQRGNAASVLGTFSPGTVRGVLFD

SEQ ID NO: 17385 - protein, 953 aa, Eilema sororculum
MSELQTTCPHCPGSSRTFSTRGLKIHITRMHGRLPQTGPVNDSSHVDVSRQMHAEAVPPLRSPLEKLATLREGIPVMRHIPKGARNQAAGKLSDAIDRCVSSNSVEDWYALLSFAYGALRVPSKSLPGNMTSKVKANIDSSGSHRFEDEYDSPVASRGSYSMKKKIESKVFEGDLRGAVRLLMSDDKFAQSSPETLAALKLKHPGPSRPLSPSPEPDTSCTPVTATPDDVAKALSSFYSGSAAGLDGIRPGHLKELTSRAAGENGQRLLGSLTKLSNFLLGGQLNSEVCPFMYGASLCALNKKDGGIRPIAVGSTYRRLTAKLACYSVRKEMSEHLQPRQVGFGTPRGCEAAIHATRAYVMEPQNAHCVVLKIDIRNAFNTLERDVLLSAVKEKSPSLYPFLFQVYHSPSNLFLNKDLVLSQVGAQQGDPLGPLVFSLAIHEAISELESPLNLWYLDDGTIGGEPGVVARDLEALIPRLKGLGLEVNPAKCEFFPCSTEARKHFTHFNTLVPGLSELTTGTFSLLGSPIFPEAVPEAITSRQLLLLAAREQLKNLSAHVAVLLLRMCFAVPKITYLLRTTPTWLCPEAVSAFDSTLRDTAESILNVSLDERQWLQASLPIRCGGLGLRRVADVGLPAFLASAHGVADLVTIMLSTDGARVSIPYMYEALSAWSALNPNKPCPGTPNVQRAWDEIGAEGAMSDMLDRATGVDLARLRAVSQPEAGAWLHALPSPHLGTLLDDDSLRVAVALRLGCKVCESHRCICGSMVEGDGHHALSCRRCTGRFPRHHALNDIVRRALISANVPCVLEPPGLDRSDGKRPDGLTLVPWKHGKCLVWDATCVSTVAATHLSRTVNAPAAAAEDAASRKRSKYAAMEPQYYFVPIAVETLGSWGSEAKRLIAEIGRRIHDQGGDSRSGSFLGQRMAIAIQRGNAASIMGTFAPGTIRGGLFDTT

SEQ ID NO: 17386 - protein, 962 aa, Erannis defoliaria
MSALSATRTCPHCPGSTRSFCEHGLKVHIGRMHKDILHPTASCCTVAQSTPTPSFDTRQVQQATPTAPGARACPLDLLAALKQRTPVVRHIPKGARNQAAGKLCEIIGKCVETNGVDDWCSLLAFAFIALKVPARQLPGNMTAKVKANIESSGSYRLDDEFGSAEANFRSSPVHKIIESKVFEGDLKGAVRLLVSEDSFARHGPDTLAALKSKHPCPSRPLTFPPGPDLSYAAVTATVEEVALALSSFYSGSAAGLDGIRPGHLKELTSGSAGENGPRLLESLTKLSNFLLSGQLNPEVCPYLYGASLCALDKKDGGVRPIAVGSVFRRLAAKLACRAVREGMAQYLQPHQLGFGTRLGCEAAIHATRTYVGDPANSNCVVLKLDISNAFNTLERDVLLSEVKDHIPSLYPFLHQIYQSPSNLFFNNNLILSQVGAQQGDPLGPLVFSLAIHKAIVDLRSSLNIWYLDDGTIGGKPETVFQDLEALIPRLKELGLEVNPSKCEFFPCCTEARTHFVQFNSLLPGLRELSTSTFYLLGSPIFLDALPEAIVSRNRLLLAAQQRLQHLSAHVALVLLRMCFAVPKVTYLLRTTPTWLCPGEISCIDGTLKSTVESILNVSLNESQWNQAVQPVRYGGLGVRRVRDIALPAFLASAHGVESLVTLILHSDGDRVSIPYVSDAVAAWSVLNSGALGPAASHVQRAWDDVGAKRMQEEMLSMATGVDLARLRAVSQSESGAWLQALPSPHLGTLLDDNSLRVAIALRLGCKVCEPHRCTCGSMVEADGHHALSCRRCTGRFSRHHALNDIVRRAFVSANVPCMLEPPGLSRTDGKRPDGLTLVPWKSGKCLLWDATCVSTVAASHLSRSIHSPGAAAEDAAKGKRQKYAAMEPNYLFVPIAVETMGCWGADAKTLVREIGRRIKEATGDSRSGSFLVQRLAIAIQRGNAASVMGTFAPGAIRGGLFD

SEQ ID NO: 17387 - protein, 956 aa, Hecatera dysodea
MSLPSCLTCPHCPGSSRVFSAHGLKVHIGRMHKHALRSGAVSQVPPVDTVNASSSGEVPPVLAPAQSPLDKLAASKASIPVLRHIPKGARNQAAGKLCDIVDACVASNGVDEWSALISFAYTSLRVPAKELPGNVTSKVKANIMSPVHCLDDEVVASRRSGSRSIKKSIETKVFEGDMRGAVRLLMSDDSFARGDADTLASLKLKHPDPSRPLSFPPDPDPSFTALSVTVEDVVSALGSFYTGSAAGLDGIRPGHLKELISVTAGENGKRLVGGLTRLANFLLSGQLNPCVCPFLYGASLFALEKKDGGVRPIAVGSVFRRLTAKLACRAVKEDMARYLQPHQLGFGIRLGCEAAIHATRTFVMDPENEDSILLKLDIRNAFNSLERDVLLSEVKDKIPSLYPFLHQVYRLPSNLFSGNNLILSKVGAQQGDPLGPLVFSLAIHKAIVGLKSGLNVWYLDDGTIGGRPEDVFQDLEALVPRLRDLGLEVNPSKCEFFPCGTEARTHFSRCNSFLPGLRKLSCSDFNLLGSPIFLSAVPEAITSRTRLLLSAHERLKDLSAHVAIVLLRMCFALPKITYLLRTAPTWLCPEEVSSFDNALKSVVESVLNVSLDEPQWRQATLPIRCGGLGVRCARDVGLPAFLASAHGVANLVTVLLNINGDGGSMPFVSDAVSVWLTLNSGAAIPESENVQRAWDDIGVKLIQEHLLANAMRVDRARLRAVSQPESGAWLQAIPSPHLGTLLDNDSLRVAVALRLGCKVCEPHTCTCGSMVEADGHHALSCRRCTGRFPRHHALNDIVRRALVSANVPCVLEPPGLNRSDGKRPDGLTLVPWKNGKCLIWDATCVSTVAASHLSRTMHTASAAAEEACSKKRLKYASLVQLYHFVPVAVETLGSWSTEAKCFVRDLGHRLGEATGDSRSGSFLVQRMAIAIQRGNAASVMGTFAPGTIRGGLFIDL

SEQ ID NO: 17388 - protein, 822 aa, Mythimna impura
MTSKVKANIMSPVHYHEEEVDANRRSGSRSIKKSIETKVFEGDLKGAVRLLMSDDTFARGDADTLASLKLKHPDPSRPLSFPPDPDPSFTALSVTVEDVISALGSFYTGSAAGLDGIRPGHLKELISVSAGENGRRLVGGLTRLANFLLSGQLNPCICPFLYGASLFALEKKDGGIRPIAVGSVFRRLTAKLACRAVKEDMAHYLQPHQLGFGTRLGCEAAIHATRAFVMDPENEDSILLKLDIRNAFNTLERDVLLSEVKEKIPSLYPFLHQVYRLPSNLFSDNSLILSKVGAQQGDPLGPLVFSLAIHKAIIELKSGLNVWYLDDGTIGGKPEDVFQDLEALVPRLRDLGLEVNPSKCEFFPCSTEARTHFSRFNSFLPGLRELSCSDFNLLGSPIFLGAVPEAITSRTRLLLSAHERLKDLSAHVAIVLLRMCFALPKITYLLRTTPTWLCPEEVSSFDNALKLVVESVLNVSLDGPQWRQAALPIRYGGLGVRCARDVGLPAFLASAHGVANLVTVLLNTNGDGGSMPFVSDAVSAWLTLNSGATIPDSVHVQRAWDDRGVKLLQEQLLGGALGVDKARLRAVSQPESGAWLQAIPSPHLGTLLDDDSLRVAVALRLGCKVCEPHTCTCGSMVEADGHHALNCRRCTGRFPRHHALNDIVRRALISANVPCVLEPPGLSRSDGKRPDGLTLVPWKNGKCLIWDATCVSTVAASHLSGTMHTASAAAKDACSKKRLKYAALDQLYHFVPVAVETLGSWSTEAKCFVGDLGRRLAEATSDSRSRSFLVQRMAIAIQRGNAASVMGTFAPGTIRGGLFIDD

SEQ ID NO: 17389 - protein, 956 aa, Apamea monoglypha
MSLPSLSACPHCPGSSRVFSAHGLRVHIGRMHKHAMRSGAVSRALPVDEVNTLSSGQVSPAHSPPQGSLGRLSGFKASVPVLRHIPKGARNQAAGKLCDIMNSCIAVNGVDEWSALLSFGYTALRVPAKELPGNVTSKVKANITSPVRCHDGVLDAGRRSGPRSIKSSIEAKVFEGDLRGAVRLLMSDDSFVRGDADTLASLKLKHPDPSRPLSFPPDPDPSLTALSVTEGDVMSALGSFYAGSAAGLDGIRPGHLKELTSVSAGENGKRLVGCLTRLANFLLCGRLDPCICPYLYGASLFALAKKGGGVRPIAVGSVFRRLTAKLACRAVKEDMAKYLQPNQLGFGTRLGCEAAIHATRTFVMNPENEDSILLKLDIRNAFNTLERDVLLSEVKENIPSLYPFLHQVYRMPSNLFFDNSLILSKVGAQQGDPLGPLVFSLAIHKAIVELNSSLNVWYLDDGTIGGRPEDVFQDLEALVPRLRDLGLEVNSAKCEFFPCSTEARTHFSRFESFLPGLREISCSDFNLLGSPIFLSAVPEAIFSREQLLLSAHERLKDLSAHVAIILLRMCYALPKMTYLLRTTPTWLCPEEVSSFDNALKSVVESVLNVSLDGPHWIQAALPIRCGGLGVRCARDVGLPAFLASAHGVANLVTVLLKTNGDGGSMPFVSDAVSAWLTLNPDAAIPEATHVQRAWDDIGVGLLQERLLEGASGVVKARLRAVSQPESGAWLQAIPSPHLGTLLDDDSLRVAVALRLGCKVCEPHICTCGSTVEADGHHALSCRRCTGRFPRHHALNDIVRRALISANVPCVLEPAGLSRCDGKRPDGLTLVPWKNGKCLIWDATCVSTVAASHLSRTAHTASAAAEDACSVKRLKYASLEQPYYFVPVAVETLGCWSKAAKVFVAELGRKLREATGDSRSGSFLVQRLAIAIQRGNAASVMGTFAPGAIRGGLFCDI

SEQ ID NO: 17390 - protein, 822 aa, Ennomos quercinarius
MTTKVKANIESSGLYLFEECDGLVGNSRSRSIQKTIESKVFEGDLRGAVRLLVSDGTFAQRGPDTLAALKLKHPCPSRPLNSPPVPDASYTTASVTVSDVSQALSTFYSGSAAGLDGIRPGHLKELTSVSAGENGHRLMECLTRLCNFLLSGQLNIEVCPYLYGAALCALAKKDGGVRPIAVGSTFRRLTAKLACRAVKGEMAEYLQPHQLGFGTRRGCEAAIHATRTFVLDAANSNCVVLKLDICNAFNTLERDVLLNEVKDNIPSLYPFLHQIYQSPSKLFFDNNLILSQVGAQQGDPLGPLVFSLAIHKIILELKSHLNLWYLDDGTIGGKPEVVAQDLRVLVPRLRELGLVINSSKCEIFPCSAEAGIHFDHFSAILPGLRELSPNTFNLLGSPIFPEAVPEAITSRKQLLLAAQERLNNLSAHVALILLRMCFALPKVTYLLRTTPTWLCPEEVSSFDSTLKSAVESILNVSLNELQWDQAALPIRLGGLGVRRVLDVGLPAFLASAHGVADLVTNILYTNGDRASVPYLSDAVSAWSAVNQGAPNPEALHVQRAWDEVGAKRNLQQMLDSATGADLARLKAVSESESGAWLHALPSPHLGTLLDDDSLRVTVALRLGCKVCEPHNCTCGAMVEADGHHALSCRRCTGRFPRHHALNDIIRRAFISANVPCVLEPPGLCRSDGKRPDGLTLVPWKNGKCLVWDATCVSTVAATHLSRTVHKAAAAVEDAASKKRLKYATMEPHYYFVPIAVETMGSWGAEAKTLVSEIGRRIRDKGGDSRSGSFLVQRLAIAIQRGNAASIMGTFAPRTVRGGLFEY

SEQ ID NO: 17391 - protein, 956 aa, Mythimna ferrago
MSMPSFLTCPHCPGSSRVFSAHGLKVHIGRMHKHVLRSGAVSQVSLVDTVNTSASGQIPPAHSLTQSPLDRLAAWKASVPVLRHIPKGARNQAAGKLCEIIDSCLTNNGVDEWSALLSFAYTSLRVPAKELPGNVTSKVKANIMSPAYCHDGEVDASRRLSSRSLKKRIEAKVFEGDLRGAVRLLMSDDSLARGDADTLASLKLKHPDPSRPLSFPPDPDPSFTSLSVTVEDVVSALGSFYSGSAAGLDGIRPGHLKELISVSAGENGRRLVGGLTRLANFLLSGQLNPCVCPFMYGASLFALEKKDGGVRPIAVGSVFRRLTAKLACHAVKEDMARYLQPHQLGFGTRLGCEAAIHTTRAFVMDPENEDSILLKLDIRNAFNTLERDVLLSEVKEKIPSLYPFLHQVYRLPSNLFSDNSLIPSKVGAQQGDPLGPLVFCLAIHKTIVELKSGLNVWYLDDGTIGGRPEDVFQDLETLVPRLRDLGLEVNPSKCEFFPCSTEARTHFSRFDSFLPGLRELSRSDLNLLGSPIFLSALPEAITARTQLLLSAHERLKDLSAHVAIVLLRMCFALPKITYLLRTTPTWLCPEEVSLFDNALKSVVESVLNVSLDGPQWRQAALPIRCGGLGVRCARDVGLPAFLASAHGVANLVTVLLNINGDGGSIPFVSDAVSAWLTLNSGATIPESEHVQRAWDDRGVMLLQEQLLEGALGVDRARLRAVSQPESGAWLQAIPSPHLGTLLDDDSLRVAVALRLGCKVCEPHTCTCGSLVEADGHHALNCRRCTGRFPRHHALNDIVRRALISANVPCVLEPSGLSRSDGKRPDGLTLVPWKNGKCLIWDATCVSTVAPSHLSRTMHTASAAAEDACSKKRLKYASLEQLYHFVPVAVETLGSWSTEARSFVRDLGRRLGEATGDSRSRSFLVQRMAIAIQRGNAASVMGTFAPGTIRGGLFIDI

SEQ ID NO: 17392 - protein, 947 aa, Eilema depressum
MSTTQLTCPHCPGSLRIFSSHGLKVHIGRMHKRAPVSPADTDTTAPAGQGQSAPALAQTTLDRLATFRGSIPVLRHIPKGARNQGAGKLCDIVDACVTNNGVEEWGALLAFAYTALRVPARESPGNMTSKVKVNVLQSDHFDNIELPASSVRTGSRSVIKNIESKVFEGDLRGAVRLLMSDDSFARRDPGTMAALELKHPSPSRQLNFPPDPGLQCTTAAVTVGDVISALGSFYAGSAAGLDGIRPVHLKELTSVSAGENGRRLLGCLTRLVNFLLSGQVHPQVCPYLYGASLFALAKKDGGLRPIAVGSVFRRLTAKLACRAVKEEMAEYLQPHQLGFGTCLGCEAAIHATRAFVMDPRNEGSILLKLDIRNAFNTLERDVLLSEARERIPSLYPFLHQAYKLPSNLFFDNNLITSKVGAQQGDPLGPLVFSLAIHRAIRGLKSALNVCYLDDGTIGGKPEDVLHDLEALVPSLKDLGLEVNPSKCEFFPCGTEARTHFAQLNSFLPGLKELSSSNFNLLGSPIFLSAVPEAITARKQLLLTAHERLRGLSAHVAIVLLRMCFALPKINYLLRTTPTWLCPEEVSSFDDALKSVVESVLNVSLDGTQWSQAAQPIRCGGLGVRRVRDVGLPAFLASAHGVANLVTSLLNPNGDGGIIPFASDAMLAWSALSAGAAIPEPVHLQRAWDDVGVKRLQVQLLDGAAGADKARLRAVSQPESGAWLQALPSPHLGTLLDDDSLRVAVAFRLGCKVCEPHICTCGSMVEADGHHALSCRRCTGRFPRHHALNDIVRRALVSANVPCVLEPPGLSRSDGKRPDGLTLVPWKNGKCLLWDATCVSTVAASHLSRTVHSPSAAAEDASSRKRLKYADLEPLYYFVPVAVETLGSWGKEAKGLIKEIGQRLNEATGDFRSGSFLVQRLAIAIQRGNAASVMGTFAPGAIRGRLFD

SEQ ID NO: 17393 - protein, 954 aa, Erannis defoliaria
MSDLSVQLTCPYCPGSTRAFSAHGLKVHIGRKHKDVRRPVAASQVLPADTVTASGQAQPSPASHQCPLERLVNLRGRVPVLRHVPKGARNQAAGKLCDIIDTCVDCNGVEDWSTLLSFAYVALRVPAKDLPGNVTTKVKANIMSSGSNHVDEVGSGLANHRLRSTKKVIESKVFEGDLRGAVRLLMSDDTYAEQGPDTLAALRLKHPAPSRSLDFPSDPDISYTSLTVTVEDVVSGLGSFYSGSAAGLDGLRPGHLKDLASVSAGENGRRLLGCLTRLVNFLLSGQLNPLVCPYLYGASLCALDKKDGGMRPIAVGSVFRRLTAKLACRAVKDDVSGYLRPHQLGFGTRLGCEAAIHATRMFVMDPENVDGILLKLDIRNAFNSLERDVLLSEVKENIPALYPFLHQVYRYPSNLFFNNTPILSQVGAQQGDPLGPLVFGLAIHKVLLEVKSSLNVWYLDDGTIGGKPDDVLQDLEALIPRLKVLGLEVNPSKCELFPCSNLSRLHFTRFSTLLPGLKEISTSDFNLLGSPIFLDAVPEAVTSRKQLLLTAHERLKDLSAHVAIILLRMCFALPKINYLLRTTPTWLCPEEISSFDLALKTVVESVLNVSLEERQWDQASLPIRYGGLGVRRARDVGLPAFLASAHGVANLVTVLLCSDGVEASIPFVSGARSAWLALNSGAIIPEKTHVQRVWDEVGAKRLQEQLLEDATGANMARLRAVSQPESGAWLHALPSPHLGTLLDDDSLRVAVALRLGCKVCEPHKCTCGSLVEADGHHALSCRRCTGRFPRHHALNDIVRRALVSANIPCVLEPPGLCRSDGKRPDGLTLVPWKNGKCLVWDATCVSTVAASHLSRTIHSPSAAAEDAGLKKRLKYAAMEPLYHFVPIAVETLGCWGIEAKELIREIGQRLNIKTGDSRSGSFLVQRMAIAIQRGNAASVMGTFAPGTVRGGLFD

SEQ ID NO: 17394 - protein, 1003 aa, Cosmia trapezina
MCCKIMLDLFLCKEVHYYFFLVVILLVSSFFLLYLLLMRVLYFLDAQMSALSTMLSCPHCPGSSRTFNSQGIKIHIGRMHKHVQQPVATPQTSSTVTDSQPVSQVPLVSHPCPLERLSALKMCTPVLRHIPKGSRNQAAGKLCDILDKCVSCNGVDEWGALLTFAFVGLRVPSRVAPGNMTTKVKANIESVGADRFVDESSCVADFSKPRGIRKAIESKVFEGDLRGAVRLLVSDDSFAQHDPGTLDALTVKHPSPSRPLNFPSAPDSSFPRVTASVEDVTLALRSFNSGSAAGMDGIRPGHLKELTSGSAGENGRRLLESLTKLVNFLMSGQLNPVVCPYLYGASLCALKKKDGGLRPIAIGSVFRRLSAKLACRSVRVAMSEYFQPHQLGFGTPRGCEAAIHATRAFVMDPKNSDCVVLKLDIRNAFNTLERDVLLSEVKDKIPSLYPFLYQVYYSPSNLFFNDSLISSQVGAQQGDPLGPLVFNLAIHKVISGLKSSLNLWYLDDGIIGGSLEEVCQDLEVLVPQLKELGLEVNPSKCEFFPCGFGARSHFSLFGCLLPGLKELSPLSFSLLGSPIFLDGVPEAISSRTQLLLNARERLKDLSAHVAILLLRMCFALPKITYLLRTAPTWLCPEEVCSFDCALKSTVESILNVSFNDTQWRQAALPIRHGGLGVRCVHDVGLPAFLASTHGVADLVTVILDSNGDGANIPFMLDAGSAWSVLNMGAASPDATHVQRAWDDVSSRLIQEQMMVGSSGADLARLRAVSQPESGAWLHALPSPHLGTLLDDDSLRVAVALRLGCKVCEPHRCTCGSTVEADGHHALSCRRCSGRFPRHHALNDIVRRAFVSADVPCVLEPPGLSRSDGKRPDGLTLVPWKNGKCLIWDATCVSTVAASHLGRTVLSPSAAAEDAAERKKVKYAPLATRYHFVPIAVETMGCWGTEARKLIGEIGHKLREKTGDSRSGSFLVQRLAIAIQRGNAASVMGTFAPGTVRGGFFENW

SEQ ID NO: 17395 - protein, 958 aa, Spilarctia lutea
MSLAPIQLSCPHCPESPRTFSEHGLRVHVGRMHRGVRQACAGSQVSPALTFASCPSGQTAQTFLPDRASLERLAYLKKCVPVLRHVPRGARNQAAGRLCDVIDLCLANNGIDEWSELLCFAYSALRVPAKELPGNMTSKVKANINSSRHWRGEGLADPGSSFGSRSVGKIIEARVFEGDLRGAARLLLSDDTFARRDRDTLDALKEKHPEPSRPLSFPSVLDLTIPALSVTAEDVVTALTSFYGGSAGGLDGIRPAHLRELTSVAAGDNGRRLLECITRLVNFLLSGRLNPLICPYLYGASLCALVKRDGGIRPIAVGSIFRRLVAKLACRAVRENMSCYLQPHQLGFGTRLGCEAAIHATRAFVMNQENEGSILLKLDIRNAFNTLERDVLLREVKEHIPSLFPFLHQVYSHPSNLFFDDNLIISQVGAQQGDPLGPLVFSLAIHKVVTEIKSPLNVWYLDEGTIGGKPEDVLQDLEILIPRFRDLGLEVNSSKCEFFPCGGGGRTQLSRLAAVLPGLRELSSLDFTLLGSPIFLCAVPGAIDSRTRLLLTTHERLGDLSAHVAIVLLRTCFALPKINYLLRTTPTWLCPEEVSSFDRALKSVVESVLNVSMDERQWSQAGLPIRCGGLGVRSMRGVDLPAFLASAHGVANLVTVLLGSHGGGVSIPFLVDATSAWLDLNSGEACPGAAHMQRSWDEVGVKRIQGDLLEGSSGADMARLRAVSRSEAGAWLHALPSPYLGTLLDDNSLRIAVALRLGCKACERHVCTCGSMVEADGHHALSCRRCSGRFSRHHALNDVVRRALISAGIPCLLEPPGLSRSDGKRPDGLTLVPWRNGRCLIWDATCVSTVAASHLSRTICSPSAAAEDACYKKRQKYAALEQQYYFVPVAVETMGSWAADTLRFVGELGRRLALLSGDSRSGSFLVQRLAIAIQRGNAASLMGTFPPEAIRDGLSGDL

SEQ ID NO: 17396 - protein, 960 aa, Apamea monoglypha
MYKDAQMSALSAMLSCPHCPGSSRAFSSHGLKVHIGRMHRNARQPVVAPRTSSTVTDSQLVSQVPPVSRPCPLERLSALKVSTPVLRHVPKGARNQAAGKLCDIIDKCISCNGVGDWGALLTFAFGGLRVPSRDAPGNMTAKVRANVESVGSDQFLDESDCVAGVTKSRGIRKAIESKVFEGDLRGAVRLLVSDDSFAQHDPDTLSALTVQHPSPSRPLNFPSAPDLSFPRMTASVEDVALALGSFYSGSAAGLDGIRPAHLKELTSGSAGENGRRLLECLTKLANFLMSGQLNPVVCPYLYGASLCALKKKDGGLRPIAIGSVFRRLTAKLACRSVRVAMSEYLQPHQLGFGTRRGCEAAIHATRAFVMNPENSDCLVLKLDIRNAFNTLERDVLLSEVKDKIPSLYPFLYQVYYYPSNLFFSDSLISSQVGAQQGDPLGPLVFSLAIHKVISGLKSSLNLWYLDDGIIGGSPEEVCQDLELLVPQLKELGLEVNPSKCEFFPCGVGARTHFSRFGSHLPGLKELSPLSFSLLGSPIFLDGVPEAISSRKQLLLSARERLKDLSAHVAILLLRMCFALPKVTYLLRTAPTWLCPEEVCSFDCALKSTVESILNVSFNDAQWRQAALPIRYGGLGVRCVHDVGLPAFLASTHGVADLVTVILDSNGDGANIPFMLDAGSAWSVLSMGAARPDATHIQRAWDDVASRLIQEQMLVGSSGADLARLRAVSQPESGAWLHALPSPHLGTLLDDDSLRVAVALRLGCKVCEPHRCTCGSMVEADGHHALSCRRCSGRFPRHHALNDIVRRAFVSADVPCLLEPPGLCRTDGKRPDGLTLVPWRDGKCLIWDATCVSTVAASHLGRTVHSPSAAAEDAAERKRVKYAPLVVRYHFVPIAVETMGAWGAEARNLISEIGHKLRDKTGDSRSGSFLVQRLAIAIQRGNAASVLGTFAPGTVRGGLFD

SEQ ID NO: 17397 - protein, 955 aa, Eilema depressum
MSVNLTPALTCPHCPGCSRAFSARGLKVHIGRMHKRAQRSDAVSLVSPADAYATTSAEQGLPAAPPSQSVLERLASFRGSVPVLRHIPKGARNQAAGKLCAIVDACVACNGVDEWGALLSFAYTALRVPAKESPGNVTSKVKANVLSAGHNDFEIAAPSAVTGSYSLKKRIEAKVFEGDLRGAVRLVVSDDSFAQRDPGTLAALQDKHPAPSRPLSFPPDPGVPIAAVKVAVEDVSSALGSFYAGSAAGLDGIRPGHLKELTSVSAGENGRRLLESLTSLVNFLLSGQLNLQVCPYLYGASLFALAKKDGGLRPIAVGSVFRRLVAKLACRAVKEEMAEYLQPHQLGFGTRLGCEAAIHAARAFVMNPRNEGSILLKLDIRNAFNTLERDVLLSEAKENIPSLYPFLHQVYRLPSNLFFDDKLILSEVGAQQGDPLGPLVFSLAIHKAIRDLKSTFNIWYLDDGTIGGKPEDVFQDLEALIPSLRNLGLEVNPSKCEFFPCGTEARTHYSHFNSLLPGLKELSSSDFSLLGSPIFLAAVPEAITTRKQLLLTAHERLKGLSAHVAIVLLRMCFALPKVTYLMRTAPTWLCPEEVSSFDAALKSVVESVLNVSLDESQWIQAALPIRCGGLGVRRVRDVGLPAFLASAHGVETLVTTLLNSNGDGEIMPFVSGAMSAWSALSAGASIPEGMHLQRAWDEVGVKRLQGKLLGDATGADKARLRAVSQPESGAWLQALPSPHLGTLLNDDSLRVAVAFRLGCKVCEPHICTCGSTVEADGHHALSCRRCTGRLPRHHALNDIVRRALISANVPCVLEPPGLSRSDGKRPDGLTLVPWKNGKCPIWDATCVSTVAASHLSRTVHSPSAAAEDASLKKRLKYADLEPLYNFVPVAVETLGSWGKEAKAFVKELGQRLNETTGDCRSGSFLVQRMAVAIQRGNAASVMGTFPRGTVTDGLL

SEQ ID NO: 17398 - protein, 997 aa, Cosmia trapezina
MLDIFLCKENHYYYFLVVILLVSSFYLLYLLLMRVLYFLDAQMSALSTMLSCPHCPGSSRTFSSHGIKIHIGRMHKHMQQPVATPQTSSTVTDSQPMSQVPLVSRPCPLERLSALKMCTPVLRHIPKGSRNQAAGKLCDILDKCVSCNGVDEWGALLTFAFVGLRVPSRVAPGNMTTKVKANIESVGADRFVDESSCVADFSKPRGIRKAIESKVFEGDLRGAVRLLVSDDSFAQHNPGTLDALTVKHPSPSRPLNFPSALDSSFPRVTASVEDVTLALRSFNSGSAAGMDGIRPGHLKELTSGSAAENGRRLLESLTKLVNFLMSGQLNPVVCPYLYGASLCALKKKDGGLRPIAIGSVFRRLSAKLACRSVRVDMAEYFQPHQLGFGTPRGCEAAIHATRAFVMDPKNSDCVVLKLDIRNAFNTLERDVLLSEVKDKIPSLYPFLYQVYYSPSNLFFNDSLISSQVGAQQGDPLGPLVFNLAIHKVISGLKSSLNLWYLDDGIIGGSLEEVCQDLEVLVPQLKELGLEVNPSKCEFFPCGFGARSHFSLFGCLLPGLKELSPLSFSLLGSPIFLDGVPEAISSRTQLLLNARERLKDLSAHVAILLLRMCFALPKITYLLRTAPTWLCPEEVCSFDCALKSTVESILNVSFNDTQWKQAALPIRHGGLGVRCVHDVGLPAFLESTHGVADLVTVILDSNGDGANIPFMLDAGSAWSVLNMGAASPDATHVQRAWDDVSSRLIQEQMMVGSSGADLARLRAVSQPESGAWLHALPSPHLGTLLDDDSLRVAVALRLGCKVCEPHRCTCGSTVEADGHHALSCRRCSGRFPRHHALNDIVRRAFVSADVPCVLEPPGLSRSDGKRPDGLTLVPWKNGKCLIWDATCVSTVAASHLGRTVLSSSAAAEDAAERKRVKYAPLATRYHFVPIAVETMGCWGTEAKKLIGEIGHKLREKTGDSRSGSFLVQRLAIAIQRGNAASVMGTFAPGTVRGGFFEN

SEQ ID NO: 17399 - protein, 982 aa, Arctia plantaginis
MCFFFFFFLIYIYCIRVCFVGIINMSSLLSSQSTCPHCQGSARIFSSRGLKIHIARIHGHQPRTSPTDVQQDTSSSDVGQRPRPGVVPQHRCPLERLATCKSSIPVMRHIPKAARNLAAAKLSSIIDGCVDGNGVEDWFALLSFAFSALRVPSKSLPGNMTSKVKANINSSGFYQFEDECDGAPTNRRSCSIQKTIENKVFEGDLRGAVRLLMSNEKFAQGGSETLAALKLKHAGPSRPLKPPPAPDASCAFVTATPEDVAQALNSFYSGSAAGLDGIRPGHLKELTSRAAGENGQRLMGSLAKLCNFLLSGQLNPEVCPFMYGASLCALNKKDGGLRPIAVGSVFRRLTAKLACCSVREEMAEYLQPHQLGFGTRRGCEAAIHATRTYVMDPKNSHCVVLKLDIRNAFNTLERDVLLSAVKDEIPSLYPFLHQVYKSPSNLFYNKDLILSQVGAQQGDPLGPLVFSLAIHKIISKLESPLNLWYLDDGTIGGQPEVVAKDIMVLIPRLKELGLEVNPAKCEFFPCSTEARTHFTHFEMFFPGLNKITPGTFSLLGSPIFLEAVPEAIAARQNLLLATRERLKHLSPHVEVLLLRMCFAVPKITYLLRTTPTWLCPEAVSLFDGALRDTAESILNVSLDEHQWIQAALPIGYGGLGLRRVLDVGLPAFLASAHGVADLVAVTLSPNGDRASIPYVSEAVSAWSAVNAGEPFPVTLHVQRAWDDIGAKGLLKQMLDTAGGTDLARLRAVSQPESGAWLHALPSPHLGTLLDGDSLRVAVALRLGCRVCEPHRCTCGSMVGADGLHALSCRRCAGRFSRHHALNDIVRRALISANVPCVLEPSGLSRSDGKRPDGLTLVPWKNGKCLVWDACVSTVAASHLSRTVQAPAAAAEDAASRKRSKYAAMETHYYFVPIAVETLGSWGSEAKKLIAEIGRRVREKSGDSRSGSFLVQRMSVAIQRGNAASIMGTFAPGATRGGLYDLT

SEQ ID NO: 17400 - protein, 959 aa, Arctia plantaginis
MSSLLSSQSTCPHCQGSARIFSSRGLKIHIARIHGHQPRTSPTDVQQDTFSIDVGQRPRPEVVPQHRCPLERLATCKSSIPVMRHIPKAARNLAAAKLSSIIDGCVDGNGVEDWFALLSFAFSALRVPSKSLPGNMTSKVKANINSSGFYQFEDECDGAPTNRRSCSIQKTIENKVFEGDLRGAVRLLMSNDKFAQGGSETLAALKLKHAGPSRPLNPPPAPDASCAFVTATPEDVAQALNSFYSGSAAGLDGIRPGHLKELTSRAAGENGQRLMGSLAKLCNFLLSGQLNPEVCPFMYGASLCALNKKDGGLRPIAVGSVFRRLTAKLACCSVREEMAEYLQPHQLGFGTRRGCEAAIHATRTYVMDPKNSRCVVLKLDIRNAFNTLERDVLLSAVKDKIPSLYPFLHQVYKSPSNLFYNKDLILSQVGAQQGDPLGPLVFSLAIHKIISKLESPLNLWYLDDGTIGGQPEVVAKDIMVLIPRLKELGLEVNPAKCEFFPCSTEARTHFTHFEMFFPGLSEITPGTFSLLGSPIFLEVVPEAIAARQNLLLTTRERLKHLSPHVAVLLLRMCFAVPKITYLLRTTPTWLCPEAVSLFDGALRDTAESILNVSLDEHQWIQAALPIRYGGLGLRRVLDVGLPAFLASAHGVADLVAVTLSPNGDRASIPYVSEALSAWSAVNAGEPFPVTLHVQRAWDDIGAKGLLKQMLDTARGTDLARLRAVSQPESGAWLHALPSPHLGTLLDGDSLRVAVALRLGCRVCEPHRCTCGAMVEADGLHALSCRRCAGRFSRHHALNDIVRRALISANVPCVLEPSGLSRSDGKRPDGLTLVPWKNGKCLVWDATCVSTVAASHLSRTVQAPAAAAEDAASRKQSKYAAMETHYYFVPIAVETLGSWGSAAKKLIAEIGRRVREKSGDSRSGSFLVQRMSVAIQRGNAASIMGTFAPGATRGGLHDLT

SEQ ID NO: 17401 - protein, 942 aa, Mythimna ferrago
MPGSSRVFSAHGLKVHIGRMHKHARHSSAVSQVPTAATVNTFASAHSPTQSPLDGLAACKASIPVLRHIAKGARNQAAGKLCDLIDSCVASNGVEEWSALLSFAYTSLRVPAKELPGNVTSKVKANIMSPLHCHGGEVDAGRRSGSRSIKKSIETKVFEGDLRGAVRLMMSDDLFARGDADTLASLKLKHPDPSRPLSFPPDPDPSFTALSVTVEDVVSALGSFYSGSAAGLDGIRPGHLKELISVSAGENGRRLVGSLTRLVNFLLSGQLNPCVCPFKYGASLFALKKKDGGVRPIAVGSVFRRLTAKLACRAVKEDMARYLQPHQLGFGTRLGCEAAIHATRAFVMDPENEDSILLKLDIRNAFNTLERDVLLSEVKEKIPSLYPFLHQVYRLPSNLFSDNSLIPSKVGAQQGDPLGPLVFSLAIHKTIVLVKLKSGLNLWYLDDGTIGGRPEDVFQDLETLVPRLRDLGLEVNPSKCEFFPCSTEARTHFSRFDSFLPGLRELSRSDFNLLGSPIFLSAVPEAITSRTQLLLFAYKCLKDLSAHIAIVLLRMCFALSKITYLLRTTPTWLCPEEVSSFDNALKSVVESVLNVSLDGPQWRQAALPIRCGGLGVRCARDVGLPAFLASAHGVANLVTVLLNTNGDGGSIPFASDAVSAWLTLNPGATIPESEHVQRAWDDGGVILLQEQLLEDALGVDRARLRAVSRPESGALLRAIPSPHLGTLLDDDSLRVAVALRLGCKVCEPHTCTCGSMVEADGHHALNCRRCTGRFPRHHALNDIVRRALISANIPCVLEPSGLSKSDGKRPDGLTLVPWKNGKCLIWDATCVSTVAASHLSLTMHTASAAAEDACSKKRLKYATLEQLYHFVRVAVETLGSWNTEARSFVRDLGRRLGEATGDSRSRSFLVQRMAVAIQRGNAASVMGTFAPGTIRGGLFIDI

SEQ ID NO: 17402 - protein, 949 aa, Mythimna impura
MSLPSILTCPHCPGSSRVFSAHGLKVHIGRMHKHALRSGAVSQVPPIDTVNTSSSGQVRPAHSPTQSPLDRLASCKASIPVLRHIPKGARNQAAGKLCDILDSCVASNGVDEWSALLSFAYTSLRVPAKELPGNMTSKVKANIMSPVHYHEKEVDANRRSGSRSIKKSIETKVFEGDLKGAVRLLMSDDTFAREDADTLASLKLKHPDPSRPLSFPPDPDPSFTALSVTVEGVISALGSFYTGSAAGLDGIRPGHLKELISVSAGENGRRLVGGLTRLANFLLSGQLNPCVCPFLYGASLFALEKKDGGIRPIAVGSVFRRLTAKLACRAVKEDMAHYLQPHQLGFGTRLGCEAAIPATRAFVMDPENEDSILLKLDIRNAFNTLERDVLLSEVKEKIPSLYPFLHQVYRLPSNLFSDNSLILSKVGAQQGDPLGPLVFSLAIHKAIIELKSGLNVWYLDDGTIGGKPEDVFQDLEALVPRLRDLGLEVNPSKCEFFPCSTEARTHFSRFNSFLPGLRELSCSDFNLLGSPIFLGAVPEAITSRTRLLLSAHERLKDLSAHVAIVLLRMCFALPKITYLLRTTPTWLCPEEVSSFDNTLKLVVESVLNVSLDGPAIRYGGLGVRCARDVALPAFLASAHGVANLVTVLLNTNGDGGSMPFVSDAVSAWLTLNSGATIPDSVHVQRTWDDRGVKLLQEQLLEGALGVDKARLRAVSQPESGAWLQAIPSPHLGTLLDDDSLRVAVALRLGCKVCEPHTCTCGSMVEADGHHALNCRRCTGRFPRHHALNDIVRRALISANVPCVLEPPGLSRSDGKRPDGLTLVPWKNGKCLIWDATCVSTVAASHLSRTMHTASAAAEDACSKKRLKYAALDQLYHFVPVAVETLGSWSTEAKCFVGDLGRRLGEATGDSRSRSFLVQRMAIAIQRGNAASVMGTFAPGTIRGGLFIDD

SEQ ID NO: 17403 - protein, 959 aa, Eilema depressum
MSTRPTELTCPHCPGSSRVFSVHGLRVHVGRMHKRVLHPGGAVSLVSPHDAGIAAPVEQEAPAPPSAPGSLDKLASVRGVIPVLRHIPKGARNQAAGRLSDIIESCVAHNGVDEWSGLLSFAYSALRVPARESPGNMTSKVKANVLSSCHFDDIEVVASTSVSATRTIKKHIESKVFEGDLRGAVRLLMSDDSFAQRDPDTLAALELKHPSPSRPLSFPPDPGLPCTVATVTIEDVSSALASFYAGSAAGLDGIRPGHLKELTSVSAGENGKRLLGCLTELVNFLVSGQLNPLVCPYLYGASLFALAKKDGGVRPIAVGSVFRRLTAKLACRGVKEDMAGYLQPHQLGFGTRLGCEAAIHATRAFVMDPKNEGSVVLKLDICNAFNTLERDVLLREVKEKIPSLYPFLHQVYRLPSNLFLDNNLILSKVGAQQGDPLGPLVFSLAIHKAIRDLRSSLNIWLLCLDDGTIGGKPEEVLQDLEVLVPSLRDLGLEVNPSKCEFFPCGTGARTHFSHFHSVLPGLKELSLSNFYLLGSPIFLSAVPEAINARKQLLLAAHERLKGLSAHVALVLLRLCFAVPKITYLLRTTPTWLCPDEVVCFTDSLKSVVESVLNVSLDDTQWSQVALPIRCGGLGIRRARDVGLPAFLASAHGVANLVTRLLTANGDGAVIPFALDAVSAWSVLNAGASIPEDVHLQRSWDDEGVRRLQNLLLECAAGADKARLRAVSQPESGAWLQALPSPHLGTLLDDDSLRVAVAFRLGCKVCEPHVCTCGSMVEADGHHALSCRRCTGRFPRHHALNDIVRRALVSANVPCVLEPPGLSRSDGKRPDGLTLVPWQNGKCLIWDATCVNTVAASHLSRTVHSPSAAAEDASYKKTLKYADLKPLYHFVPIAVETLGSWSKEAKILVRDIGSRLIETTGDSRSGAFLVQRLAIAIQRGNAASVMGTFAPGAVRGGLFD

SEQ ID NO: 17404 - protein, 952 aa, Ephestia elutella
MSFLSPMLTCPHCPGSLRTFSSHGLKIHIGRKHKGISSIVAPRPADAGITGISLGQSTPSASPRQCPLDALAGLKGSTQVLRHIPKGARNQAAGKLSEIVDRCVESNEMDDWFALLSFAYTALRVPSKALPGNMTSKVKNNIESSGNNKFEDVSDIAAEGFKPRSTRKIIESKVFEGDLRGAVRLLVSDDTLAKQGPDTLAALKLKHPGPSRPLSSPPAPDTSYTPKSFTVDDVTLALTSFYSGSAAGSDGIRPGHLKELTSSCAGENGRRLMESLTRLSNFMLSGRVNVQVCPYLYGAALCALSKRRGLRPIAIGSVFRRLAAKLACRAVKEIMSEYLQPHQLGFGTRLGCEAAIHSTRAFVADADNAKCVVLKLDIYNAFNTLERDVLLCEVRDKLPSLYPFLYQVYQSPSNLVYNNNLILSQVGAQQGDPLGPLVFSLAIHKIVSDLKSPLNIWYLDDGTLGGEPETVYGDLLTLIPRFKELGLEVNTSKCEYFPCSSEARSHSAHFSTLLPGLRELSKTNFSLLGSPIFVEAVPEAINSRRQLLLMAKERLQNISAHVALILLRTCFALPKISFLLRTAPTWLCSKEISDFDGSLKSTVESILNVQLDETQWKQAALPIRLGGIGVRCARDVGMPAFLASAHGVAGLVAIIISSKGSKVSIPYVSDAELAWAADNLGAPSPISLSVQRAWDDVGSEKVHKELLGTAAGADLARLKAVSQPESGAWLHALPSPHLGTLLDDDSMRVAVALRLGSRVCEPHKCVCGSMVESDGYHALSCRRCSGRFPRHHALNDIVRRAFVTANVPCMLEPPGLSRSDGKRPDGLTLVPWRHGRCLIWDATCVSTVAISHIGRTACTAAAAAEDAANKKREKYAAMEPKYIFVPIAVETMGSWGSDAKRLLKEIGQRIAVNTGDSRSGSFLVQRMAIAIQRGNAASVLGTFAPETLRGGL

SEQ ID NO: 17405 - protein, 947 aa, Ephestia elutella
MLTCPHCPGSLRTFSSHGLKIHIGRKHKGISSIVAPRPADAGITGISLGQSTPSASPRQCPLDALAGLKGSTQVLRHIPKGARNQAAGKLSEIVDRCVESNEMDDWFALLSFAYTALRVLSKALPGNMTSKVKNNIESSGNNKFEDVSDIAAEGFKPRSTRKIIESKVFEGDLRGAVRLLVSDDTLAKQGPDTLAALKLKHPGPSRPLSSPPAPDTSYTPKSFTVDDVTLALTSFYSGSAAGSDGIRPGHLKELTSSCAGENGRRLMESLTRLSNFMLNGRVNVQVCPYLYGAALCALSKKDGGLRPIAIGSVFRRLAAKLACRAVKEIMSEYLQPHQLGFGTRLGCEAAIHSTRAFVADADNAKCVVLKLDIYNAFNTLERDVLLCEVRDKLPSLYPFLYQVYQSPSNLVYNNNLILSQVGAQQGDPLGPLVFSLAIHKIVSDLKSPLNIWYLDDGTLGGEPETVYGDLLTLIPRFKELGLEVNTSKCEYFPCSSEARSHSAHFSTLLPGLRELSKTNFSLLGSPIFVEAVPEAINCRRQLLLMAKERLQNISAHVALILLRTCFALPKISFLLRTAPTWLCSKEISDFDGSLKSTVESILNVQLDETQWKQAALPIRLGGIGVRCARDVGMPAFLASANGVAGLVAIIISSKGSKVSIPYVSDAELAWAADNLGAPSPISLSVQRAWDDVGSEKVHKELLDTAAGADLARLKAVSQPESGAWLHALPSPHLGTLLDDDSMRVAVALRLGSRVCEPHKCVCGSMVESDGYHALSCRRCSGRFPRHHALNDIVRRAFVTANVPCMLEPPGLSRSDGKRPDGLTLVPWRHGRCLIWDATCVSTVAISHIGRTACTAAAAAEDAANKKREKYAAMEPKYIFVPIAVETMGSWGSDAKRLLKEIGQRIAVNTGDSRSGSFLVQRMAIAIQRGNAASVLGTFAPETLRGGL

SEQ ID NO: 17406 - protein, 953 aa, Ephestia elutella
MSSLSPMLTCPHCPGSLRTFSSHGLKIHIGRKHKGISSIVAPRPADAGVSGISLGQSTPSASPRQCPLDALAGLKGSTQVLRHVPKGARNQAAGKLSEIVDRCVESNEVDDWFALLSFAYTALRVPSKALPGNMTFKVKSNIESSGNNKIENVSDIAAEGFRPRSTRKIIESKVFEGDLRGAVRLLVSDDTLAKRGPDTLAALKLKHPGPSRPLSSPPAPDTSYTAESFTVDDVTLALTSFYSGSAAGSDGIRPGHLKELTSSCAGENGRRLMESLTRLSNFMLSGRVNVQVCPYLYGAALCALSKKDGGLRPIAIGSVFRRLAAKLACRAVKEIMSEYLQPHQLGFGTRLGCEAAIHSTRAFVADADNAKCVVLKLDIYNAFNTLERDVLLCEVRDKLPSLYPFLYQVYQSPSNLVYNNNLILSQVGAQQGDPLGPLVFSLAIHKIVSDLKSPLNIWYLDDGTLGGEPETVYGDLLTLIPRFKELGLEVNTSKCEYFPCSSEARSHSAHFFTLLPGLRELSKTNFSLLGSPIFVEAVPEAINSRRQLLLMAKERLQNISAHVALILLRTCFALPKISFLLRTAPTWLCSKEISDFDGSLKSTVESILNVQLDGTQWKQAALPIRLGGIGVRCARDVGMPAFLASAHGVAGLVAIILSSKGSKVSIPYVSDAELAWAADNLGAPSPISLSVQRAWDDVGSEKVHKELLGTASGADLARLKAVSQPESGAWLHALPSPYLGTLLDDDSMRVAVALRLGSRVCEPHKCVCGSMVESDGYHALSCRRCSGRFPRHHALNDIVRRAFVTANVPCMLEPPGLSRSDGKRPDGLTLVPWRHGRCLIWDATCVSTVAISHIGRTACTAAAAAEDAANKKREKYAAMEPKYIFVPIAVETMGSWGSDAKRLLKEIGQRIAVNTGDSRSGSFLVQRMAIAIQRGNAASVLGTFAPETLRGGL

SEQ ID NO: 17407 - protein, 956 aa, Xestia xanthographa
MSSSSLSPCPHCSDSLRLFSSRGLKIHIGRTHKDATSTILSGSQVGFSASSTLLSRGPSQQGVSFQNLPKLKRNTPVLRHIPRGARSLAAEKLSQIINSCVDNNGVEEWYSLLTFSFKALKSPSRSDKGNMVQKVKNNIGSFGHCCLESPEIDEGKSFGSHSISRAIETKVHEGDLRGAVRLLMSDDTMAQSAPETLDALKLKHPSPSRPLVFPDPPDQSFLPLTVTVEDVSLALGSFYSGSAAGLDGIRPGHLKELTSSSAGDNGQRLLESLCRLCNFLLSGQLNREVCPYLYGASLCAIAKKDGGLRPIAIGSTFRRLTAKLACRAVKEEMAAYLQPHQLGFGTLLGCEGAIHATRAFATGPENANCIIVKLDVRNAFNTLERDVLLREVRGRTPSLYPFLHQVYEAPSNLYFGDALIKSQVGAQQGDPLGPLTFSLAIQASIHDLKSPLNVWYLDDGTIGGKPEDVEQDIRTLIPRLRELGLEVNSAKCEFFPCGPEAVPKFSHFSSFLPGLTMLSPNSFNLLGDPIFPDAVPEALEDRKRNLLDVHRRLKNLSAHVALVLLRMCFAVPKLTYFLRTAPTWWFPQSLSSFDEALKETVESILNVSLNEAQWAQAALPIRHGGLGVRRAQDVGLPAFLASAHGVTDLVARILSLDGEQVSIPFAADALVAWSGHCPGGIIPEKPQVQRSWDDVGAKAVLAGLIDQAEGVELARLKAVSRSESGAWLQALPSPHLGTLLDGDSLRVAVALRLGCDVCEPHICICGSRVEANGHHALSCCRCSGRFPRHHALNDIIRRALVGANIPCVLEPPGLCRLDGKRPDGLTLVPWQKGKCLLWDATCVSTFAASHLPRTVGSPGAAAESAALKKRVKYATLEPRYYFVPLAVETTGCWGSDAVKFVAEIGRRLRDRGGDPRSGSFLVQRLALAIQRGNAASVMGSFAPGTSRDCGLKIIMT

SEQ ID NO: 17408 - protein, 924 aa, Xestia xanthographa
MHKDATSTILSGSQAGFSARSTLLSRGPSQQGVSFQNLPKLKRNTPVLRHIPRGARSLAAEKLSQIINSCVDNNGVEDWYSLLTFSFKALKTPSRSDKGNMVRKVKNNIGSFGHCCLESPEIDERKSFGSHSISRAIETKVHEGDLRGAVRLLMSDDTMAQSAPETLDALKLKHPSPSRPLVFPDPPDQSFLPLTVTVEDVSLALGSFYSGSAAGLDGIRPGHLKELTSSSAGDNGQRLLESLCRLCNFLLSGQLNREVCPYLYGASLCAIAKKDGGLRPIAIGSTFRRLTAKLACRAVKEEMAAYLQPHQLGFGTLLGCEAAIHATRAFATGPENANCIIVKLDVRNAFNTLERDVLLREVRGRTPSLYPFLHQVYEAPSNLYFGDALIKSQVGAQQGDPLGPLTFSLAIQASIHDLKSPLNVWYLDDGTIGGKPEDVEQDIRTLIPRLRELGLEVNSAKCEFFPCGPEAVPKFSHFSSFLPGLTMLSPNSFNLLGAPIFPDAVPEALEDRKRNLLDAHRRLKNLSAHVALVLLRMCFAVPKLTYFLRTAPTWWFPQSLSSFDEALKETVESILNVSLNEAQWVQAALPIRHGGLGVRRAQDVGLPAFLASAHGVTDLVARILSLDGEQVSIPFAADALAAWSGHCPGGIIPEEPQVQRSWDDVGAKAVLAGLIDRAEGVELARLKAVSRSESGAWLQALPSPHLGTLLDGDSLRVAVALRLGCDVCEPHICICGSRVEANGHHALSCCRCSGRFPRHHALNDIIRRALVGANIPCVLEPPGLCRLDGKRPDDLTLVPWQKGKCLLWDATCVSTFAASHLPRTVGSPGAAAESAAVKKRVKYAILEPRYYFVPLAVETTGCWGSDAIKFVAEIGRRLRDRGGDPRSGSFLVQRLALAIQRGNAASVMGSFAPGTSRDCGLLMT

SEQ ID NO: 17409 - protein, 954 aa, Cosmia trapezina
MSSSSLSPCPHCPDSSRLFSSRGLKIHIGRMHKDETSAIKSGSQVAFAAGSTLSPGGSLQQGVSFQNLAKLKRDTPVLRHIPRGARSLAAEKLSQIINSCVVNNGVEDWYSLLTFSFKALKTPSRSDKGNMVQKVKNNIGSFGHCCLDSPEIDGGKSFGSHSISRAIETKVHEGDLRGAVRLLMSDDTIAQSAPETLDALKSKHPSPSRPLVFPEPPDQSCLSLSVTVEDVSLALGSFYSGSAAGLDGIRPGHLKELTSSSAGDNGQRLLESLCRLCNFLLSGQLNREVCPYLYGASLCAITKKDGGVRPIAIGSTFRRLTAKLACRAVKEEMAAYLQPHQLGFGTRLGCEAAIHATRAFATRTENANCIIVKLDLRNAFNTLERDVLLREVRGKTPSLYPFLHQVYEAPSNLYYGDSLIKSQVGAQQGDPLGPLTFSLAIQASIHDLKSPLNVWYLDDGILGGKPEDVEQDIRTLIPRLRELGLEVNSSKCEFFPCGPEAEPGFSHFSSFLPGLTILSPISFSLLGAPIFPVAVPEALEDRKRNLLDAHKRLKDLSAHVALILLRMCFAVPKLTYFLRTAPTWLFPQSLSSFDEALKEAIESILNVSLNEAQWAQAALPIRHGGLGARRAQDVGLPAFLASAHGVTDLVARILSLDGEQVSIPFAADALAAWSGHCPGSIAPKEPQVQRSWDDVGAKAVLAGLIDRAEGVELARLKAVSRSESGAWLQALPSPHLGTLLDGDSLRVAVALRLGCDVCEPHTCICGSRVEANGHHALSCCRCSGRFPRHHALNDIVRRALVGANIPCVLEPPGLCRLDGKRPDGLTLVPWQKGKCLLWDATCVSTFAASHLPRTVGSPGAAAESAALKKRAKYAALEPKYYFVPLAVETTGCWGSDAIKFVAEIGRRLRERGGDPRSGSFLVQRLALAIQRGNAASVMGSFAPGTSRDCGLLLT

SEQ ID NO: 17410 - protein, 950 aa, Cosmia trapezina
MSSSSLSPCPHCPDSSRLFSSRGLKIHIGRMHKNETSAIKSGSQVAFAAGSTLSPGGSLQQGVSFQNLAKLKRDTPVLRHIPRGARSLAAEKLSQIINSCVVNNGVEDWCSLLTFSFKALKTPSRSDKGSMVQKVKNNIGSFDHCCLDSPEIDEGKSFGSRSISRAIETKVHEGDLRGAVRLLMSDDTIAQSAPETLDALKSKHPSPSRPLVFPEPPDRSCLPLTVTVGDVSLALGSFYSGSAAGLDGIRPGHLKELTSTSAGDNGQRLLESLCRLCNFLLSGQLNREVCPYLYGASLCAITKKDGGVRPIAIGSTFRRLTAKLACRAVKEEMAAYLQPHQLGFGTRLGCEAAIHATRAFATGTENANCIIVKLDLRNAFNTLERDVLLREVRGRTPSLYPFLHQVYEAPSNLYYGDSLIKSQVGAQQGDPLGSLTFSLAIQASIHDLKSPLNVWYLDDGILGGKPEDVEQDIRTLIPRLRELGLEVNSSKCEFFPCGPEAEPGFSHFSSFLPGLTMLSPISFSLLGAPIFPVAVPEALEDRKRNLLDAHKRLKDLSAHVALILLRMCFAVPKLTYFLRTAPTWWFPQSLSSFDEALKETIESILNVSLNEAQWAQAALPIRHGGLGVRRAQDVGLPAFLASAHGVTDLVARILSLDGEQVSIPFAADALAAWSGHCPGSIAPKEPQVQRSWDDVGAKAVLAGLINRAEGVELARLKAVSRSESGAWLQALPSPHLGTLLDGESLRVAVALRLGCDVCEPHICICGSRVEANGHHALSCCRCSGRFPRHHALNDIVRRALVSANIPCVLEPPGLCRLDGKRPDGLTLVPWQKGKCLLWDATCVSTFAASHLPRTVGSPGAAAESAALKKRAKYAALEPKYYFVPLAVETTGCWGSDAIKFVAEIGRRLRERGGDPRSSSFLVQRLALAIQRGNAASVMGSFAPGTSRDFY

SEQ ID NO: 17411 - protein, 954 aa, Xestia xanthographa
MNSSSLSPCPHCPDSSRLFSSRGLKIHIGRMHKDATSTILSGSQAGFSASSTLLSRGPSQQGVSFQNLPKLKRNTPVLRHIPRGARSLAAEKLSQIINSCVDNNGVEDWYSLLTFSFKALKTPSRSDKGNMVQKVKNNIGSFGHCCLESPEIDERKSFGSHSISRAIETKVHEGDLRGAVRLLMSDDTMAQSAPETLDALKLKHPSPSRPLVFPDPPDQSFLPLTVTVEDVSLALGSFYSGSAAGLDGIRPGHLKELTSSSAGDNGQRLLESLCRLCNFLLSGQLNREVCPYLYGASLCAIAKKDGGLRPIAIGSTFRRLTAKLACRAVKEEMAAYLQPHQLGFGTLLGCEAAIHATRAFATRPENANCIIVKLDVRNAFNTLERDVLLREVRGRTPSLYPFLHQVYEAPSNLYFGDALIKSQVGAQQGDPLGPLTFSLAIQASIHDLKSPLNVWYLDDGTIGGKPEDVEQDIRTLIPRLRELGLEVNSAKCEFFPCGPEAVPKFSHFSSFLPGLTMLSPNSFNLLGAPIFPDAVPEALEDRKRNLLDAHRRLKNLSAHVALVLLRMCFAVPKLTYFLRTAPTWWFPQSLSSFDEALKETVESILNVSLNEAQWAQAALPIRHGGLGVRRAQDVGLPAFLASAHGVTDLVARILSLDGEQVSIPFAADALAAWSGHFPGDIVPEEPQVQRSWDDVGAKAVLAGLIDRAEGVELARLKAVSRSESGVWLQALPSPHLGTLLDGDSLRVAVALRLGCDVCEPHICICGSRVEANGHHALSCCRCSGRFPRHHALNDIIRRALVGANIPCVLEPPGLCRLDGKRPDGLTLVPWQKGKCLLWDGTCVSTFAASHLPRTVGSPGAAAESAAVKKRVKYAILEPRYYFVPLAVETTGCWGSDAIKFVAEIGRRLRDRGGDPRSGSFLVQRLALAIQRGNAASVMGSFAPGTSRDCGLLMT

SEQ ID NO: 17412 - protein, 954 aa, Xestia xanthographa
MNSSSLSPCPHCPDSSRLFSSRGLKIHIGRMHKDATSTILSGSQAGFSASSTLLSRGPSQQGVSFQNLPKLKRNTPVLRHIPRGARSLAAEKLSQIINSCVDNNGVEDWYSLLTFSFKALKTPSRSDKGNMVQKVKNNIGSFGHCCLESPEIDERKSFGSHSISRAIETKVHEGDLRGAVRLLMSDDTMAQSAPETLDALKLKHPSPSRPLVFPDPPDQSFLPLTVTVEDVSLALGSFYSGSAAGLDGIRPGHLKELTSSSAGDNGQRLLESLCRLCNFLLSGQLNREVCPYLYGASLCAIAKKDGGLRPIAIGSTFRRLTAKLACRAVKEEMAAYLQPHQLGFGTLLGCEAAIHATRAFATRPENANCIIVKLDVRNAFNTLERDVLLREVRGRTPSLYPFLHQVYEAPSNLYFGDALIKSQVGAQQGDPLGPLTFSLAIQASIHDLKSPLNVWYLDDGTIGGKPEDVEQDIRTLIPRLRELGLEVNSAKCEFFPCGPEAVPKFSHFSSFLPGLTMLSPNSFNLLGAPIFPDAVPEALEDRKRNLLDAHRRLKNLSAHVALVLLRMCFAVPKLTYFLRTAPTWWFPQSLSSFDEALKETVESILNVSLNEAQWAQAALPIRHGGLGVRRAQDVGLPAFLASAHGVTDLVARILSLDGEQVSIPFAADALAAWSGHFPGDIVPEEPQVQRSWDDVGAKAVLAGLIDRAEGVELARLKAVSRSESGAWLQALPSPHLGTLLDGDSLRVAVALRLGCDVCEPHICICGSRVEANGHHALSCCRCSGRFPRHHALNDIIRRALVGANIPCVLEPPGLCRLDGKRPDGLTLVPWQKGKCLLWDGTCVSTFAASHLPRTVGSPGAAAESAAVKKRVKYAILEPRYYFVPLAVETTGCWGSDAIKFVAEIGRRLRDRGGDPRSGSFLVQRLALAIQRGNAASVMGSFAPGTSRDCGLLMT

SEQ ID NO: 17413 - protein, 960 aa, Hedya salicella
MSSTSHTVTCPHCPESSRRFTQHGLKIHVGRVHKDVARPWPQPASAQVPPRLDRPRGPGPLQAPHSLSPPGVALESLGALKKSVRVLKHIPKGARSLAAEKLCTIISKCIETNETVDWYALLTFAYSALKAPEQQSQGNLTSKVKSNIAAAECWSSSFELGSVGEASPPSVLKTIESKVYEGDVRGAVRVLMSDDSVAPPGPETFASLRTKHPPPSRTLTFPREPDRSVQALTVNMEDVVRALGTFHSGSAAGLDGIRPAHLKELTSISAGNNGQRVLESLVKLCNFLFSGQLNREICPYLYGASLCALTKNEGGIRPIAVGSTFRRLVAKLGCHVVKEHMAGYLQPHQLGFGTRRGCEAAIHATRTFVTEPRNADCVVIKLDLKNAFNTVERDVLLGEVEKHIPTLYSFLHQVYYSPSNLVYGDSLILSQVGAQQGDPLGPLTFSLAIHEAVSSLKSPLNIWYLDDGTLGGEPEVVKQDLDFLIPRLKDMGLEVNAGKCEVYCCGPASSSSLFSLRSLLPGLKELSHGTFTLLCSPIFQEAIPSAIESRKRLLLLAQERLKGINAHVALTLLRMCFAVPKITYLLRTTPTWLCPDDVSVFDATLRDTTETILNVSLSVEQWVQASLPIRHGGLGLRRAGDVGLPAFLASAHGVGSLVSKILNSNGDMVTIPFVDDALAKWTARYPTASMPEAPQVQRVWDDVGARDTLARLKDVATGVDLARLKSVSNVEAGAWLQALPAPYLGTLLDNDSLRVAVALRLGCDVCVPHKCICGSMVEANGHHALSCCRCSGRFPRHHALNDIVRRALISANIPCVLEPPGLCRADGKRPDGLTLVPWQRGKCLLWDATCVSTFAASPLSRTVRTAGAAADFAAVKKRDKYSALDGNYYFVPLAFETTGCWGTEAIAFIREVGRRIRERGFDARAGSYLVQRLSIAIQRGNAASVMGTFAPETIRGGLFD

SEQ ID NO: 17414 - protein, 982 aa, Xestia xanthographa
MFFFFTILTVSHFVFVSIIFRIYTDCSRMSSSSLSPCPHCPDSSRLFSSRGLKIHIGRMHKDATSTILSGSQAGFSASSTLLSRGPSQQGVSFQNLPKLKRNTPVLRHIPRGARSLAAEKLSQIINSCVDNNGVEDWYSLLTFSFKALKTPSRSDKGNMVQKVKNNIGSFGHCCLESPEIDERKSFGSHSISRAIETKVHEGDLRGAVRLLMSDDTMAQSAPETLDALKLKHPSPSRPLVFPDPPDQSFLPLTVTVEDVSLALGSFYSGSAAGLDGIRPGHLKELTSSSAGDNGQRLLESLCRLCNFLLSGQLNREVCPYLYGASLCAIAKKDGGLRPIAIGSTFRRLTAKLACRAVKEEMAAYLQPHQLGFGTLLGCEAAIHATRAFATGPENANCIIVKLDVRNAFNTLERDVLLREVRGRTPSLYPFLHQVYEAPSNLYFGDALIKSQVGAQQGDPLGPLTFSLAIQASIHDLKSPLNVWYLDDGTIGGKPEDVEQDIRTLIPRLRELGLEVNSAKCEFFPCGPEAVPKFSHFSSFLPGLTMLSPNSFNLLGAPIFPDAVPEALEDRKRNLLDAHRRLKNLSAHVALVLLRMCFAVPKLTYFLRTAPTWWFPQSLSSFDEALKETVESILNVSLNEAQWAQAALPIRHGGLGVRRAQDVGLPAFLASAHGVTDLVARILSLDGEQVSIPFAADALAAWSGHCPGGIIPEEPQVQRSWDDVGAKAVLAGLIDRAEGVELARLKAVSRSESGAWLQALPSPHLGTLLDGDSLRVAVALRLGCDVCEPHICICGSRVEANGHHALSCCRCSGRFPRHHALNDIIRRALVGANIPCVLEPPGLCRLDGKRPDGLTLVPWQKGKCLLWDATCVSTFAASHLPRTVGSPGAAAESAAVKKRVKYAILEPRYYFVPLAVETTGCWGSDAIKFVAEIGRRLRDRGGDPRSGSFLVQRLALAIQRGNAASVMGSFAPGTSRDCGLLMT

SEQ ID NO: 17415 - protein, 929 aa, Xestia xanthographa
MSSSSLSPCPHCSDSSRLFSSRGLKIHIGRMHKDATSTILSGSQVGFSASSTLLSSGPSQHGVSFQNLPKLKRNTPVLRHIPRGARSLAAEKLSQIINSCVDNNGVEEWYSLLTFSFKALKSPSRSDKGNMVQKVKNNIGSFGHCCLESPEIDEGKSFGSHSISRAIETKVHEGDLRGAVRLLMSDDTMAQSAPETLDALKLKHPSPSRPLVFPDPPDQSFLPLTVTVEDVSLALGSFYSGSAAGLDGIRPGHLKELTSSSAGDNGQRLLESLCRLCNFLLSGQLNREVCPYLYGASLCAIAKKDGGLRPIAIGSTFRRLTAKLACRAVKEEMAAYLQPHQLGFGTLLGCEAAIHATRAFATGPENANCIIVKLDVRNAFNTLERDVLLREVRGRTPSLYPFLHQVYEAPSNLYFGDALIKSQVGAQQGDPLGPLTFSLAIQASIHDLKSPLNVWYLDDGTIGGKPEDVEQDIRKLIPRLRELGLEVNSAKCEFFPCGPEAVPKFSHFSTFLPGLTMLSPNSFNLLGAPIFPDAVPEALEDRKRNLLDAHRRLQNLSAHVGLVLLRMCFAVPKLTYFLRTAPTWWFPQSLSSFDEALKETVESILNVSLNEAQWAQAALPIRHGGLGVRRAQDVGLPAFFASAHGVTDLVARILSLDGEQVSIPFAADALAAWSGHCPGGIIPEKPQVQRSWDDVGAKAVLAGLIDRAEGVELARLKAVSRSESGAWLQALSSPHLGTLLDGDSLRVAVALRLGCDVCEPHICICGSRVEANGHHALSCCRCSGRFPRHHALNDIIRRALVGANIPCVLEPPGLCRLDGKRPDGLTLVPWQKGKCLLWDATCVSTFAASHLPRTVGSPGAAAESAALKKRVKYETLEPRYYFVPLAVETTGCWGSDAVKFVAEIGRRLRDRGGDPRSGSFLVQRLALAI

SEQ ID NO: 17416 - protein, 945 aa, Blastobasis lacticolella
MSGSSAPSLKCPHCADSLRSFSPHGLKIHIGRMHKNLPATQSPLVDAVSQHLPSDIDIGALRNLGTLKRSVRVLRHIPKGARSLAAGRLCNLIDECIELNGVKEWSALLTFAYTGLKSPEASGPGTLTTKVKVNIQNSGLRCFVDGLGGNQSPTTVERRIESKVYEGDLKGAVRLLMSNDTVAPPGPDTLASLRAKHPAPSRPLDFPLCPDRSVSALKVKTEDIVQALNTFYSGSAAGLDGIRPVHLKELTSPAAGDSGHRLKDSLARLCNFLFSGQVNSEVCPYLYGAALCALSKKDGGLRPIAIGNTLRRLAAKLGCYAVKEEMAVYLRPHQLGFGTRLRCEAAIHAVRAFAMDPKSANSVIVKLDIKNAFNSVERDVLLSVVRERLPSLYPFFHQLYHSPSNLFYDETLLLSQVGAQQGDPLGPLAFCLAIHKAISDLKSPLSVWYLDDGTLGGRPDVVQQDLNVLLPHLRRLGLEVNTGRCEFFSCGEESRASFSLFSSLLPGLREISSSSFNLLGSPIYSEAIPEAFEVRRQLLLVARGRLENLSAHVALVLLRMCFAVPKINYFLRTCPAWLFPDSIAGFDEVLRDSVERILNVSLSALQWSQASLPIRCGGLGVRRARDVSLPAFLASSYGVVSLVTNMLTVDGGRVNIPYVGDALTAWGALDPTLLVPDCPEIQRSWDDCGIERVRNQLEGGAEGVDLARLRAVSQPESGAWLHALPSPHLGTLLDGDSLRVAVALRLGCDVCERHQCICGSMVEANGHHALSCCRCSGRFPRHHALNDIVRRALVSANIPCALEPPGLSRTDGKRPDGLTLVPWQRGKCLLWDATCVSTFAPSHLSRTVRVAGAAAEFAALRKREKYSELQGQYLFIPLAAETTGCWCKDARIFFKEVGRRMRERGGDPRSGSFLLQRLSIAIQRGNAASVMGTFASGVARSGAEV

SEQ ID NO: 17417 - protein, 954 aa, Xestia xanthographa
MSSSSLSPCPHCPDSSRLFSFRGLKIHIGRMHKDATSTILSGSQAGFSASSTLLSRGPSQQGVSFQNLPKLKRNTPVLRHIPRGARSLAAEKLSQIINSCVDNNGVEDWYSLLTFSFKALKTPSRSDKGNMVQKVKNNIGSFGHCCLESPEIDERKSFGSHSISRAIETKVHEGDLRGAVRLLMSDDTMAQSAPETLDALKLKHPSPSRPLVFPDPPDQSFLPLTVTVEDVSLALGSFYSGSAAGLDGIRPGHLKELTSSSAGDNGQRLLESLCRLCNFLLSGQLNREVCPYLYGASLCAIAKKDGGLRPIAIGSTFRRLTAKLACRAVKEEMAAYLQPHQVGFGTLLGCEAAIHATRAFATGPENANCIIVKLDVRNAFNTLERDVLLREVRGRTPSLYPFLHQVYEAPSNLYFGDALIKSQVGAQQGDPLGPLTFSLAIQASIHDLKSPLNVWYLDDGTIGGKPEDVEQDIRTLIPRLRELGLEVNSAKCEFFPCGPEAVPKFSHFSSFLPGLTMLSPNSFNLLGAPIFPDAVPEALEDRKRNLLDAHRRLKNLSAHVALVLLRMCFAVPKLTYFLRTAPTWWFPQSLSSFDEALKETVESILNVSLNEAQWAQAALPIRHGGLGVRRAQDVGLPAFLASAHGVTDLVARILSLDGEQVSIPFAADALAAWSGHCPGGIIPEEPQVQRSWDDVGAKAVLAGLIDRAEGVELARLKAVSRSESGAWLQALPSPHLGTLLDGDSLRVAVALRLGCDVCEPHICICGSRVEANGHHALSCCRCSGRFPRHHALNDIIRRALVGANIPCVLEPPGLCRLDGKRPDGLTLVPWQKGKCLLWDATCVSTFAASHLPRTVGSPGAAAESAAVKKRVKYAILEPRYYFVPLAVETTGCWGSDAIKFVAEIGRRLRDRGGDPRSGSFLVQRLALAIQRGNAASVMGSFAPGTSRDCGLLMT

SEQ ID NO: 17418 - protein, 975 aa, Blastobasis lacticolella
MCKVFLQACIVVLFSLIFFNINYLCVFTSIMSGSSAPSLKCPHCADSLRSFSPHGLKIHIGRMHKNLPATQSPLVDAVSQHLPSDIDIGALRNLGTLKRSVRVLRHIPKGARSLAAGRLCNLIDECIELNGVKEWSALLTFAYTGLKSPEASGPGTLTTKVKVNIQNSGLRCFVDGLGGNQSPTTVERRIESKVYEGDLRGAVRLLMSNDTVAPPGPDTLASLRAKHPAPSRPLDFPLCPDRSVSALKVKTEDIVQALNTFYSGSAAGLDGIRPVHLKELTSPAAGDSGHRLKDSLARLCNFLFSGQVNSEVCPYLYGAALCALSKKDGGLRPIAIGNTFRRLAAKLGCYAVKEEMAVYLRPHQLGFGTRLGCEAAIHAVRAFAMDPKSADSVIVKLDIKNAFNSVERDVLLSVVRERLPSLYPFFHQLYHSPSNLFYDETLLLSQVGAQQGDPLGPLAFCLAIHKAISDLKSPLSVWYLDDGTLGGRPDVVQQDLNVLLPHLRRLGLEVNTGKCEFFSCGEESRASFSLFSSLLPGLREISSSSFNLLGSPIFSEAIPEAFEVRRQLLLVARGRLENLSAHVALVLLRMCFAVPKINYFLRTCPAWLFPDSIAGFDEVLRDSVERILNVSLSALQWSQASLPIRCGGLGVRRARDVSLPAFLASSYGVVSLVTNILTVDGGRVNIPYVGDALTAWGALDPTLLVPDCPEIQRSWDDCGIERVRNQLEGGAEGVDLARLRAVSQPESGAWLHALPSPHLGTLLDGDSLRVAVALRLGCDVCERHQCICGSMVEANGHHALSCCRCSGRFPRHHALNDIVRRALVSANIPCALEPPGLSRTDGKRPDGLTLVPWQRGKCLLWDATCVSTFAPSHLSRTVRVAGAAAEFAALRKRDKYSELQGQYLFIPLAAETTGCWCKDARIFFKEVGRRMRERGGDPRSGSFLLQRLSIAIQRGNAASVMGTFASGVARSGAEV

SEQ ID NO: 17419 - protein, 960 aa, Pammene fasciana
MSSPSRTLTCPHCPESSRKFTSHGLKVHVGRVHKDVPRVRPQPASARVSLRLHQPSRVSPPPCSSPPPGVALDSLGALKKSVRVLRHIPKGARNLAAEKLCTVISKCIEGNDTADWYALLTFAYSALRAPEVQGQGNLTTKVKANITAADCWSSSVELDRVREASHGTPSVLKTIESKVYEGDVRGAVRVLMSDDSIAPPGPETLASLRTKHPPPSRALTFPREPDRSFQALTVGMEDVARALGTFNSGSAAGLDGIRPAHLKELTSSSAGDNGQRLLETLVKLCNFLLSGQLNPEVCPYLYGASLCALTKKEGGIRPIAVGSTFRRLVAKLGCHEVRGRMAAYLQPHQLGFGTQGGCEAAIHATRTFVMEPGNADCIVVKLDLKNAFNTVERDVLLGEVEKHIPTLYPFLHQVYHSPSNLVYDDSLILSQVGAQQGDPLGPLAFSLAVHEAVSSLKSPLNIWYLDDGTLGGEPEVVKQDLAFLIPRLRDMGLEVNAGKCEVYCCGPASSSSLSSLRFLLPGLKELSNGTFTLLGSPIFQEAISNAIETRKRLLLLAQERLKNINAHIALLLLRMCFALPKITYLLRTTPTWLCPGDVSSFDVALRDTAEAILNVSFSDEQWLQASLPIRHGGLGLRCAGDVGLPAFLASAHGVGDLVSKILNYHGNKVTIPFVENALQRWTARYPTASLPEVPQVQRVWDDVGAKDALARLLGEATGVNLARLKSVSRFEAGAWLQALPAPHLGTLLDNDSLRVAVALRLGCDVCVPHKCICGSMVEANGHHALSCCRCSGRFPRHHALNDIVRRALISANIPCVLEPPGLCRTDGKRPDGLTLVPWQRGKCLLWDATCVSTFAASHLGRTMRTAGAAADFAAVKKRDKYSALDGTYHFVPLAFETTGCWGSEAIAFIREVGRRITERGSDARSGSYLVQRLSVAIQRGNAASVMGTFAPGTTRGGLFD

SEQ ID NO: 17420 - protein, 950 aa, Cosmia trapezina
MSSSSLSPCPNCPDSSRLFSSRGLKIHIGRMHKNETSAIKSGSQVAFAAGSTLSPGGSLQQGVSFQNLAKLKRDTPVLRHIPRGARSLAAEKLSQIINSCVVNNGVEDWCSLLTFSFKALKTPSRSDKGSMVQKVKNNIGSFDHCCLDSPEIDEGKSFGSRSISRAIETKVHEGDLRGAVRLLMSDDTIAQSAPETLDALKSKHPSPSRPLVFPEPPDRSCLPLTVTVGDVSLALGSFYSGSAAGLDGIRPGHLKELTSTSAGDNGQRLLESLCRLCNFLLSGQLNREVCPYLYGASLCAITKKDGGVRPIAIGSTFRRLTAKLACRAVKEEMAAYLQPHQLGFGTRLGCEAAIHATRAFATGTENANCIIVKLDLRNAFNTLERDVLLREVRGRTPSLYPFLHQVYEAPSNLYYGDSLIKSQVGAQQGDPLGPLTFSLAIQASIHDLKSPLNVWYLDDGILGGKPEDVEQDIRTLIPRLRELGLEVNSSKCEFFPCGPEAEPGFSHFSSFLPGLTMLSPISFSLLGAPIFPVAVPEALEDRKRNLLDAHKRLKDLSAHVALILLRMCFAVPKLTYFLRTAPTWWFPQSLSSFDEALKETIESILNVSLNEAQWAQAALPIRHGGLGVRRAQDVGLPAFLASAHGVTDLVARILSLDGEQVSIPFAADALAAWSGHCPGSIAPKEPQVQRSWDDVGAKAVLAGLINRAEGVELARLKAVSRSESGAWLQALPSPHLGTLLDGESLRVAVALRLGCDVCEPHICICGSRVEANGHHALSCCRCSGRFPRHHALNDIVRRALVSANIPCVLEPPGLCRLDGKRPDGLTLVPWQKGKCLLWDATCVSTFAASHLPRTVGSPGAAAESAALKKRAKYAALEPKYYFVPLAVETTGCWGSDAIKFVAEIGRRLRERGGDPRSSSFLVQRLALAIQRGNAASVMGSFAPGTSRDFY

SEQ ID NO: 17421 - protein, 952 aa, Apotomis turbidana
MSDLSPLSTCPHCRDSSRTFSARGLKVHIGRMHKDVRCVLAPDPSQPVVSGPQQAHTNNCGATGLSDLASLRQSVRVLRHIPKGARNLAASKLSDVIERCIDTNGTAEWRALLTFSYSAFKAPESTGSSNLTAKVKHNIDSVGGADLLGNAHLSTASSRSPSVLKTIQSKVFEGDLRGAVRVLMSDDVVAPSSPETLATLQLKHPPPSRPLVLPLEPDKSIPAQEVKVEDVARALGSFNNGSAAGLDGIRPSHLKELTSSSAGDSGSRLLESLTKLCNFLLSGQLNIEVCPYIYGASLCALSKKDGGLRPIAVGSTFRRLTAKLGCFAVRERMAAYLQPHQLGFGTQLGCEAAIHATRAFALDLKNSESVIVKLDIKNAFNSVERDVLLSEVKDKVPSLYPFLYQVYSSPTNLFYNDSLILSQVGAQQGDPLGPLAFSLAIHKAISELKSPLNIWYLDDGTLGGKPEIVKRDLLTLLPHLQHLGLEVNAAKCEFFPCSPESSGSFQSFSAMLPGLKQITPDSFSLLGAPIFPVAIPEAFEERRQLLSTARDRLGDLPAHVALVLLRVCFAVPKLTYFLRTVPAWLCPEDIDSFDSILKESMEIILNVSLDASQWQQASLPVRNGGLGIRRARDVCLPAFLASASGVVDLVSQIFALDQDKATIPYASEAQAAWVALNPGAALPDKPERQRSWDDVGVKRVVDSQLESASGVERARLNAVSRPESGAWLQALPSPHLGTLLDDNSLRVAVALRLGCDVCEPHLCICGTRVESNGHHALSCCRCAGRFPRHHALNDIIRRALVSANVPCLLEPPGLSRTDGKRPDGVTLVPWQRGKCLLWDATCVSTFAASHLGRTTRSAGAAAEVAACRKRDKYSVLSSNYIFVPFAVETTGCWGSEARAFIAEIGRRLRERGLDPRSGSFLVQRLSIAIQRGNAASVMGTFAPGMTRGGLFD

SEQ ID NO: 17422 - protein, 983 aa, Xestia xanthographa
MFFFFFTILTLSHFVFVSIIFRIYTDCSRMSSSSLSPCPHCPDSSRLFSFRGLKIHIGRMHKDATSTILSGSQAGFSASSTLLSRGPSQQGVSFQNLPKLKRNTPVLRHIPRGARSLAAEKLSQIINSCVDNNGVEDWYSLLTFSFKALKTPSRSDKGNMVQKVKNNIGSFGHCCLESPEIDERKSFGSHSISRAIETKVHEGDLRGAVRLLMSDDTMAQSAPETLDALKLKHPSPSRPLVFPDPPDQSFLPLTVTVEDVSLALGSFYSGSAAGLDGIRPGHLKELTSSSAGDNGQRLLESLCRLCNFLLSGQLNREVCPYLYGASLCAIAKKDGGLRPIAIGSTFRRLTAKLACRAVKEEMAAYLQPHQVGFGTLLGCEAAIHATRAFATGPENANCIIVKLDVRNAFNTLERDVLLREVRGRTPSLYPFLHQVYEAPSNLYFGDALIKSQVGAQQGDPLGPLTFSLAIQASIHDLKSPLNVWYLDDGTIGGKPEDVEQDIRTLIPRLRELGLEVNSAKCEFFPCGPEAVPKFSHFSSFLPGLTMLSPNSFNLLGAPIFPDAVPEALEDRKRNLLDAHRRLKNLSAHVALVLLRMCFAVPKLTYFLRTAPTWWFPQSLSSFDEALKETVESILNVSLNEAQWAQAALPIRHGGLGVRRAQDVGLPAFLASAHGVTDLVARILSLDGEQVSIPFAADALAAWSGHCPGGIIPEEPQVQRSWDDVGAKAVLAGLIDRAEGVELARLKAVSRSESGAWLQALPSPHLGTLLDGDSLRVAVALRLGCDVCEPHICICGSRVEANGHHALSCCRCSGRFPRHHALNDIIRRALVGANIPCVLEPPGLCRLDGKRPDGLTLVPWQKGKCLLWDATCVSTFAASHLPRTVGSPGAAAESAAVKKRVKYAILEPRYYFVPLAVETTGCWGSDAIKFVAEIGRRLRDRGGDPRSGSFLVQRLALAIQRGNAASVMGSFAPGTSRDCGLLMT

SEQ ID NO: 17423 - protein, 954 aa, Xestia xanthographa
MSSSSLSPCPHCSDSSRLFSSRGLKIHIGRMHKDATSTILPGSQVGFSASSTLLSRGPSQRGVSFQNLPKLKRNTPVLRHIPRGARSLAAEKLSQIINSCVDNNGVEDWYSLLTFSFKALKTPSRSDKGNMVQKVKNNIGSFGHCCLESPEIDEGKSFGSHSISRAIETKVHEGDLRGAVRLLMSDDTMAQSAPETLDALKLKHPSPSRPLVFPDPPDQSFLPLTVTVEDVSLTLGSFYSGSAAGLDGIRPGHLKELTSSSAGDNGQRLMESLCRLCNFLLSGQLNREVCPYLYGASLCAIAKKDGGLRPIAIGSTFRRLTAKLACRAVKEEMAAYLQPHQLGFGTLLGCEAAIHATRAFATGPENANCIIVKLDVRNVFNTLERDVLLREVRGRTPSLYPFLHQVYEAPSNLYFGDALIKSQVGAQQGDPLGPLTFSLAIQASIHDLKSPLNVWYLDDGTIGGKPEDVEQDIRTLIPRLRELGLEVNSAKCEFFPCGPEAVPKFSDFSSFLPGLTMLSPNSFNLLGAPIFPDAVPEALEDRKRNLLDAHRRLKNLSAHVALVLLRMCFAVPKLTYFLRTAPTCWFPQSLSSFDEALKETVESILNVSLNEAQWAQAALPIRYGGLGVRRAQDVGLPAFLASAHGVTDLVARILSLNGEQVSIPFAADALAAWSGHCPGGIIPEEPQVQRSWDDVGAKAVLAGLIDRAEGVELARLKAVSRSESGAWLQALPSPHLGTLLDGDSLRVAVALRLGCDVCEPHICICGSRVEANGHHALSCCRCSGRFPRHHALNDIIRRALVGANIPCVLEPPGLCRLDGKRPDGLTLVPWQKGKCLLWDATCVSTFAASHLPRTVGSPGAAAESAALKKRVKYATLEPRYYFVPLAVETTGCWGSDAIKFVAEIGRRLRDRGGDPRSGSFLVQRLALAIQRGNAASIMGSFAPGTSRDCGLLVT

SEQ ID NO: 17424 - protein, 952 aa, Apotomis turbidana
MSDLSPLSTCPHCRDSSRTFSARGLKVHIGRMHKDVRCAVAPDPSQPVVSGPQQAHTNNCGATGLGDLASLRQSVRVLRHIPKGARNLAASKLSDVIDRCIDTNGTAEWRALLTFSYSAFKAPESTGSSNLTAKVKHNIDSVGGADLLGNAHLSAASSRSPSVLKAIQSKVFEGDLRGAVRVLMSDDVVAPSSPETLATLQLKHPPPSRPLVLPLEPDKSIPAQEVKVEDVARALGSFNNGSAAGLDGIRPSHLKELTSSSAGDSGSRLLESLMKLCNFLLSGQLNVEVCPYIYGASLCALSKKDGGLRPIAVGSTFRRLTAKLGCFAVRERMAAYLQPHQLGFGTQLGCEAAIHATRAFALDLKNSESVIVKLDIKNAFNSVERDVLLSEVKDKVPSLYPFLYQVYSSPTNLFYNDSLILSQVGAQQGDPLGPLAFSLAIHKAISELKSPLNIWYLDDGTLGGKPEIVKRDLLTLLPRLQHLGLEVNAAKCEFFPCSPESSGSFQSFSAMLPGLKQITPDLFSLLGAPIFPVAIPEAFEERRQLLSTARDRLGDLPAHVALVLLRVCFAVPKLTYFLRTVPAWLCPEDIDSFDSILKESMEIILNVSLDASQWQQASLPIRNGGLGIRRARDVCLPAFLASASGVVDLVSQIFALDQDKATIPYASEAQAAWVALNPSAALPDKPERQRSWDDVGVKRVVDSQLESASGVERARLNAVLRPESGAWLQALPSPHLGTLLDDNSLRVAVALRLGCDVCEPHLCICGTRVESNGHHALSCCRCAGRFPRHHALNDIIRRALVSANVPCLLEPPGLSRTDGKRPDGVTLVPWQRGKCLLWDATCVSTFAASHLGRTTRSAGAAAEVAACRKRDKYSVLTSNYIFVPFAVETTGCWGSEARAFIAEIGRRLRERGLDPRSGSFLVQRLSIAIQRGNAASVMGTFAPGMTRGGLFD

SEQ ID NO: 17425 - protein, 922 aa, Xestia xanthographa
MSSSSLSPCPHCSDSSRLFSSRGLKIHIGRMHKDATSTILPGSQVGFSASSTLLSRGPSQRGVSFQNLPKLKRNTPVLRHIPRGARSLAAEKLSQIINSCVDNNGVEDWYSLLTFSFKALKTPSRSDKGNMVQKVKNNIGSFGHCCLESPEIDEGKSFGSHSISRAIETKVHEGDLRGAVRLLMSDDTMAQSAPETLDALKLKHPSPSRPLVFPDPPDQSFLPLTVTVEDVSLALGSFYSGSAAGLDGIRPGHLKELTSSSAGDNGQRLMESLCRLCNFLLSGQLNREVCPYLYGASLCAIAKKDGGLRPIAIGSTFRRLTAKLACQAVKEEMATYLQPHQLGFGTLLGCEAAIHATRAFATGPENANCIIVKLDVRNAFNTLERDVLLREVRGRTPSLYPFLYQVYEAPSNLYFGHALIKSQVGAQQGDPLGPLTFSLAIQASIHDLKSPLNVWYLDDGTIGGKPEDVEQDIRTLIPRLRELGLEVNSAKCEFFPCGLRAVPKFSHFSSFLPGLTMLSPNSFNLLGAPIFPDAVPEALEDRKRNLLDAHRRLKNLSAHVALVLLRMCFAVPKLTYFLRTAPMWWFPQSLSSFDEALKETVESILNVSLNEAQWAQAALPIRYGGLGVRRAQDVGLPAFLASAHGVTDLVARILSLNGEQVSIPFAADALAAWSGHCPGGIIPEEPQVQRSWDDVGAKAVLAGLIDRAEGVELARLKAVSRSESGAWLQALPSPHLGTLLDGDSLRVAVALRLGCDVCEPHICICGSRVEANGHHALSCCRCSGRFPRHHALNDIIRRALVGANISCVLEPPGLCRLDGKRPDGLTLVPWQKGKCLLWDATCVSTFAASHLPRTVGSPGAAAESAALKKRVKYATLEPRYYFVPLAVETTGCWGSDAIKFVAEIGRRLRDRGGDPRSGSFLV

SEQ ID NO: 17426 - protein, 976 aa, Xestia xanthographa
MFFFTILTVSHFVFVSIIFRIYTDCSRMSSSSLSPCPHCSDSSRLFSSRGLKIHIGRMHKDATSTILSGSQVGFSANSTLLSSGPSQQGVSFQNLPKLKRNTPVLRHIPRGARSLAAEKLSQIINSCVDNNGVEEWYSLLTFCFKALKSPSRSDKGNMVQKVKNNIGSFGHCCLESPEIDEGKSFGSHSISRAIETKVHEGDLRGAVRLLMSDDTMAQSAPETLDALKLKHPSPSRPLVFPDPPDQSFLPLTVTVEDVSLALGLFYSGSALGLDGIRPGHLKELTSSSAGDNGQRLLESLCRLCNFLLSGQLNREVCPYLYGASLCAIAKKDGGLRPIAIGSTFRRLTAKLACRAVKGEMAAYLQPHQLGFGTLLGCEAAIHATRAFATGPENANCIIVKLDVRNAFNTLERDVLLREVRGRTPSLYPFLHQVYEAPSNLYFGDALIKSQVGAQQGDPLGPLTFSLAIQASIHDLKSTLNVWYLDDGTIGGKPEDVEQDIRILIPRLRELGLEVNSAKCEFFPCGPEAVPKFSHFSSFLPGLTMLSPNSFNLLGAPIFPDAVPEALEDRKRNLLDAHRRLNNLSAHVALVLLRMCFAVPKLTYFLRTAPTWWFPQSLSSFDEALKETVESILNVSLNETQWAQAALPIRHGGLGVRRAQDVGLPAFLASAHGVTDLVARILSLDGEQVSIPFAADALAAWSGHCPGGIIPEKPQVQRSWDDVGAKAVLAGLIDRAEGVELARLKAVSRSESGAWLQALPSPHLGTLLDGDSLRVAVALRLGCDVCEPHICICGSRVEANGHHALSCCRCSGRFPRHHALNDIIRRALVGANIPCVLEPPGLCRLDGKRPDGLTLVPWQKGKCLLWDATCVSTFAASHLPRTVGSPGAAAESAALKKRVKYATLEPRYYFVPLAVETTGCWGSDAVKFVAEIGRRFRDRGGDPRSGSFLVQRLALAIQRGNAPLRRERLGTVDLKLS

SEQ ID NO: 17427 - protein, 769 aa, Cydia splendana
MSDDSIAPPSPETLASLQTKHPPPSRTLTFPREPDRSFQATTVSVEDVVRALGTFHSGSAAGLDGIRPAHLKELTSSSAGDSGQRLLGSLVKLCNFLLSGQLNREVCPYLYGASLCALTKKEGGIRPIAVGSTFRRLVAKLGCYEVKERMAKFLQPHQLGFGTQRGCEAAIHATRTFVMDPENANCVVLKLDLKNAFNTVERDVLLGAVEKYIPTLYPFLHQVYHSPSNLVYDDSLILSQVGAQQGDPLGPLAFSLAIHEAVSSLKAPLNTWYLDDGTLGGEPEVVEQDLAFLIPRLRDMGLEVNAGKCEVYCCGPTSSSSFSSLRSLLPGLKELSDETFTLLGSPIFPEAISNAIETRKRLLLLAQERLKYINAHVALTLLRMCFAVPKITYLLRTAPTWLCPGDVSSFDGALRVTAETILNVSFSDEQWTQASLPIRHGGLGLRCAGDVGLPAFLASAHGVGDLVFKILHCQGERVTIPFVEDALTRWTARYPTASLPEAPQVQRLWDDVGAGDALARLMGMATGVNLARLKSVSRVEAGAWLQALPAPHLGTLLDNDSLRVAVALRLGCDVCVPHKCICGSMVEANGHHGLSCCRCSGRFPRHHALNDIVRRALISANIPCVLEPPGLCRTDGKRPDGLTLVPWQRGKCLLWDATCVSTFAASHLGRTVRAAGAAADFAAAKKLEKYANLAGNYYFVPLAFETTGCWGSEATAFIREVGRRMREKGSDARAGSYLVQRLSIAIQRGNAASVMGTFAPGTTRGGLFD

SEQ ID NO: 17428 - protein, 985 aa, Xestia xanthographa
MFFFFFFFTILTVSHFVFVSIIFRIYTDCSRMSSSSLSPCPHCPDSSRLFSSRGLKIHIGRMHKDATSTILSGSQAGFSASSTLLSRGPSQQGVSFQNLPKLKRNTPVLRHIPRGARSLAAEKLSQIINSCVDNNGVEDWYSLLTFSFKALKTPSRSDKGNMVQKVKNNIGSFGHCCLESPEIDERKSFGSHSISRAIESKVHEGDLRGAVRLLMSADTMAQSAPETLDALKLKHPSPSRPLVFPDPPDQSFLPLTVTVEDVSLALGSFYSGSAAGLDGIRPGHLKELTSSSAGDNGQRLLESLCRLCNFLLSGQLNREVCPYLYGASLCAIAKKDGGLRPIAIGSTFRRLTAKLACRAVKEEMAAYLQPHQLGFGTLLGCEAAIHATRAFATGPENANCIIVKLDVRNAFNTLERDVLLREVRGRTPSLYPFLHQVYEAPSNLYFGDALIKSQVGAQQGDPLGPLTFSLAIQASIHDLKSPLNVWYLDDGTIGGKPEDVEQDIRTLIPRLRELGLEVNSAKCEFFPCGPEAVPKFSHFSSFLPGLTMLSPNSFNLLGAPIFPDAVPEALEDRKRNLLDAHRRLKNLSAHVALVLLRMCFAVPKLTYFLRTAPTWWFPQSLSSFDEALKETVESILNVSLNEAQWAQAALPIRHGGLGVRRAQDVGLPAFLASAHGVTDLVARILSLDGEQVSIPFAADALAAWSGHCPGGIIPEEPQVQRSWDDVGAKAVLAGLIDRAEGVELARLKAVSRSESGAWLQALPSPHLGTLLDGDSLRVAVALRLGCDVCEPHICICGSRVEANGHHALSCCRCSGRFPRHHALNDIIRRALVGANIPCVLEPPGLCRLDGKRPDGLTLVPWQKGKCLLWDATCVSTFAASHLPRTVGSPGAAAESAAVKKRVNYAILEPRYYFVPLAVETTGCWGSDAIKFVAEIGRRLRDRGGDPRSGSFLVQRLALAIQRGNAASVMGSFAPGTSRDCGLLMT

SEQ ID NO: 17429 - protein, 948 aa, Blastobasis adustella
MINSSPFLKCPHCADSFRSFSPHGLKVHIGRMHKDISRTPVASQSSNVASHPLQVSDGIEALKSLATLKRTVRVLRHVPKGARSLAAGRLCHLIDDCIELNGIEQWSVLLTFAYKGLKSPEATGPGTLTTKVKENIQNCCGCCFSDGTGGNKSLTTVERRIENKVFEGDLRGAVRLLMSNDAVAPPGPETLASLRVKHPPPSRPLDFPRSPDRSIPTYTIKAQDVAQALNTFHNGSASGLDGIRPAHLKELTSPSAGDNGHRLVDSLAKLCNFLFSGQLNTEVCPFLYGATLCALSKKDGGLRPIAIGNTIRRLAAKLGCCAVREEIACYLSPHQLGFGTRLGCEAAIHAVRAFAMDPGQTGSVIVKLDIKNAFNSVERDVLLSEVGEKLPSLYPFLYQLYHSPSNLFYDETLILSQVGAQQGDPLGPLAFSLAIHKAILELKSPLNVWYLDDGTIGGKPEVVEQDLKILLPHFRRLGLEINSTKCEFFSCGLESRSSFPLFSSLLPGLRELSPSSFHILGSPIFPEAIPEAFEFRRQLLLVAGRRLENLSAHVALLLLRMCFAVPKVNYFLRTCPTWLYPDSIAAFDEVLRNSVESILNVALNAEQWRQASLPIRCGGLGVRRVRDVSLPAFLASSHGVVSLVTNILTVNSGRTNIPYVSDALTAWRALNPTSPLPEGPECQRSWDGVGVKRTLEQLESVAMGVDLARLKAVSRPESGAWLHALPSPHLGTLLDSDSLRVAVSLRLGCNVCVPHQCICGSRVEANGHHALSCCRCSGRFPRHHALNDIVRRALVAANIPCTLEPPGLCRSDGKRPDGLTLVPWQRGKCLLWDATCVSTFAASHLARTVRAAGAAAELAALRKRDKYSELENNYLFVPLAAETTGCWCEEARGFIKDVGRRMRERGGDPRSGSFLLQRLSIAIQRGNAASVMGTFGPGMAKSGASSLS

SEQ ID NO: 17430 - protein, 960 aa, Cydia splendana
MSSPSRTLTCPHCPVPSRRFAPHGLKVHIGMKHKDVALVHPQPASDQVSPSLDQPGRTASPPRSVPPPGVALESLGALKKSVRVLKHIPRGARNLAAEKLCTVISKCIETNDTADWYALLTFAYSALKAPEVQACGNLTTKVKSNIVAADCWSSTVELGSVGEPAPRSPSVLKTIESKVYEGDLRGAVRVLMSDDSIAPPSPETLASLQTKHPPPSRTLTFPREPDRSFQATTVSVEDVVRALGTFHSGSAAGLDGIRPAHLKELTSSSAGDSGQRLLGSLVKLCNFLLSGQLNREVCPYLYGASLCALTKKEGGIRPIAVGSTFRRLVAKLGCYEVKERMAKFLQPHQLGFGTQRGCEAAIHATRTFVMDPENANCVVLKLDLKNAFNTVERDVLLGAVEKYIPTLYPFLHQVYHSPSNLVYDDSLILSQVGAQQGDPLGPLAFSLAIHEAVSSLKAPLNTWYLDDGTLGGEPEVVEQDLAFLIPRLRDMGLEVNAGKCEVYCCGPTSSSSFSSLRSLLPGLKELSDETFTLLGSPIFPEAISNAIETRKRLLLLAQERLKYINAHVALTLLRMCFAVPKITYLLRTAPTWLCPGDVSSFDGALRVTAETILNVSFSDEQWTQASLPIRHGGLGLRCAGDVGLPAFLASANGVGDLVFKILHCQGERVTIPFVEDALTRWTARYPTASLPEAPQVQRLWDDVGAGDALARLMGMATGVNLARLKSVSRVEAGAWLQALPAPHLGRLLDNDSLRVAVALRLGCDVCVPHKCICGSMVEANGHHALSCCRCSGRFPRHHALNDIVRRALISANIPCVLEPPGLCRTDGKRPDGLTLVPWQRGKCLLWDATCVSTFAASHLGRTVRAAGAAADFAAAKKLEKYANLAGNYYFVPLAFETTGCWGSEATAFIREVGRRMREKGSDARAGSYLVQRLSIAIQRGNAASVMGTFAPGTTRGGLFD

SEQ ID NO: 17431 - protein, 952 aa, Apotomis turbidana
MSDLSPLSTCPHCRDSSRTFSARGLKVHIGRMHKDVRCAVAPDPSQPVVSGPQQAHTNNCGATGLGDLASLRQSVRVLRHIPKGARNLAASKLSDVIDRCIDTNGTAEWRALLTFSYSAFKAPESTGSSNLTAKVKHNIDSVGGADLLGNAHLSAASSRSPSVLKTIQSKVFEGDLRGAVRVLMSDDVVAPSSPETLATLQLKHPPPSRPLVLPLEPDKSIPAQEVKVEDVARALGSFNNGSAAGLDGIRPSHLKELTSSSAGDSGSRLLESLMKLCNFLLSGQLNVEVCPYIYGASLCALSKKDGGLRPIAVGSTFRRLTAKLGCFAVRERMAAYLQPHQLGFGTQLGCEAAIHATRAFALDLKNSESVIVKLDIKNAFNSVERDVLLSEVKDKVPSLYPFLYQVYSSPTNLFYNDSLILSQVGAQQGDPLGPLAFSLAIHKAISELKSPLNIWYLDDGTLGGKPEIVKRDLLTLLPRLQHLGLEVNAAKCEFFPCSPESSGSFQSFSAMLPGLKQITPDLFSLLGAPIFPVAIPEAFEERRQLLSTARDRLGDLPAHVALVLLRVCFAVPKLTYFLRTVPAWLCPEDIDSFDSILKESMEIILNVSLDASQWQQASLPIRNGGLGIRRARDVCLPAFLASASGVVDLVSQIFALDQDKATIPYASEAQAAWVALNPSAALPDKPERQRSWDDVGVKRVVDSQLESASGVERARLNAVLRPESGAWLQALPSPYLGTLLDDNSLRVAVALRLGCDVCEPHLCICGTRVESNGHHALSCCRCAGRFPRHHALNDIIRRALVSANVPCLLEPPGLSRTDGKRPDGVTLVPWQRGKCLLWDATCVSTFAASHLGRTTRSAGAAAEVAACRKRDKYSVLTSNYIFVPFAVETTGCWGSEARAFIAEIGRRLRERGLDPRSGSFLVQRLSIAIQRGNAASVMGTFAPGMTRGGLFD

SEQ ID NO: 17432 - protein, 977 aa, Xestia xanthographa
MFLTVSHFVFVSIIFRIYTDCSRMSSSSLSPCPHCPDSSRLFSSRGLKIHIGRMHKDATSTILSGSQAGFSASSTLLSRGPSQQGVSFQNLPKLKRNTPVLRHIPRGARSLAAEKLSQIINSCVDNNGVEDWYSLLTFSFKALKTPSRSDKGNMVQKVKNNIGSFGHCCLESPEIDERKSFGSHSISRAIETKVHEGDLRGAVRLLMSDDTMAQSAPETLDALKLKHPSPSRPLVFPDPPDQSFLPLTVTVEDVFLALGSFYSGSAAGLDGIRPGHLKELTSSSAGDNGQRLLESLCRLCNFLLSGQLNREVCPYLYGASLCAIAKKDGGLRPIAIGSTFRRLTAKLACRAVKEEMAAYLQPHQLGFGTLLGCEAAIHATRAFATGPENANCIIVKLDVRNAFNTLERDVLLREVRERTPSLYPFLHQVYEAPSNLYFGDALIKSQVGAQQGDPLGPLTFSLAIQASIHDLKSPLNVWYLDDGTIGGKPEDVEQDIRTLIPRLRELGLEVNSAKCEFFPCGPEAVPKFSHFSSFLPGLTMLSPNSFNLLGAPIFPDAVPEALEDRKRNLLDAHRRLKNLSAHVALVLLRLCFAVPKLTYFLRTAPTWWFPQSLSSFDEALKETVESILNVSLNEAQWAQAALPIRHGGLGVRRAQDVGLPAFLASAHGVTDLVARILSLDGKQVSIPFAADALAAWSGHCPGGIIPEEPQVQRSWDDVGAKAVLAGLIDRAEGVELARLKAVSRSESGAWLQALPSPHLGTLLDGDSLRVAVALRLGCDVCEPHICICGSRVEANGHHALSCCRCSGRFPRHHALNDIIRRALVGANIPCVLEPPGLCRLDGKRPDGLTLVPWQKGKCLLWDATCVSTFAASHLPRTVGSPGAAAESAAVKKRVKYAILEPRYYFVPLAVETTGCWGSDAIKFVAEIGRRLRDRGGDPRSGSFLVQRLALAIQRGNAASVMGSFAPGTSRDCGLLMT

SEQ ID NO: 17433 - protein, 952 aa, Apotomis turbidana
MSDLSPLSTCPHCRDSSRTFSARGLKVHIGRMHKDVRCAVAPDPSQPVVSSPQQAHTNNCGATGLGDLASLRQSVRVLRHIPKGARNLAASKLSDVIDRCIDTNGTAEWRALLTFSYSAFKAPESTGSSNLTAKVKHNIDSVGGADLLGNAHLSAASSRSPSVLKTIQSKVFEGDLRGAVRVLMSDDVVAPSSPETLATLQLKHPPPSRPLVLPLEPDKSIPAQEVKVEDVARALGSFNNGSAAGLDGIRPSHLKELTSSSAGDSGSRLLESLMKLCNFLLSGQLNVEVCPYIYGASLCALSKKDGGLRPIAVGSTFRRLTAKLGCFAVRERMAAYLQPHQLGFGTQLGCEAAIHATRAFALDLKNSESVIVKLDIKNAFNSVERDVLLSEVKDKVPSLYPFLYQVYSSPTNLFYNDSLILSQVGAQQGDPLGPLAFSLAIHKAISELKSPLNIWYLDDGTLGGKPEIVKRDLLTLLPRLQHLGLEVNAAKCEFFPCSPESSGSFQSFSAMLPGLKQITPDLFSLLGAPIFPVAIPEAFEERRQLLSTARDRLGDLPAHVALVLLRVCFAVPKLTYFLRTVPAWLCPEDIDSFDSILKESMEIILNVSLDASQWQQASLPIRNGGLGIRRARDVCLPAFLASASGVVDLVSQIFALDQDKATIPYASEAQAAWVALNPSAALPDKPERQRSWDDVGVKRVVDSQLESASGVERARLNAVLRPESGAWLQALPSPHLGTLLDDNSLRVAVALRLGCDVCEPHLCICGTRVESNGHHALSCCRCAGRFPRHHALNDIIRRALVSANVPCLLEPPGLSRTDGKRPDGVTLVPWQRGKCLLWDATCVSTFAASHLGRTTRSAGAAAEVAACRKRDKYSVLTSNYIFVPFAVETTGCWGSEARAFIAEIGRRLRERGLDPRSGSFLVQRLSIAIQRGNAASVMGTFAPGMTRGGLFD

SEQ ID NO: 17434 - protein, 948 aa, Blastobasis adustella
MINSSPFLKCPHCADSFRSFSPHGLKVHIGRMHKDISRTPVASQSSNVASHPLQVSDGTEALKSLATLKRTVRVLRHVPKGARSLAAGRLCHLIDDCIELNGIEQWSVLLTFAYKGLKSPEATGPGTLTTKVKENIKNCCGCCFSHGTGGNKSPTTVERRIENKVFEGDLRGAVRLLMSNDTVAPPGPETLASLHVKHPPPSRPLDFPRFPDRSIPTYTIKAQDVVQALNTFYNGSASGLDGIRPAHLKELTSPSAGDNGHRLVDSLAKLCNFLFSGQLNTEVCPFLYGATLCALSKKDGGLRPIAIGNTIRRLAAKLGCCAVREEIAGYLSPHQLGFGTRLGCEAAIHAVRAFAMDPGQTGSVIVKLDIKNAFNSVERDVLLSEVREKLPSLYPFLYQLYHSPSNLFYDETLILSQVGAQQGDPLGPLAFSLAIHKAILELKSPLNVWYLDDGTIGGKPEVVEQDLKILLPHFRRLGLEINSTKCEFFSCGLESRSSFPLFSSLLPGLRELSPSSFHILGSPIFPEAIPEAFEFRRQLLLVAGRRLENLSAHVALLLLRMCFAVPKVNYFLRTCPTWLYPDSIAAFDEVLRNSVERILNVALNAEQWSQASLPIRCGGLGVRRVRDVSLPAFLASSHGVVSLVTNILTVNGGRTNIPYVSDALTAWGALNPTSPLPEGPECQRSWDGVGVKRTLEQLESVAMGVDLARLKAVSRPESGAWLHALPSPHLGTLLDSDSLRVAVSLRLGCDICVPHQCICGSRVEANGHHALSCCRCSGRFPRHHALNDIVRRALVAANIPCTLEPPGLCRSDGKRPDGLTLVPWQRGKCLLWDATCVSTFAASHLARTVRAAGAAAELAALRKRDKYSELENNYLFVPLAAETTGCWCEEARGFIKDVGRRMRERGGDPRSGSFLLQRLSIAIQRGNAASVMGTFGPGMAKSGASSLS

SEQ ID NO: 17435 - protein, 948 aa, Blastobasis adustella
MINSSPFLKCPHCADSFRSFSPHGLKVHIGRMHKDISRTPVASQSSNVASHPLQVSDGTEALKSLATLKRTVRVLRHVPKGARSLAAGRLCHLIDDCIELNGIEQWSVLLTFAYKGLKSPEATGPGTLTTKVKENIKNCCGCCFSHGTGGNKSPTTVERRIENKVFEGDLRGAVRLLMSNDTVAPPGPETLASLHVKHPPPSRPLDFPRFPDRSIPTYTIKAQDVVQALNTFYNGSASGLDGIRPAHLKELTSPSAGDNGHRLVDSLAKLCNFLFSGQLNTEVCPFLYGATLCALSKKDGGLRPIAIGNTIRRLAAKLGCCAVREEIAGYLSPHQLGFGTRLGCEAAIHAVRAFAMDPGQTGSVIVKLDIKNAFNSVERDVLLSEVREKLPSLYPFLYQLYHSPSNLFYDETLIPSQVGAQQGDPLGPLAFSLAIHKAILELKSPLNVWYLDDGTIGGKPEVVEQDLKILLPHFRRLGLEINSTKCEFFSCGLESRSSFPLFSSLLPGLRELSPSSFHILGSPIFPEAIPEAFEFRRQLLLVAGRRLENLSAHVALLLLRMCFAVPKVNYFLRTCPTWLYPDSIAAFDEVLRNSVERILNVALNAEQWSQASLPIRCGGLGVRRVRDVSLPAFLASSHGVVSLVTNILTVNGGRTNIPYVSDALTAWGALNPTSPLPEGPECQRSWDGVGVKRTLEQLESVAMGVDLARLKAVSRPESGAWLHALPSPHLGTLLDSDSLRVAVSLRLGCDVCVPHQCICGSRVEANGHHALSCCRCSGRFPRHHALNDIVRRALVAANIPCTLEPPGLCRSDGKRPDGLTLVPWQRGKCLLWDATCVSTFAASHLARTVRAAGAAAELAALRKRDKYSELENNYLFVPLAAETTGCWCEEARGFIKDVGRRMRERGGDPRSGSFLLQRLSIAIQRGNAASVMGTFGPGMAKSGASSLS

SEQ ID NO: 17436 - protein, 950 aa, Cosmia trapezina
MSSSSLSPCPHCPDSSRLFSSRGLKIHIGRMHKNETSAIKSGSQVAFAAGSTLSPGGSLQQGVSFQNLAKLKRDTPVLRHIPRGARSLAAEKLSQIINSCVVNNGVEDWCSLLTFSFKALKTPSRSDKGSMVQKVKNNIGSFDHCCLDSPEIDEGKSFGSRSISRAIETKVHEGDLRGAVRLLMSDDTIAQSAPETLDALKSKHPSPSRPLVFPEPPDRSCLPLTVTVGDVSLALGSFYSGSAAGLDGIRPGHLKELTSTSAGDNGQRLLESLCRLCNFLLSGQLNREVCPYLYGASLCAITKKDGGVRPIAIGSTFRRLTAKLACRAVKEEMAAYLQPHQLGFGTRLGCEAAIHATRAFATGTENANCIIVKLDLRNAFNTLERDVLLREVRGRTPSLYPFLHQVYEAPSNLYYGDSLIKSQVGAQQGDPLGPLTFSLAIQASIHDLKSPLNVWYLDDGILGGKPEDVEQDIRTLIPRLRELGLEVNSSKCEFFPCGPEAEPGFSHFSSFLPGLTMLSPISFSLWGAPIFPVAVPEALEDRKRNLLDAHKRLKDLSAHVALILLRMCFAVPKLTYFLRTAPTWWFPQSLSSFDEALKETIESILNVSLNEAQWAQAALPIRHGGLGVRRAQDVGLPAFLASAHGVTDLVARILSLDGEQVSIPFAADALAAWSGHCPGSIAPKEPQVQRSWDDVGAKAVLAGLINRAEGVELARLKAVSRSESGAWLQALPSPHLGTLLDGESLRVAVALRLGCDVCEPHICICGSRVEANGHHALSCCRCSGRFPRHHALNDIVRRALVSANIPCVLEPPGLCRLDGKRPDGLTLVPWQKGKCLLWDATCVSTFAASHLPRTVGSPGAAAESAALKKRAKYAALEPKYYFVPLAVETTGCWGSDAIKFVAEIGRRLRERGGDPRSSSFLVQRLALAIQRGNAASVMGSFAPGTSRDFY

SEQ ID NO: 17437 - protein, 960 aa, Notocelia uddmanniana
MSCSSHMVTCPHCPESFRRFTPHGLSIHIGRIHKNVARQRPQLASGRMTPHTSQPDSNATESPDSQPPGGVLENLAALKTSVRVLRHIPKGARNLAAEKLCNVISKCIKTNEAADWCAFLTFAYSALKAPDAQGPGNLTTKVKSNIVAAESRSSSLENRGVMEACPRVPSILKTIESKVFEGDVRGAVRVLMSDDSVAPPGPETLASLQMKHPTPSRPLRFPRMPDRSIQPLTVNLDEVVQALGTFHNGSAAGLDGIRPAHLKELTSSSAGDNGQRLFECLVKLCNFLLSGQLNPEVCPYIYGACLCALAKKEGGIRPIAVGSTIRRLVAKLGCRAVREQMAEYLQPYQLGFGTQRGCEAAIHAARTFAAEPGNAECVIIKLDVKNAFNTVERDVLLSEAEENIPLLYPFLYQVYHSPSNLFYNGSLIHSQVGAQQGDPLGPLTFSLAIHKVTSSLKSPLNIWYLDDGTLGGKPELVKQDLAFLLPRFKEMGLEVNAAKCEFFGCGSTSSSSLYSFKSLLPDLKELSRGTFCLLGSHIFPDAIPSAIDTRRQLLLLARERLKNIGAHVALVLLRMCFAVPKITYLLRTTPTWLCPDEVSSFDEALKETAEAILNVSLSNTQWSQASLPIRHGGLGLRRAGDVGLPAFLASTHGVSGLVSKILNSHGDKVTIPFVSDALVQWTDRFPSTSVPQVPHVQKAWDDVGARDALARLMDGATGADLARLKAVSQTEAGAWLQALPAPHLGTLLDSDSMRVAVALRLGCDVCIRHECICGSMVEANGHHALSCCRCSGRFPRHHALNDIVRRALVSANIPCVLEPPGLCRTDGKRPDGLTLVPWQKGKCLLWDATCVSTFAASHLGRTVQTAGAAAEFAAVKKRDKYSALLLNYHFVPLAFETTGCWGSEAVAFVKEVGRRIRERGSDARAGSYLVQRLSIAIQRGNAASVMGTFAPGTTRGGLFD

SEQ ID NO: 17438 - protein, 948 aa, Blastobasis adustella
MINSSPFLKCPHCADSFRSFSPHGLKVHIGRMHKDISRTPVASQSSNVASHPLQVSDGTEALKSLATLKRTVRVLRHVPKGARSLAAGRLCHLIDDCIELNGIEQWSVLLTFAYKGLKSPEATGPGTLTTKVKENIQNCCGCCFSDGTGGNKSPTTVERRIENKVFEGDLRGAVRLLMSNDTVAPPGPETLASLHAKHPPPSRPLDFPRSPDRSIPPYTIKAQDVVQALNTFHNGSASGLDGIRPAHLKELTSHSAGDNGHRLVDSLAKLCNFLFSGQLNTEVCPFLYGATLCALSKKDGGLRPIAIGNTIRRLAAKLGCCAVREEIAGYLSPHQLGFGTRLGCEAAIHAVRAFAMDPGQTGSVIVKLDIKNAFNSVERDVLLSEVGEKLPSLYPFLYQLYHSPSNLFYDETLILSQVGAQQGDPLGPLAFSLAIHKAILELKSPLNVWYLDDGTIGGKPEVVEQDLKILLPHFRRLGLEINSTKCEFFSCGLEFRSSFPPFSSLLPGLKELSPSSFHILGSPIFPEAIPEAFEFRRQLLLVAGRRLENISAHVALLLLRMCFAVPKVNYFLRTCPTWLYPDSIAAFDEVLRNSVERILNVALNAEQWSQASLPIRCGGLGVRRVRDVSLPAFLASSHGVVSLVTNILTVNGGRTNIPYVSDALTAWGALNPTSPLPEGPECQRSWDGVGVKRTLEQLESVAMGVDLARLKAVSRPESGAWLHALPSPHLGTLLDSDSLRVAVSLRLGCDVCVPHQCICGSRVEANGHHALSCCRCSGRFPRHHALNDIVRRALVAANIPCTLEPPGLCRSDGKRPDGLTLVPWQRGKCLLWDATCVSTFAASHLARTVRAAGAAAELAALRKRDKYSELENNYLFVPLAAETTGCWCEEARGFIKDVGRRMRERGGDPRSGSFLLQRLSIAIQRGNAASVMGTFGPGMAKSGASSLS

SEQ ID NO: 17439 - protein, 954 aa, Xestia xanthographa
MSSSSLSPCPHCSDSSRLFSSRGLKIHIGRMHKDATSTILSGSQVGFSASSTLLSRGPSQQGVSFQNLPKLKRNTPVLRHIPRGARSLAAEKLSQIINSCVDNNGVEDWYSLLTFSFKALKTPSRSDKGNMVQKVKNNIGSFGHCCLESPEIDEGKSFGSHSISRAIETKVHEGDLRGAVRLLMSDDTMAQSAPETLDTLKLKHPSPSRPLVFPDPPDQSFLPLTVTVEDVSLALGSFYSGSAAGLDGIRPGHLKELTSSSAGDNGQRLMESLCRLCNFLLSGQLNREVCPYLYGASLCAIAKKDGGLRPIAIGSTFRRLTAKLACRAVKEEMAAYLQPHQLGFGTLLRCEAAIHATRAFVTGPENANCIIVKLDVRNAFNTLERDVLLREVRGRTPSLYPFLHQVYEAPSNLYFGDALIKSQVGAQQGDPLGPLTFSLAIQASIHDLKSPLNVWYLDDGTIGGKPEDVEQDIRTLIPRLRELGLEVNSAKCEFFPCGPEAVPKFSHFFSFLPGFTMLSPNSFNLLGAPIFPDAVPEALEDRKRNLLDAHRRLKNLSAHVALVLLRMCFAVPKLTYFLRTAPTWWFPQSLSSFDEALKETVESILNVSLNEAQWAQAALPIRHGGLGVRRAQDVGLPAFLASAHGVTDLVARILSLDGEQVSIPFAADALAAWSGHCPGGIIPEEPQVQRSWDDIGAKAVLAGLIDRAEGVELARLKAVSRSESGAWLQALPSPHLGTLLDGDSLRVAVALRLGCDVCEPHICICGSRVEANGHHALSCCRCSGRFPRHHALNDIIRRALVGANIPCVLEPPGLCRLDGKRPDGLTLVPWQKGKCLLWDATCVSTFAASHLPRTVGSPGAAAESAALKMRDKYATLEPRYYFVPLAVVTTGCWGSDAIKFVAEIGRRLRDRGGDPRSGYFLVQRLALAIQRGNAASVMGSFAPGTSRDCGILMT

SEQ ID NO: 17440 - protein, 1124 aa, Fabriciana adippe
MSDAGNIGVEGNNIVVLLPISVDIPLKCPLCNTRGLYKGERKIENFARHCKEHHRDLCVTYRCIKCNFVAPQQARYPRKIVTAHCLECMPIANPTTTAGRDRVRRNAVREELNIAIPRNNESQSRIASIVPNSPLEETRSEEGRLMSGVLTTQATTNPISPPVRAVELSIHSQPNILHSAGNETSDSTQPVRETERSARGSSRIPTNEQIALIEELNLVNSTEHLHSVHQKVEIFMSRLINNSRARQANRPQATRAENQNAPTDKIIEATRIQKLYRKNRKRAMQQVLTGPAKVCSMEKTHVHEYFATLAAPRHGESTWTDVFNQEPPSDSTGEELTAPIRREEVLGILKKRTNTAPGPNGLTYSDLQKADPGAHVTTALFNAIWRLEQIPDSWKDSNTTLIYKKGTVDDIRNWRPIAMSDTEPKLFAAILAERLKTWAIRNKRFNRAQKGFLEYEGCFEHNFILQEAIRETKNKKKSLAVAWLDLANAFSSVPHSSIMRALAGHGVPSKATSIIKAMYDNTRTRIRTLTGLTDPITMKAGVKQGCPLSPAIFNLTLEVVLRVLERSGEGFVVGENRIPSLAYADDIVIMAETAVGLTNQLQAAESAAKMIGISFNPAKCATLHIEDGNVLPTVFSIQHESVKALGHNDYYEHLGIPTGYQIKQTPISSIKELIADTRRLDGSLLAPWQKLDAMRAFILPRLDFVMQGSNIYKSHLAEADKVVKRVAKGWLHLPQRASAELVCIPSSRGGGGLLPLSDLYDLYSIAHAYRMLHATDDIVGGLASRLLKETVSERLKKPASNVDIARYLSGDLDLPRSSSRTSFWAKVRTSTYRIRSKFNIRWIWNNDKQEITLRWDGAEPITPATKGMAYKRLRMRLTDYYASRLTAKPDQGKVLEVTTKSKHSNHFLCNGRNTRFCDWRFVHRARLDVLPLNATKRWDTDADKRCRRCGADEETLPHVENHCRVHTVARQKRHDNIVSRLVKANRHPGSVSVNRTVEGVTGEAAMQRPDIVIRDNASKTIVIVDVTVPFENRLSGFNAARTEKLSKYAALADQLMLQGYRVEVEAFIIGTLGGWGMKNERILDLMRVSRYYAGMMRRFMVSDTIRWSRDIYVEHVSGVRQYQQ

SEQ ID NO: 17441 - protein, 1109 aa, Boloria selene
MSDAGNISVEESNIVVLLPIPVDTPIKCPLCNTRGLYKGERKIENFARHCKEHHRNLRVTYRCVNCSFVALQQARYPRKVVTAHCLECAPIANPTTTAGRDRNRRNAIREELNIAIPHNSETRSESTSGVANTPTPHGTGPEEDGNNTTASPVIAAELSSHPQACTLPSTRPETANLVQSTRDRSARGSSRIPTNEQRALTEELELVDSAEQLHSVHQKVEKFMCRLTTKIPHQSHKPQTVPADNTRLDRIKEATKIQRLYRKNRKRAMQQVLAGPAKLCDMEKTRVHEYFATLAAPRHGESTWADVFNQEPPSQSTDEELTASIRREEVLGILSKRSNTAPGPNGLTYSDLRRADPGAYVTTALFNAVWRLELIPDSWRNSNTTLIYKKGTVDDIRNWRPIAMSDTEPKLFAAILAERLKTWAIKNQRFNRAQKGFLEYEGCFEHNFILQEAIREAKNKKKSLFVAWLDLANAFSSIPHSSIIRALTGHRVPSKATSIIKAMYDNAGTRIRTPTGLTDAITMTAGVKQGCPLSPIIFNLTLEVVLRVLERSGEGLVVGERRIPSLAYADDIAIIADTAEGLINQLQSAESAAKMVGISFNPAKCATLHIDTGKVLPTEFFVQHEAVKALGPNDYYEHLGIPTGYQVKQTPVSSIKELIADARKLDGSLLAPWQKLDAMRVFILPRLDFAMQGCDISKSHLTEADKVVKRVAKGWLHLPQRASAELVFIPPSQGGGGLLPLSDLYDLYSIAHAYRMLHAIDDTVCGLASRLLKETVSERLKKPASNVDIARYLSGDLDLPRSSSRTSFWAKVRTATYRIRSKFNIRWIWDEENQEITLRWNEAEPITPATKGMAYRRLRMRLTDYYASRVTAKPDQGKVMEVTTKSKHSNHFLCNGRNTRFCDWRFIHRARLDVLPLNATKRWDPDIDKRCRRCGADEETLPHVENHCRVHTVARQKRHDNIVNRLVKANRHSGSVSVNRTVEGVTGEAAMLRPDIVIRDNTSKKVIIVDVTVPFENRRSGFIAARTEKLSKYAILADQLRLQGYRVEVEAFMIGTLGGWNSRNENILNLMNVSKYYAGMMRRFMVSDTIRWSRDIYVEHVSGVRQYKQ

SEQ ID NO: 17442 - protein, 674 aa, Apotomis turbidana
MYLGNVNPTIVPILYGANLIALTKKDGGVRPIAVGSTLRRLASKIAVRYIASKLQTLFEPIQLGFGTKGGSEAAVHALRTFLSNEPCDILVKIDVKNAFNSVNRDVLLTEIKNNVPELYNYLLHCYAEPSNLMYRKNVISSEVGCQQGDPLGPAIFSLAINPVIQNLKSKFNVWYLEDGTLGGDLDTVLIDLETIKAKFMSMGLELNFSKCELFIQNLALNVQDIKQKFDALTPNIKIVDRNSLCLLGSPIFEESFSNHILKSISKFKNYESRLLEISPHYAFSILKFCLFVPKFTYVLRCCPFSKFQNELLQMDVLIKAILESILNIQLSEKSWTQASLPIRFGGIGTRKISSISAPAFLSSVHSSADLIGKILKASPLNYETAGLTEAKRAWSIACPGKDIPQNLKSQRAWDDVMSKLTYDSLLNHSSGPERARLLAAGALESGHWLQAYPSSNTGTFLEPDTFRIATCLRLGVQICAPHKCPCGSEVDSLGHHGLSCQKSAGRFSRHAALNDTIRRSLATVNVPAILEPPGIARDDGKRPDGMSLIPWKLGRVLVWDATCVDTLAPSHLHGTSGRAGAAAEAAEKLKINKYRGLGPEYNFVPFGVETLGPWGPSAHKLLNEISKRLIESTGDRRAGSFLAQRISIAIQRGNAASVFGTMPRGHSFFRFILA

SEQ ID NO: 17443 - protein, 948 aa, Pammene fasciana
MQPATQPGNSTSNNDCQICNKSFKSKKGLNIHIAKAHRQCLSQNAAPVNSNLIDPPSSEASQNQNTTPFHTHLSHMKSNVSVVKRIPRGARISVATHLAHLIDKCTENNTTADWHKLLLFPYHTLHAQEDDPSISLTQKIKNNCVNNPLPPVHTSKTNSIFNRQKHIESKISDGDLKGAARLLFSSDVLSPDTPDTLLALQSKHPPGPSIPHILDPPTANQACLQIKNRDVMEGILSFKTGSAAGLDGLSPQHLKDLTSHTAGDAGDRLIDSLTKLVNFMYTGNVNPEIVPILYGANLIALTKKDGGVRPIAVGSTLRRLSSKIAVRYIASKLKPLFEPVQLGFGIKGGCEAAVHALRTYLTNSPCDVLVKIDVRNAFNSVNRDTLLTEIKNNIPEIYNYLLHCYADPTKLVYRNNVLSSEVGCQQGDPLGPAIFSLAINPIIQNLKSKFNVWYLDDGTLGGDLDSVLSDLSTIQSKFRSIGLDLNYAKCELYIHNTSLNLSDVKQEFDSLTPNIKIVNKSSLCLLGSPIFEESFSNYVSGSVSKFQTYEGRLLEISPHFALTIIKFCLFVPKLTYVLRCCPFSKFQNLLIPMDDLIKSSLESILNLQLSEESWTQASLPIRYGGIGIRKISSVSAPAFLSSAHSSASLVGKILRACPSNYEIAGLTEAKNAWSIACPGKDFPDNLTSQRTWDDISCKITYDSLLSHSTGSERARLLAVGTREAGAWLHAFPSVHTGTFLEPHTLRVAACLRLGVRVCAPHRCPCGTDVDVLGHHGLSCQRSAGRFSRHAALNDILRRSLASVNVPALLEPTGILRDDGKRPDGMSLVPWKMGRVLVWDATCVDTLAPSHLHGTSTRAGAAAEAAEKQKKTKYGGLGVEYNFVPFGVETLGPWGPNAHALFKEISKRLVDSTGDRRAGSFLAQRIGIAIQRGNAASIYGTMPRGDWLF

SEQ ID NO: 17444 - protein, 949 aa, Apotomis turbidana
MQSATQPVGSTSSSHICQICNKSFKSIKGLNIHVSKTHRRCLSQNAVPVLNHHLTPPSATTQPSTPFHLQLSNLKNHVPLVKRIPRGARITVATHLSKLINNCTEFNGIDDWHNLLLFAFHVLHAHDDGSSISFTQKIKNNCVRHSTPPIVSKDFPTSFNRRKTVESKVSDGDLKGAASLLFSNDVLAPDTPDTLSALQSKHPPGPPLPYFFDPPAANQACLQIKNRDVIEGISSFKIGSSAGLDGLSPQHLKDLTSHSVGDAGERLVESLTKLINNMYLGNVNPTIVPILYGANLIALTKKDGGVRPIAVGSTLRRLASKIAVRYIASKLQTLFEPIQLGFGTKGGSEAAVHALRTFLSNEPCDILVKIDVKNAFNSVNRDVLLTEIKNNVPELYNYLLHCYAEPSNLMYRKNVISSEVGCQQGDPLGPAIFSLAINPVIQNLKSKFNVWYLDDGTLGGDLDTVLIDLETIKAKFMSMGLELNFSKCELFIQNLALNVQDIKQKFDALTPNIKIVDRNSLCLLGSPIFEESFSNHILKSISKFKNYESRLLEISPHYAFSILKFCLFVPKFTYVLRCCPFSKFQNELLQMDVLIKAILESILNIQLSEKSWTQASLPIRFGGIGTRKISSISAPAFLSSVHSSADLIGKILKASPLNYETAGLTEAKRAWSIACPGKDIPQNLKSQRAWDDVMSKLTYDSLLNHSSGPERARLLAAGALESGHWLQAYPSSNTGTFLEPDTFRIATCLRLGVQICAPHKCPCGSEVDSLGHHGLSCQKSAGRFSRHAALNDTVRRSLATVNVPAILEPPGIARDDGKRPDGMSLIPWKLGRVLVWDATCVDTLAPSHLHGTSGRAGAAAEAAEKLKINKYRGLGPEYNFVPFGVETLGPWGPSAHKLLNEISKRLIESTGDRRAGSFLAQRISIAIQRGNAASVFGTMPRGHSFLDLF

SEQ ID NO: 17445 - protein, 947 aa, Pammene fasciana
MHPATQPANSTSNNNQCQLCNKSFKSKKGLNIHIAKSHRPCLSQNATPINSNQINLPSSTAPQPTTPFHIHLSHLKSNVTVVKRIPRGARISVASHLAHLIDKCTENNTIADRHQLLLFPYHTLHARDDDSNISLTQKIKNNCINNPPPLLHKNKNNLIFNRPKHVESKISDGDLKGAARLLFSSDVLSPETPDTLLALQSKHPPGPSIPHSLAPPTANQACLQIKNRDVMEGIFSFKIGSAAGLDGLSPQHLKDLISHTAGDAGERLLDSITKLINFMYTGNVNPEIVPILYGANLIALTKKDGGVRPIAVGSTFRRLASKIAVRYILSKLKPLFEPIQLGFGTKGGCEAAVHALRTYLLNSPYDVLVKIYVRNAFNSVNRDTLLTEIKSNTPEIYNYLLNCYADPTKLVYRENVLSSEVGCQQGDPLGPAIFSLAINPIIQNLKSKFNVWYLDDGTLGGDLESVLSDLSTIQSKFRSIGLDLNYAKCELYIHNTSLNSIDVKQKFDSLTPNIKIVNKSSLCLLGSPIFDESFSNYISDTITKFQNFECRLLEISPHFALTVLKFCLFVPKLTYVLRCCPFSKFQNVLIPMDNLIKANVESILNLQLSEESWTQASLPIRYGGIGIRKISSVSAPAFLSSVHSSASLVGKILRACPLNYEIAGLTEAKNAWSIACPGKDFPDNLTSQRTWDDISCKIIYDTLLSHSTGSERARLLAVGSKEAGAWLHAFPSVHTGTFLEPHTLRVAACLRLGVRVCAPHRCPCGSDVDVLGHHGLSCQRSAGRFSRHAALNDILRRSLASVNVPALLEPAGILRDDGRRPDGMSLVPWKMGRVLVWDATCVYTLAPSHLHGTSARAGAAADAAEKSKINKYRGLGVEYNFVPFGVETLGPWGPSAHALFRDLSKRLVDATGDRRAGSFLAQRIGIAIQRGNAASIYGTMPRGDFLV

SEQ ID NO: 17446 - protein, 948 aa, Pammene fasciana
MQPATQPGNSTSNNDCQICNKSFKSKKGLNIHIAKAHRQCLSQNAAPVNSNLIDPPSSEASQNQNTTPFHTHLSHMKSNVSVVKRIPRGARISVATHLAHLIDKCTENNTTADWHKLLLFPYHTLHAQEDDPSISLTQKIKNNCVNNPLPPVHTSKTNSIFNRQKHIESKISDGDLKGAARLLFSSDVLSPDTPDTLLALQSKHPPGPSIPHILDPPTANQACLQIKNRDVMEGILSFKTGSAAGLDGLSPQHLKDLTSHTAGDAGDRLIDSLTKLVNFMYTGNVNPEIVPILYGANLIALTKKDGGVRPIAVGSTLRRLSSKIAVRYIASKLKPLFEPVQLGFGIKGGCEAAVHALRTYLTNSPCDVLVKIDVRNAFNSVNRDTLLTEIKNNIPEIYNYLLHCYADPTKLVYRKNVLSSEVGCQQGDPLGPAIFSLAINPIIQNLKSKFNVWYLDDGTLGGDLDSVLSDLSTIQSKFRSIGLDLNYAKCELYIHNTSLNLSDVKQEFDSLTPNIKIVNKSSLCLLGSPIFEESFSNYVSGSVSKFQTYEGRLLEISPHFALTIIKFCLFVPKLTYVLRCCPFSKFQNLLIPMDDLIKSSLESILNLQLSEESWTQASLPIRYGGIGIRKISSVSAPAFLSSAHSSASLVGKILRACPSNYEIAGLTEAKNAWSIACPGKDFPDNLTSQRTWDDISCKITYDSLLSHSTGSERARLLAVGTREAGAWLHAFPSVHTGTFLEPHTLRVAACLRLGVRVCAPHRCPCGTDVDVLGHHGLSCQRSAGRFSRHAALNDILRRSLASVNVPALLEPTGILRDDGKRPDGMSLVPWKMGRVLVWDATCVDTLAPSHLHGTSTRAGAAAEAAEKQKKTKYGGLGVEYNFVPFGVETLGPWGPNAHALFKEISKRLVDSTGDRRAGSFLAQRIGIAIQRGNAASIYGTMPRGDWLF

SEQ ID NO: 17447 - protein, 946 aa, Cydia splendana
MQPATQPAGNSTSYICQLCQKSFKSTKGLNIHTTKVHRPCLTQNIPPIDNSQINPPPFLAAAQPTTPFHLHLSHLKNNVSIVKRIPRGARITVASHLSHLINKCTENNTTADWHNLLLFPYHTLHAQDDDPSICLTQKIKNNCINNPPPPTYKNKTNIMYDRKKHIENKISDGDLKGAARLLFSNDVLSPDTPDTLLALQTKHPPGPTTPHFLDPPTANQAGLQIKNRDVIIGILSFKIGSAAGLDGLSPQHLKDLTSHSVGDAGERLVDSLTKLINLMYTGNVNPEIVPILYGANLIALTKKDGGVRPIAVGSAIRRLASKIAVRYIISKLKPLFEPVQLGFGIKGGCEAAVHALRTYLSNSPCDVLVKIDVRNAFNSVNRDTLLTEIKNNIPEIYNYLLHCYADPTNLIYRENVLSSEVGCQQGDPLGPAIFSLAINPIIQNLKSKFNVWYLDDGTLGGDLESVLSDLSTIKSKFETIGLELNYSKCELFINNTSLNFSDIKPKFDLLTPNIKITDKDSLCLLGSPIFEESYSKFTCDTTSKFQTYESRLLEISPHFALTIIKFCLFVPKLMYVLRCCPFTKFLNLLTPLDDLIKTNLESILNLQFSEESWTQASLPIRHGGLGIRKISSVSTPAFLSSVHSSATLIGKILRACPPNYEITGLTESKNAWSIACPGKDFPENLNSQRAWDDIQCKITYDYLLSRSTGSARARLLAAGSRESGAWLHAFPSVHTGTFLEPHTLRVAACLRLGVRVCAPHRCPCGTDVDAFGHHGLSCQRSAGRFSRHAALNDILRRSLTSVNVPALLEPPGIVRDDGKRPDGMSRIPWKMGRVLVWDATCVDTLAPSHLHGTTSKAGAAAEAAEKLKKTKYRGLGPEYDFVPFGVETLGPWGPNASTLFKELSKRIADATGDRRSGSFLAQRISIAIQRGNAASIYGTIPQGDIL

SEQ ID NO: 17448 - protein, 948 aa, Notocelia uddmanniana
MQPATQPAATTSDFICQSCNKSFKSIKGLNIHTTKVHRRFLSQNASTLNSNPISLPSSLPSTNLPNNPFHLHLSHLKNNVSLVKRIPRGARISVATHLCQLIDNCANRNTITDWHELFLFPFNILHVQEDGSHISLTQKIKNNCVNHQRPPTFRNNITSAYNRRKNIEAKISDGDLKGAARLLFSNDVLSPDTPETLSALQTKHPPGPSNPYFLDPPVANQACLQTKSRDVLDAILSFKTGSAAGLDGLSPQHLKDLTSHSVGDAGERLVCSISKLINSMYTGSINPDIIPILYGANLIALTKKDGGVRPIAVGTTLRRLASKIAVRYIVSKLKPLFEPVQLGFGVKGGCEAAVHALRTFLFNGRCDVLVKIDVKNAFNSVNRDTLLTEIKNNVPEIYNYLLHCYADPTKLIYRNTVISSEVGCQQGDPLGPAIFSLAINSIIQNLKSKFNVWYLDDGTLGGNMESVLSDLSTVKSKFQAIGLELNFSKCELFILNSSLNSYDIKQKFDNLTPNIKLVDKKSLCLLGSPIFEESFSNYISESITKFKNYESRLLEISPHFAITIIKFCLFVPKLTYVLRCCPFTNFQNLLYPMDDLIKVNLESILNLQLSENSWTLASLPIRYGGLGIRKISSISAPAFLSSVHSSANLIGKILRALPVNYEITGLTDAKNAWSNACPGKDFPQNLKSQRAWDDTLSKLSFDSLLNCSTGSDRARILAAGTKEAGSWLHAFPSVHTGTFLEPHTLRIATCLRLGVRVCAPHTCPCGMEVDALGHHGLSCQKSAGRFSRHAALNDILRRSLASVNVPVLLEPPGIHRDDGRRPDGMSLVPWKMGRVLVWDATCVDTLAPSHLHGTSIRAGSAAAAAEKSKTNKYSGLGAEYCFVPFGVETLGPWGPSAQELFKELSKRLADTTGDRRAGSFLAQRISIAIQRGNAASIFGTMPRGDPLL

SEQ ID NO: 17449 - protein, 948 aa, Notocelia uddmanniana
MQPATQPAATTSDFICQSCNKSFKSIKGLNIHTTKVHRRFLSQNASTLNSNPISLPSSLPSINLPNNPFHLHLSHLKNNVSLVKRIPRGARISVATHLCQLIDNCANRNTITDWHELFLFPFNILHVQEDGSHISLTQKIKNNCVNHQRPPTFRNNITSAYNRRKNIEAKISDGDLKGAARLLFSNDVLSPDTPETLSALQTKHPPGPSNPYFLDPPVANQACLQTKSRDVLDAILSFKTGSAAGLDGLSPQHLKDLTSHSVGDAGERLVCSISKLINSMYTGSINPDIIPILYGANLIALTKKDGGVRPIAVGTTLRRLASKIAVRYIVSKLKPLFEPVQLGFGVKGGCEAAVHALRTFLFNGRCDVLVKIDVKNAFNSVNRDTLLTEIKNNVPEIYNYLLHCYADPTKLIYRNTVISSEVGCQQGDPLGPAIFSLAINSIIQNLKSKFNVWYLDDGTLGGNMESVLSDLSTVKSKFQAIGLELNFSKCELFILNSSLNSYDIKQKFDNLTPNIKLVDKKSLCLLGSPIFEESFSNYISESITKFKNYESRLLEISPHFAITIIKFCLFVPKLTYVLRCCPFTNFQNLLYPMDDLIKVNLESILNLQLSENSWTLASLPIRYGGLGIRKISSISAPAFLSSVHSSANLIGKILRALPVNYEITGLTDAKNAWSNACPGKDFPQNLKSQRAWDDTLSKLSFDSLLNCSTGSDRARILAAGTKEAGSWLHAFPSVHTGTFLEPHTLRIATCLRLGVRVCAPHTCPCGIEVDALGHHGLSCQKSAGRFSRHAALNDILRRSLASVNVPVLLEPPGIHRDDGRRPDGMSLVPWKMGRVLVWDATCVDTLAPSHLHGTSIRAGSAAAAAEKSKTNKYSGLGAEYCFVPFGVETLGPWGPSAQELFKELSKRLADTTGDRRAGSFLAQRISIAIQRGNAASIFGTMPRGDPLL

SEQ ID NO: 17450 - protein, 922 aa, Cydia splendana
MIVAIYYVILFVHRPCLTQNIPPIDNSQINPPPFLAAAQPTTPFHLHLSHFKNNVSIVKKIPRGARITVASHLSHLINKCTENNTTADWHNLLLFPYHTLHAQDDDPSICLTQKIKNNCINNPPPPTYKNKTNIMYDRKKHIENKISDGDLKGAARLLFSNDVLSPDTPDTLLALQTKHPPGPTTPHFLDPPTANQACLQIKNRDVIIGILSFKIGSAAGLDGLSPQHLKDLTSHSVGDAGERLVDSLTKLINLMYTGNVNPEIVPILYGANLIALTKKDGGVRPIAVGSTIRRLASKIAVRYIISKLKPLFEPVQLGFGIKGGCEAAVHALRTYLSNSPCDVLVKIDVWNAFNSVNRDTLLTEIKNNIPEIYNYLLHCYADPTNLIYRENVLSSEVGCQQGDPLGPAIFSLAINPIIQNLKSKFNVWYLDDGTLGGDLESVLSDLSTIKSKFETIGLELNYSKCELFINNTSLNFSDIKPKFDLLTPNIKITDKDSLCLLGSPIFEESYSKFTCDTTSKFQTYESRLLEISPHFALTIIKFCLFVPKLMYVLRCCPFTKFLNLLTPLDDLIKTNLESILNLQFSEESWTQASLPIRHGGLGIRKISSVSTPAFLSSVHSSATLIGKILRACPPNYEITGLTESKNAWSIACPGKDFPENLNSQRAWDDMQCKITYDYLLSRSTGSARARLLAAGSRESGAWLHAFPSVHTGTFLEPHTLRVTACLRLGVRVCAPHRCPCGTDVDAFGHHGLSCQRSAGRFSRHAALNDILRRSLTSVNVPALLEPPGIVRDDGKRPDGMSLIPWKMGRVLVWDATCVDTLAPSHLHGTTSKAGAAAEAAEKLKKTKYRGLGPEYDFVPFGVETLGPWGPNASTLFKDLSKRIADATGDRRSGSFLAQRINIAIQRGNAASIYGTIPQGNIL

SEQ ID NO: 17451 - protein, 949 aa, Apotomis turbidana
MQSATQPVGSTSSSHICQICNKSFKSIKGLNIHVSKTHRRCLSQNAVPVLNHHLTPPSATTQPSTPFHLQLSNLKNHVPLVKRIPRGARITVATHLSKLINNCTEFNGIDDWHNLLLFAFHVLHAHDDGSSISFTQKIKNNCVRHSTPPIVSKDFPTSFNRRKTVESKVSDGDLKGAASLLFSNDVLAPDTPDTLSALQSKHPPGPPLPYFFDPPAANQACLQIKNRDVIEGISSFKIGSSAGLDGLSPQHLKDLTSHSVGDAGERLVESLTKLINNMYLGNVNPTIVPILYGANLIALTKKDGGVRPIAVGSTLRRLASKIAVRYIASKLQTLFEPIQLGFGTKGGSEAAVHALRTFLSNEPCDILVKIDVKNAFNSVNRDVLLTEIKNNVPELYNYLLHCYAEPSNLMYRKNVISSEVGCQQGDPLGPAIFSLAINPVIQNLKSKFNVWYLDDGTLGGDLDTVLIDLETIKAKFMSMGLELNFSKCELFIQNLALNVQDIKQKFDALTPNIKIVDRNSLCLLGSPIFEESFSNHILKSISKFKNYESRLLEISPHYAFSILKFCLFVPKFTYVLRCCPFSKFQNELLQMDVLIKAILESILNIQLSEKSWTQASLPIRFGGIGTRKISSISAPDFLSSVHSSADLIGKILKASPLNYETAGLTEAKRAWSIACPGKDIPQNLKSQRAWDDVMSKLTYDSLLNHSSGPERARLLAAGALESGHWLQAYPSSNTGTFLEPDTFRIATCLRLGVQICAPHKCPCGSEVDSLGHHGLSCQKSAGRFSRHAALNDTIRRSLATVNVPAILEPPGIARDDGKRPDGMSLIPWKLGRVLVWDATCVDTLAPSHLHGTSGRAGAAAEAAEKLKINKYRGLGPEYNFVPFGVETLGPWGPSAHKLLNEISKRLIESTGDRRAGSFLAQRISIAIQRGNAASVFGTMPRGHSFLDLF

SEQ ID NO: 17452 - protein, 949 aa, Apotomis turbidana
MQSATQPVGSTSSSHICQICNKSFKSIKGLNIHVSKTHRRCLSQNAVPVLNHHLTPPSATTQPSTPFHLQLSNLKNHVPLVKRIPRGARITVATHLSKLINNCTEFNGIDDWHNLLLFAFHVLHAHDDGSSISFTQKIKNNCVRHSTPPIVSKDFPTSFNRRKTVESKVSDGDLKGAASLLFSNDVLAPDTPDTLSALQSKHPPGPPLPYFFDPPAANQACLQIKNRDVIEGISSFKIGSSAGLDGLSPQHLKDLTSHSVGDAGERLVESLTKLINNMYLGNVNPTIVPILYGANLIALTKKDGGVRPIAVGSTLRRLASKIAVRYIASKLQTLFEPIQLGFGTKGGSEAAVHALRTFLSNEPCDILVKIDVKNAFNSVNRDVLLTEIKNNVPELYNYLLHCYAEPSNLMYRKNVISSEVGCQQGDPLGPAIFSLAINPVIQNLKSKFNVWYLDDGTLGGDLDTVLIDLETIKAKFMSMGLELNFSKCELFIQNLALNVQDIKQKFDALTPNIKIVDRNSLCLLGSPIFEESFSNHILKSISKFKNYESRLLEISPHYAFSILKFCLFVPKFTYVLRCCPFSKFQNELLQMDVLIKAILESILNIQLSEKSWTQASLPIRFGGIGTRKISSISAPAFLSSVHSSADLIGKILKASPLNYETAGLTEAKRAWSIACPGKDIPQNLKSQRAWDDVMSKLTYDSLLNHSSGPERARLLAAGALESGHWLQAYPSSNTGTFLEPDTFRIATCLRLGVQICAPHKCPCGSEVDSLGHHGLSCQKSAGRFSRHAALNDTIRRSLATVNVPAILEPPGIARDDGKRPDGMSLIPWKLGRVLVWDATCVDTLAPSHLHGTSGRAGAAAEAAEKLKINKYRGLGPEYNFVPFGVETLGPWGPSAHKLLNEISKRLIESTGDRRAGSFLAQRISIAIQRGNAASVFGTMPRGHSFLDLF

SEQ ID NO: 17453 - protein, 947 aa, Pammene fasciana
MYPATQPANSTSNNNQCQLCNKSFKSKKGLNIHIAKSHRPCLSQNATPINSNQINLPSSTAPQPTTPFHIHLSHLKSNVTVVKRIPRGARISVASHLAHLIDKCTENNTTADWHQLLLFPYHTLHARDDDSNISLTQKIKNNCINNPPPLLHKNKNNLIFNRPKHVESKISDGDLKGAARLLFSSDVLSPETPDTLLALQSKHPPGPSIPHSLAPPTANQACLQIKNRDVMEGIFSCKIGSAAGLDGLSPQHLKDLISHTAGDAGERLLDSITKLINFMYTGNVNPEIVPILYGANLIALTKKDGGVRPIAVGSTFRRLASKIAVRYILSKLKPLFEPIQLGFGTKGGCEAAVHALRTYLLNSPCDVLVKIDVRNAFNSVNRDTLLTEIKSNTPEIYNYLLNCYADPTKLVYRENVLSSEVGCQQGDPLGPAIFSLAINPIIQNLKSIFNVWYLDDGTLGGDLESVLSDLSTIQSKFRSIGLDLNYAKCELYIHNTSLNSIDVKQKFDSLTPNIKIVNKSSLCLLGSPIFDESFSNYISDTITKFQNFECRLLEISPHFALTVLKFCLFVPKLTYVLRCCPFSKFQNLLIPMDNLIKANVESILNLQLSEESWTQASLPIRYGGIGIRKISSVSAPAFLSSVHSSASLVGKILRACPLNYEIAGLTEAKNAWSIACPGKDFPDNLTSQRTWDDISCKIIYDTLLSHSTGSERARLLAVGSKEAGARLHAFPSVHTGTFLEPHTLRVAACLRLGVRVCAPHRCPCGSDVDVLGHHGLSCQRSAGRFSRHAALNDILRRSLASVNVPALLEPAGILRDDGRRPDGMSLVPWKMGRVLVWDATCVDTLAPSHLHGTSARAGAAADAAEKSKINKYRGLGVEYNFVPFGVETLGPWGPSAHALFRDLSKRLVDATGDRRAGSFLAQRIGIAIQRGNAASIYGTMPRGDFLV

SEQ ID NO: 17454 - protein, 949 aa, Apotomis turbidana
MQSATQPVGSTSSSHICQICNKSFKSIKGLNIHVSKTHRRCLSQNAVPVLNHHLTPPSATTQPSTPFHLQLSNLKNHVPLVKRIPRGARITVATHLSKLINNCTEFNGIDDWHNLLLFAFHVLHAHDDGSSISFTQKIKNNCVRHSTPPIVSKDFPTSFNRRKTVESKVSDGDLKGAASLLFSNDVLAPDTPDTLSALQSKHPPGPPLPYFFDPPAANQACLQIKNRDVIEGISSFKIGSSAGLDGLSPQHLKDLTSHSVGDAGERLVESLTKLINNMYLGNVNPTIVPILYGANLIALTKKDGGVRPIAVGSTLRRLASKIAVRYIASKLQTLFEPIQLGFGTKGGSEAAVHALRTFLSNEPCDILVKIDVKNAFNSVNRDVLLTEIKNNVPELYNYLLHCYAEPSNLMYRKNVISSEVGCQQGDPLGPAIFSLAINPVIQNLKSKFNVWYLDDGTLGGDLDTVLIDLEKIKAKFMSMGLELNFSKCELFIQNLALNVQDIKQKFDALTPNIKIVDRNSLCLLGSPIFEESFSNHILKSISKFKNYESRLLEISPHYAFSILKFCLFVPKFTYVLRCCPFSKFQNELLQMDVLIKAILESILNIQLSEKSWTQASLPIRFGGIGTRKISSISAPAFLSSVHSSADLIGKILKASPLNYETAGLTEAKRAWSIACPGKDIPQNLKSQRAWDDVMSKLTYDSLLNHSSGPERARLLAAGALESGHWLQAYPSSNTGTFLEPDTFRIATCLRLGVQICAPHKCPCGSEVDSLGHHGLSCQKSAGRFSRHAALNDTIRRSLATVNVPAILEPPGIARDDGKRPDGMSLIPWKLGRVLVWDATCVDTLAPSHLHGTSGRAGAAAEAAEKLKINKYRGLGPEYNFVPFGVETLGPWGPSAHKLLNEISKRLIESTGDRRAGSFLAQRISIAIQRGNAASVFGTMPRGHSFLDLF

SEQ ID NO: 17455 - protein, 946 aa, Cydia splendana
MQPATQPAGNSTSYICQLCQKSFKSTKGLNIHTTKVHRPCLTQNIPPIDNSQINPPPFLAAAQPTTPFHLHLSHLKNNVSIVKRIPRGARITVASHLSHLINKCTENNTTADWHNLLLFPYHTLHAQDDDPSICLTQKIKNNCINNPPPPTYKNKTNIMYDRKKHIENKISDGDLKGAARLLFSNDVLSPDTPDTLLALQTKHPPGPTTPHFLDPPTANQACLQIKNRDVIIGILSFKIGSAAGLDGLSPQHLKDLTSHSVGDAGERLVDSLTKLINLMYTGNVNPEIVPILYGANLIALTKKDGGVRPIAVGSTIRRLASKIAVRYIISKLKPLFEPVQLGFGIKGGCEAAVHALRTYLSNSPCDVLVKIDVRNAFNSVNRDTLLTEIKNNIPEIYNYLLHCYADPTNLIYRENVLSSEVGCQQGDPLGPAIFSLAINPIIQNLKSKFNVWYLDDGTLGGDLESVLSDLSTIKSKFETIGLELNYSKCELFINNTSLNFSDIKPKFDLLTPNIKITDKDSLCLLGSPIFEESYSKFTCDTTSKFQTYESRLLEISPHFALTIIKFCLFVPKLMYVLRCCPFTKFLNLLTPLDDLIKTNLESILNLQFSEESWTQASLPIRHGGLGIRKISSVSTPAFLSSVHSSATLIGKILRACPPNYEITGLTESKNAWSIACPGKDFPENLNSQRAWDDIQCKITYDYLLSRSTGSARARLLAAGSRESGAWLHAFPSVHTGTFLEPHTLRVAASLRLGVRVCAPHRCPCGTDVDAFGHHGLSCQRSAGRFSRHAALNDILRRSLTSVNVPALLEPPGIVRDDGKRPDGMSLIPWKMGRVLVWDATCVDTLAPSHLHGTTSKAGAAAEAAEKLKKTKYRGLGPEYDFVPFGVETLGPWGPNASTLFKELSKRIADATGDRRSGSFLAQRISIAIQRGNAASIYGTIPQGNIL

SEQ ID NO: 17456 - protein, 947 aa, Pammene fasciana
MHPATQPANSTSNNNQCQLCNKSFKSKKGLNIHIAKSHRPCLSQNATPINSNQINLPSSTAPQPTTPFHIHLSHLKSNVTVVKRIPRGARISVASHLAHLIDKCTENNTIADWHQLLLFPYHTLHARDDDSNISLTQKIKNNCINNPPPLLHKNKNNLIFNRPKHVESKISDGDLKGAARLLFSSDVLSPETPDTLLALQSKHPPGPSIPHSLAPPTANQACLQIKNRDVMEGIFSFKIGSAAGLDGLSPQHLKDLISHTAGDAGERLLDSITKLINFMYTGNVNPEIVPILYGANLIALTKKDGGVRPIAVGSTFRRLASKIAVRYILSKLKPLFEPIQLGFGTKGGCEAAVHALRTYLLNSPCDVLVKIDVRNAFNSVNRDTLLTEIKSNTPEIYNYLLNCYADPTKLVYRENVLSSEVGCQQGDPLGPAIFSLAINPIIQNLKSKFNVWYLDDGTLGGDLESVLSDLSTIQSKFRSIGLDLNYAKCELYIHNTSLNSIDVKQKFDSLTPNIKIVNKSSLCLLGSPIFDESFSNYISDTITKFQNFECRLLEISPHFALAVLKFCLFVPKLTYVLRCCPFSKFQNVLIPMDNLIKANVESILNLQLSEESWTQASLPIRYGGIGIRKISSVSAPAFLSSVHSSASLVGKILRACPLNYEIAGLTEAKNAWSIACPGKDFPDNLTSQRTWDDISCKIIYDTLLSHSTGSERARLLAVGSKEAGAWLHAFPSVHTGTFLEPHTLRVAACLRLGVRVCAPHRCPCGSDVDVLGHHGLSCQRSAGRFSRHAALNDILRRSLASVNVPALLEPAGILRDDGRRPDGMSLVPWKMGRVLVWDATCVDTLAPSHLHGTSARAGAAADAAEKSKINKYRGLGVEYNFVPFGVETLGPWGPSAHALFRDLSKRLVDATGDRRAGSFLAQRIGIAIQRGNAASIYGTMPRGDFLV

SEQ ID NO: 17457 - protein, 949 aa, Apotomis turbidana
MQSATQPVGSTSSSHICQICNKSFKSIKGLNIHVSKTHRRCLSQNAVPVLNHHLTPPSATTQPSTPFHLQLSNLKNHVPLVKRIPRGARITVATHLSKLINNCTEFNGIDDWHNLLLFAFHVLHAHDDGSSISFTQKIKNNCVRHSTPPIVSKDFPTSFNRRKTVESKVSDGDLKGAASLLFSNDVLAPDTPDTLSALQSKHPPGPPLLYFFDPPAANQACLQIKNRDVFEGISSFKIGSSAGLDGLSPQHLKDLTSHSVGDAGERLVESLTKLINNMYLGNVNPTIVPILYGANLIALTKKDGGVRPIAVGSTLRRLASKIAVRYIASKLQTLFEPIQLGFGTKGGSEAAVHALRTFLSNEPCDILVKIDVKNAFNSVNRDVLLTEIKNNVPELYNYLLHCYAEPSNLMYRKNVISSEVGCQQGDPLGPAIFSLAINPVIQNLKSKFNVWYLDDGTLGGDLDTVLIDLETIKAKFMSMGLELNFSKCELFIQNLALNVQDIKQKFDALTPNIKIVDRNSLCLLGSPIFEESFSNHILKSISKFKNYESRLLEISPHYAFSILKFCLFVPKFTYVLRCCPFSKFQNELLQMDVLIKAILESILNIQLSEKSWTQASLPIRFGGIGTRKISSISAPAFLSSVHSSADLIGKILKASPLNYETAGLTEAKRAWSIACPGKDIPQNLKSQRAWDDVMSKLTYDSLLNHSSGPERARLLAAGALESGHWLQAYPSSNTGTFLEPDTFRIATCLRLGVQICAPHKCPCGSEVDSLGHHGLSCQKSAGRFSRHAALNDTIRRSLATVNVPAILEPPGIARDDGKRPDGMSLIPWKLGRVLVWDATCVDTLAPSHLHGTSGRAGAAAEAAEKLKINKYRGLGPEYNFVPFGVETLGPWGPSAHKLLNEISKRLIESTGDRRAGSFLAQRISIAIQRGNAASVFGTMPRGHSFLDLF

SEQ ID NO: 17458 - protein, 949 aa, Apotomis turbidana
MQSATQPVGSTSSSHICQICNKSFKSIKVPNIHVSKTHRRCLSQNAVPVLNHHLTPPSATTQPSTPFHLQLSNLKNHVPLVKRIPRGARITVATHLSKLINNYTEFNGIDDWHNLLLFAFHVLHAHDDGSSISFTQKIKNNCLRHSTPPIVSKDFPTSFNRRKTVESKVSDGDLKGAASLLFSNDVLAPDTPDTLSALQSKHPPGPPLPYFFDPPAANQACLQIKNRDVIEGISSFKIGSSAGLDGLSPQHLKDLTSHSVGDAGERLVESLTKLINNMYLGNVNPTIVPILYGANLIALTKKDGGVRPIAVGSTLRRLASKIAVRYIASKLQTLFEPIQLGFGTKGGSEAAVHALRTFLSNEPCDILVKIDVKNAFNSVNRDVLLTEIKNNVPELYNYLLHCYAEPSNLMYRKNVISSEVGCQQGDPLGPAIFSLAINPVIQNLKSKFNVWYLDDGTLGGDLDTVLIDLETIKAKFMSMGLELNFSKCELFIQNLALNVQDIKQKFDALTPNIKIVDRNSLCLLGSPIFEESFSNHILKSISKFKNYESRLLEISPHYAFSILKFCLFVPKFTYVLRCCPFSKFQNELLQMDVLIKANLESILNIQLSEKSWTQASLPIRFGGIGTRKISSISAPAFLSSVHSSADLIGKILKASPLNYETAGLTEAKRTWSIACPGKDIPQNLKSQRAWDDVMSKLIYDSLLNHSSGPERARLLATGALESGHWLQAYPSSNTGTFLEPDTFRIATCLRLGVQICAPHKCPCGSEVDSLGHHGLSCQKSAGRFSRHAALNDTIRRSLATVNVPAILEPPGIARDDGKRPDGMSLIPWKLGRVLVWDATCVDTLAPSHLHGTSGRTGAAAEAAEKLKINKYRGLGPEYNFVPFGVETLGPWGPSAHKLLNEISKRLIESTGDRRAGSFLAQRISIAIQRGNAASVFGTMPRGHSFLDLF

SEQ ID NO: 17459 - protein, 947 aa, Pammene fasciana
MHPATQPANSTSNNNQCQLCNKSFKSKKGLNIHIAKSHRPCLSQNATPINSNQINLPSSTAPQPTTPFHIHLSHLKSNVTVVKRIPRGARISVASHLAHLIDKCAENNTTADWHQLLLFPYHTLHARDDDSSISLTQKIKNNCINNPPPPSDKNKKNLIFNRPKHIESKISDGDLKGAARLLFSSDVLSPETPDTLLALQSKHPPGPSIPHSLAPPTATQACLQIKNRDVMEGILSFKIGSAAGLDGLSPQHLKDLISHTAGDAGERLVDSIAKLINFMYTGNVNPEIVPILYGANLIALTKKDGGVRPIAVGSTFRRLASKIAVRYVLSKLKPLFEPVQLGFGVKGGCEAAVHALRTYLLNSPCDVLVKIDVRNAFNSVNRDTLLTEIKTNTPEIYNYLLNCYADPTKLVYRENVLSSEVGCQQGDPLGPAIFSLAINPIIQNLKSKFNVWYLDDGTLGGDLESVLSDLSTIQSEFRSIGLDLNYAKCELYIHNTSLNFIDVKQKFDSLTPNIKIVNKTSLCLLGSPIFDESFSNYISDSITKFQNFESLLLEISPHFALTVLKFCLFVPKLTYVLRCCPFSKFQNLLIPIDNLIKANVESILNLQLSEESWTQASLPIRYGGIGIRKISSVSAPAFLSSVHSSASLVGKILRACPLNYEIAGLTEAKNAWSIACPGKDFPDNLTSQRTWDDISCKIIYDTLLSQSTGSERARLLAVGTKEAGAWLHAFPSVHTGTFLEPHTLRVAACLRLGVRVCAPHRCPCGTDVDVLGHHGLSCQRSAGRFSRHAALNDILRRSLASVNVPALLEPAGILRDDGKRPDGMSLVPWKMGRVLVWDATCVDTLAPSHLHGTSARAGAAADAAEKSKINKYRGLGVEYNFVPFGVETLGPWGPSAHALFRDISKRLVDATGDRRAGSFLAQRISIAIQRGNAASIYGTMPRGDFLV

SEQ ID NO: 17460 - protein, 946 aa, Cydia splendana
MQPATQPAGNSTSYICQLCQKSFKSTKGLNIHTTKVHRPCLTQNIPPIDNSQINPPPFLAAAQPTTPFHLHLSHLKNNVSIVKRIPRGARITVASHLSHLINKCTENNTTADWHNLLLFPYHTLHAQDDDPSICLTQKIKNNCINNPPPPTYKNKTNIMYDRKKHIENKISDGDLKGAARLLFSNDVLSPDTPDTLLALQTKHPPGPTTPHFLDPPTANQACLQIKNRDVTIGILSFKIGSAAGLDGLSPQHLKDLTSHSVGDAGERLVDSLTKLINLMYTGNVNPEIVPILYGANLIALTKKDGGVRPIAVGSTIRRLASKIAVRYIISKLKPLFEPVQLGFGIKGGCEAAVHALRTYLSNSPCDVLVKIDVRNAFNSVNRDTLLTEIKNNIPEIYNYLLHCYADPTNLIYRENVLSSEVGCQQGDPLGPAIFSLAINPIIQNLKSKFNVWYLDDETLGGDLESVLSDLSTIKSKFETIGLELNYSKCELFINNTSLNFSDIKPKFDLLTPNIKITDKDSLCLLGSPIFEESYSKFTCDTTSKFQTYESRLLEISPHFALTIIKFCLFVPKLMYVLRCCPFTKFLNLLTPLDDLIKTNLESILNLQFSEESWTQASLPIRHGGLGIRKISSVSTPAFLSSVHSSATLIGKILRACPPNYEITGLTESKNAWSIACPGKDFPENLNSQRAWDDIQCKITYDYLLSRSTGSARARLLAAGSRESGAWLHAFPSVHTGTFLEPHTLRVAACLRLGVRVCAPHRCPCGTDVDAFGYHGLSCQRSAGRFSRHAALNDILRRSLTSVNVPALLEPPGIVRDDGKRPDGMSLIPWKMGRVLVWDATCVDTLAPSHLHGTTSKAGAAAEAAEKLKKTKYRGLGPEYDFVPFGVETLGPWGPNASTLFKELSKRIADATGDRRSGSFLAQRISIAIQRGNAASIYGTIPQGDIL

SEQ ID NO: 17461 - protein, 948 aa, Cydia pomonella
MQAATQPVGSSEENHNCYLCQKSFRTIKGLNIHITKVHRQCLSQNAAPLDNRPSTTPPSISLSGQITPFHVLLSQLKSNTRVVKRIPRGARIFVASHLTHLIDQCTENNATEDWHHLLLFVYHTLHVRDDDTNISLTQKIKNNCSNHPFLLQSYNKILSAFNRKKNVEAKISDGDLKGAARLLFSSDVLSPDTPDTLVSLQEKHPPGPTTPYFLDPPMADQACLQIKNKDVMDGILSFKAGSAAGLDGLSPQHLKDLTSHYVGDAGERLIDSITKLINFMYLGKVNPDIVPILYGANLIALTKKDGGVRPIAVGTTLRRLASKIAVRYVTSKLRPLFEPVQLGFGVRGGCEAAVHALRTYLSCGPCDVLVKIDVRNAFNSVNRDALLTEVKNNVPEIYNYLLLCYADPTKLLYREKVLSSEVGCQQGDPLGPAIFSLAVNRTIQNLKSKFNVWYLDDGTIGGDLETVLSDLSDVVSKFHSIGLDLNYAKCELFIRNESLRPEDVKEKFDGMMPGIKIVDRSSLYLLGSPIFEESFQGFITDTILKFQKYESNLLEISPHFAITIMRSCLFVPKLMYVLRCCPFTKFQSLLIPVDKMIKSNLESILNLQLAEESWIQASLPIRYGGLGVRKMSCVSAPAFLSSAYSTAVLIGKILRGFPSNNETVGLAEAKNAWSIACPGKEFPENLESQSAWDDVQSKILYEDLLSRSTSSDRARLLAVGTKEAGAWLHAYPSVHTGTFLEPNTMRVATCLRLGVRVCAPHRCPCGVDVDVRGHHGLSCQRSAGRFSRHWALNDILRRALASANVPALLEPSGVLRDDGKRPDGMSLIPWEMGRVLVWDATCVDTLAPSHLHGTSVSPGAAADAAERKKRAKYSRIGQEYSFTPFGVETLGPWGPGALKFFGALSKRLVDATGDRRAGSFLAQRISIAIQRGNAASIYGTLPRGEFLF

SEQ ID NO: 17462 - protein, 957 aa, Adoxophyes honmai
MSASSQTGDSTSTDLHPCRLCQKTFKSLRGLNIHTTKVHRNSLSQNAIPPNNAPLPTSSSLPSAGDGVLNPPNNPFHIYLSHLKQNIPLVKRIPRGARTLTASHLANLINKCADNNRIEDWHNLFLFSFKTLHARADDSNCSLTQKIKNNCSNHLPPSVIPRNLPSFNRRKNVEAKISDGDLKGAARLLFSSDVLSPDTPETLSALQTKHPPGPTTPFFFDAPFPNQACLQINNTDVSNAIISFKTGSAAGLDGLSPQHLKDLTSRLVGDAGERLIDAITKLINFMFSGSVNPDIIPILYGANLIALTKKDGGVRPIAVGSTLRRLASKIAVKHITSKLQPLFEPVQLGFGVKGGCEAAVHALRTYLSNEPCDALIKIDVKNAFNSVNRDTLLTEVQSNIPELYNYLLHCYADPTNLVYRDNVLSSEVGCQQGDPLGPAIFSLAINPIIQNLKSKFNVWYLDDGTLGGDLDTLISDLATIKSKFQAIGLELNFSKCELFIQNINLNFLDLKTKFENLTPNVKIVDRNSLSLLGSPIFEESFKSFISESISKFKNYESRLLEISPHFALTILKFCLFVPKFTYVLRCCPFTKFQNELTGMDDLIKASLEAILNIQLGEDSWTQASLPIRFGGLGIRKITSVSAPAFLSSAHGSAALIGKILRACSLNYETAGLSEAKTAWSAACPGEDLPVNTKSQRAWDDIFSKLTFESLLCRSMGSERARILAAGSVEAGYWLQAFPSANTGTFLEPETLRVATCLRLGVPVCVPHRCTCGNNVDALGHHGLSCQKSAGRFSRHAALNDIIRRSLATINVPAVLEPSGIVRDDGKRPDGMSLIPWKQGRVLVWDATCVDTLAPSHLHGTSTKAGAAAEAAEKLKNTKYRGLGPEYLFLPFGVETLGPWGPSATNLVKELSKRLVDATGDRRASSFLAQRISIAIQRGNAASVFGTMPRGCPFVNIF

SEQ ID NO: 17463 - protein, 949 aa, Cydia pomonella
MQPATQPAGNSTSIICQLCQKAFKNIKGLNIHTGKVHRTCLTQNILPSHDSQINSPPSLPTAAQPTTPFHLHLSHLKNNVSIVKRIPRGARISVASHLSHIINKCTENNATEDWHRLLLFSYHTLHVQEDDSNISLTQKIKNNCANILPTPAFTYKIKSNTTFNHSKYIENKISDGDLKGAARLLFSNDVLSPDTPDTLLALQTKHPPGPTIPHFLDPPTANQACLQIKNRDVMEGILSFKIGSAAGLDGLSPQHLKDLTSHSVGDAGERLVESLTKLINVMYTGNVNPDIVPILYGANLIALSKKDGGVRPIAVGSTIRRLASKIAVRYIISKLKPLFEPVQLGFGIKGGCEAAVHALRTYLSNSSCDVLVKIDVRNAFNSVNRDTLLTEIKNNIPEIYNYLLHCYADPTKLIYRDNMISSEVGCQQGDPLGPAIFSLAINPIIQNLKSKFNVWYLDDGTLGGDLESVLSDLSTIKSKFETIGLDLNYSKCELFIHNASLNLLDVKQKFDLLTPNIKIIDKSSLCLLGSPIFEESYSNFISDTTSKFQNYESRLLEISPHFALSIIKFCLFVPELMYVLRCCSFSKFQNLLIPLDDIIKNNLESILNLQLSEESWTQASLPIRHGGIGIRKISSVSTPAFLSSVHSSAILIGKILRACPPNYEIAGLTESKNAWSIACPGKDFPENLNSQRTWDDIHCKIIYDSLLSRSIGSSRARLLAAGTKESGAWLHAFPSVHTGTFLEPHTLRVATCLRLGVRVCAPHRCPCGTDVDALGHHGLSCQRSAGRFSRHAALNDILRRSLASVNVPALLEPAGIVRDDGKRPDGMSLIPWKMGRVLVWDATCVDTLAPSHLHGTTAKPGAAAEAAEKLKKIKYRGLGPEYDFVPFGVETLGPWGPNASSLFKDLAKKIEDATGDRRAGSFLAQRISIAIQRGNAASIYGTMPQGDSF

SEQ ID NO: 17464 - protein, 717 aa, Pammene fasciana
MEGILSFKIGSAAGLDGLSPQHLKDLISHTAGDAGERLVDSIAKLINFMYTGNVNPEIVPILYGANLIALTKKDGGVRPIAVGSTFRRLASKIAVRYVLSKLKPLFEPVQLGFGVKGGCEAAVHALRTYLLNSPCDVLVKIDVRNAFNSVNRDTLLTEIKTNTPEIYNYLLNCYADPTKLVYRENVLSSEVGCQQGDPLGPAIFSLAINPIIQNLKSKFNVWYLDDGTLGGDLESVLSDLSTIPSEFRSIGLDLNYAKCELYIHNTSLNFIDVKQKFDSLTPNIKIVNKTSLCLLGSPIFDESFSNYISDSITKFQNFESRLLEISPHFALTVLKFCLFVPKLTYVLRCCPFSKFQNLLIPIDNLIKANVESILNLQLSEESWTQASLPIRYGGIGIRKISSVSAPAFLSSVHSSASLVGKILRACPLNYEIAGLTEAKNAWSIACPGKDFPDNLTSQRTWDDIPCKIIYDTLLSQSTGSERARLLAVGTKEACAWLHAFPSVHTGTFLEPHTLRVAACLRLGVRVCAPHRCPCGTDVDVLGHHGLSCQRSAGRFSRHAALNDILRRSLASVNVPALLEPAGILRDDGKRPDGMSLVPWKMGRVLVWDATCVDTLAPSHLHGTSARAGAAADAAEKSKINKYRGLGVEYNFVPFGVETLGPWGPSAHALFRDISKRLVDATGDRRAGSFLAQRISIAIQRGNAASIYGTMPRGDFLV

SEQ ID NO: 17465 - protein, 672 aa, Apotomis turbidana
MYLGNVNPTIVPILYGANLIALTKKDGGVRPIAVGSTLRRLASKIAVRYIASKLQTLFEPIQLGFGTKGGSEAAVHALRTFLSNEPCDILVKIDVKNAFNSVNRDVLLTEIKNNVPELYNYLLHCYAEPSNLMYRKNVISSEVGCQQGDPLGPAIFSLAINPVIQNLKSKFNVWYLDDGTLGGDLDTVLIDLETIKAKFMSMGLELNFSKCELFIQNLALNVQDIKQKFDALTPNIKIVDRNSLCLLGSPIFEESFSNHILKSISKFKNYESRLLEISPHYAFSILKFCLFVPKFTYVLRCCPFSKFQNELLQMDVLIKAILESILNIQLSEKSWTQASLPIRFGGIGTRKISSISAPAFLSSVHSSADLIGKILKASPLNYETAGLTEAKRAWSIACPGKDIPQNLKSQRAWDDVMSKLTYDSLLNHSSGPERARLLAAGALESGHWLQAYPSSNTGTFLEPDTFRIATCLRLGVQICAPHKCPCGSEVDSLGHHGLSCQKSAGRFSRHAALNDTIRRSLATVNVPAILEPPGIARDDGKRPDGMSLIPWKLGRVLVWDATCVDTLAPSHLHGTSGRAGAAAEAAEKLKINKYRGLGPEYNFVPFGVETLGPWGPSAHKLLNEISKRLIESTGDRRAGSFLAQRISIAIQRGNAASVFGTMPRGHSFLDLF

SEQ ID NO: 17466 - protein, 955 aa, Cydia splendana
MQTSTAATGSSSSQAFPCNQCHKSFSTTHGLNIHIGKCHKTTNSHIIATCPPAVGPQPSPSTPQQNVNFFHLHLSHLKNNIPVIKRIPRGARIAVATRLTDVINTCVESNSLDSWENLLTFSFSTLHATLDNNRLSLTQKIKNNCAHPLNHQIPIYHLNNHLSYSSCNNLKKTVEGKVSDGDLKGAARLLFSTDVLSVDSTETLSALRDKHPSAPATPYFLDPPTEPNVCLQVQDKDTLNAILSFKTGSAAGLDGFSPQHLKDLTSHCVGDTGKRLIIALTKLVNLMLSGKVNPLFVPIIYGANLIALTKKDGGIRPIAVGSTFRRLTSKISVRHVLSKLQKQFEPVQLGFGTKGGCEAAVHALRTCLFNDQCEVLLKIDVKNAFNSLNRDALLAEVNNHAPELYNYLLNCYAYPSKLLYKNHELSSEVGCQQGDPLGPAIFSLAINPVIQNLNSKFNVWYLDDGTLGGDVNTVLADLSEIKNKFKLIGLELNFAKCELYLNLYNPDIVQKFQALTPNIKVVNKDSLNLLGSPIFEEAIPSIITNTITKFKNCADRLNDINSHSALTILKFCLFVPKFTYLLRCCPFWKHQNSLLPIDNLIRSSLETILNIQLSEHSWNQACLPIRFGGLGTRKISSVALPAFLSSVHGTSSLVGKILRACPLNYETACLAEARDAWLTACPGQDLPSKLHIQRCWDDTLCKINFEVLLSSSDGPNTRARLLAAAERESGQWLHAYPSPPSGTYLEPDTLRLAVSLRLGVKVCAPHGCPCGATVDVLGHHGLSCRLSAGRLSRHAALNDIIRRSLATVNAPAILEPNGVLRDDGKRPDGMSLVPWKMGRVLVWDATCVDTLAPSHLPRTSTRAGAAAEAAENKKFSKYQGLGPQYHFVAFGVETLGPWGPSAHVLFKELSKKLADTTGDQRAGSFLSQRISIAIQRGNAASIFGTMPRGPFLDLL

SEQ ID NO: 17467 - protein, 955 aa, Cydia splendana
MQTSTAATGSSSSQAFPCNQCHKSFSTTHGLNIHIGKCHKTTNSHIIATCPPAVGPQPSPSTPQQNVNFFHLHLSHLKNNIPVIKRIPRGARIAVATRLTDVINTCVESNSLDSWENLLTFSFSTLHATLDNNRLSLTQKIKNNCAHPLNHQIPIYHLNNHLSYSSCNNLKKTVEGKVSDGDLKGAARLLFSTDVLSVDSTETLSALRDKHPSAPATPYFLDPPTEPNVCLQVQDKDTLNAILSFKTGSAAGLDGLSPQHLKDLTSHCVGDTGKRLIIALTKLVNLMLSGKVNPLFVPIIYGANLIALTKKDGGIRPIAVGSTFRRLTSKISVRHVLSKLQKQFEPVQLGFGTKGGCEAAVHALRTCLFNDQCEVLLKIDVKNAFNSLNRDALLAEVNNHAPELYNYLLNCYAYPSKLLYKNHELSSEVGCQQGDPLGPAIFSLAINPVIQNLNSKFNVWYLDDGTLGGDVNTVLADLSEIKNKFKLIGLELNFAKCELYLNLYNPDIVQKFQALTPNIKVVNKDSLNLLGSPIFEEAIPSIITNTITKFKNCADRLNDINSHSALTILKFCLFVPKFTYLLRCCPFWKHQNSLLPIDNLIRSSLETILNIQLSEHSWNQACLPIRFGGLGTRKISSVALPAFLSSVHGTSSLVGKILRACPLNYETACLTEARDAWLTACPGQDLPSKLHIQRCWDDTLCKINFEVLLSSSDGPNTRARLLAAAERESGQWLHAYPSPPSGTYLEPDTLRLAVSLRLGVKVCAPHGCPCGATVDVLGHHGLSCRLSAGRLSRHAALNDIIRRSLATVNAPAILEPNGVLRDDGKRPDGMSLVPWKMGRVLVWDATCVDTLAPSHLPRTSTRAGAAAEAAENKKFSKYQGLGPQYHFVAFGVETLGPWGPSAHVLFKELSKKLADTTGDQRAGGFLSQRISIAIQRGNAASIFGTMPRGPFLDLL

SEQ ID NO: 17468 - protein, 955 aa, Cydia splendana
MQTSTAATGSSSSQAFPCNQCHKSFSTTHGLNIHIGKCHKTTNSHIIATCPPAVGPQPSPSTPQQNVNFFHLHLSHLKNNIPVIKRIPRGARIAVATRLTDVINTCVESNSLDSWENLLTFSFSTLHATLDNNRLSLTQKIKNNCAHPLNHQIPIYHLNNHLSYSSCNNLKKTVEGKVSDGDLKGAARLLFSTDVLSVDSTETLSALRDKHPSAPATPYFLDPPTEPNVCLQVQDKDTLNAILSFKTGSAAGLDGLSPQHLKDLTSHCVGDTGKRLIIALTKLVNLMLSGKVNPLFVPIIYGANLIALTKKDGGIRPIAVGSTFRRLTSKISVRHVLSKLQKQFEPVQLGFGTKGGCEAAVHALRTCLFNDQCEVLLKIDVKNAFNSLNRDALLAEVNNHAPELYNYLLNCYAYPSKLLYKNHELSSEVGCQQGDPLGPAIFSLAINPVIQNLNSKFNVWYLDDGTLGGDVNTVLADLSEIKNKFKLIGLELNFAKCELYLNLYNPDIVQKFQALTPNIKVVNKDSLNLLGSPIFEEAIPSIITNTITKFKNCADRLNDINSHSALTILKFCLFVPKFTYLLRCCPFWKHQNSLLPIDNLIRSSLETILNIQLSEHSWNQACLPIRFGGLGTRKISSVALPAFLSSVHGTSSLVGKILRACPLNYETACLTEARDAWLTACPGQDLPSKLHIQRCWDDTLCKINFEVLLSSSDGPNTRARLLAAAERESGQWLHAYPSPPSGTYLEPDTLRLAVSLRLGVKVCAPHGCPCGATVDVLGHHGLSCRLSAGRLSRHAALNDIIRRSLATVNAPAILEPNGVLRDDGKRPDGMSLVPWKMGRVLVWDATCVDTLAPSHLPRTSTRAGAAAEAAENKKFSKYQGLGPQYHFVAFGVETLGPWGPSAHVLFKELSKKLADTTGDQRAGSFLSQRISIAIQRGNAASIFGTMPRGPFLDLL

SEQ ID NO: 17469 - protein, 955 aa, Cydia splendana
MQTSTAATGSSSSQAFPCNQCHKSFSTTHGLNIHIGKCHKTTNSHIIATCPPAVGPQPSPSTPQQNVNYFHLHLSHLKNNIPVIKRIPRGARIAVATRLTDVINTCVQSNSLDSWENLLTFSFSTLHATLDNNRLSLTQKIKNNCAHPLNHQIPIYHLNNHLSYSSCNNLKKTVEGKVSDGDLKGAARLLFSTDVLSVDSTETLSALRDKHPSAPATPYFLDPPTEPNVCLQVQDKDTLNAILSFKTGSAAGLDGLSPQHLKDLTSHCVGDTGKRLIIALTKLVNLMLSGKVNSLFVPIIYGANLIALTKKDGGIRPIAVGSTFRRLTSKISVRHVLSKLQKQFEPVQLGFGTKGGCEAAVHALRTCLFNDQCEVLLKIDVKNAFNSLNRDALLAEVNNHAPELYNYLLNCYAYPSKLLYKNHELSSEVGCQQGDPLGPAIFSLAINPVVQNLNSKFNVWYLDDGTLGGDVNTVLADLSEIKNKFKLIGLELNFAKCELYLNRYNPDIVQKFQALTPNIKVVNKDSLNLLGSPIFEEAIPSIITNTITKFKNCADCLNDINSHSALTILKFCLFVPKFTYLLRCCPFWKHQNSLLPIDNLIRSSLETILNIQLSEHSWNQACLPIRFGGLGTRKISSVALPAFLSSVHGTSSLVGKILRACPLNYETACLTEARDAWLTACPGQDLPSKLHIQRCWDDTLCKINFEVLLSSSDGPNTRARLLAAAERESGQWLHAYPSPPSGTYLEPDTLRLAVSLRLGVKVCAPHGCPCGATVDVLGHHGLSCRLSAGRLSRHAALNDIIRRSLATVNAPAILEPNGVLRDDGKRPDGMSLVPWKMGRVLVWDATCVDTLAPSHLPRTSSRAGAAAEAAENKKFSKYQGLGPQYHFVAFGVETLGPWGPSAHVLFKELSKKLADTTGDQRAGSFLSQRISIAIQRGNAASIFGTMPRGPFLDLL

SEQ ID NO: 17470 - protein, 955 aa, Cydia splendana
MQTSTAATGSSSSQAFPCNQCHKSFSTTHGLNIHIGKCHKTTNSHIIATCPPAVGPQPSPSTPQQNVNFFHLHLSHLKNNIPVIKRIPRGARIAVATRLTDVINTCVESNSLDSWENLLTFSFSTLHATLDNNRLSLTQKIKNNCAHPLNHQIPIYHLNNHLSYSSCNNLKKTVEGKVSDGDLKGAARLLFSTDVLSVDSTETLSALRDKHPSAPATPYFLDPPTEPNVCLQVQDKDTLNAILSFKTGSAAGLDGLSPQHLKDLTSHCVGDTGKRLIIALTKLVNLMLSGKVNPLFVPIIYGANLIALTKKDGGIRPIAVGSTFRRLTSKISVRHVLSKLQKQFEPVQLGFGTKGGCEAAVHALRTCLFNDQCEVLLKIDVKNAFNSLNRDALLAEVNNHAPELYNYLLNCYAYPSKLLYKNHELSSEVGCQQGDPLGPAIFSLAINPVIQNLNSKFNVWYLDDGTLGGDVNTVLADLSEMKNKFKLIGLKLNFAKCELYLNLYNPDIVQKFQALTPNIKVVNKDSLNLLGSPIFEEAIPSIITNTITKFKNCADRLNDINSHSALTILKFCLFVPKFTYLLRCCPFWKHQNSLLPIDNLIRSSLETILNIQLSEHSWNQACLPIRFGGLGTRKISSVALPAFLSSVHGTSSLVGKILRACPLNYETACLTEARDAWLTACPGQDLPSKLHIQRCWDDTLCKINFEVLLSSSDGPNTRARLLAAAERESGQWLHAYPSPPSGTYLEPDTLRLAVSLRLGVKVCAPHGCPCGATVDVLGHHGLSCRLSAGRLSRHAALNDIIRRSLATVNAPAILEPNGVLRDDGKRPDGMSLVPWKMGRVLVWDATCVDTLAPSHLPRTSTRAGAAAEAAENKKFSKYQGLGPQYHFVAFGVETLGPWGPSAHVLFKELSKKLADTTGDQRAGSFLSQRISIAIQRGNAASIFGTMPRGPFLDLL

SEQ ID NO: 17471 - protein, 953 aa, Apotomis turbidana
MQSITPSADSTSTHSCHLCPKSFLSVRGLHIHISKAHKTSSASNSTLSPSTNPQPSTSSSAQHHNVSQFHLHLSHLKNSVAVVKRIPRGARIAVATRLTEIINKCVDLNTPDSWQNFLTFSFSTLHAKIDNSQLTLTQKIKNNCINPTVFSYPISINPSTINRPRSFDLNKVVESKVSDGDLKGAARLLFSSDVLSPDSAETLSALRSKHPPAPTTPPFFGSPTGHDICLHVQDQDTLLAIFSFKTGSAAGLDGISPQHLKDLTSHCVGDAGKRLLVALTKLINFMLSGNIHPAFVPIVYGANLIALTKKDGGIRPIAVGSTFRRLASKISVRHIVDKLEKQFQPIQLGFGIKGGCEAAVHALRTCLINDQCEVLLKIDVKNAFNSVNRDALLSEVRNHIPEIYNYLLHCYGDPSKLMYRNNELSSEVGCQQGDPLGPAIFSLAINPIIQNLRSKFNVWYLDDGTLGGDANSVLTDLLEIKDKFKLIGLELNFNKCELFLSRDLPDVVQEFNTICPNIKILDKTTLNLLGCPIFDEAIPDVIGLAISKFRYSADRLLEINSHYALTILKFCLFVPKFTYLLRCCPFWKQKNSLVSVDHIIKSSLESILNIQLKEQSWNQASLPIRYGGLGTRKISSVALPAFLSSVHGSAVLVGKILRAFPSNCETVGLSDAREAWQLACPGQNFPTSLNSQRSWDDAYSKLLLNNSIDSSSGSTRARLLAAAQWEAGQWLHAYPSPTTGTFIEPDTLRLAVSLRLGVMVCTPHKCPCGTFVDELGHHGLSCNHSAGRLSRHAALNDIIRRALATVNVPAILEPNGVSRDDGKRPDGMTLVPWKMGRVLVWDATCVDTLAPSHLPRTSIRACGAAETAESRKIHKYRGLGSQYHFTAFGVETLGPWGPSARILFKELAKRLIDTTGDQRAGSFLAQRLSIAIQRGNAASVFGTMPRGPFLDLV

SEQ ID NO: 17472 - protein, 953 aa, Apotomis turbidana
MYLLTPSADSTSTHSCHLCPKSFLSVRGLHIHISKAHKTSSASNSTLSPSTNPQPSTSSSAQHHNVSQFHLHLSHLKNSVAVVKRIPRGARIAVATRLTEIINKCVDLNTPDSWQNFLTFSFSTLHAKIDNSQLTLTQKIKNNCINPTVFSYPISINPSTINRPRSFDLNKVVESKVSDGDLKGAARLLFSSDVLSPDSAETLSALRSKHPPAPTTPPFFDSPTGHDICLHVQDQDTLLAIFSFKTGSAAGLDGISPQHLKDLTSHCVGDAGKRLLVALTKLINFMLSGNIHPAFVPIVYGANLIALTKKDGGIRPIAVGSTFRRLASKISVRHIVDKLEKQFQPIQLGFGIKGGCEAAVHALRTCLINDQCEVLLKIDVKNAFNSVNRDALLSEVRNHIPEIYNYLLHCYGDPSKLMYRNNELSSEVGCQQGDPLGPAIFSLAINPIIQNLRSKFNVWYLDDGTLGGDANSVLADLLEIKDKFKLIGLELNFNKCELFLSRDLPDVVQKFNTICPNIKILDKTTLNLLGCPIFDEAIPDVIGLAISKFRYSADRLLEINSHYALTILKFCLFVPKFTYLLRCCPFWKQKNSLVSVDHIIKSSLESILNIQLKEQSWNQASLPIRYGGLGTRKISSVALPAFLSSVHGSAVLVGKILRAFPSNCETVGLSDAREAWQLACPGQNFPTSLNSQRSWDDAYSKLLLNNSIDSSSGSTRARLLAAAQWEAGQWLHAYPSPTTGTFIEPDTLRLAVSLRLGVMVCTPHKCPCGTFVDELGHHGLSCNHSAGRLSRHAALNDIIRRALATVNVPAILEPNGVSRDDGKRPDGMTLVPWKMGRVLVWDATCVDTLAPSHLPRTSIRACGAAETAESRKIHKYRGLGSQYHFTAFGVETLGPWGPSARILFKELAKRLIDTTGDQRAGSFLAQRLSIAIQRGNAASVFGTMPRGPFLDLV

SEQ ID NO: 17473 - protein, 964 aa, Apotomis turbidana
MLIATRIPTFIGWLHVTGGGGIIITQVHKAIGADLIIIGLHIHISKAHKTSSASNSTLSPSTNPQPSTSSSAQHHNVSQFHLHLSHLKNSVAVVKRIPRGARIAVATRLTEIINKCVDLNTPDSWQNFLTFSFSTLHAKIDNSQLTLTQKIKNNCINPTVFSYPISINPSTINRPRSFDLNKVVESKVSDGDLKGAARLLFSSDVLSPDSAETLSALRSKHPPAPTTPPFFDSPTGHDICLHVQDQDTLLAIFSFKTGSAAGLDGISPQHLKDLTSHCVGDAGKRLLVALTKLINFMISGNIHPAFVPIVYGANLIALTKKDGGIRPIAVGSTFRRLASKISVRHIVDKLEKQFQPIQLGFGIKGGCEAAVHALRTCLINDQCEVLLKIDVKNAFNSVNRDALLSEVRNHIPEIYNYLLHCYGDPSKLMYRNNELSSEVGCQQGDPLGPAIFSLAINPIIQNLRSKFNVWYLDDGTLGGDANSVLTDLLEIKDKFKLIGLELNFNKCELFLSRDLPDVVQKFNTICPNIKILDKTTLNLLGCPIFDEAIPDVIGLAISKFRYSADRLLEINSHYALTILKFCLFVPKFTYLLRCCPFWKQKNSLVSVDHIIKSSLESILNIQLKEQSWNQASLPIRYGGLGTRKISSVALPAFLSSVHGSAVLVGKILRAFPSNCETVGLSDAREAWQLACPGQNFPTSLNSQRSWDDAYSKLLLNNSIDSSSGSTRARLLAAAQWEAGQWLHAYPSPTTGTFIEPDTLRLAVSLRLGVMVCTPHKCPCGTFVDELGHHGLSCNHSAGRLSRHAALNDIIRRALATVNVPAILEPNGVSRDDGKRPDGMTLVPWKMGRVLVWDATCVDTLAPSHLPRTSIRACGAAETAESRKIHKYRGLGSQYHFTAFGVETLGPWGPSARILFKELAKRLIDTTGDQRAGSFLAQRLSIAIQRGNAASVFGTMPRGPFLDLV

SEQ ID NO: 17474 - protein, 953 aa, Apotomis turbidana
MQSITPSADSTSTHSCHLCPKSFLSVRGLHIHISKAHKTSSASNSTLSPSTNPQPSTSSSAQHHNVSQFHLHLSHLKNSVAVVKRIPRGARIAVATRLTEIINKCVDLNTPDSWQNFLTFSFSTLHAKIDNSQLTLTQKIKNNCINPTVFSYPISINPSTINRPRSFDLNKVVESKVSDGDLKGAARLLFSSDVLSPDSAETLSALRSKHPPAPTTPPFFDSPTGHDICLHVQDQDTLLAIFSFKTGSAAGLDGISPQHLKDLTSHCVGDAGKRLLVALTKLINFMLSGNIHPAFVPIVYGANLIALTKKDGGIRPIAVGSTFRRLASKISVRHIVDKLEKQFQPIQLGFGIKGGCEAAVHALRTCLINDQCEVLLKIDVKNAFNSVNRDALLSEVRNHIPEIYNYLLHCYGDPSKLMYRNNELSSEVGCQQGDPLGPAIFSLAINPIIQNLRSKFNVWYLDDGTLGGDANSVLTDLLEIKDKFKLIGLELNFNKCELFLSRDLPDVVQEFNTICPNIKILDKTTLNLLGCPIFVEAIPDVIGLAISKFRYSADRLLEINSHYALTILKFCLFVPKFTYLLRCCPFWKQKNSLVSVDHIIKSSLESILNIQLKEQSWDQASLPIRYGGLGTRKISSVALPAFLSSVHGSAVLVGKILRAFPSNCETVGLSDAREAWQLACPGQNFPTSLNSQRSWDDAYSKLLLNNSIDSSSGSTRARLLAAAQWEAGQWLHAYPSPTTGTFIEPDTLRLAVSLRLGVMVCTPHKCPCGTFVDELGHHGLSCNHSAGRLSRHAALNDIIRRALATVNVPAILEPNGVSRDDGKRPDGMTLVPWKMGRVLVWDATCVDTLAPSHLPRTSIRACGAAETAESRKIHKYRGLGSQYHFTAFGVETLGPWGPSARILFKELAKRLIDTTGDQRAGSFLAQRLSIAIQRGNAASVFGTMPRGPFLDLV

SEQ ID NO: 17475 - protein, 668 aa, Apotomis turbidana
MLSGNIHPAFVPIVYGANLIALTKKDGGIRPIAVGSTFRRLASKISVRHIVDKLEKQFQPIQLGFGIKGGCEAAVHALRTCLINDQCEVLLKIDVKNAFNSVNRDALLSEVRNHIPEIYNYLLHCYGDPSKLMYRNNELSSEVGCQQGDPLGPAIFSLAINPIIQNLRSKFNVWYLDDGTLGGDANSVLTDLLEIKDKFKLIGLELNFNKCELFLSRDLPDVVQEFNTICPNIKILDKTTLNLLGCPIFDEAIPDVIGLAISKFRYSADRLLEINSHYALTILKFCLFVPKFTYLLRCCPFWKQKNSLVSVDHIIKSSLESILNIQLKEQSWDQASLPIRYGGLGTRKISSVALPAFLSSVHGSAVLVGKILRAFPSNCETVGLSDAREAWQLACPGQNFPTSLNSQRSWDDAYSKLLLNNSIDSSSGSTRARLLAAAQWEAGQWLHAYPSPTTGTFIEPDTLRLAVSLRLGVMVCTPHKCPCGTFVDELGHHGLSCNHSAGRLSRHAALNDIIRRALATVNVPAILEPNGVSRDDGKRPDGMTLVPWKMGRVLVWDATCVDTLAPSHLPRTSIRACGAAETAESRKIHKYRGLGSQYHFTAFGVETLGPWGPSARILFKELAKRLIDTTGDQRAGSFLAQRLSIAIQRGNAASVFGTMPRGPFLDLV

SEQ ID NO: 17476 - protein, 953 aa, Apotomis turbidana
MQSITPSADSTSTHSCHLCPKSFLSVRGLHIHISKAHKTSSASNSTLSPSTNPQPSTSSSAQHHNVSQFHLHLSHLKNSVAVVKRIPRGARIAVATRLTEIINKCVDLNTPDSWQNFLTFSFSTLHAKIDNSQLTLTQKIKNNCINPTVFSYPISINPSTINRPRSFDLNKVVESKVSDGDLKGAARLLFSSDVLSPDSAETLSALRSKHPPAPTTPPFFDSPTGHDICLHVQDQDTLLAIFSFKTGSAAGLDGISPQHLKDLTSHCVGDAGKRLLVALTKLINFMLSGNIHPAFVPIVYGANLIALTKKDGGIRPIAVGSTFRRLASKISVRHIVDKLEKQFQPIQLGFGIKGGCEAAVHALRTCLINDQCEVLLKIDVKNAFNSVNRDALLSEVRNHIPEIYNYLLHCYGDPSKLMYRNNELSSELGCQQGDPLGPAIFSLAINPIIQNLRSKFNVWYLDDGTLGGDANSVLTDLLEIKDKFKLIGLELNFNKCELFLSRDLPDVVQKFNTICPNIKILDKMTLNLLGCPIFDEAIPDVIGLAISKFRYSADRLLEINSHYALTILKFCLFVPKFTYLLRCCPFWKQKNSLVSVDHIIKSSLESILNIQLKEQSWNQASLPIRYGGLGTRKISSVALPAFLSSVHGSAVLVGKILRAFPSNCETVGLSDAREAWQLACPGQNFPTSLNSQRSWDDAYSKLLLNNSIDSSSGSTRARLLAAAQWEAGQWLHAYPSPTTGTFIEPDTLRLAVSLRLGVMVCTPHKCPCGTFVDELGHHGLSCNHSAGRLSRHAALNDIIRRALATVNVPAILEPNGVSRDDGKRPDGMTLVPWKMGRVLVWDATCVDTLAPSHLPRTSIRACGAAETAESRKIHKYRGLGSQYHFTAFGVETLGPWGPSARILFKELAKRLIDTTGDQRAGSFLAQRLSIAIQRGNAASVFGTMPRGPFLDLV

SEQ ID NO: 17477 - protein, 668 aa, Apotomis turbidana
MLSGNIHPVFVPIVYGANLIALTKTDGGIRPIAVGSTFRRLASKISVRHIVDKLEKQFQPIQLGFGIKGGCEAAVHALRTCLINDQCEVLLKIDVKNAFNSVNRDALLSEVRNHIPEIYNYLLHCYGDPSKLMYRNNELSSEVGCQQGDPLGPAIFSLAINPIIQNLRSKFNVWYLDDGTLGGDANSVLTDLLEIKDKFKLIGLELNFNKCELFLSRDLPDVVQKFNTICPNIKILDKTTLNLLGSPIFDEAIPDVIGLAISKFRYSADRLLEINSHYALTILKFCLFVPKFTYLLRCCPFWKQKNSLVSVDHIIKSSLESILNIQLKEQSWNQASLPIRYGGLGTRKISSVALPAFLSSVHGSAVLVGKILRAFPSNCETVGLSDAREAWQLACPGQNFPTSLNSQRSWDDAYSKLLLNNSIDSSSGSTRARLLAAAQWEAGQWLHAYPSPTTGTFIEPDTLRLAVSLRLGVMVCTPHKCPCGTFVDELGHHGLSCNHSAGRLSRHAALNDIIRRALATVNVPAILEPNGVSRDDGKRPDGMTLVPWKMGRVLVWDATCVDTLAPSHLPRTSIRACGAAETAESRKIHKYRGLGSQYHFTAFGVETLGPWGPSARILFKELAKRLIDTTGDQRAGSFLAQRLSIAIQRGNAASVFGTMPRGPFLDLV

SEQ ID NO: 17478 - protein, 954 aa, Pammene fasciana
MQTNSPATGSTSSQVHPCIQCHKSFSSTRGLHIHIGKCHKPSNPCIAATCPPAIGLQPSLAPQNINNFHLHLSYLKNNIPIIKRIPRGARIEVATRLTEVINSCIENNSYDSWKNLLTFSFSTLHAPSDNNEVTLTQKIKNNCVNPLDHLPSINHKNNHSSQPTNSSLKKTVEGKVSDGDLKGAARLLFSNDVLSVDSTETLSALRSKHPPAPATPYFFDPPTGPDACLHTQEKDTANAILSFKTGSASGLDGISPQHLKDLTSHCVGDIGKRLINAITKLVNLMLSGNVNPLVIPIIYGANLIALTKKDGGIRPIAVGSTFRRLASKISVRHIVSKLKKQFEPVQLGFGTKGGCEAAVHALRTCLVNDQCEVLLKIDVKNAFNSVNRDALLSEIRDNIPELYNYMLHCYSIPSKLMYKNHELSSEVGCQQGDPLGPAIFSLAINPIIQNLNSKFNVWYLDDGTLGGDVDTVLSDLLEIKNKFNLIGLELNFNKCELFLNSNQPDIVQKFQALSPNIKIVRKDSLNLLGSPIYEEAIPTVITNAITKFQNCTDRLHEIDSHFALTILKFCLFVPKFTYLLRCCPFWKHTNLLLPIDAIIRSSLESILNIQLSEESWPQASLPIRFGGLGTRKISSVALPAFLSSVHGTSALVGKILRACPLNYETSCMTEAKNAWQMACPSQNLPQKLYIQRSWDDTLSKIEFDKLVNSSFGHTRARLLAAAEREAGQWLHAYPSVPVGNYLDPETIRLAVGLRLGVKVCAPHKCPCGTYVDEFGHHGLSCRFSAGRLSRHAALNNIVRRTLATVNVPAILEPSGVSRDDGKRPDGMTLIPWKMGRVLVWDATCVDTLAPSHLPRTSIRAGAAAEAAERKKVSKYRGLRPQYHFLAFGVETLGPWGPSARSLVKDLSKRLIETTGDQRAWQLPLTAAQYCYTERKCCQPPWHDAAGAIFRHILA

SEQ ID NO: 17479 - protein, 955 aa, Pammene fasciana
MQTFTAVTGNTSSQAYPCNQCHKSFSTTRGLHIHIGKCHKAPSNPSIVASCPPAVTQQPIPSTPQQIVNNFHFHLSHLKNNITIVKRIPRGARITVAARLTEVINTCVENNSPDSWKNLLTFSFSTLHAPSENNQVTLTQKIKNNCAHPLNHHPPFNHQNNHSSHHTCYNLKKTVEGKVSDGDLKGAARMLFSSDVLSVDSDETLSALRDKHPSAPATPYFLDPPTEPESCLQIQEKDTANAILSFKTGSAAGLDGISPQHLKDLTSHCVGDTGKRLIVALTKLINLMLSGKVNPLFLPIIYGANLIALTKKDGGIRPIAIGLTFRRLTSKISVRHVLSKLQKQFEPVQLGFGTKGGCEAAVHALRTCLINDQCEVLLKIDVKNAFNSLNRDALLTEVNNHVPELYNYLLNCYANPSNLMYKNHELSSEVGCQQGDPLGPAIFSLAINPIIQNLNSKFNVWYLDDGTLGGDVNTVLADLTEIKNKFKLIGLELNYDKCELFLNCNNPDSIPKFQAITPNIKVVNKDSLSLLGSPIFEEAIPSIITNAITKFKNCANRLLEINSHSALTILKCCLFVPKFTYLLRCCPFWKHQNSLLLIDDIIRSSLDSILNIQLSELSWNQASLPIRFGGLGTRKISSVALPAFLSSVHGTASLVGKILKGCPLNYETACLTDAKNAWLVACPGQDLPTKLNVQRCWDDTLCKIAYNSLLSASSGHMRARLLAAAEQESGQWLYAYPSPPIGTYLEPDTLRLAVSLRLGVKVCAPHKCPCGVLVDELGHHGLSCQMSAGRLSRHAALNDIIRRSLATVNAPAILEPNGVLRDDGRRPDGMTLVPWKMGRVLVWDATCVDTLAPSHLPRTSARAGAAAETAEAKKALKYRGLGPTYHFVAFGVETLGPWGPSARTLFKEVAKKLIETTGDQRAGSFLSQRISIAIQRGNAASIFGTMPRGPYLDVF

SEQ ID NO: 17480 - protein, 952 aa, Pammene fasciana
MQTNSPATGSTSSQVHPCIQCHKSFSSTRGLHIHIGKCHKPSNPCIAATCPPAIGLQPSLAPQNINNFHLHLSYLKNNIPIIKRIPRGARIEVATRLTEVINSCIENNSYDSWKNLLTFSFSTLHAPSDNNEVTLTQKIKNNCVNPLDHLPSINHKNNHSSQPTNSSLKKTVEGKVSDGDLKGAARLLFSNDVLSVDSTETLSALRSKHPPAPATPYFFDPPTGPDACLHTQEKDTANAILSFKTGSASGLDGISPQHLKDLTSHCVGDIGKRLINAITKLVNLMLSGNVNPLVIPIIYGANLIALTKKDGGIRPIAVGSTFRRLASKISVRHIVSKLKKQFEPVQLGFGTKGGCEAAVHALRTCLVNDQCEVLLKIDVKNAFNSVNRDALLSEIRDNIPELYNYMLHCYSIPSKLMYKNHELSSEVGCQQGDPLGPAIFSLAINPIIQNLNSKFNVWYLDDGTLGGDVDTVLSDLLEIKNKFNLIGLELNFNKCELFLNSNQPDIVQKFQALSPNIKIVRKNSLNLLGSPIYEEAIPTVITNAITKFQNCTDRLHEIDSHFALTILKFCLFVPKFTYLLRCCPFWKHTNLLLPIDAIIRSSLESILNIQLSEESWSQASLPIRFGGLGTRKISSVALPAFLSSVHGTSALVGKILRACPLNYETSCMTEAKNAWQMACPSQNLPQKLYIQRSWDDTLSKIEFDKLVNSSFGHTRARLLAAAEREAGQWLHAYPSVPVGNYLDPETIRLAVGLRLGVKVCAPHKCPCGTYVNEFGHHGLSCRFSAGRLSRHAALNNIVRRTLATVNVPAILEPSGVSRDDGKRPDGMTLIPWKMGRVLVWDATCVDTLAPSHLPRTSIRAGAAAEAAERKKVSKYRGLRPQYHFLAFGVETLGPWGPSARSLVKDLSKRLIETTGDQRAGSFLSQRLSIAIQRGNAASLLGTMPRGPFLDIF

SEQ ID NO: 17481 - protein, 668 aa, Pammene fasciana
MLSGNVNPLVIPIIYGANLIALTKKDGGIRPIAVGSTFRRLASKISVRHIVSKLKKQFEPVQLGFGTKGGCEAAVHALRTCLVNDQCEVLLKIDVKNAFNSVNRDALLSEIRDNIPELYNYMLHCYSIPSKLMYKNHELSSEVGCQQGDPLGPAIFSLAINPIIQNLNSKFNVWYLDDGTLGGDVDTVLSDLLEIKNKFNLIGLELNFNKCELFLNSNQPDIVQKFQALSPNIKIVRKDSLNLLGSPIYEEAIPTVITNAITKFQNCTDRLHEIDSHFALTILKFCLFVPKFTYLLRCCPFWKHTNLLLPIDAIIRSSLESILNIQLSEESWSQASLPIRFGGLGTRKISSVALPAFLSSVHGTSALVGKILRACPLNYETSCMTEAKNAWQMACPSQNLPQKLYIQRSWDDTLSKIEFDKLVNSSFGHTRARLLAAAEREAGQWLHAYPSVPVGNYLDPETIRLAVGLRLGVKVCAPHKCPCGTYVDEFGHHGLSCRFSAGRLSRHAALNNIVRRTLATVNVPAILEPSGVSRDDGKRPDGMTLIPWKMGRVLVWDATCVDTLAPSHLPRTSIRAGAAAEAAERKKVSKYRGLRPQYHFLAFGVETLGPWGPSARSLVKDLSKRLIETTGDQRAGSFLSQRLSIAIQRGNAASLLGTMPRGPFLDIF

SEQ ID NO: 17482 - protein, 955 aa, Pammene fasciana
MQTFTAVTGNTSSQAYPCNQCHKSFSTTRGLHIHIGKCHKAPSNPSIVASCPPAVTQQPIPSTPQQIVNNFHFHLSHLKNNITIVKRIPRGARITVAARLTEVINTCVENNSPDSWKNLLTFSFSTLHAPSENNQVTLTQKIKNNCAHPLNHHPPFNHQNNHSSHHTCYNLKKTVEGKVSDGDLKGAARMLFSSDVLSVDSDETLSALRDKHPSAPATPYFLDPPTEPESCLQIQEKDTANAILSFKTGSAAGLDGISPQHLKDLTSHCVGDTGKRLIVALTKLINLMLSGKVNPLFLPIIYGANLIALTKKDGGIRPIAIGSTFRRLTSKISVRHVLSKLQKQFEPVQLGFGTKGGCEAAVHALRTCLINDQCEVLLKIDVKNAFNSLNRDALLTEVNNHVPELYNYLLNCYANPSNLMYKNHELSSEVGCQQGDPLGPAIFSLAINPIIQNLNSKFNVWYLDDGTLGGDVNTVLADLTEIKNKFKLIGLELNYDKCELFLNCNNPDSIPKFQAITPNIKVVNKDSLSLLGSPIFEEAIPSIITNAITKFKNCANRLLEINSHSALTILKCCLFVPKFSYLLRCCPFWKHQNSLLLIDDIIRSSLDSILNIQLSELSWNQASLPIRFGGLGTRKISSVALPAFLSSVHGTASLVGKILKGCPLNYETACLTDAKNAWLVACPGQDLPTKLNVQRCWDDTLCKIAYNSLLSASSGHMRARLLAAAEQESGQWLYAYPSPPIGTYLEPDTLRLAVSLRLGVKVCAPHKCPCGVLVDELGHHGLSCQMSAGRLSRHAALNDIIRRSLATVNAPAILEPNGVLRDDGRRPDGMTLVPWKMGRVLVWDATCVDTLAPSHLPRTSARAGAAAETAEAKKALKYRGLGPTYHFVAFGVETLGPWGPSARTLFKEVAKKLIETTGDQRAGSFLSQRISIAIQRGNAASIFGTMPRGPYLDVF

SEQ ID NO: 17483 - protein, 952 aa, Pammene fasciana
MQTNSPATGSTSSQVHPCIQCHKSFSSTRGLHIHIGKCHKSSNPCIAATCPPAIGLQPSLAPQNINNFHLHLSYLKNNIPIIKRIPRGARIEVATRLTEVINSCIENNSYDSWKNLLTFSFSTLHAPSDNNEVTLTQKIKNNCVNPLDHLPSINHKNNHSSQPTNSSLKKTVEGKVSDGDLKGAARLLFSNDVLSVDSTETLSALRSKHPPAPATPYFFDPPTGPDACLHTQEKDTANAILSFKTGSASGLDGISPQHLKDLTSHCVGDIGKRLINAITKLVNLMLSGNVNPLVIPIIYGANLIALTKKDGGIRPIAVGSTFRRLASKISVRHIVSKLKKQFEPVQLGFGTKGGCEAAVHALRTCLVNDQCEVLLKIDVKNAFNSVNRDALLSEIRDNIPELYNYMLHCYSIPSKLMYKNHELSSEVGCQQGDPLGPAIFSLAINPIIQNLNSKFNVWYLDDGTLGGDVDTVLSDLLEIKNKFNLIGLELNFNKCELFLNSNQPDIVQKFQALSPNIKIVRKDSLNLLGSPIYEEAIPTVITNAITKFQNCTDRLHEIDSHFALTILKFCLFVPKFTYLLRCCPFWKHTNLLLPIDAIIRSSLESILNIQLSEESWSQASLPIRFGGLGTRKISSVALPAFLSSVHGTSALVGKILRACPLNYETSCMTEAKNAWQMACPSQNLPQKLYIQRSWDDTLSKIEFDKLVNSSFGHTRARLLAAAEREAGQWLHAYPSVPVGNYLDPETIRLAVGLRLGVKVCAPHKCPCGTYVDEFGHHGLSCRFSAGRLSRHAALNNIVRRTLATVNVPAILEPSGVSRDDGKRPDGMTLIPWKMGRVLVWDATCVDTLAPSHLPRTSIRAGAAAEAAERKKVSKYRGLRPQYHFLAFGVETLGPWGPSARSLVKDLSKRLIETTGDQRAGSFLSQRLSIAIQRGNAASLLGTMPRGPFLDIF

SEQ ID NO: 17484 - protein, 952 aa, Pammene fasciana
MQTNSPATGSTSSQVHPCIQCHKSFSSTRGLHIHIGKCHKPSNPCIAATCPPAIGLQPSLAPQNINNFHLHLSYLKNNIPIIKRIPRGARIEVATRLTEVINSCIENNSYDSWKNLLTFSFSTLHAPSDNNEVTLTQKIKNNCVNPLDHLPSINHKNNHSSQPTNSSLKKTVEGKVSDGDLKGAARLLFSNDVLSVDSTETLSALRSKHPPAPATSYFFDPPTGPDACLHTQEKDTANAILSFKTGSASGLDGISPQHLKDLTSHCVGDIGKRLINAITKLVNLMLSGNVNPLVIPIIYGANLIALTKKDGGIRPIAVGSTFRRLASKISVRHIVSKLKKQFEPVQLGFGTKGGCEAAVHALRTCLVNDQCEVLLKIDVKNAFNSVNRDALLSEIRDNIPELYNYMLHCYAIPSKLMYKNHELSSEVGCQQGDPLGPAIFSLAINPIIQNLNSKFNVWYLDDGTLGGDVDTVLSDLLEIKNKFNLIGLELNFNKCELFLNSNQPDIVQKFQALSPNIKIVRKDSLNLLGSPIYEEAIPTVITNAITKFQNCTDRLHEIDSHFALTILKFCLFVPKFTYLLRCCPFWKHTNLLLPIDAIIRSSLESILNIQLSEESWSQASLPIRFGGLGTRKISSVALPAFLSSVHGTSALVGKILRACPLNYETSCMTEAKNAWQMACPSQNLPQKLYIQRSWDDTLSKIEFDKLVNSSFGHTRARLLAAAEREAGQWLHAYPSVPVGNYLDPETIRLAVGLRLGVKVCAPHKCPCGTYVDEFGHHGLSCRFSAGRLSRHAALNNIVRRTLATVNVPAILEPSGVSRDDGKRPDGMTLIPWKMGRVLVWDATCVDTLAPSHLPRTSIRAGAAAEAAERKKVSKYRGLRPQYHFLAFGVETLGPWGPSARSLVKDLSKRLIETTGDQRAGSFLSQRLSIAIQRGNAASLLGTMPRGPFLDIF

SEQ ID NO: 17485 - protein, 766 aa, Pammene fasciana
MLFSSDVLSVDSDETLSALRDQHPSAPATPYFLDPPTEPESCLQIQEKDTANAILSFKTGSAAGLDGISPQHLKDLTSHCVGDTGKRLIVALTKLINLMLSGKVNPLFLPIIYGANLIALTKKDGGIRPIAIGSTFRRLTSKISVRHVLSKLQKQFEPVQLGFGTKGGCEAAVHALRTCLINDQCEVLLKIDVKNAFNSLNRDALLTEVNNHVPELYNYLLNCYANPSNLMYKNHELSSEVGCQQGDPLGPAIFSLAINPIIQNLNSKFNVWYLDDGTLGGDVNTVLADLTEIKNKFKLIGLELNYDKCELFLNCNNPDSIPKFQAITPNIKVVNKDSLSLLGSPIFEEAIPSIITNAITKFKNCANRLLEINSHSALTILKCCLFVPKLTYLLRCCPFWKHQNSLLLIDDIIRSSLDSILNIQLSELSWNQASLPIRFGGLGTRKISSVALPAFLSSVHGTASLVGKILKGCPLNYETACLTDAKNAWLVACPGQDLPTKLNVQRCWDDTLCKIAYNSLLSASSGHMRARLLAAAEQESGQWLYAYPSPPIGTYLEPDTLRLAVSLRLGVKVCAPHKCPCGVLVDELGHHGLSCQMSAGRLSRHAALNDIIRRSLATVNAPAILEPNGVLRDDGRRPDGMTLVPWKMGRVLVWDATCVDTLAPSHLPRTSARAGAAAETAEAKKALKYRGLGPTYHFVAFGVETLGPWGPSARTLFKEVAKKLIETTGDQRAGSFLSQRISITIQRGNAASIFGTMPRGPYLDVF

SEQ ID NO: 17486 - protein, 950 aa, Adoxophyes honmai
MHSATQPYDSTPLLHQCPLCTKSFSSNRGLNIHKSKVHKFRSQNSPPPNTTPYHTDYIPVNSAATATSPPFHIQLSSLKNKYNVIKKIPRGARISVATQLTRLIISCTESNSYVDWQNLLLFPYTTLHAKFDESSLSLTQKIKNNCSNPTVPFHTQNSVKHNMPYNLKNKVESKVSDGDLKGAARLLFSSDVLSPDTSETLSALQTKHPPAPTSPFFLDPPTSPDACLRIQENDTVKAINSFKIGSAAGLDGLSPQHLKDLTSHCVGDAGKNLIQALTKLINLMLSGNVNSEIIPVLYGANLIALTKKDGGVRPIAVGCTFRRLVSKISVRHIISKLQHDFEPVQLGFGTKGGCEAAVHALRTFLDNDQCEVLLKIDVKNAFNSVNRDTLLTEIRNNVPEIYNYLLNCYHEPSKLMYKSNELSSEVGCQQGDPLGPAIFSLAINSIIQNLKSKFNVWYLDDGTLGGDAKTVLSDLSEIIHKFKNIGLVLNFNKCELFINSTNNNPDILQLLDSLCPNIKIVDKQSLSLLGSPIFEDAFPDLIDKSVSKFQNCADRLLEISAHPALTILKFCLFLPKFTYLLRCCPFWKHQNLLIPIDALIKKSLESVLNIQLSEQSWTQASLPIRDGGLGIRKISNVALPAFLSSVHSTSNLVGKILPVNYETTGLADSRNAWLMACPGQNLPTNPNSQRSWDEVLSKLTYSKILISSSGPDRARLLAAGRKESGDWLHAYPSASIGTFLEPETLRIAVGLRLGVALCSPHRCPCGAIVDQSGHHGLSCQKSAGRFSRHAAVNDIIRRSLATANVPAVLEPTGIARDDGKRPDGMSLIPWRMGRVVVWDATCVDTLAPSHLHGTTVKAGAAAEAAETKKRAKYQGLGSCYNFIAVGIETLGPWGPSATLFFNELKKRLVDATGDQRAGSYFAQRISIAVQRGNAASLLGTMPRGPFLDLI

SEQ ID NO: 17487 - protein, 949 aa, Notocelia uddmanniana
MQPATQPTTISNSHVCQSCNKSFKTTKGLNIHITKVHRQCLSQNDLSANNNPFNPPSSLTTANPPVTPFHVHLSFLKSNVPVLKRIPRGARISVATHLSQLIDKCIENNTVADWHSLLLFPFHTLHVHDEDSTTSLTQKIKNSCFTNSVPAILKKKNFATFNRRKSIESKINDGDLKGAARLLFSNDVISPDTADTLQALQTKHPPGPSTPYFLDPPLENQACLQISNRDVINAIISFKTGSAAGLDGLSPQHLKDLTSHSVGDAGERLVGSITNLINSMYTGNIHPEIVPILYGANLIALTKKDGGVRPIAVGSTLRRLASKIAVRYIASKLQPLFEPIQLGFGIKGGCEAAVHALRTYLSSNAPCDVLVKIDVKNAFNSVNRDTLLTEIKNNIPEIYNYLLVCYADPTKLMYHETVISSEVGCQQGDPLGPAIFSLAINPIIQNFKSKFNVWYLDDGTLGGDLETVLSDLSIIKSKFQAIGLELNFSKCELFIKNNSLNFVEVKKKIEILTPNIKLIDRSTLCLLGSPIFEESFSSFISVSTSKFQNYKSRLLEISPHFAISIIRFCLFVPKLTYVLRCCPFTKFHNLLSPLDDLIKSNLESVLNMQLSEDSWTQASLPIRYGGIGIRKITNICAPAFLSSALSSANLIGKILREFPSNCETAGLSEAKNAWSIACPGKDFPQNLKSQRSWDDIQCKNTYDSLLSRSAGSDRARILAVGTREAGAWLHAYPSVHTGTFLEAHTLRVATCLRLGVRVCAPHRCPCGSEVDTLGHHGLSCQKSAGRFSRHAALNDILRRSLATVNVPALLEPPGILRDDGKRPDGMSLIPWKMGRVLVWDATCVDTLAPSHLHGTSVRAGAAAEAPEKGKQSKYRGLGAEYNFVPFGVETLGPWGPRAHDLFKEVAKRLVDTTGDQRAGSFLTQRISIAIQRGNAASIFGTMPRGDPLF

SEQ ID NO: 17488 - protein, 949 aa, Notocelia uddmanniana
MQPATQPTTISNSHVCQSCNKSFKTTKGLNIHITKVHRQCLSQNDLPANNNPFNPPSSLTTANPPVTPFHVHLSFLKSNVPVLKRIPRGARISVATHLSQLIDKCIENNTVADWHSLLLFPFHTLHVHDEDSTTSLTQKIKNSCFTNSVPAILKKKNFATFNRRKSIESKINDGDLKGAARLLFSNDVISPDTADTLQALQTKHPPGPSTPYFLDPPLANQACLQISNRDVINAIISFKTGSAAGLDGLSPQHLKDLTSHSVGDAGERLVGSITNLINSMYTGNIHPEIVPILYGANLIALTKKDGVVRPIAVGSTLRRLASKIAVRYIVSKLQPLFEPIQLGFGIKGGCEAAVHALRTYLSSNAPCDVLVKIDIKNAFNSVNRDTLLTEIKNNIPEIYNYLLVCYADPTKLMYHETVISSEVGCQQGDPLGPAIFSLAINPIIQNLKSKFNVWYLDDGTLGGDLETVLSDLSIIKSKFQAIGLELNFSKCELFIKNNSLNFVEVKKKIEILTPNIKLIDRSTLCLLGSPIFEESFSSFISVSTSKFQNYKSRLLEISPHFAISIIRFCLFVPKLTYVLRCCPFTKFLNLLSPLDDLIKSNLESVLNMQLSEDSWTQASLPIRYGGIGIRKITNICAPAFLSSAHSSANLIGKILREFPSNCETAGLTEAKNAWSIACPGKDFPQNLKSQRSWDDIQCKNTYDSLLSRSAGSDRARILAVGTREAGAWLHAYPSVHTGTFLEAHTLRVATCLRLGVRVCAPHRCPCGSEVDTLGHHGLSCQKSAGRFSRHAALNDILRRSLATVNVPALLEPPGILRDDGKRPDGMSLIPWKMGRVLVWDATCVDTLAPSHLHGTSVRAGAAAEAAEKAKQSKYRGLGAEYNFVPFGVETLGPWGPRAHDLFKEVAKRLVDTTGDQRAGSFLAQRISIAIQRGNAASIFGTMPRGDPLF

SEQ ID NO: 17489 - protein, 670 aa, Notocelia uddmanniana
MYTGNIHPEIVPILYGANLIALTKKDGGVRPIAVGSTLRRLASKIAVRYIASKLQPLFEPIQLGFGIKGGCEAAVHALRTYLSSNAPCDVLVKIDVKNAFNSVNRDTLLTEIKNNIPEIYNYLLICYADPTKLMYHETVISSEVGCQQGDPLGPAIFSLAINPIIQNLKSKFNVWYLDDGTLGGDLETVLSDLSIIKSKFQAIGLELNFSKCELFIKNSSLNFVEVKKKIEILTPNIKLIDRSSLCLLGSPIFEESFSSFISVSTSKFQNYKSRLLEISPHFAISIIRFCLFVPKLTYVLRCCPFTKFHNLLSPLDDLIKSNLESVLNMQLSEDSWTQASLPIRYGGIGIRKITNICAPAFLSSAHSSANLIGKILREFPSNCETAGLTEAKNAWSIACPGKDFPQNLKSQRSWDDIQCQNTYDSLLSRSAGSDRARILAVGTREAGAWLHAYPSVHTGTFLEAHTLRVATCLRLGVRVCAPHRCPCGSEVDTLGHHGLSCQKSAGRFSRHAALNDILRRSLATVNVPALLEPPGILRDDGKRPDGMSLIPWKMGRVLVWDATCVDTLAPSHLHGTSARAGAAAEAAEKAKQSKYRGLGAEYNFVPFGVETLGPWGPRAHDLFKEVAKRLVDTTGDQRAGSFLAQRISFAIQRGNAASIFGTMPRGDPLF

SEQ ID NO: 17490 - protein, 941 aa, Apotomis turbidana
MPSDSTSTGLHTCHICNKSFKSTKGLNIHISKTHRRCLSQNAVPSSNNICTSPPAAVPFATQPTTPFHLHLSHLKNNTPVLKRVPRGARITAATHLSHLIDKCVEVNGIEDWHNLLLFPFRILHAHDDGTSTSLTQKIKNNCFNHSSPPIVHRNSTSSFNRRKAVEAKISDGDLKGAARLLFSSDVLSPNTPDTLSALQTKHPPGPSTPYFFDPPTATQACLKIKNRDVTIAIESFKTGSAAGLDRLSPQHLKDMTSHSVGDAGERLVESLTKLINAMYLGNVNPYIVPTLYGANLIALTKKDGGVRPIAVGSTLRRLASKIAVRYISSKLQSFFEPIQLGFGVKGGCEADGWTGDALVKIDVKNAFNSVNRDTLLTEVKNNIPEINNYLLHCYADPSHLIYRENALPSEVGCQQGDPLGPAIFSLAINPIIKNLKSKFNVWYLDDGTLGGDLDTLMSDLFTIKTEFQSIGLELNFSKCELLIQNPNLNILQVKSKFDVLTPNIKIVDRYSLNLLGAPIFEESFPSFISECVSKFKNYENRLLEISPHFAITILKFCLFVPKFTYVLRCCPFTKFQILLTQLDDLIKANLESILNIHLSEESWTQASLPIRFGGIGIRKIYSISAPAFLSSAHSSAVLIGKILRAFSALNYETAGLTEAKRAWSIACPGQDFPENLKSQRTWDDVLSKLTYDSLLSRSTGSERARILAAGTKEAGHWLHAFPSANTGTFLEPDTLRISTCLRLGVPICAPHRCSCGSAVDTLGHHGLSCQKSAGRFSRHATLNDIIRRSLATVNVPALLEPSGIARDDGKRPDGMSLVPWRLGRVLVWDATCVDTLALSHLHGTSCRAGAAAEAAEKLKSTKYRGLGPEYNFVPFGVETLGPWGPSARNLYKELSKRLAETTGDRRAGSFLAQRISIAVQRGNAASVFGTMPQGSNFLNLF

SEQ ID NO: 17491 - protein, 949 aa, Apotomis turbidana
MQSATQPSDSTSTGLHTCQICNKSFQSTKGLNIHISKTHRRCLSQNAVPSSTNLFTSSPAALPSAIQPTTPFHLHLSHLKNSTPVVKRIPRGARITAATHLSHLIDKCVEVNDIEDWHNLFSFRILHVHDDGTSTSLTQKIKNNCMHHSSPPIVHKNSTSSFNRRKAVEAKISDGDLKGAARLLFSNDVLSPNTPDTLSALQTKHPPGPSTPYFFDPPAANQACLQIKNRNVIQAIESFKTGSAAGLDGLSPQHLKDLTSHSVGDAGERLVESLTKLINAMYLGNVNTQVVPTLYGANLIALTKKDGGVRPIAVGSTLRRLASKIAVRYIYSKLQSVFEPIQLGFGVKGGCEAAVHALRTYLSNKPCDALVKIDVKNAFNSVNRDTLLAEVKNNIPEIYNFLLLCYADPSHLIYPENVLSSEVGCQQGDPLGPALFSLAINPIIKKLKSKFNVWYLDDGTLEGDLDTLMSDLLTIKSEFQLIGLELNFSKCELLVQNPNLNILQVKSKFDLLTPNIKIVDRYSLSLLGAPIFEDSFPSFISECVSKFKNYENRLLEISPHFAITILKFCLFVPKFTYVLRCCPFTKFQILLTQLDDLIKANLESILNIQLSEESWTQASLPIRFGGIGIRKISSISAPAFLSSVHSSAVLIGKILKAFSALNYETAGLSEAKRAWSIACPGEDFPENSKSQSTWDDILSKLTYDSLLSRSTGSERARILAAGTKEAGHWLHAFPSANTGTFLEPDTLRISTCLRLGVPICAPHRCSCGSAVDTLGHHGLSCQKSAGHFSRHATLNDIICRSLATVNVPALLEPTGIASDDGKRPDGMSLVPWRLGRVLVWDATCVDTLALSHLHGTSGRAGAAAEAAEKLKSTKYRGLGPEYNFVPFGVETLGPWGPSAQKLHKELSKRLQETTGDRRAGSFLAQRISIAVQRGNAASIFGTMPKGSSF

SEQ ID NO: 17492 - protein, 696 aa, Apotomis turbidana
MTSHSVGDAGERLVESLTKLINAMYLGNVNPYLVPTLYGANLIALTKKDGGVRPIAVGSTLRRLASKIAVRYISSKLQSFFEPIQLGFGVKGGCEAAVHALRTYLSNKPCDALVKIDVKNAFNSVNRDTLLTEVKNNIPEIYNYLLHCYADPSHLIYRENALSSEVGCQQGDPLGPAIFSLAINPIIKNLKSKFNVWYLDDGTLGGDLDTLMSDLFTIKTEFQSIGLELNFSKCELLIQNPNLNILQVKSKFDVLTPNIKIVDRYSLSLLGAPIFEESFPSFISECVSKFKNYENRLLEISPHFAITILKFCLFVPKFTYVLRSCPFTKFQILLTQLDNLIKANLESILNIHLSEESWTQASLPIRFGRIGIRKISSISAPAFLSSAHSSAVLIGKILRAFSALNYETAGLTEAKRAWSIACPGQDFPENLKSQRTWDDVLSKLTYDSLLSRSTGSERARILAAGTKEAGHWLHAFPSANTGTFLEPDTLRISTCLRLGVPICAPHRCSCGSAVDTLGHHGLSCQKSAGRFSRHATLNDIIRRSLATVNVPALLEPSGIARDDGKRPDGMSLVPWRLGRVLVWDATCVDTLALSHLHGTSCRAGAAAEAAEKLKSTKYRGLGPEYNFVPFGVETLGPWGPSARNLYKELSKRLAETTGDRRAGSFLAQRISIAVQRGNAASVFGTMPQGSNFLNLF

SEQ ID NO: 17493 - protein, 988 aa, Pyrgus malvae
MQFVTQSCDGTSNATHTCTQCNKSFKSLRGLNIHTTKTHRKCFSQNISPLDIHHIIPSAPTYVANDQTPFHIYLSHLKNSIPIVKRIPRGARITVATHLSQLIHKCYLSNCTLDWQNLFLFSYSTLHIIKTDEPNLSLTQKIKNNCAVNSSPSPATIIKHDSPRNRNKLIENKICDGDLKGAARLLFSNDVLSPDTPDTLQALQTKHPPAPVNPYFLDPPTAGQTCLQIQNKDVRDAILSFKPGSAAGLDGISPQHLKDLISHSVGDAGEQLLNSITKLINFMYSGNVNPEIVPILFGANLIALTKKDGGVRPIAVGSTLRRLASKIAVRHILPKLNSVFEPVQLGFGVKGGCEAAVHALRSFLTYEQPDILLKIDVKNAFNSINRDTLLTEIKQHIPEIYNYLLLSYADPTKLLYRSNELSSEVGCQQGDPLGPAIFSLAINPIIKNLNSKFNVWYLDDGTLGGDLDTVFSDLFLIKNKFEAIGLELNFSKCELFVNNCNLNLNEIKQKFNILAPNIKIVNNSSLYLLGSPIFDESISEYINNSITKFQNSADRLLEISPHYALCILKFCLFLPKFTYVLRCCSFWNHPDLLTQVDDLIKISLESILNMQLNEQSWTQASLPIRYGGLGIRKISSVALPAFLSSVHSSANLISKILRASPSNFEIAGLEEARNAFLIACPGQNLPFSPISQRSWDDIYCKLTYDNLLSCSTDSARARLLAVGAHEAGYWLHAYPSSNTGTFLEPDTLRIATCLRLGVPVCAPHKCPCGSDVDKLGHHGLSCQKSAGRFSRHAALNDIIHRSLATVNVPSLREPTGIARDDGKRPDGMSLIPWKMGRVLVWDATCSDTLAPSHLHGTNIRAGAACEAAEKAKACKYRGLGTEYDFVPFGVETLGPWGPSALRLFKEITKRLVDVTGDRRAGSYLGQRISLAIQRGLFAVWCPARVAPLRFFPGGRRRRPRDTFQEMGSSIFLSNVSSTAVTNPQCQAW

SEQ ID NO: 17494 - protein, 954 aa, Pyrgus malvae
MQSVTQSCDGTSNATHTCTQCNKSFKSLRGLNIHTTKTHRKCFSQNISPLDIHHIIPSAPTYVANDQTPFHIYLSHLKNSIPIVKRIPRGARITVATHLSQLIHKCYLSNCTLDWQNLFLFSYSTLHIIKTDEPNLSLTQKIKNNCAVNSSPSPATIIKHDSPRNRNKLIENKICDGDLKGAARLLFSNDVLSPDTPDTLQALHTKHPPAPVNPYFLDPPTAGQACLQIQNKDVRDAILSFKPGSAAGLDGISPQHLKDLISHSVGDAGEQLLNSITKLINFMYSGNVNPEIVPILFGANLIALTKKDGGVRPIAVGSTLRRLASKIAVRHILPKLNSVFEPVQLGFGVKGGCEAAVHALRSFLRYEQPDILLKIDVKNAFNSINRDTLLTEIKQHIPEIYNYLLLSYADPTKLLYRSNELSSEVGCQQGDPLGPAIFSLAINPIIKNLNSKFNVWYLDDGTLGGDLDTVFSDLFLIKNKFEAIGLELNFSKCELFVNNCNLNLNEIKQKFNILAPNIKIVNNSSLYLLGSPIFDESISEYINNSITKFQNSADRLLEISPHYALCILKFCLFLPKFTYVLRCCSFWNHPDLLTQVDDLIKISLESILNMQLNEQSWTQASLPIRYGGLGIRKISSVALPAFLSSVHSSANLISKILRASPSNFEIAGLEEARNAFLIACPGQNLPFSPISQRSWDDIYCKLTYDNLLSCSTDSARARLLAVGAHEAGYWLHAYPSSNTGTFLEPDTLRIATCLWLGVPVCAPHKCPCGSDVDKLGHHGLSCQKSAGRFSRHAALNDIIHRSLATVNVPSLREPTGIARDDGKRPDGMSLIPWKMGRVLVWDATCSDTLAPSHLHGTNIRAGAACEAAEKAKAGKYRGLGTEYDFVPFGVETLGPWGPSALKLFKEITKRLVDVTGDRRAGSYLGQRISLAIQRGNAASIFGTLPKGTPFNTIF

SEQ ID NO: 17495 - protein, 954 aa, Pyrgus malvae
MQSVTQSCDGTSNATHTCTQCNKSFKSLRGLNIHTTKTHRKCFSQNISPLDIHHIIPSAPTYVANDQTPFHIYLSHLKNSIPIVKRIPRGARITVATHLSQLIHKCYLSNCTLDWQNLFLFSYSTLHIIKTDEPNLSLTQKIKNNCAVNSSPSPATIIKHDSPRNRNKLIENKICDGDLKGAARLLFSNDVLSPDTPDTLQALQTKHPPAPVNPYFLDPPTAGQACLQIQNKDVRDAILSFKPGSAAGLDGISPQHLKDLISHSVGDAGEQLLNSITKLINFMYSGNVNPEIVPILFGANLIALTKKDGGVRPIAVGSTLRRLASKIAVRHILPKLNSVFEPVQLGFGVKGGCEAAVHALRSFLTYEQPDILLKIDVKNAFNSINRDTLLTEIKQHIPEIYNYLLLSYADPTKLLYRSNELSSEVGCQQGDPLGPAIFSLAINPIIKNLNSKFNVWYLDDGTLGGDLDTVFSDLFLIKNKFEAIGLELNFSKCELFVNNCNLNLNEIKQKFNILAPNIKIVNNSSLYLLGSPIFDESISEYINNSITKFQNSADRLLEISPHYALCILKFCLFLPKFTYVLRCCSFWNHPDLLTQVDDLIKISLESILNMQLNEQSWTQASLPIRYGGLGIRKISSVALPAFLSSVHSSANLISKILRASPSNFEIAGLEEARNAFLIACPGQNLPFSPISQRSWDDIYCKLTYDNLLSCSTDSARARLLAVGAHEAGYWLHAYPSSNTGTFLEPDTLRIATCLRLGVPVCAPHKCPCGSDVDKLGHHGLSCQKSAGRFSRHAALNDIIHRSLATVNVPSLREPTGIARDDGKRPDGMSLIPWKMGRVLVWDATCSDTLAPSHLHGTNIRAGAACEAAEKAKAGKYRGLGTEYDFVPFGVETLGPWGPSALKLFKEITKRLVDVTGDRRAGSYLGQRISLAIQRGNAASIFGTLPKGTPFNTIF

SEQ ID NO: 17496 - protein, 951 aa, Melitaea cinxia
MQSVTQSCDGTSKTTHTCTQCNKIFKSLKGLKIHTTKTHRECSQNSSPLDIHPTIPRAPTYVANDATPFHTYLSHLKNSIPIIKRIPRGARITVATHLSQLIQKCYISNCTQDWQNLFLFSYSTLNIIKTDEPNLSLTQKIKNNCAVSSSPSPAPPIKHDRNRSKIIEKKICDGDLKGAARLLFSNDVLSPDTPDTLQALRTKHPPAPVNPFFLDPPTAGQECLQIQKKDVTDAILSFKPGSAAGFDGISPQHLKDLTSHSVGDAGEQLVNSITKLINFMYSGNVNPEIVPIFFGANLIALTKKDGGVRPIAVGSTLRRLASKIAVRHILPKLNSEFEPVQLGFGVKGGCEAAVHALRSFLTYGQPDVLLKIDVKNAFNSVNRDTLLTEIKQHIPEVYNYLLLSYADPTKLLYRSNELSSEVGCQQGDPLGPAIFSLAINPIIKSLNSKFNVWYLDDGTLGGDVDTVFSDLFLIKNKFEAIGLELNFSKCELFINNCDLNLNDVKQKFNILAPNIKIVNSNSLYLLGSPIFDESIPEYINNSITKFQNSVDSLLEISPHYALCILKYCLFVPKFTYALRCCSFWNHPDLLTQVDDLIKISLESILNMQMNEQSWTQASLPIRYGGLGIRKISSVALPAFLSSVHSSANLISKILRSSPSNFEIAGLEEARNVFLIACPGQNFPVSPNSQRSWDDINCKLTYDNLLSCSTGSARARLLAVGTQEAGYWLHAYPSTNTGTFLEPDTLRIATCLRLGVPVCAPHKCPCGSDVDKLGHHGLSCLKSAGRFSRHAALNDIIRRSLATVNVPSLLEPTGIARDDGKRPDGMSLIPWKMGRVLVWDATCSDTLAPSHLHGTNNRAGAACEAAEKTKADKYRGLGSEYDFVPFGVETLGPWGPSAITLFKEIAKRLVDVTGDRRAGSYFGQRISLAIQRGNAASIFGTLPKGTPFNNIF

SEQ ID NO: 17497 - protein, 953 aa, Melitaea cinxia
MQSVTQSCDGTSNTTHTCTQCNKKFKSLKGLKIHTTKTHRKCSQNSSPSDIHPITPRAPTYVANDATPFHTYLSNLKNSIPIAKRIPRGARITVAKHLSQLIQKCYISNCTQDWQNLFLFSYSTLHIIKTDEPNLSLTQKIKNNCAVSSSPSPAPPIKHDAPRNRNKVIENKICDGDLKGAARLLFSNDVLSPDTPDTLQALRTKHPPAPVNPFFLDPPTARQECLQIQNKDITGAILSFKPGSAAGLDGISPQHLKDLTSHSVGDAGEQLVNSITKLINFMYSGNVNPEIVPILFGANLIALTKKDGGVRPIAVGSTLRRLASKIAVRHILPKLNSEFEPVQLGFGVKGGCEAAVHALRSFLTYDRPDVLLKIDVKNAFNSVNRDTLLTEIKQYIPELYNYLLLSYADPTKLLYRSNELSSEVGCQQGDPLGPAIFSLAINPIIKNLNSKFNVWYLDDGTLGGDVDTVFSDLFLIKNKFEAIGLELNFSKCELFINNCDLNLNDVKQKFNILAPNIKIVNSNSLYLLGSPIFDECISEYINNSFTKFQNSVDRLLEISPHYALCILKYCLFVPKFTYALRCCSFWNHPDLLTQVDDLIKISLESILNMQLNEQSWTQASLPIRYGGLGIRKISSVALPAFLSSVHSSANLISKILRAPPSNFEIAGLEEARNAFLIACPGQNFPVSPNSQRSWDDINCKLTYENLLSCSTGTARARLLAVGTHEAGYWLHAYPSTNTGTFLEPDTLRIATCLRLGVPVCAPHKCPCGSDVDKLGHHGLSCLKSAGRFSRHAALNDIIRRSLATVNVPSLLEPTGIARDDGKRPDGMSLIPWKMGRVLVWDATCSDTLAPSHLHGTNNRAGAACEAAEKTKADKYRGLGSEYDFVPFGVETLGPWGPSAITLFKEISKRLFDVTGDRRAGSYFGQRISLAIQRGNAASIFGTLPKGTPFNNIF

SEQ ID NO: 17498 - protein, 954 aa, Clostera curtula
MQSGTQSCDGTSNAIHTCTQCNKSFKSLKGLNIHTTKTHRKCNSQISTPLDIHPIIPSDPAYVANDPTPFHTYLSHLKNSIPIVKRIPRGARITVATHLAQLIQKCYLNNCAQDWMNLFLFSYSTLHIIKTDEPNLSLTQKIKNNCAVSSSPSPAPIFKHDAPHNRKKLIENKICDGDLKGAARLLFSNDVLSPDTPDTLQALRTKHPPAPVTPYFLDPPTAGQACLQIQNKDVTDAILSFEPGSAAGLDGISPQHLKDLTSHSVGDAGEQLVNSITKLVNFMYSGNVNPEIVPILFGANLIALTKKDGGVRPIAVGSTLRRLASKIAIRHILPKLNSEFEPVQLGFGVKGGCEAAVHALRSFLTYGQPDVLLKIDVKNAFNSVNRDTLLTEIKQHIPEIYNYLLLSYAEPTKLLYRSNELSSEVGCQQGDPLGPAIFSLAINPIIKKINSKFNVWYLDDGTLGGDVDTVLSDLFIIKNKFEAIGLELNFSKCELFINNCDLNLNDVKLKFNILAPNIKIVNSNSLYLLGSPIFDESFAEYINNSITKFQNSADRLIEISPHYALCILKFCLFVPKFTYVLRCCSFWNRPDLLTQVDDLIKISLESVLNMQLNEHSWTQASLPIRYGGLGIRKISSVALPAFLSSVHSSASLISTILRASPSNFEIAGLEEARNAFLIACPGQNFPSSPNSQRSWDDINCKLSYDNLLSCSTGSTRARLLAVGTHEAGYWLHAYPSSKTGTFLEPDTLRIATCLRLGVPVCAPHKCPCGSDVDKLGHHGLSCQKSAGRFSRHAALNDIIRRSLTSVNVPSLLEPTGIARDDGKRPDGMSLIPWKMGRVLVWDATCSDTLAPSHLHGTNNRAGAACEAAEKAKAYKYRGLGSEYEFVPFGVETLGPWGPSAISLFKEIAKRLVDITGDRRAGSYLGQRISLAIQRGNAASIFGTLPKGTPLNNIF

SEQ ID NO: 17499 - protein, 954 aa, Clostera curtula
MQSGTQSCDGTSNAIHTCTQCNKSFKSLKGLNIHTTKTHRKCNSQISTPLDIHPILPSDPAYVANDPTPFHTYLSHLKNSIPIVKRIPRGARITVATHLAQLIQKCYLNNCAQDWMNLFLFSYSTLHIIKTDEPNLSLTQKIKNNCAVSSSPSPTPICKHDAPHNRKKLIENKICEGDLKGAARLLFSNDVLSPDTPDTLQALRTKHPPAPVTPYFLDPPTAGQACLQIQNKDVTDAILSFKPGSAAGLDGISPQHLKDLTSHSVGDAGEQLVHSITKLVNFMYSGNVNPEIVPILFGANLIALTKKDGGVRPIAVGSTLRRLASKIAIRHILPKLNSEFEPVQLGFGVKGGCEAAVHALRSFLTYGQPDVLLKIDVKNAFNSVNRDTLLTEIKQHIPEIYNYLLLSYAEPTKLLYRSNELSSEVGCQQGDPLGPAIFSLAINPIIKKLNSKFNVWYLDDGTLGGDVDTVLSDLFIIKNKFEAIGLELNFSKCELFINNCDLNLNDVKLKFNILAPNIKIVNSNSLYLLGSPIFDESFAEYINNSITKFQNSADRLIEISPHYALCISKFCLFVPKFTYVLRCCSFWNRPDLLTQVDDLIKISLESVLNMQLNEHSWTQASLPIRYGGLGIRKISSVALPAFLSSVHSSASLISTILRASPSNFEIAGLEEARNAFLIACPGQNFPSSPNSQRSWDDINCKLSYDNLLSCSTGSARARLLAVGTHEAGYWLHAYPSSKTGTFLEPDTLRIATCLRLGVPVCAPHKCPCGSDVDKLGHHGLSCQKSAGRFSRHAALNDIIRRSLTSVNVPSLLEPTGIARDDGKRPDGMSLIPWKMGRVLVWDATCSDTLAPSHLHGTNNRAGAACEAAEKAKGYKYRGLGSEYEFVPFGVETLGPWGPSAISLFKEIAKRLVDITGDRRAGSYLGQRISLAIQRGNAASIFGTLPKGTPLNNIF

SEQ ID NO: 17500 - protein, 954 aa, Cosmia trapezina
MQSVTQSCDGTSNATHTCTQCNKSFKSLKGLNIHTTKTHRKCISQNSSPLDIHPIIPSAPTYVASDPTPFHIYLSHLKNSIPIVKRIPRGARITVATHLSQLIQKCYIRNCTQDWQNLFLFSYSTLHIIKTDEPYLSLTQKIKNNCAVSYSPSPAPPIKHDAPRNRNKLIENKICDGDLKGAARLLFSNDVLSPDTPDTLQALQTKHPPAPVNPYFLDPPTAGQACLQIQNKDVTAAILSFKPGSAAGLDGISPQHLKDLTSHSVGDAGEQLVNSITKLINFMYSGNVNPEIVPILFGANLIALTKKDGGVRPIAVGSTLRRLASKIAVRHILPKLNSEFEPVQLGFGVKGGCEASVHALRSFLTYGQPDVLLKIDVKNAFNSVNRDTLLTEIKQHIPEIYNYLLLSYADPTKLLYRSNELSSEVGCQQGDPLGPAIFSLAINPIIKNLNSKFNVWYLDDGTLGGDVDTVFSDLFLIKNKFEAIGLELNFSKCELFINNCNLNLNDVKQKFNILAPNIKIVNSNSLYLLGSPIFDESISEYFNNSITKFQNSADRLLEISPHYALCILKFCLFVPKFTYVLRCCSFWNHPDLLTQVDDLIKISLESILNMQLNEQSWTQASLPIRYGGLGIRKISSVALPAFLSSVHSSANLISKILRASPSNFEIAGLEEARNAFLIACPGQNFPVYSNSQRSWDDIICKLTHDNLLSCSTGSARARLLAVGAHEAGYWLHAYPSSNTGTFLEPDTLRIATCLRLGVPVCAPHKCPCGSDVDRLGHHGLSCQKSAGRFSRHAALNDIIRRSLATVNVPSLLEPTGIARDDGKRPDGMSLIPWKMGRVLVWDATCSDTLAPSHLHGTSIRAGAACEAAEKGKVSKYRGLGSEYDFVPFGVETLGPWGPTAIRLFNEITKRLVDVTGDRRAGSYLGQRISLAIQRGNAASIFGTLPKGTPFNNIF

SEQ ID NO: 17501 - protein, 950 aa, Bembecia ichneumoniformis
MQSVTQSCDGTSNATHTCTQCNKPFKSLKGLNIHTTKTHRKCISQNSAPLDIHPIIPSAPTNVAPFHTYLSHLKNSIPIVKRIPRGARIIVATHLSQLIQKCYISNCTQDWQNLFLFSYSTLHIIKTDEPNSSLTQKIKNNCAVSSSPSLAPLIKHDAPRNRNKLIENKICDGDLKGAARLLFSNDVLSPDTPDTLQALQTKHPPAPVNPYFFDPPTAGQTCLQIQNKDVTDAILSFKPGSAAGLDGISPQHLKDLTSHSVGDAGENLVNSITKLINFMYSGNVNPEFVPILFGANLIALTKKDGGVRPIAVGSTLRRLASKIAVRHILPKLNAEFEPVQLGFGVKGGCEAAVHSLRSFLTYGQPDVLLKIDVKNAFNSVNRDTLLTEIKQHIPEIYNYLLLSYADPTKLLYRSNELSSEVGCQQGDPLGPAIFSLAINPIIKNLNSKFNVWYLDDGTLGGDVDTVFSDLFLIKNKFEAIGLELNFSKCELFINNCNLNSNDVKEKFNILAPNIKIVNSNSLYLLGSPIFDESFSEYINNSITKFQNSADRLLEISPHYALCILKFCLFVPKFMYVLRCCSFWNHPDLLTQVDDLIKISLESILNMQLNEQSWSQASLPIRHGGLGIRKISSVALPAFLSSVYSSENLISKILRASPSNFEIAGLEEARNAFLIACPGQNFPVSPNSQRSWDDINCKLTYDNLLSCSTGSARARLLAVGAHEAGYWLHAYPSSNTGTFLEPDTLRIATCLRLGVPVCVPHKCPCGSDVDNLGHHGLSCQKSAGRFSRHAALNDIIRRSLASVKVPSLLEPTGIARDDGKRPDGMSLIPWKMGRVLVWDATCSDTLAPSHLHGTNNRAGAACEAAEKAKACKYRGLGSEYDFVPFGVETLGPWGPSAIRLFKEIVKRLVDITGDRRAGSYLGQRISLAIQRGNAASIFGTLPKGTPFNNIF

SEQ ID NO: 17502 - protein, 952 aa, Cydia splendana
MHAATQSGDGTPYPNFNCVQCDNSFKTQRGLNIHISKKHRLCISQNDAGLNLGPSLLTTPLSDHPNSIPFHLHLSELKNNVPVIKRVPRGARITVAKHLSGLLTKCVENNQIDDWHNLFLFSFKTLHAKKDKTISLTQKIKNNCVSNTTPHISRPSGCSSSTFNRTKLIESKISDGDLKGAARLLFTNDVLSPDTPDTLSALRSKHPPAPSVPHSFAPPTADQACLQIEGKDVIDAILSFKAGSAAGLDGISPQHLKDLISHSVGDAGEQLVCSLTKLINFMFSGKINTNIVPILYGANLIALTKKDGGVRPIAVGSTLRRLASKIAVRHIRSKLQSLFEPIQLGFGTKGGCEAAVHALRTYLSLDDCEIVVKIDVKNAFNSVSRDTLLTEVKDKIPELYNYLFFCYSDSSKLMYKSHELSSEVGCQQGDPLGPAIFSLAINPIIKNLKSKFNVWYLDDGTLGGDVNTVLSDLSFIKSSFENIGLELNFSKCELFIQKSSCTLTNLQPKFDDLTPNIKSVDKYSLCLLGSPIFEESFPDYISNSITKFKSHTDRLLEISPHYALVILKFCLFVPKFTYVLRCCPFWKHQNLLSPIDDLIKISLETILNIQLSEPSWSQASLPIRFGGLGIRKISSVASPAFLASTHSTSGLIGNILRALPTNCEIAGFEDAKNAFNIACPGKQFPDNPNSQRSWDNVYCDLTYNTLLNNCTGPDRARLLAVGAREAGYWLHAHPSPNTGTFLDPASLRLATGLRLGVSVCTPHICSCGTDVDRLGHHGLSCQKSAGRFSRHASLNDIVRRSLATINVPALLEPTGIIRDDGKRPDGVSLVPWSLGRMLVWDATCVDTLAPSHLQRTTVKAGGAAESAEILKRNKYKSLGREYHFVPFGVETLGPWGPSAHKLFAEIAKRLVDVTGDRRAGGYLAQRISIAIQRGNAASILGTMPQGPILDLS

SEQ ID NO: 17503 - protein, 953 aa, Melitaea cinxia
MQSVTQSCDGTSNTTHTCTQCNKKFKSLKGLKIHTTKTHRKCSQNSSPSDIHPIIPRAPTYVAYDATPFHTYLSHLKNSIPIAKRIPRGARITVAKHLSQLIQKCYISNSTQDWQNLFLFSYSTLHIIKTDEPNLSLTQKIKNNCAVSSSPSPAPPIKHDAPRNRNKVIENKICDGDLKGAARLLFSNDVLSPDTPDTLQALRTKHPPAPVNPFFLDPPTARQECLQIQNKDVTGAILSFKPGSAAGLDGISPQHLKDLTSHSVGDAGEQLVNSITKLINFMYSGNVNPEIVPILFGANLIALTKKDGGVRPIAVGSTLRRLASKIAVRHILPKLNSEFEPVQLGFGVKGGCEAAVHALRSFLTYDRPDVLLKIDVKNAFNSVNRDTLLTEIKQYIPELYNYLLLSYADPTKLLYRSNELSSEVGCQQGDPLGPAIFSLAINPIIKNLNSKFNVWYLDDGTLGGDVNTVFSDLFLIKNKFEAIGLELNFSKCELFINNCDLNLNDVKQKFNILAPNIKIVNSNSLYLLGSPIFDECISEYINNSFTKFQNSVDRLLEISPHYALCILKYCLFVPKFTYALRCCSFRNHPDLLTQVDDLIKISLESILNMQLNEQSWTQASLPIRYGGLGIRKISSVALPAFLSSVHSSANLISKILRASPSNFEIAGLEEARNAFLIACPGQNFPVSPNSQRSWDDINCKLTYENLLSCSTGSARARLLAVGTHEAGYWLHAYPSTNTGTFLEPDTLRIATCLRLGVPVCAPHKCPCGSDVDKLGHHGLSCLKSAGRFSRHAALNDIIRRSLATVNVPSLLEPTGIARDDGKRPDGMSLIPWKMGRVLVWDATCSDTLAPSHLHGTNNRAGAACEAAEKTKADKYRGLGSEYDFVPFGVETLGPWGPSAITLFKEISKRLFDVTGDRRAGSYFGQRISLAIQRGNAASIFGTLPKGTPFNNIF

SEQ ID NO: 17504 - protein, 848 aa, Melitaea cinxia
MIKTNEPNLSLTQKIKNNCAVRSSPSPAPPIKHDAPRNRNKVIENKICDGDLKGAARLLFSNDVLSPDTPDTLQALQTKHPPAPVNPFFLDPPTARQECLQIQNKDVTGAILSFKPGSAAGLDGISPQHLKDLTSHSVGDAGEQLVNSITKLINFMYSGNVNPEIVPILFGANLIALTKKDGGVRPIAVGSTLRRLASKIAVRHILPKLNSEFEPVQLGFGVKGGCEAAVHALRSFLTYDRPDVLLKIDVKNAFNSVNRDTLLTEIKQYIPELYNYLLLSYADPTKLLYRSNELSSEVGCQQGDPLGPAIFSLAINPIIKNLNSKFNVWYLDDGTLGGDVDTVFSDLFLIKNKFEAIGLELNFSKCELFINNCDLNLNDVKQKFNILAPNIKIVNSNSLYLLGSPIFDECISEYINNSFTKFQNSVDRLLEISPHYALCILKYCLFVPKFTYALRCCSFWNHPDLLTQVDDLIKISLESILNMQLNEQSWTQASLPIRYGGLGIRKISSVALPAFLSSVHSSANLISKILRASPSNFEIAGLEEARNAFLIACPGQNFPVSPNSQRSWDDINCKLTYENLLSCSTGSARARLLAVGTHEAGYWLHAYPSTNTGTFLEPDTLRIATCLRLGVPVCAPHKCPCGSDVDKLGHHGLSCLKSAGRFSRHAALNDIIRRSLATVNVPSLLEPTGIARDDGKRPDGMSLIPWKMGRVLVWDATCSDTLAPSHLHGTNNRAGAACEAAEKTKADKYRGLGSEYDFVPFGVETLGPWGPSAITLFKEISKRLFDVTGDRRAGSYFGQRISLAIQRGNAASIFGTLPKGTPFNNIFYIQKINYPNCRTILKLCAKQQ

SEQ ID NO: 17505 - protein, 954 aa, Mellicta athalia
MQSVTQSGDGTSNTIHTCTQCNKSFKSLKGLNIHTTKTHRKCFSQDISSVDTHPIIPNTPSHASNDQIPFHTYLSHLKNSIPIIKRIPRGARITVATHLSQLIQKCYISNCTQDWQNLFLFSYSTLHIIKTDEPNLSLTQKIKNKCAASSSPSPAPLIKHDDPLNRKKLIINKICDGDLKGAARLLFSNDVLSPDTPDTLQALLTKHPPAPVNPYFLDPPTAGQACLQIQNKDVTNAISSFKPGSASGLDGISPQHLKDLTSHSVGDAGTQLLNSITKLINFMYSGNVNPEIVPILFGANLIALTKKDGGVRPIAVGSTLRRLASKIAVRHILPKLNSEFEPVQLGFGVKGGCEAAVHALRSFLTYGQPDVLLKIDVKNAFNSINRDTLLTEIKQHIPELYNYLLLSYGDPTKLLYRSNELSSEVGCQQGDPLGPAIFSLAINPIVKNLNSKFNVWYLDDGTLAGDVDTVFSDLFLIKNKFEAIGLELNFSKCELFINNSVLNLNDIKQKFNILAPNIKIVNSNSLYLLGSPIFDDSIPEYINNSITKFQNSVDRLLEISSHYALCILKFCLFVPKFTYVLRCCSFWNHPDLLTKVDKLIKISLESILNMQLNEQSWSQASLPIRYGGLGIRKISSVALPAFLSSVHSSANLISKILRASPSNFEIAGLEEARNAFLIACPGQNFPVSTNSQRSWDDINCKFTFDDLLSCSTGSARARLLAVGTHEAGYWLHAYPSPNTGTFLEPDTLRIATCLRLGVPVCVPHKCPCGSDVDKLGHHGLSCQKSAGRFSRHAALNDIIRRSLATINVPSLLEPTGIARDDGKRPDGMSLIPWKMGRVLVWDATCSDTLAPSHLHGTNNRAGAACEAAEKAKAGKYRGLGPEYDFVPFGVETLGPWGPSALRLFKEIAKRLVDITGDRRAGSYLGQRISLAIQRGNAASIFGTLPKGTPFNNIF

SEQ ID NO: 17506 - protein, 954 aa, Mellicta athalia
MQSVTQSGDGTSNTIHTCTQCNKSFKSLKGLNIHTTKTHRKCFSQDISSVATHPIIPNTPSHASNDQIPFHTYLSHLKNSIPIIKRIPRGARITVATHLSQLIQKCYISNCTQDWQNLFLFSYSTLHIIKTDEPNLSLTQKIKNKCAASSSPSPAPLIKHDDPLNRKKLIINKICDGDLKGAARLLFSNDVLSPDTPDTLQALLIKHPPAPVNPYFLDPPTAGQACLQIQNKDVTNAISSFKPGSASGLDGISPQHLKDLTSHSVGDAGTQLLNSITKLINFMYSGNVNPEIVPILFGANLIALTKKDGGVRPIAVGSTLRRLASKIAVRHILPKLNLEFEPVQLGFGVKGGCEAAVHALRSFLTYGQPDVLLKIDVKNAFNSINRDTLLTEIKQHIPELYNYLLLSYGDPTKLLYRSNELSLEVGCQQGDPLGPAIFSLAINPIIKNLNSKFNVWYLDDGTLAGDVDTVFSDLFLIKNKFEAIGLELNFSKCELFINNSVLNLNDIKQKFNILAPNIKIVNSNSLYLLGSPIFDDSIPEYINNSITKFQNSVDRLLEISSHYALCILKFCLFVPKFTYVLRCCSFWNHPDLLTKVDKLIKISLESILNMQLNEQSWTQASLPIRYGGLGIRKISSVALPAFLSSVHSSENLISKILRASPSNFEIAGLEEARNAFLIACPGQNFPVSTNSQRSWDDINCKFTFDDLLSCSTGSARARLLAVGTHEAGYWLHAYPSPNTGTFLEPDTLRIATCLRLGVPICVPHKCPCGSDVDKLGHHGLSCQKSAGRFSKHAALNDIIRRSLATINVPSLLEPTGIARDDGKRPDGMSLIPWKMGRVLVWDATCSDTLAPSHLHGTYNRAGAACEAAEKAKAGKYRGLGPEYDFVPFGVETLGPWGPSALRLFKEIAKRLVDITCDRRAGSYLGQRISLAIQRGNAASIFGTLPKGTPFNNIF

SEQ ID NO: 17507 - protein, 959 aa, Tinea trinotella
MQSVTQSCDGTSNADHTCSQCSKSFKSLKGLNIHTTKIHRKCSSQNSSPIDIHPIIPSAPTYVANNSTPFHKYLSNLKNSIPVVKRIPRGARITVATHLSKLIQKCYISNCTQDWQNLFLFSYNTLHIIKTNEPNLSLTQKIKNNCAVSSLPSPAPLAITRSIKHDAPRNRNKLIENKISDGDLKGAARLLFSNDVLSPDTPDTLQALRTKHPPAPLNPYFLDPPTAGQACLQIQNKDVTDAILSFKPGSAAGLDGISPQHLKDLTSHSVGDAGEQLVNSITKLINFMYSGNVNPEIVPILFGANLIALTKKDGGVRPIAVGSTLRRLASKIAVRHILPKLNSEFEPVQLGFGVKGGCEAAVHALRSFLTYGQPDVLLKIDVKNAFNSVNRDTLLTEIKQHIPEIYNYLLLSYADPTKLLYRSNELSSEVGCQQGDPLGPAIFSLAINPIIKNLNSNFNVWYLDDGTLGGDVNTVFSDLFLIKSKFEAIGLELNFSKCELFINNCALNLNDVKQKFNILAPNIKIVNSNSLYLLGSPIFDESISEYIKNSITKFQNSADRLLEISPHYALCILKFCLFVPKFTYVLRCCSFWNYPDLLKHVDNLIKNSLESILNMQLNEQSWTQASLPIRYGGLGIRKISSVALPAFLSSVHSSANLIGKILRATPSNFEIAALEEARNAFLIACPGQNFSISPNSQRSWDDINCKLTYDNLLSSSTGSARARLLAVGAHEAGYWLHAYPSSNTGTFLEPDTLRIATCLRLGVPVCAPHKCPCGSDVDKLGHHGLSCQKSAGRFSRHAALNDIIRRSLASVNVPSLLEPTGIARDDGKRPDGMSLIPWKMGRVLVWDATCSDTLAPSHLHGTNSRAGAACEAAEKAKACKYRGLGSEYDFVPFGVETLGPWGPSALRLFKEISKRLVDITGDRRVGSYLGQRISLAIQRGNAASIFGTLPKGTPFNNVF

SEQ ID NO: 17508 - protein, 959 aa, Tinea trinotella
MQSVTQSCDGTSNAIHTCSQCSKSFKSLKGLNIHTTKIHRKCSSQNSSPIDIHPIIPNAPTYVANNSTPFHKYLSNLKNSIPVVKRIPRGARITVATHLSKLIQKCYISNCTQDWQNLFLFSYNTLHIIKTNEPNLSLTQKIKNNCAVSSLPSPAPLAITRSIKHDAPRNRNKLIENKISDGDLKGAARLLFSNDVLSPDTPDTLQALRTKHPPAPLNPYFLDPPTAGQACLQIQNKDVTDAILSFKPGSAAGLDGISPQHLKDLTSHSVGDAGEQLVNSITKLINFMYSGNVNPEIVPILFGANLIALTKKDGGVRPIAVGSTLRRLASKIAVRHILPKLNSEFEPVQLGFGVKGGCEAAVHALRSFLTYGKPDVLLKIDVKNAFNSVNRDTLLTEIKQHIPEIYNYLLLSYADPTKLLYRSNELSSEVGCQQGDPLGPAIFSLAINPIIKNLNSNFNVWYLDDGTLGGDVNTVFSDLFLIKSKFEAIGLELNFSKCELFINNCALNLNDVKQKFNILAPNIKIVNSNSLYLLGSPIFDESISEYIKNSINKFQNSADRLLEISPHYALCILKFCLFVPKFTYVLRCCSFWNYPDLLKHVDNLIKNSLESILNMQLNEQSWTQASLPIRYGGLGIRKISSVALPAFLSSVHSSANLIGKILRATPSNFEIAALEEARNAFLIACPGQNFSISPNSQRSWDDINCKLTYDNLLSSSTGSARARLLAVGTHEAGYWLHAYPSSNTGTFLEPDTLRIATCLRLGVPVCAPHKCPCGSDVDKLGHHGLSCQKSAGRFSRHAALNDIIRRSLASVNVPSLLEPTGIARDDGKRPDGMSLIPWKMGRVLVWDATCSDTLAPSHLHGTNSRAGAACEAAEKAKACKYRGLGSEYDFVPFGVETLGPWGPSALRLFKEISKRLVDITGDRRVGSYLGQRISLAIQRGNAASIFGTLPKGTRFNNVF

SEQ ID NO: 17509 - protein, 959 aa, Tinea trinotella
MQSVTQSCDGTSNATHTCSQCSKSFKSLKGLNIHTTKIHRKCSSQNSSPIDIHPIIPSAPTYVANNSTPFHKYLSNLKNSIPVVKRIPRGARITVATHLSKLIQKCYISNCTQDWQNLFLFSYNTLHIIKTNEPNSSLTQKIKNNCAVSSLPSPAPLAITRSIKHDAPRNRNKLIENKISDGDLKGAARLLFSNDVLSPDTPDTLQALRTKHPPAPLNPYFLDPPTAGQACLQIQNKDVTDAILSFKPGSAAGLDGISPQHLKDLTSHSVGDAGEQLVNSITKLINFMYSGNVNPEIVPILFGANLIALTKKDGGVRPIAVGSTLRRLASKIAVRHILPKLNSEFEPVQLGFGVKGGCEAAVHALRSFLTYGKPDVLLKIDVKNAFNSVNRDTLLTEIKQHIPEIYNYLLLSYADPTKLLYRSNELSSEVGCQQGDPLGPAIFSLAINPIIKNLNSNFNVWYLDDGTLGGDVNTVFSDLFLIKSKFEAIGLELNFSKCELFINNCALNLNDVKQKFNILAPNIKIVNSNSLYLLGSPIFDESISEYIKNSINKFQNSADRLLEISPHYALCILKFCLFVPKFTYVLRCCSFWNYPDLLKHVDNLIKNSLESILNMQLNEQSWTQASLPIRYGGLGIRKISSVALPAFLSSVHSSANLIGKILRATPSNFEIAALEEARNAFLIACPGQNFSISPISQRSWDDINCKLTYDNLLSSSTGSARARLLAVGTHEAGYWLHANPSSNTGTFLEPDTLRIATCLRLGVPVCAPHKCPCGSDVDKLGHHGLSCQKSAGRFSRHAALNDIIRRSLASVNVPSLLEPTGIARDDGKRPDGMSLIPWKMGRVLVWDATCSDTLAPSHLHGTNSRAGAACEAAEKAKACKYRGLGSEYDFVPFGVETLGPWGPSALRLFKEISKRLVDITGDRRVGSYLGQRISLAIQRGNAASIFGTLPKGTPFNNVF

SEQ ID NO: 17510 - protein, 954 aa, Clostera curtula
MQSGTQSCDGTSNAIHTCTQCNKSFKSLKGLNIHTTKTHRKCNSQISTPLDIHPIIPSAPAYVANDPTPFHTYLSHLKNSIPIVKRIPRGARITVATHLAQLIQKCYLNNCAQDWMNLFLFSYSTLHIIKTDEPNLSLTQKIKNNCAVSSSPSPAPIFKHDAPHNRKKLIENKICDGDLKGAARLLFSNDVLSPDTPDTLQALRTKHPPAPATPYFLDPPTAGQACLQIQNKDVTDAILSFKPGSAAGLDGISPQHLKDLTSHSVGDAGEQLVNSITKLINFMYSGNVNPEIVPILFGANLIALTKKDGGVRPIAVGSTLRRLASKIAIRHILPKLNSEFEPVQLGFGVKGGCEAAVHALRSFLTYGQPDVLLKIDVKNAFNSVNRDTLLTEIKQHIPEIYNYLLLSYAEPTKLLYRSNELSSEVGCQQGDPLGPAIFSLAINPIIKKLNSKFNVWYLDDGTLGGDVDTVLSDLFIIKNKFEAIGLELNFSKCELFINNCDLNLNDVKLKFNILAPNIKIVTSNSLYLLGAPIFDVSFAEYINNSITKFQNSADRLLEISPHYALCILKFCLFVPKFTYVLRCCSFWNRPDLLTQVDDLIKISLESVLNMQLNEHSWTQASLPIRYGGLGIRKISSVALPAFLSSVHSSASLISTILRASPSNFEIAGLEEARNAFLIACPGQNFPSSPNSQRSWDDINCKLSYDNLLSCSTGSARARLLAVGAHEAGYGLHAYPSSKTGTFLEPDTLRIATCLRLGVPVCAPHKCPCGSDVDKLGHHGLSCQKSAGRFSRHAALNDIIRRSLTSVNVPSLLEPTGIARDDGKRPDGMSLIPWKMGRVLVWDATCSDTLAPSHLHGTNNRAGAACEAAEKAKAHKYRGLGSEYEFVPFGVETLGPWGPSAISLFKEIAKRLVDITGDRRAGSYLGQRISLAIQRGNAASIFGTLPKGTPLNNIF

SEQ ID NO: 17511 - protein, 937 aa, Zygaena filipendulae
MYTVCIQCNKSFKSLKGLNIHTTKTHRKCISQNGSPSDIHPIIPSAPTYVANVPTPFHTYLSHLKNSIPIVKRIPRGARITVATHLSQLIQKCYISNHTQDWQNLFLFSYSTLHIIKTDEPNLSLTQKIKNNCAVSSPPSPAPLIKHDAPRNRKNLIVNKICDGDLKGAAHLLFSNDVLSPDTPDTLQALRTKHPPAPVIPYFLDPPTAGQACLQIQNKDILNAILSFKPGSAAGLDGISPQHLKDLTSHSVGDAGEQLVNSITKLINFMYSGNVNPEIVPILFGANLIALTKKDGGVRPIAVGSTLRRLASKIAVRHILPKLKSEFEPLQLGFAVKGGCEASVHALRSFLTYGQPDVLLKIDVKNAFNSVNRDTLLSEIKQHIPEIYNYLLLSYADPTKLLYRSNELSSEVGCQQGDPLGPAIFSLAINPIIKNLNSKFNVWYLDDGTLGGDVDTVLSDLFLIKNKFEAIGLELNFSKCELFINNRNLNLNDTKQKFNILAPNIKIVNSNSLYLLGSPIFDESIPEFFNNSITKFKNSADRLLEISPHYALCILKFCLFVPKFTYVLRCCSFRNYPDLLKQVDDLIKISLESILNMQLNEKSWTQASLPIRYGGLGIRKISSVALPAFLSSIHSSANLISKILRASPSNFEIAGLEEARNAFLIACPGQNFPVCPNSQRSWDDIICKLTYDTLLSCSTGSTRARLLAVGAHEAGYWLHAYPSSRTGTFLEPDTLRIATCLRLGVPVCAPHKCPCGSDVDELGHHGLSCQKSAGRFSRHAALNDIIRRTLATVNVPSLLEPTGIARDDGKRPDGMSLIPWKMGRVLVWDATCSDTLAPSHLHGTNNRAGAACEAAENTKARKYRGLGPEYDFVPFGVETLGPWGPSAIRLFKEIAKRLVDITGDRRAGSYLAQRISLAIQRGNAASIFGTLPKGTPF

SEQ ID NO: 17512 - protein, 953 aa, Pammene fasciana
MHAATQSGDGTSNLNFICVRCDSSFKTQRGLNIHISKKHRLCISQNDAALNLDPSLSTTPLSDQPNSITFHLYLSELKNNVPVIKRVPRGARITVANHLSSLIIKCVENNQTNDWHNLFLFSFNTLHAKNDEAISLTQKIKNNCVSNTNPHISRLSKGCASSTYNRTKLIESKISDGDLKGAARLLFTNDVLSPDTPDTLSALISKHPPAPSVPHSFAPPSADQACLQIEGKDVIDAIISFKTGSAAGLDGISPQHLKDLISHSVGDAGEQLVGSLTKLINFMFSGKINPDIAPILYGANLIALTKKDGGVRPIAVGSTLRRLASKIAVRHFRSKLQSLFEPIQLGFGTKGGCEAAVHALRTYLSLDDCEIVVKIDVKNAFNSVSRDTLLTEVKENIPELYNYLFSCYSDSSKLMYKSHELSSEVGCQQGDPLGPAIFSLAINPIIKNLKSKFNVWYLDDGTLGGDVNTVLSDLSFIKSSFENIGLDLNFSKCELFIQKSSCTLADLKPKFDDLAPNIKSVDKNSLCLLGSPIFEESFPGYISNTISKFKSHTNRLIEISPHYALVILKFCLFVPKFTYVLRCCPFWKHQNLLSPIDDLIKISLETILNIQLSEPSWSQASLPIRFGGLGIRKISSVACPAFLASTHSTSGLIGNILRALPTNYEIAGFEDAKNAFKIACPGKTFPDNPKSQRSWDNVYCDLSYNTLLNNCTGPDRARLLAVGAREAGHWLHAHPSPNTGTFLDPTSLRLATGLRLGVSVCTPHICSCGTDVDRLGHHGLSCQKSAGRFSRHASLNDIIRRSLATINVPALLEPTGIIRDDGKRPDGVSLVPWSLGRMLVWDATCVDTLAPSHLQRTNVKAGAAAESAEISKRNKYKSLGREYHFVPFGVETLGPWGPSAHKFFAEIAKRLVDVTGDRRAGGFLAQRISIAIQRGNAASILGTMPQGPSLDLS

SEQ ID NO: 17513 - protein, 952 aa, Cydia splendana
MHAATQSGDGTPYPNFNCVQCDNSFKTQRGLNIHISKKHRLCISQNDAGLNLGPSLLTTPLSDHPNSIPFHLHLSELKNNVPVIKRVPRGARITVAKHLSGLLTKCVENNQIDDWHNLFLFSFKTLHAKKDKTISLTQKIKNNCVSNTTPHISRPSGCSSSTFNRTKLIESKISDGDLKGAARLLFTNDVLSPDTPDTLSALRSKHPPAPSVPHSFAPPTADQACLQIEGKDVIDAIFSFKAGSAAGLDGISPQHLKDLISHSVGDAGEQLVCSLTKLINFMFSGKINTNIVPILYGANLIALTKKDGGVRPIAVGSTLRRLASKIAVRHIRSKLQSLFEPIQLGFGTKGGCEAAVHALRTYLSLDDCEIVVKTDVKNAFNSVSRDTLLTEVKDKIPELYNYLFFCYSDSSKLMYKSHELSSEVGCQQGDPLGPAIFSLAINPIIKNLKSKFNVWYLDDGTLGGDVNTVLSDLSFIKSSFENIGLELNFSKCELFIQKSSCTLTNLQPKFDDLTPNIKSVDKYSLCLLGSPIFEESFPDYISNSITKFKSHTDRLLEISPHYALVILKFCLFVPKFTYVLRCCPFWKHQNLLSPIDDLIKISLETILNIQLSEPSWSQASLPIRFGGLGIRKISSVASPAFLASTHSTSGLIGNILRALPTNCEIAGFEDAKNAFKIACPGKQFPDNPNSQRSWDNVYCDLTYNTLLNNCTGPDRARLLAVGAREAGYWLDAHPSPNTGTFLDPASLRLATGLRLGVSVCTPHICSCGTDVDRLGHHGLSCQKSAGRFSRHASLNDIVRRSLATINVPALLEPTGIIRDDGKRPDGVSLVPWSLGRMLVWDATCVDTLAPSHLQRTTVKAGGAAESAEILKRNKYKSIGREYHFVPFGVETLGPWGPSAHKLFAEIAKRLVDVTGDRRAGGYLAQRISIAIQRGNAASILGTMPQGPILDLS

SEQ ID NO: 17514 - protein, 959 aa, Tinea trinotella
MQSVTQSCDGMSNATHTCSQCSKSFKSLKGLNIHTTKIHRKCSSQNSSPIDIHPIIPSAPTYVANNSTPFHKYLSNLKNSIPVVKRIPRGARITVATHLSKLIQKCYISNCTQDWQNLFLFSYNTLHIIKTNEPNLSLTQKIKNNCAVSSLPSPAPLAITRSIKHDAPRNRNKLIENKISDGDLKGAARLLFSNDVLSPDTPDTLQALRTKHPPAPLNPYFLDPPTAGQACLQIQNKDVTDAILSFKPGSAAGLDGISPQHLKDLTSHSVGDAGEQLVNSITKLINFMYSGNINPEIVPILFGANLIALTKKDGGVRPIAVGSTLRRLASKIAVRHILPKLNSEFEPVQLGFGVKGGCEAAVHALRSFLTYGKPDVLLKIDVKNAFNSVNRDTLLTEIKQHIPEIYNYLLLSYADPTKLLYRSNELSSEVGCQQGDPLGPAIFSLAINPIIKNLNSNFNVWYLDDGTLGGDVNTVFSDLFLIKSKFEAIGLELNFSKCELFINNCALNLNDVKQKFNILAPNIKIVNSNSLYLLGSPIFDESISEYIKNSINKFQNSADRLLEISPHYALCILKFCLFVPKFTYVLRCCSFWNYPDLLKHVDNLIKNSLESILNMQLNEQSWTQASLPIRYGGLGIRKISSVALPAFLSSIHSSANLIGKILRATPSNFEIAALEEARNAFLIACPGQNFSISPNSQRSWDDINCKLTYDNLLSSSTGSARARLLAVGTHEAGYWLHAYPSSNTGTFLEPDTLRIATCLRLGVPVCAPHKCPCGSDVDKLGHHGLSCQKSAGRFSRHAALNDIIRRSLASVNVPSLLEPTGIARDDGKRPDGMSLIPWKMGRVLVWDATCSDTLAPSHLHGTNSRAGAACEAAEKAKACKYRGLGSEYDFVPFGVETLGPWGPSALRLFKEISKRLVDITGDRRVGSYLGQRISLAIQRGNAASIFGTLPKGTPFNNVF

SEQ ID NO: 17515 - protein, 1193 aa, Tinea trinotella
MDKASYNIETLRKNNFDTWKIQAQAVLIKNGLWGYVSGAKVKPVEDEKAKARYEEQDLIARSELLLVISPSELKQVKNCKTAKELWDKLLNTHESKGPARKATLLKKLILNKMKEGDEVREYLDNFMDTVEKLNDMDININSDLLSIMILYSLPPTFETFRIAIESRDNLPAPEALKIKIIEESEARNNNLVDNGNENEALYGRNKKYTYNPRHRNKEPNVIFKYRCHKCRKKGHKAKDCKEEKAKIVNAECSYSSNFEKTDKLKWCLDSGCTSHMCHDRNKFSTLDENYKNNTLKLAAESATTDINGKGKVSLEVNNYKINLLNTLYVPNLSTNLISVAKITEKGKSVLFKKNVATVKDKSGRVELRAIKTNGLYYVSENQNSVKRSQNEANFNVTNDENEITKWHRKLGHINEADLRMSIKNELMKGLKFNLNEKLQKCETCIKGKMTRLQFAKGSSNRTNEQLETALADVTDAILSFKQGSAAGLDGISPQHLKDLTSHSVGDAGEQLVNSITKLINFMYSGNVNPEIVPILFGANLIALTKKDGGVRPIAVGSTLRRLASKIAVRHILPKLNSEFEPVQLGFGVKGGCEAAVHALRSFLTYGKPDVLLKIDVKNAFNSVNRDTLLTEIKQHIPEIYNYLLLSYADPTKLLYRSNELSSEVGCQQGDPLGPAIFSLAINPIIKNLNSNFNVWYLDDGTLGGDVNTVLSDLFLIKSKFEAIGLELNFSKCELFINNCALNLNDVKQKFNILAPNIKIVNSNSLYLLGSPIFDESISEYIKNSINKFQNSADRLLEISPHYALCILKFCLFVPKFTYVLRCCSFWNYPDLLKHVDNLIKNSLESILNMQLNEQSWTQASLPIRYGGLGIRKISSVALPAFLSSVHSSANLIGKILRATPSNFEIAALEEARNAFLIACPGQNFSISPNSQRSWDDINCKLTYDNLLSSSTGSARARLLAVGAHEAGYWLHAYPSSNTGTFLEPDTLRIATCLRLGVPVCAPHKCPCGSDVDKLGHHGLSCQKSAGRFSRHAALNDIIRRSLASVNVPSLLEPTGIARDDGKRPDGMSLIPWKMGRVLVWDATCSDTLAPSHLHGTNSRAGAACEAAEKAKACKYRGLGSEYDFVPFGVETLGPWGPSALRLFKEISKRLVDITGDRRVGSYLGQRISLAIQRGNAASIFGTLPKGTPFNNVF

SEQ ID NO: 17516 - protein, 839 aa, Clostera curtula
MNLFLFSYSTLHIIKTDEPNLSLTQKIKNNCAVSSSPSPAPIFKHDAPHNRKKLIENKICDGDLKGAARLLFSNDVLSPDTPDTLQALRTKHPPAPATPYFLDPPTAGQACLQIQNKDVTDAILSFKPGSAAGLDGISPQHLKDLTSHSVGDAGEQLVNSITKLINFMYSGNVNPEIVPILFGANLIALTKKDGGVRPIAVGSTLRRLASKIAIRHILPKLNSEFEPVQLGFGVKGGCEAAVHALRSFLTYGQPDVLLKIDVKNAFNSVNRDTLLTEIKQHIPEIYNYLLLSYAEPTKLLYRSNELSSEVGCQQGDPLGPAIFSLAINPIIKKLNSKFNVWYLDDGTLGGDVDTVLSDLFIIKNKFEAIGLELNFSKCELFINNCDLNLNDVKLKFNILAPNIKIVTSNSLYLLGAPIFDVSFAEYINNSITKFQNSADRLLEISPHYALCILKFCLFVPKFTYVLRCCSFWNRPDLLTQVDDLIKISLESVLNMQLNEHSWTQASLPIRYGGLGIRKISSVALPAFLSSVHSSASLISTILRASPSNFEIAGLEEARNAFLIACPGQNFPSSPNSQRSWDDINCKLSYDNLLSCSTGSARARLLAVGAHEAGYWLHAYPSSKTGTFLEPDTLRIATCLRLGVPVCAPHKCPCGSDVDKLGHHGLSCQKSAGRFSRHAALNDIIRRSLTSVNVPSLLEPTGIARDDGKRPDGMSLIPWKMGRVLVWDATCSDTLAPSHLHGTNNRAGAACEAAEKAKAHKYRGLGSEYEFVPFGVETLGPWGPSAISLFKEIAKRLVDITGDRRAGSYLGQRISLAIQKGNAASIFGTLPKGTPLNNIF

SEQ ID NO: 17517 - protein, 954 aa, Cosmia trapezina
MQSVTQSCDGTSNATHTCTQCNKSFKSLKGLNIHTTKTHRKCISQNSSPLDIHPIIPSAPTYVASDPTPFHIYLSHLKNSIPIVKRIPRGARITVATHLSQLIQKCYIRNCTQDWQNLFLFSYSTLHIIKTDEPYLSLTQKIKNNCAVSSSPSPAPPIKHDAPRNRNKLIENKICDGDLKGAARLLFSNDVLSPDTPDTLQALQTKHPPAPVNPYFLDPPTAGQACLQIQNNDVTAAILSFKPGSAAGLDGISPQHLKDLTSHSVGDAGEQLVNSITKLINFMYSGNVNPEIVPILFGANLIALTKKDGGVRPIAVGSTLRRLASKIAVRHILPKLNSEFEPVQLGFGVKGGCEASVHALRSFLTYGQPDVLLKIDVKNAFNSVNRDTLLTEIKQHIPEIYNYLLLSYADPTKLLYRSNELSSEVGCQQGDPLGPAIFSLAINPIIKNLNSKFNVWYLDDGTLGGDVDTVFSDLFLIKNKFEAIGLELNFSKCELFINNCNLNLNDVKQKFNILAPNIKIVNSNSLYLLGSPIFDESISEYFNNSITKFQNSADRLLEISPHYALCILKFCLFVPKFTYVLRCCSFWNHPDLLTQVDDLIKISLESILNMQLNEQSWTQASLPIRYGGLGIRKISSVALPAFLSSVHSSANLISKILRASPSNFEIAGLEEARNAFLIACPGQNFPVYSNSQRSWDDIICKLTHDNLLSCSTGSARARLLAVGAHEAGYWLHAYPSSNTGTFLEPDTLRIATCLRLGVPVCAPHKCPCGSDVDRLGHHGLSCQKSAGRFSRHAALNDIIRRSLATVNVPSLLEPTGIARDDGKRPDGMSLIPWKMGRVLVWDATCSDTLAPSHLHGTSIRAGAACEAAEKGKVSKYRGLGSEYDFVPFGVETLGPWGPTAIRLFNEITKRLVDVTGDRRAGSYLGQRISLAIQRGNAASIFGTLPKGTPFNNIF

SEQ ID NO: 17518 - protein, 672 aa, Furcula furcula
MYSGNVNPEIVPILFGANLIALTKKDGGVRPIAVGSTLRRLASKIAVRHILPKLNSEFEPVQLGFGVKGGCEAAVHALRSFLTYGQPDVLLKIDVKNAFNSVNRDTLLTEIKQHIPEIYNYLLLSYADPTKLLYRSNELSSEVGCQQGDPLGPAIFSLAINPIIQKLNSKFNVWYLDDGTLGGDVDTVFSDLFLIKNKFEAIGLELNFSKCELFINNSVLNLNDVKQKFNILAPNIKIVNSNSLYLLGSPIFDESIPGYISKSITKFQNSADRFLEISPHYALCILKFCFFVPKFTYVLRCCSFRNQPVLLTQVDDLIKISLESILNMQLNEQSWTQASLPIRYGGLGIRKISSVALPAFLSSVHSSVNLISKLLRASPSNFEIAGLEEARNAFLIACPGQNFPVSPNSQRSWDDINCKLTYDNLLSCSTGSARARLLAVGTHEAGYWLHAYPSSNTGTFLEPDTLRIATCLRLGVPVCAPHKCPCGSDVDKLGHHGLSCQKSAGRFSRHAALNDIIRRSLATVNVPSLLEPTGIARDDGKRPDGMSLIPWKMGRVLVWDATCSDTLAPSHLHGTNNRAGAACEAVEKAKACKYRGLGSEYDFVPFGVETLGPWGPSAVKLFMEMAKRLVDITGDRRAGSYLGQRISLAIQRGNAASIFGTLPKGTSFNNIF

SEQ ID NO: 17519 - protein, 953 aa, Papilio xuthus
MQAVTQSCDGTSNAIHTCTQCNKSFKSLKGLNIHTSKTHRKCISQNSTPLDIHPITPSAPTSTNNTTPFHTYLSHLKNTTPIVRRIPRGARITVATHLSQLIQKCYTQNCTQDWHNLFLFSYNTLHIIKTNDPNLSLTQKIKNNCTESSSPSPPPLIKHHAPRNLNKLIENKICDGDLKGAARLLFSNDVLSPDTPDTLQALRTKHPPAPVNPYFLDPPTAVQNCLQIQNKDVTDAILSFKPGSAAGLDGISPQHLKDLTSHSVGDAGEQLVNSITKLINFMYSGNVNPEFVPILFGANLIALTKKDGGVRPIAVGSTLRRLASKIAVKHILPKLNSEFEPVQLGFGVKGGCEAAVHALRSFLTYGRPDVLLKIDVKNAFNSVNRDTLLTEIKKHIPEIYNYLLLSYADPTKLIYRSNELSSEVGCQQGDPLGPAIFSLAINPIIKNLNSKFNVWYLDDGSLGGDVDSVLSDLFVIKTKFEAIGLELNFSKCELFLNNCDLNLNDVKQKFNILAPNIKIVNSNSLYLLGSPIFDESISEYINNSITKFQNSANRLHEISPHYALCVLKFCLLVPKFTYVLRCCSFWKSADLLSNVDDLIKINLESILNIQLNEQSWTQASLPIRYGGLGIRKISSVALPAFLSSVHSSANLIGKILRAFPSNFEIAGLEEARNAFLIACPGQNLPVSPNLQRSWDDIFCKLTYENLLNYSIGSARARLLAVGTHEAGYWLHAYPSPHTGTFLEPDTLRIATCLRLGVPVCAPHRCPCGSDVDKLGHHGLSCQKSAGRFSRHAALNDIIRRSLATVNVPSLLEPTGVARDDGKRPDGMSLIPWKMGRVLVWDATCSDTLAPSHLHGTNNRAGAACEAAENAKACKYRGLGSEYHFVPFGVETLGPWGPSALRLFKDISKKLIDITGDRRAGSYLGQRISLAVQRGNAASIFGTLPKGTPFINIF

SEQ ID NO: 17520 - protein, 950 aa, Bembecia ichneumoniformis
MQSVTQSCDGTSNATHTCTQCNKPFKSLKGLNIHTTKTHRKCISQNSAPLDIHPIIPSAPTNVAPFHTYLSHLKNSIPIVKRIPRGARIIVATHLSQLIQKCYISNCTQDWQNLFLFSYSTLHIIKTDEPNSSLTQKIKNNCAVSSSPSPAPLIKHDAPRNRNKLIENKICDGDLKGAARLLFSNDVLSPDTPDTLQALQTKHPPAPVNPYFFDPPTAGQTCLQIQNKDVTDAILSFKPGSAAGLDGISPQHLKDLTSHSVGDAGENLVNSITKLINFMYSGNVNPEFVPILFGANLIALTKKDGGVRPIAVGSTLRRLASKIAVRHILPKLNAEFEPVQLGFGVKGGCEAAVHSLRSFLTYGQPDVLLKIDVKNAFNSVNRDTLLTEIKQHIPEIYNYLLLSYADPTKLLYRSNELSSEVGCQQGDPLGPAIFSLAINPIIKNLNSKFNVWYLDDGTLGGDVDTVFSDLFLIKNKFEAIGLELNFSKCELFINNCNLNSNDVKEKFNILAPNIKIVNSNSLYLLGSPIFDESFSEYINNSITKFQNSADRLLEISPHYALCILKFCLFVPKFMYVLRCCSFWNHPDLLTQVDDLIKISLESILNMQLNEQSWSQASLPIRHGGLGIRKISSVALPAFLSSVYSSENLISKILRASPSNFEIAGLEEARNAFLIACPGQNFPVSPNSQRSWDDINCKLTYDNLLSCSTGSARARLLAVGAHEAGYWLHAYPSSNTGTFLEPDTLRIATCLRLGVPVCVPHKCPCGSDVDNLGHHGLSCQKSAGRFSRHAALNDIIRRSLASVKVPSLLEPTGIARDDGKRPDGMSLIPWKMGRVLVWDATCSDTLAPSHLHGTNNRAGAACEAAEKAKACKYRGLGSEYDFVPFGVETLGPWGPSAIRLFKEIVKRLVDITGDRRAGSYLGQRISLAIQRGNAASIFGTLPKGTPFNNIF

SEQ ID NO: 17521 - protein, 953 aa, Melitaea cinxia
MQSVTQSCDGTSNTIHTCIQCNKEFKSLKGLKIHTTKTHRKCSQNSSPSDIHPIIPRAPTYVANDATPFHTYLSHLKNSIPIAKRIPRGARITVAKHLSQLIQKCYISNCTQDWQNLFLFSYSTLHIIKTDEPNLSLTQKIKNNCAVRSSPSPAPPIKHDAPRNRNKVIENKICDGDLKGAARLLFSNDVLSPDTPDTLQALQTKHPPAPVNPFFLDPPTARQECLQIQNKDVTGAILSFKPGSAAGLDGISPQHLKDLTSHSVGDAGEQLVNSITKLINFMYSGNVNPEIVPILFGANLIALTKKDGGVRPIAVGSTLRRLASKIAVRHILPKLNSEFEPVQLGFGVKGGCEAAVHALRSFLTYDRPDVLLKIDVKNAFNSVNRDTLLTEIKQYIPELYNYLLLSYADPTKLLYRSNELSSEVGCQQGDPLGPAIFSLAINPIIKNLNSKFNVWYLDDGTLGGDVDTVFSDLFLIKNKFEAIGLELNFSKCELFINNCDLNLNDVKQKFNILAPNIKIVNSNSLYLLGSPIFDECISEYINNSFTKFQNSVDRLLEISPHYALCILKYCLFVPKFTYALRCCSFWNHPDLLTQVDDLIKISLESILNMQLNEQSWTQASLPIRYGGLGIRKISSVALPAFLSSVHSSANLISKILRASPSNFEIAGLEEARNAFLIACPGQNFPVSPNSQRSWDDINCKLTYENLLSCSTGSARARLLAVGTHEAGYWLHAYPSTNTGTFLEPDTLRIATCLRLGVPVCAPHKCPCGSDVDKLGHHGLSCLKSAGRFSRHAALNDIIRRSLATVNVPSLLEPTGIARDDGKRPDGMSLIPWKMGRVLVWDATCSDTLAPSHLHGTNNRAGAACEAAEKTKADKYRGLGSEYDFVPFGVETLGPWGPSAITLFKEISKRLFDVTGDRRAGSYFGQRISLAIQRGNAASIFGTLPKGTPFNNIF

SEQ ID NO: 17522 - protein, 954 aa, Glaucopsyche alexis
MQSVTQSCDGTSNATHKCTQCNNSFKSLKGLNIHTTKIHRKCISQNSSPLDIHPIIPSAPTYVTNDTTPFHTYLSQLKNSIPLVKRIPRGARITVATHLSQLIQKCYISNCTQDWQNLFLFSYSTLHIIKTDEPNLSLTQKIKNNCALSSSPSPAPLIKHDNPRNRNKLIENKICEGDLKGAARLLFSNDVLSPDTPDTLQALRTKHPPAPVDTCFLDPPTAGQACLQIQNKDIMDAILSFKPGSAAGLDGISPQHLKDLTSHSVGNAGELLVNSITKLINFMYSGNVNPEIVPILFGANLIALTKKDGGVRPIAVGSTLRRLASKIAVRHILPKLNSEFEPVQLGFGVKGGCEAAVHALRSFLTYGQPDVLLKIDVKNAFNSVNRDTLLTEIKQHIPEIYNYLLLSYANPTKLLYRSNELSSEVGCQQGDPLGPAIFSLAINSIIKNLNSKFNVWYLDDGTLGGDVDTVFSDLFLIKNKLEAIGLEPYFSKCELFINNCDLNLNDVKQKFNILAPNIKIVNSNSLYLLGSPIFDESISEYINNSITKFQNSADRLLEISPHYALCILKFCLFVPKFTYVLRCCSFWNHPDLLTQVDDLIKISLESILNMQLNEHSWTQASLPIRYGGLGIRKISSVALPAFLSSVHSSANLISKILRASPSNFEIAGLEEARNAFLIACPGQNFPVSPNSQRSWDDINCKSTYDNLLSRSTGSARARLLAVGAHEAGYWLHAYPSSNTGTFLEPDTLRIATCLRLGVPVCAPHKCPCGSDVDKLGHHGLSCQKSAGRFSRHAALNDILRRSLATVNVPSLLEPTGIARDDGKRPDGMSLIPWKMGRVLVWDATCSDTLGPSHLHGTYNRAGAACEAAEKAKTCKYRGLGSEYDFVPFGVETLGPWGPSAIRLFIEIGKRLVDITGDRRAGSYLGQRISLAIQRGNAASIFGTLPKGTLFNNIF

SEQ ID NO: 17523 - protein, 953 aa, Notocelia uddmanniana
MHAATQSDDGTSNLNFICVQCDNSFKTQRGLNIHISKKHRLCLSQNGPALNLDPAFIPAPLSDKPNSIPFHLYLSDLKNNVPVVKRVPRGARISVANHLSGLITKCVENNQIDDWHNLLLFSFNTLHAKNDEAISLTQKIKNNCVSNTTPHFSRPPKRCASSTFNKTKLIECKISDGDLKGAARLLFTNDVLSPDTPDTLLALRSKHPPAPVIPYVIDPPTADQACLQIEGKDVIDAIISFKTGSAAGLDGISPQHLKDLISQSAGDAGEQLICSLTKLINFMFSGKINNEVVPLLYGANLIGLTKKDGGVRPIAVGSTLRRLASKIAVRHIRSKLQSLFEPVQLGFGTKGGCEAAVHALRTYLSYDDCEIVVKIDVKNAFNSVNRDTLLAEVKDKIPEIYNYLLLCYADPSKLMYKSHELSSEVGCQQGDPLGPAIFSLAINPIIQKLKSKFNVWYLDDGTLGGDVDTVLSDLAFIKTNFENIGLELNFSKCELFIQKTSCSLVDLIQKFVHLAPGIRVVDKFSLCLLGSPIFEESFPGYISDTISKFQSHANRLLEISPHYALIILKFCLFVPKFTYVLRCCPFWKHQNLLSRMDDLIKTSLEMILNIQLTESSWSQASLPIRYGGLGIRKVSSVASPAFLASTHSTSGLIGNILRALPTYCEIAGLEGAKNAFKVACPGKKFPDNPKSQRSWDNIYCDLNYNILLNSSAGPDRARLLAVGTREAGYWLHAHPSPNTGTFLDPTSLRLATGLRLGVAVCTPHICSCGTDVDRLGHHGLCCQKSAGRFSRHATLNDIIRRSLATVNVPALLEPTGMVRDDGMRPDGVSLVPWSVGRMLVWDATCVDTLAPSHLQRTTVKAGAAAENAEILKRNKYKGLGREYMFVPFGVETLGSWGPSAHKLFAEIAKRLVDVTGDRRAGGFLAQRISIAIQRGNAASILGTMPQGPVLDLS

SEQ ID NO: 17524 - protein, 953 aa, Pammene fasciana
MHAATQSGDGTSNLNFICVRCDSSFKTQRGLNIHISKKHRLCISQNDAALNLDPSLSTTPLSDQPNSITFHLYLSELKNNVPVIKRVPRGARITVANHLSSLIIKCVENNQTNDWHNLFLFSFNTLHAKNDEAISLTQKIKNNCVSNTNPHISRLSKGCASSTYNRTKLIESKISDGDLKGAARLLFTNDVLSPDTPDTLSALISKHPPAPSVPHSFAPPSADQACLQIEGKDVIDAIISFKTGSAAGLDGISPQHLKDLISHSVGDAGEQLVGSLTKLINFMFSGKINPDIAPILYGANLIALTKKDGGVRPIAVGSTLRRLASKIAVRHFRSKLQSLFEPIQLGFGTKGGCEAAVHALRTYLSLDDCEIVVKIDVKNAFNSVSRDTLLTEVKEKIPELYNYLFSCYSDSSKLMYKSHELSSEVGCQQGDPLGPAIFSLAINPIIKNLKSKFNVWYLDDGTLGGDVNTVLSDLSFIKSSFENIGLDLNFSKCELFIQKSSCTLADLKPKFDDLAPNIKSVDKNSLCLLGSPIFEESFPGYISNTISKFKSHTNRLIEISPHYALVILKFCLFVPKFTYVLRCCPFWKHQNLLSPIDDLIKISLETILNIQLSEPSWSQASLPIRFGGLGIRKISSVACPAFLASTHSTSGLIGNILRALPTNYEIAGFEDAKNAFKIACPGKTFPDNPKSQRSWDNVYCDLSYNTLLNNCTGPDRARLLAVGAREAGHWLHAHPSPNTGTFLDPTSLRLATGLRLGVSVCTPHICSCGTDVDRLGHHGLSCQKSAGRFSRHASLNDIIRRSLATINVPALLEPTGIIRDDGKRPDGVSLVPWSLGRMLVWDATCVDTLAPSHLQRTNVKAGAAAESAEISKRNKYKSLGREYHFVPFGVETLGPWGPSAHKFFAEIAKRLVDVTGDRRAGGFLAQRISIAIQRGNAASILGTMPQGPSLDLS

SEQ ID NO: 17525 - protein, 955 aa, Mellicta athalia
MQSGTQSCDGTSNATYTCTQCNKSFKSLKGLNIHTSKIHRTFFSQNSSPVDFHPIIPNTPTHVDNDPTPFHTYLSHLKNSIPIVKRIPRGARITVATHLSQLIQKCYMSNCTQDWQNLFLFSYSTLHITIKTDEPKLSLTQKIKNNCAVSSSPSPAALIKHDAPRNRNKLIINKICDGDLKGAARLLFSNDVLSPDTPDTLQTLLKKHPPAPVNPYFLDPPTAEQACLQIQNKDVTNAISSFKPGSAAGLDGISPQHLKDLTSHSVGDAGKQLVNSITKLINFMYSGNVNPEFVPILFGANLIALTKKDGGVRPIAVGSTLRRLASKIAVRHILPKLNSEFEPVQLGFGVKGGCEAAVHALRSFLTYEKPDVLLKIDVKNAFNSVNRETLLTEIKQHIPELYNYLLLSYADPTKLLYRSNELSSEVGCQQGDPLGPAIFSLAINPIIKKLNSKFNVWYLDDGTLGGDVNTVFSDLFLIKNKFEAIGLELNFSKCELFINNRDLNLNDINEKFNILAPNIKIVNSNSLYLLGSPIFDESIPGYINNSITKFQNSVDRLLEISSHYALSILKFCLFVPKFTYVLRCCSFWNHPDLLTQVDNLIKICLESILNMQLNEQSWTQASLPIRYGGLGIRKISSVALPAFLSSVHSSANLISKILRASPSNFEIAGLEEARNAFLIACPGQNFPVSTNSQRSWDDINCKFTFDRLLSCSTGSARARLLAVGTHEAGYWLHAYPSSNTGTFLEPDTLRIATCLRLGVPVCAPHKCPCGSDVDKLGHHGLSCQKSAGRFSRHAALNDIIRRSLATVNVPSILEPSGIARDDGKRPDGMSLIPWKMGRVLVWDATCSDTLAPSHLHGTNNRAGAACEAAEKAKQGKYRGLGPEYDFVPFGVETLGPWGPSAIKLFKEIAKRLVDITGDRSAGSYLGQRISLAIQRGNAASIFGTLPKGTSFNNIF

SEQ ID NO: 17526 - protein, 959 aa, Tinea trinotella
MQTVTQSCDGTSNATHTCSQCRKSFKSLKGLNIHTTKIHKKCISQNSSPLDIHPIIPSAPTYVANNSTPFHKYLSNLKNSIPVVKRIPRGARITVATHLSKLIQKCYISNCTQDWQNLFLFSYNTLHIIKTNEPNLSLTQKIKNNCAVSSLPSPAPLAITRSIKHDASRNRNKLIENKISDGDLKGAARLLFSNDVLSPDTPDTLQALRTKHPPAPVNPYFLDPPTAGQACLQIQNKDVTDAILSFKPGSAAGLDGISPQHLKDLTSHSVGDAGEQLVNSITKLINFMYFGNVNPEIVPILFGANLIALTKKDGGVRPIAVGSTLRRLASKIAVRHILPKLNSEFEPVQLGFGVKGGCEAAVHALRSFLTYGQPDVLLKIDVKNAFNSVNRDTLLTEIKQHIPEIYNYLLLSYADPTKLLYRSNELSSEVGCQQGDPLGPAIFSLAINPIIKNLNSNFNVWYLDDGTLGGDVNTVFSDLFLIKSKFEAIGLELNFSKCELFINNCALNLNDVKQKFNILAPNIKIVNSNSLYLLGSPIFDESISEYINNSITKFQNSADRLLEISPHYALCILKFCLFVPKFTYVLRCCSFWNYPDLLKHVDDLIKNSLESILNMQLNEQSWTQASLPIRYGGLGIRKISSVALPAFLSSVHSSANLIGKILRATPSNFEIAALEEARNAFLIACPGQNFSISPNSQRSWDDINCKLTYDNLLSSSTGSARARLLAVGTHEAGYWLHAYPSSNTGTFLEPDTLRIATCLRLGVPVCAPHKCPCGSDVDKLGHHGLSCQKSAGRFSRHAALNDIIRRSLASVNVPSLLEPNGIARDDGKRPDGMSLIPWKMGRVLVWDATCSDTLAPSHLHGTNSRAGAACEEAEKAKACKYRGLGSEYDFVPFGVETLGPWGPSALRLFKEISKRLVDITGDRRVGSYLGQRISLTIQRGNAASIFGTLPKGIPFNNVF

SEQ ID NO: 17527 - protein, 959 aa, Tinea trinotella
MQSVTQSCDGTSNAIHTCSQCSKSFKSLKGLNIHTTKIHRKCSSQNSSPIDIHPIIPSAPTYVANNSTPFHKYLSNLKNSIPVVKRIPRGARITVATHLSKLIQKCYISNCTQDWQNLFLFSYNTLHIIKTNEPNLSLTQKIKNNCAVSSLPSPAPLAITRSIKHDAPRNRNKLIENKINDGDLKGAARLLFSNDVLSPDTPDTLQALRTKHPPAPLNPYFLDPPTAGQACLQIQNKDVTDAILSFKPGSAAGLDGISPQHLKDLTSHSVGDAGEQLVNSITKLINFMYSGNVNPEIVPILFGANLIALTKKDGGVRPIAVGSTLRRLASKIAVRHILPKLNSEFEPVQLGFGVKGGCEAAVHALRSFLTYGKPDVLLKIDVKNAFNSVNRDTLLTEIKQHIPEIYNYLLLSYADPTKLLYRSNELSSEVGCQQGDPLGPAIFSLAINPIIKNLNSNFNVWYLDDGTLGGDVNTVFSDLFLIKSKFEAIGLELNFSKCELFINNCALNLNDVKQKFNILAPNIKIVNSNSLYLLGSPIFDESISEYIKNSINKFQNSADRLLEISPHYALCILKFCLFVPKFTYVLRCCSFWNYPDLLKHVDNLIKNSLESILNMQLNEQSWTQASLPIRYGGLGIRKISSVALPAFLSSVHSSANLIGKILRATPSNFEIAALEEARNAFLIACPGQNFSNSPNSQRSWDDINCKLTYDNLLSSSTGSARARLLAVGTHEAGYWLHAYPSSNTGTFLEPDTLRIATCLRLGVPVCAPHKCPCGSDVDKLGHHGLSCQKSAGRFSRHAALNDIIRRSLASVNVPSLLEPTGIARDDGKRPDGMSLIPWKMGRVLVWDATCSDTLAPSHLHGTNSRAGAACEAAEKAKACKYRGLGSEYDFVPFGVETLGPWGPSALRLFKEISKRLVDITGDRRVGSYLGQRISLAIQRGNAASIFGTLPKGTPFNNVF

SEQ ID NO: 17528 - protein, 954 aa, Cosmia trapezina
MQSVTQSCDGTSNATHTCTQCNKSFKSLKGLNIHTTKTHRKCISQNSSPLDIHPIIPSAPTYVASDPTPFHIYLSHLKNSIPIVKRIPRGARITVATHLSQLIQKCYIRNCTQDWQNLFLFSYSTLHIIKTDEPYLSLTQKIKNNCAVSSSPSPAPPIKHDAPRNRNKLIENKICDGDLKGAARLLFSNDVLSPDTPDTLQALQTKHPPAPVNPYFLDPPTAGQACLQIQNKDVTAAILSFKPGSAAGLDGISPQHLKDLTSHSVGDAGEQLVNSITKLINFMYSGNVNPEIVPILFGANLIALTKKDGGVRPIAVGSTLRRLASKIAVRHILPKLNSEFEPVQLGFGVKGGCEASVHALRSFLTYGQPDVLLKIDVKNAFNSVNRDTLLTEIKQHIPEIYNYLLLSYADPTKLLYRSNELSSEVGCQQGDPLGPAIFSLAINPIIKNLNSKFNVWYLDDGTLGGDVDTVFSDLFLIKNKFEAIGLELNFSKCELFINNCNLNLNDVKQKFNILAPNIKIVNSNSLYLLGSPIFDESISEYFNNSITKFQNSADRLLEISPHYALCILKFCLFVPKFTYVLRCCSFWNHPDLLTQVDDLIKISLESILNMQLNEQSWTQASLPIRYGGLGIRKISSVALPAFLSSVHSSANLISKILRASPSNFEIAGLEEARNAFLIACPGQNFPVYSNSQRSWDDIICKLTHDNLLSCSTGSARARLLAVGAHEAGYWLHAYPSSNTGTFLEPDTLRIATCLRLGVPVCAPHKCPCGSDVDRLGHHGLSCQKSAGRFSRHAALNDIIRRSLATVNVPSLLEPTGIARDDGKRPDGMSLIPWKMGRVLVWDATCSDTLAPSHLHGTSIRAGAACEAAEKGKVSKYRGLGSEYDFVPFGVETLGPWGPTAIRLFNEITKRLVDVTGDRRAGSYLGQRISLAIQRGNAASIFGTLPKGTPFNNIF

SEQ ID NO: 17529 - protein, 954 aa, Cosmia trapezina
MQSVTQSCDGTSNATHTCTQCNKSFKSLKGLNIHTTKTHRKCISQNSSPLDIHPIIPSAPTYVASDPTPFHIYLSHLKNSIPIVKRIPRGARITVATHLSQLIQKCYISNCTQDWQNIFLFSYSTLHIIKTDEPYLSLTQKIKNNCAVSSSPSPAPPIKHDAPRNRNKLIENKICDGDLKGAARLLFSNDVLSPDTPDTLQALQTKHPPAPVNPYFLDPPTAGQACLQIQNKDVTAAILSFKPGSAAGLDGISPQHLKDLTSHSVGDAGEQLVNSITKLINFMYSGNVNPEIVPILFGANLIALTKKDGGVRPIAVGSTLRRMASKIAVRHILPKLNSEFEPVQLGFGVKGGCEASVHALRSFLTYGHPDVLLKIDVKNAFNSINRDTLLTEIKQHIPEIYNYLLISYADPTKLLYRSNELSSEVGCQQGDPLGPAIFSLAINPIIKNLNSKFNVWYLDDGTLGGDVDTVFSDLFLIKNKFEAIGLELNFSKCELFINNCNLNLNDVKQKFNILAPNIKIVNSNSLYLLGSPIFDESISEYFNNSITKFQNSADRLLEISPHYALCILKFCLFVPKFTYVLRCCSFWNHPDLLTQVDDLIKISLESILNMQLNEQSWTQASLPIRYGGLGIRKISSVALPAFLSSVHSSANLISKILRASPSNFEIAGLEEARNAFLIACPGQNFPVSSNSQRSWDDIICKLTHDNLLSCSTGSARARLLAVGAHEAGYWLHAYPSSNTGTFLEPDTLRIATCLRLGVPVCAPHKCPCGSDVDRLGHHGLSCQKSAGRFSRHAALNDIIRRSLATVNVPSLLEPTGIARDDGKRPDGMSLIPWKMGRVLVWDATCSDTLAPSHLHGTSIRAGAACEAAEKGKVSKYRGLGSEYDFVPFGVETLGPWGPTAIRLFKEITKRLVDVTGDRRAGSYLGQRISLAIQRGNAASIFGTLPKGTPFNNIF

SEQ ID NO: 17530 - protein, 954 aa, Lycaena phlaeas
MQSVTQSCDGTSNTTHTCIQCNQSFKSLKGLNIHTTKIHRKCNSQISSPSDINPIFPSTPTDVDNASTSFHTYLSQLKNSKPIVKRIPRGARITVATHLSHLIQKCYISNGIQDWQNLFLFSYSTLHVIKTDEPNLSLTQKIKNNCVVSSLPSPAPLIKHDAHFNRKKLIENKISDGDLKGAARLLFSNDVLSPDTPDTLQALRTKHPPAPVSPYFLDPPTAGQACLQIQSKDVSNAILSFKTGSAAGLDGISPQHLKDLTSHSVGDAGEQLLNSITKLINFMYSGNVNPEIVPILFGANLIALTKKDGGVRPIAVGSTLRRLASKIAVRHILPKLNSEFEPVQLGFGVKGGCEAAVHALRSFLTYGQPDVLLKIDVKNAFNSVNRDTLLTEIKKNIPEIYNYLLLSYADPTKLLYRSNELSSEVGCQQGDPLGPAIFSLAINPIIKNLNSKFNVWYLDDGTLGGDVDTVLSDLFSIKNKFEAIGLELSFSKCELFINNRDLNLNDVKQKFNILAPNIKIVKSDSLYLLGSPIFDESISEYINNSITKFKNSADRLLEISPHYAICILKFCLFVPKFTYLLRCCSFWNHPELLTQVDDLIKITLESILNMQLNEQSWSQASLPIRYGGLGIRKISSVALPAFLSSVHSSVNLISTILRASPSNFVIAGLEEARNAFLIACPGQNFPVSPNSQRSWDDINCKMIYDNLLSCSTGSARARLLASGTHEAGYWLHAYPSSNTGTFLEPDTLRIATCLRLGVSVCVPHKCPCGSDVDKLGHHGLSCQKSAGRFSRHAALNDIIRRSLATVNVPSLLEPPGIARDDGKRPDGMSLIPWKMGRVLVWDATCSDTLAPSHLHGTSNRAGAACEAAEKTKACKYRVLGAEYDFVPFGVETLGPWGPNALRLFKEIAKRLVDITGDRRAGSYLGQRISLAIQRGNAASIFGTLPKGTPFNNIF

SEQ ID NO: 17531 - protein, 954 aa, Pyrgus malvae
MQSVTQSCDGTSNATHTCTQCNKSFKSLRGLNIHTTKTHRKCFSQNISPLDIHHIIPSAPTYVANDQTPFHIYLSHLKNSIPIVKRIPRGARITVATHLSQLIHKCYLSNCTLDWQNLFLFSYSTLHIIKTDEPNLSLTQKIKNNCAVNSSPSPATIIKHDSPRNRNKLIENKICDGDLKGAARLLFSNDVLSPDTPDTLQALQTKHPPAPVNPYFLDPPTAGQACLQIQNKDVRDAILSFKPGSAAGLDGISPQHLKDLISHSVGDAGEQLLNSITKLINFMYSGNVNPEIVPILFGANLIALTKKDGGVRPIAVGSTLRRLASKIAVRHILPKLNSVFEPVQLGFGVKGGCEAAVHALRSFLTYEQPDILLKIDVKNAFNSINRDTLLTEIKQHIPEIYNYLLLSYADPTKLLYRSNELSSEVGCQQGDPLGPAIFSLAINPIIKNLNSKFNVWYLDDGTLGGDLDTVFSDLFLIKNKFEAIGLELNFSKCELFVNNCNLNLNEIKQKFNILAPNIKIVNNSSLYLLGSPIFDESISEYINNSITKFQNSADRLLEISPHYALCILKFCLFLPKFTYVLRCCSFWNHPDLLTQVDDLIKISLESILNMQLNEQSWTQASLPIRYGGLGIRKISSVALPAFLSSVHSSANLISKILRASPSNFEIAGLEEARNAFLIACPGQNLPFSPISQRSWDDIYCKLTYDNLLSCSTDSARARLLAVGAHEAGYWLHAYPSSNTGTFLEPDTLRIATCLRLGVPVCAPHKCPCGSDVDKLGHHGLSCQKSAGRFSRHAALNDIIHRSLATVNVPSLREPTGIARDDGKRPDGMSLIPWKMGRVLVWDATCSDTLAPSHLHGTNIRAGAACEAAEKAKAGKYRDLGTEYDFVPFGVETLGPWGPSALRLFKEITKRLVDVTGDRRAGSYLGQRISLAIQRGNAASIFGTLPKGTPFNTIF

SEQ ID NO: 17532 - protein, 671 aa, Pammene fasciana
MFSGKINPDIAPILYGANLIALTKKDGGVRPIAVGSTLRRLASKIAVRHFRSKLQSLFEPIQLGFGTKGGCEAAVHALRTYLSLDDCEIVVKIDVKNAFNSVSRDTLLTEVKEKIPELYNYLFSCYSDSSKLMYKSHELSSEVGCQQGDPLGPAIFSLAINPIIKNLKSKFNVWYLDDGTLGGDVNTVLSDLSFIKSSFENIGLDLNFSKCELFIQKSSCTLADLKPKFDDLAPNIKSVDKNSLCLLGSPIFEESFPGYISNTISKFKSHTNRLIEISPHYALVILKFCLFVPKFTYVLRCCPFWKHQNLLSPIDDLIKISLETILNIQLSEPSWSQASLPIRFGGLGIRKISSVACPAFLASTHSTSGLIGNILRALPTNYEIAGFEDAKNAFKIACPGKTFPDNPKSQRSWDNVYCDLSYNTLLNNCTGPDRARLLAVGAREAGHWLHAHPSPNTGTFLDPTSLRLATGLRLGVSVCTPHICSCGTDVDRLGHHGLSCQKSAGRFSRHASLNDIIRRSLATINVPALLEPTGIIRDDGKRPDGVSLVPWSLGRMLVWDATCVDTLAPSHLQRTNVKAGAAAESAEISKRNKYKSLGREYHFVPFGVETLGPWGPSAHKFFAEIAKRLVDVTGDRRAGGFLAQRISIAIQRGNAASILGTMPQGPSLDLS

SEQ ID NO: 17533 - protein, 954 aa, Mellicta athalia
MQSVTQSGDGTSNTIHTCTQCNKSFKSLKGLNIHTTKTHRKCFSQDISSVDTHPIIPNTPSHASNDQIPFHTYLSHLKNSIPIIKRIPRGARITVATHLSQLIQKCYISNCTQDWQNLFLFSYSTLHIIKTDEPNLSLTLKIKNKCAASSSPSPAPLIKHDDPLNRKKLIINKICDGDLKGAARLLFSNDVLSPDTPDTLQALLTKHPPAPVNPYFLDPPTAGQACLQIQNKDVTNAISSFKPGSASGLDGISPQHLKDLTSHSVGDAGTQLLNSITKLINFMYSGNVNPEIVPILFGANLIALTKKDGGVRPIAVGSTLRRLASKIAVRHILPKLNSEFEPVQLGFGVKGGCEAAVHALRSFLTYGQPDVLLKIDVKNAFNSINRDTLLTEIKQHIPELYNYLLLSYGDPTKLLYRSNELSSEVGCQQGDPLGPAIFSLAINPIIKNLNSKFNVWYLDDGTLAGDVDTVFSDLFLIKNKFEAIGLELNFSKCELFINNSVLNLNDIKQKFNILAPNIKIVNSNSLYLLGSPIFDDSIPEYINNSITKFQNSVDRLLEISSHYALCILKFCLFVPKFTYVLRCCSFWNHPDLLTKVDKLIKISLESILNMQLNEQSWTQASLPIRYGGLGIRKISSVALPAFLSSVHSSANLISKILRASPSNFEIAGLEEARNAFLIACPGQNFPVSTNSQRSWDDINCKFTFDDLLSCSTGSARARLLAVGTHEAGYWLHAYPSPNTGTFLEPDTLRIATCLRLGVPVCVPHKCPCGSDVDKLGHHGLSCQKSAGRFSRHAALNDIIRRSLATINVPSLLEPTGIARDDGKRPDGMSLIPWKMGRVLVWDATCSDTLAPSHLHGTNNRAGAACEAAEKAKAGKYRGLGPEYDFVPFGVETLGPWGPSALRLFKEIAKRLVDITGDRRAGSYLGQRISLAIQRGNSASIFGTLPKGTPFNNIF

SEQ ID NO: 17534 - protein, 959 aa, Tinea trinotella
MQTVTQSCDGTSNATHTCSQCRKSFKSLKGLNIHTTKIHRKCISQNSSPLDIHPIIPSAPTYVANNSTPFHKYLSNLKNSLPVVKRIPRGARITVATHLSKLIQKCYISNCTQDWQNLFLFSYNTLHIIKTNEPNLSLTQKIKNNCAVSSLPSPAPLAITRSIKHDAPRNRNKLIENKISDGDLKGAARLLFSNDVLSPDTPDTLQVLRTKHPPAPVNPYFLDPPTAGQACLQIQNKDVTDAILSFKPGSAAGLDGISPQHLKDLTSHSVGDAGEQLVNSITKLINFMYFGNVNPEIVPILFGANLIALTKKDGGVRPIAVGSTLRRLASKIAVRHILPKLNSEFEPVQLGFGVKGGCEAAVHALRSFLTYGQPDVLLKIDVKNAFNSVNRDTLLTEIKQHIPEIYNYLLLSYADPTKLLYRSNELSSEVGCQQGDPLGPAIFSLAINPIIKNLNSNFNVWYLDDGTLGGDVNTVFSDLFLIKSKFEAIGLELNFSKCELFINNCALNLNDVKQKFNILAPNIKIVNSNSLYLLGSPIFDESISEYINNSITKFQNSADRLLEISPHYALCILKFCLFVPKFTYVLRCCSFWNYPDLLKHVDDLIKNSLESILNMQLNEQSWTQASLPIRYGGLGIRKISSVALPAFLSSVHSSANLIGKILRATPSNFEIAALEEARNAFLIACPGQNFSISPNSQRSWDDINCKLTYDNLLSSSTGSARARLLAVGTHEAGYWLHAYPSSNTGTFLEPDTLRIATCLRLGVPVCAPHKCPCGSHVDKLGHHGLSCQKSAGRFSRHAALNDIIRRSLASVNVPSLLEPNGIARDDGKRPDGMSLIPWKMGRVLVWDATCSDTLAPSHLHGTNSRAGAACEAAEKAKACKYRGLGSEYDFVPFGVETLGPWGPSALRLFKEISKRLVDITGDRRVGSYLGQRISLAIQRGNAASIFGTLPKGTPFNNVF

SEQ ID NO: 17535 - protein, 954 aa, Ochlodes sylvanus
MQSVTQSCDGTSNASHPCTQCNKSFKSLKGLNIHSTKTHKKCISQNISSLDIHPVIPSAPTHVANDSTPFHTYLSHLKNSIPIVKRIPRGARITVATHLSKLIQKCYLNNYTQDWQNLFLFSYSSLHIIKTNEQNLSLTQKIKNNCALSSSPSPTPLNKHDAPRNRNKLIEKKICDGDLKGAARLLFSNDVLSPDTPDTLQALRTKHPPAPVNPYFLDPPTAGQACLQIQNKDVKDAILSFKPGSAAGLDGISPQHLKDLTSHSVGDAGEQLVNSITKLINFMYSGNVNSEIVPILFGANLIALTKKDGGVRPIAVGSTLRRLASKIAVRHILPKLNSEFEPVQLGFGVKGGCEAAVHALRFFLTYEQPDVLLKIDVKNAFNSVNRDTLLTEIKQHIPEIYNYLLLSYADPTKLLYRSNELSSEVGCQQGDPLGPAIFSLAINPIIKNLNSKFNVWYLDDGTLGGDVDTVFSDLFLIKNKFEAIGLELNFSKCELFINNCDLNLNEVKQKFNILAPNIKIVNSNSLYLLGSPIFDESIAEYINISITKFQNSADRLFEISPHYALCILKFCLFVPKFTYVLRCCSFWNHPDLLTQVDNLIKISLESILNLQLTEQSWTQASLPIRYGGLGIRKISSVALPAFLSSVHSSANLISKILRASPSNFEIVGLEEARNAFLIACPGQNFPFSPNSQRSWDDIKCKLTYDNLLSCSTGSARARLLAVGAHEAGYWLHAYPSSNTGTFLEPDTLRIATCLRLGVPVCAPHKCPCGSDVDKLGHHGLSCQKSAGRFSRHAALNDIIRRSLATVNVPSLLEPTGIARDDGKRPDGMSLIPWKMGRVLVWDATCSDTLAPSHLHGTINTAGAACEAAEKAKAFKYRGLGSEYDFVPFGVETLGPWGPSAIKLFKEIAKRLVDVTGDRRAGSYLGQRISLAIQRGNAASIFGTLPKGTPFNNIF

SEQ ID NO: 17536 - protein, 957 aa, Glaucopsyche alexis
MQSVTQSCDGTSNATHKCTQCNNSFKSLKGLNIHTTKIHRKCISQNSSPLDIHPIIPSAPTYVTNDTTPFHTYLSQLKNSIPLVKRIPRGARITVATHLSQLIQKCYISNCTQDWQNLFLFSYSTLHIIKTDEPNLSLTQKIKNNCALSSSPSPAPLIKHDNPRNRNKLIENKICEGDLKGAARLLFSNDVLSPDTPDTLQALRTKHPPAPVDTCFLDPPTAGQACLQIQNKDIMDAILSFKPGSAAGLDGISPQHLKDLTSHSVGNAGEQLVNSFTKLINFMYSGNVNPEIVPILFGANLIALTKKDGGVRPIAVGSTLRRLASKIAVRHILPKLNSEFEPVQLGFGVKGGCEAAVHALRSFLTYGQPDVLLKIDVKNAFNSVNRDTLLTEIKQHIPEIYNYLLLSYANPTKLLYRSNELSSEVGCQQGDPLGPAIFSLAINSIIKNLNSKFNVWYLDDGTLGGDVDTVFSDLFQIKNKFEAIGLELNFSKCELFINNCDLNLNDVKQKFNILAPNIKIVNSNSLYLLGSPIFDESISEYINNSITKFQNSADCLLEISPHYALCILKFCLFVPKFTYVLRCCSFWNHPDLLTQVDDLIKISLESILNMQLNEQSWTQASLPIRYGGLGIRKISSVALPAFLSSVHSSANLISKILRASPSNFEIAGLEEARNAFLIACPGQNFPVSPNPQRSWDDINCKSTYDNLLSRSTGSARARLLAVGTHEAGYWLHAYPSSNTGTFLEPDTLRIATCLRLGVPVCAPHKCPCGSDVDKLGHHGLSCQKSAGRFSRHAALNDIIRRSLATVNVPSLLEPTGIARDDGKRPDGMSLIPWKMGRVLVWDATCSDTLAPSHLHGTYNRAGAACEAAEKAKTCKYRGLGSEYDFVPFGVETLGPWGPSAIRLFIEIGKRLVDITGDRRAGSYLGQRIIKKVYQNLMANREIKFCSVQYWGNRIKRS

SEQ ID NO: 17537 - protein, 953 aa, Notocelia uddmanniana
MHAATQSDDGTSNLNFICVQCDNSFKTQRGLNIHISKKHRLCLSQNGPALNLDPAFIPAPLSDKPNSIPFHLYLSDLKNNVPVVKRVPRGARISVANHLSGLITKRVENNQIDDWHNLLLFSFNTLHAKNDEAISLTQKIKNNCVSNTTPHFSRPPKRCASSTFNKTKLIECKISDGDLKGAARLLFTNDVLSPDTPDTLLALRSKHPPAPVIPYVIDPPTADQACLQIEGKDVIDAIISFKTGSAAGLDGISPQHLKDLISQSAGDAGEQLICSLTKLINFMFSGKINNEVVPLLYGANLIGLTKKDGGVRPIAVGSTLRRLASKIAVRHIRSKLQSLFEPVQLGFGTKGGCEAAVHALRTYLSYDDCEIVVKIDVKNAFNSVNRDTLLAEVKDKIPEIYNYLLLCYADPSKLMYKSHELSSEVGCQQGDPLGPAIFSLAINPIIQKLKSKFNVWYLDDGTLGGDVDTVLSDLAFIKTNFENIGLELNFSKCELFIQKTSCSLVDLIQKFVHLAPGIRVVDKFSLCLLGSPIFEESFPGYISDTISKFQSHANRLLEISPHYALIILKFCLFVPKFTYVLRCCPFWKHQNLLSRMDDLIKTSLEMILNIQLTESSWSQASLPIRYGGLGIRKVSSVASPAFLASTHSTSGLIGNILRALPTYCEIAGLEGAKNAFKVACPGKKIPDNPKSQRSWDNIYCDLNYNILLNSSAGPDRARLLAVGTREAGYWLHAHPSPNTGTFLDPTSLRLATGLRLGVAVCTPHICSCGTDVDRLGHHGLCCQKSAGRFSRHATLNDIIRRSLATVNVPALLEPTGMVRDDGMRPDGVSLVPWSVGRMLVWDATCVDTLAPSHLQRTTVKAGAAAENAEILKRNKYKGLGREYMFVPFGVETLGSWGPSAHKLFAEIAKRLVDVTGDRRAGGFLAQRISIAIQRGNAASILGTMPQGPVLDLS

SEQ ID NO: 17538 - protein, 954 aa, Pyrgus malvae
MQSVTQSCDGTSNATHTCTQCNKSFKSLRGLNIHTTKTHRKCFSQNISPLDIHHIIPSAPTYVANDQTPFHIYLSHLKNSIPIVKRIPRGARITVATHLSQLIQKCYLSNCTQDWQNLFLFSYSTLHIIKTDEPNISLTQKIKNNCAVSSSPSPATLIKHDSPRNRIKLIENKICDGDLKGAARLLFSNDVLSPDTPDTLQALQTKHPPAPVNPYFLDPPTAGQACLQIQNKDVTDAILSFKPGSAAGLDGISPQHLKDLTSHSVGDAGAQLVNSITKLINFMYSGNVNPEIVPILFGANLIALTKKDGGVRPIAVGSTLRRLASKIAVRHILPKLNSVFEPVQLGFGVKGGCEAAVHALRSFLTYEQPDILLKIDVKNAFNSINRDTLLTEIKQHIPDIYNYLLLSYADPTKLLYRSNELSSEVGCQQGDPLGPAIFSLAINPIIKNLNSKFNVWYLDDGTLGGDLDTVFSDLFLIKNKFEAIGLELNFSKCELFVNNCNLNLNDIKQKFNILAPNIKIVNNSSLYLLGSPIFEESISEYINNSITKFQNSADRLLEISPHYALCILKFCLFLPKFTYVLRCCSFWNHPDLLTQVDDLIKISLESILNMQLNEQSWTQASLPIRYGGLGIRKISSVALPAFLSSVHSSANLISKILRASPSNFEIAGLEEARNAFLIACPGQNLPFSPISQRSWDDIYCKLTYDNLLSCRTDSARARLLAVGAHEAGYWLHAYPSSNTVTFLEPDTLRIATCLRLEVPVCAPHKCPCGSDVDKLGHHGLSCQKSAGRFSRHAALNDIIHRSLATVNVPSLREPTGIARDDGKRPDGMSLIPWKMGRVLVWDATCSDTLAPSHLHGTNIRAGAACEAAEKAKACKYRGLGTEYDFVPFGVETLGPWGPSALRLFKEITKRLVDVTGDRRAGIYLGQRISLAIQRGNAASIFGTLPKGTPFNTIF

SEQ ID NO: 17539 - protein, 671 aa, Pammene fasciana
MFSGKINTDIAPILYGANLIALTKKDGGVRPIAVGSTLRRLASKIAVRHFRSKLQSLFEPIQLGFGTKGGCEAAVHALRTYLSLDDCEIVVKIDVKNAFNSVSRDTLLTEVKEKIPELYNYLFSCYSDSSKLMYKSHELSSEVGCQQGDPLGPAIFSLAINPIIKNLKSKFNVWYLDDGTLGGDVNTVLSDLSFIKSSFENIGLDLNFSKCELFIQKSSCTLADLKPKFDDLAPNIKSVDKNSLCLLGSPIFEESFPGYISNTISKFKSHTNRLIEISPHYALVILKFCLFVPKFTYVLRCCPFWKHQNLLSPIDDLIKISLETILNIQLSEPSWSQASLPIRFGGLGIRKISSVACPAFLASTHSTSGLIGNILRALPTNYEIAGFEDAKNAFKIACPGKTFPDNPKSQRSWDNVYCDLSYNILLNNCTGPDRARLLAVGAREAGHWLHAHPSPNTGTFLDPTSLRLATGLRLGVSVCTPHICSCGTDVDRLGHHGLSCQKSAGRFSRHASLNDIIRRSLATINVPALLEPTGIIRDDGKRPDGVSLVPWSLGRMLVWDATCVDTLAPSHLQRTNVKAGAAAESAEISKRNKYKSLGREYHFLPFGVETLGPWGPSAHKFFAEIAKRLVDVTGDRRAGGFLAQRISIAIQRGNAASILGTMPQGPSLDLS

SEQ ID NO: 17540 - protein, 943 aa, Bembecia ichneumoniformis
MQSVTQSCDGTSNATHTCTQCNKPFKSLKGLNIHTTKTHRKCISQNSAPLDIHPIIPSAPTNVAPFHTYLSHLKNSIPIVKRIPRGARIIVATHLSQLIQKCYISNCTQDWQNLFLFSYSTLHIIKTDEPNSSLTQKIKNNCAVSSSPSPAPLIKHDAPRNRNKLIENKICDGDLKGAARLLFSNDVLSPDTPDTLQALQTKHPPAPVNPYFFDPPTAGQTCLQIQNKDVTDAILSFKPGSAAGLDGISPQHLKDLTSHSVGDAGENLVNSITKLINFMYSGNVNPEFVPILFGANLIALTKKDGGVRPIAVGSTLRRLASKIAVRHILPKLNAEFEPVQLGFGVKGGCEAAVHSLRSSLTYGQPDVLLKIDVKNAFNSVNRDTLLTEIKQHIPEIYNYLLLSYADPTKLLYRSNELSSEVGCQQGDPLGPAIFSLAINPIIKNLNSKFNVWYLDDGTLGGDVDTVFSDLFLIKNKFEAIGLELNFSKCELFINNCNLNSNDVKEKFNILAPNIKIVNSNSLYLLGSPIFDESFSEYINNSITKFQNSADRLLEISPHYALCILKFCLFVPKFMYVLRCCSFWNHPDLLTQVDDLIKISLESILNMQLNEQSWSQASLPIHHGGLGIRKISSVALPAFLSSVYSSENLISKILRASPSNFEIAGLEEARNAFLIACPGQNFPVSPNSQRSWDDINCKLTYDNLLSCSTGSARARLLAVGAHEAGYWLHAYPSSNTGTFLEPDTLRIATCLRLGVPVCVPHKCPCGSDVDNLGHHGLSCQKSAGRFSRHAALNDIIRRSLASVKVPSLLEPTGIARDDGKRPDGMSLIPWKMGRVLVWDATCSDTLAPSHLHGTNNRAGAACEAAEKAKACKYRGLGSEYDFVPFGVETLGPWGPSAIRLFKEIVKRLVEITGDRRAGSYLGQRISLAIQRGNAYFSYVFKFEI

SEQ ID NO: 17541 - protein, 953 aa, Melitaea cinxia
MQSVTQSCDGTSTTTHTCTQCNKKFKSLKGLKIHTTKTHRKCSQNSSPSDIHPIIPRAPTYVANDATPFHTYLSHLKNSIPIAKRIPRGARIAVAKHLSQLIQKCYISNCTQDWQNLFLFSYSTLHIIKTDEPNLSLTQKIKNNCAVSSSPSPAPPIKHDAPRNRNKVIENKICDGDLKGAARLLFSNDVLSPDTPDTLQALRTKHPPAPVNPFFLDPPTARQECLQIQNKDVTGAILSFKPGSAAGLDGISPQHLKDLTSHSVGDAGEQLVNSITKLINFMYSGNVNPEIVPILFGANLIALTKKDGGVRPIAVGSTLRRLASKIAVRYILPKLNSEFEPVQLGFGVKGGCEAAVHALRSFLTYDRPDVLLKIDVKNAFNSVNRDTLLTEIKHYIPELYNYLLLSYADPTKLLYRSNELSSEVGCQQGDPLGPAIFSLAINPIIKNLNSKFNVWYLDDGTLGGDVDTVLSDLFLIKNKFEAIGLELNFSKCELFINNCDLNLNDVKHKFNILAPNIKIVNSNSLYLLGSPIFDECISEYINNSFTKFQNSVDRLLEISPHYALCILKYCLFVPKFTYALRCCSFWNHPDLLTQVDDLIKISLESILNMQLNEQSWTQASLPIRYGGLGIRKISSVALPAFLSSVHSSANLISKILRASPSNFEIAGLEEARNAFLIACPGQNFPVSPNSQRSWDDINCKLTYENLLSCSTGSARARLLAVGTHEAGYWLHAHPSTNTGTFLEPDTLRIATCLRLGVPVCAPHKCPCGSDVDKLGHHGLSCLKSAGRFSRHAALNDIIRRSLATVNVPSLLEPTGIARDDGKRPDGMSLIPWKMGRVLVWDATCSDTLAPSHLHGTNNRAGAACEAAEKTKADKYRGLGSEYDFVPFGVETLGPWGPSAITLFKEISKRLFDVTGDRRAGSYFGQRISLAIQRGNAASIFGTLPKGTPFNNIF

SEQ ID NO: 17542 - protein, 959 aa, Tinea trinotella
MQSVTQSCDGTSNATHTCSQCSKSFKSLKGLNIHTTKIHRKCSSQNSSPIDIHPIIPSAPTYVANNSTPFHKYLSNLKNSIPVVKRIPRGARITVATHLSKLIQKCYISNCTQDWQNLFLFSYNTLHIIKTNEPNLSLTQKIKNNCAVSSLPSPAPLAITRSIKHDAPRNRNKLIENKISDGDLKGAARLLFSNDVLSPDTPDTLQALRTKHPPAPLNPYFLDPPTAGQACLQIQNKYVTDAILSFKPGSAAGLDGISPQHLKDLTSHSVGDAGEQLVNSITKLINFMYSGNVNPEIVPILFGANLIALTKKDGGVRPIAVGSTLRRLASKIAVRHILPKLNSEFEPVQLGFGVKGGCEAAVHALRSFLTYGKPDVLLKIDVKNAFNSVNRDTLLTEIKQHIPEIYNYLLLSYADPTKLLYRSNELSSEVGCQQGDPLGPAIFSLAINPIIKNLNSNFNVWYLDDGTLGGDVNTVFSDLFLIKSKFEAIGLELNFSKCELFINNCALNLNDVKQKFNILAPNIKIVNSNSLYLLGSPIFDESISEYIKNSINKFQNSADRLLEISPHYALCILKFCLFVPKFTYVLRCCSFWNYPDLLKHVDNLIKNSLESILNMQLNEQSWTQASLPIRYGGLGIRKISSVALPAFLSSVHSSANLIGKILRATPSNFEIAALEEARNAFLIACPGQNFSISPNSQRSWDDINCKLTYDNLLSSSTGSARARLLAVGTHEAGYWLHAYPSSNTGTFLEPDTLRIATCLRLGVPVCAPHKCPCGSDVDKLGHHGLSCQKSAGRFSRHAALNDIIRRSLASVNVPSLLEPTGIARDDGKRPDGMSLIPWKMGRVLVWDATCSDTLAPSHLHGTNSRAGAACEAAEKAKACKYRGLGSEYDFVPFGVETLGPWGPSALRLFKEISKRLVDITGDRRVGSYLGQRISLAIQRGNAASIFGTLPKGTPFNNVF

SEQ ID NO: 17543 - protein, 959 aa, Tinea trinotella
MQSVTQSCDGTSNATHTCSQCSKSFKSLKGLNIHTTKIHRKCSSQNSSPIDIHPIIPSAPTYVANNSTPFHKYLSNLKNSIPVVKRIPRGARITVATHLSKLIQKCYISNCTQDWQNLFLFSYNTLHIIKTNEPNLSLTQKIKNNCAVSSLPSPAPLAITRSIKHDAPRNRNKLIENKISDGDLKGAARLLFSNDVLSPDTPDTLQALRTKHPPAPLNPYFLDPPTAGQACLQIQNKDVTDAILSFKPGSAAGLDGISPQHLKDLTSHSVGDAGEQLVNSITKLINFMYSGNVNPEIVPILFGANLIALTKKDGGVRPIAVGSTLRRLASKIAVRHILPKLNSEFEPVQLGFGVKGGCEAAVHALRSFLTYGKPDVLLKIDVKNAFNSVNRDTLLTEIKQHIPEIYNYLLLSYADPTKLLYRSNELSSEVGCQQGDPLGPAIFSLAINPIIKNLNSNFNVWYLDDGTLGGDVNTVFSDLFLIKSKFEAIGLELNFSKCELFINNCALNLNDVKQKFNILAPNIKIVNSNSLYLLGSPIFDESISEYIKNSINKFQNSADRLLEISPHYALCILKFCLFVPKFTYVLRCCSFWNYPDLLKHVDNLIKNSLESILNMQLNEQSWTQASLPIRYGGLGIRKISSVALPAFLSSVHSSANLIGKILRATPSNFEIAALEEARNAFLIACPGQNFSISPNSQRSWDDINCKLTYDNLLSSSTGSARARLLAVGTHEAGYWLHAYPSSNTGTFLEPDTLRIATCLRLGVPVCAPHKCPCGSDVDKLGHHGLSCQKSAGRFSRHAALNDIIRRSLASVNVPSLLEPTGIARDDGKRPDGMSLIPWKMGRVLVWDATCSDTLAPSHLHGTNSRAGAACKAAEKAKACKYRGLGSEYDFVPFGVETLGPWGPRALRLFKEISKRLVDITGDRRVGSYLGQRISLAIQRGNAASIFGTLPKGTPFNNVF

SEQ ID NO: 17544 - protein, 954 aa, Clostera curtula
MQSGTQSCDGTSNAIHTCTQCNKSFKSLKGLNIHTTKTHRKCNSQISTPLDIHPILPSDPAYVANDPTPFHTYLSHLKNSIPIVKRIPRGARITVATHLAQLIQKCYLNNCAQDWMNLFLFSYSTLHIIKTDEPNLSLTQKIKNNCAVSSSPSPTPIFKHDAPHNRKKLIENKICDGDLKGAARLLFSNDVLSPDTPDTLQALRTKHPPAPVTPYFLDPPTAGQACLQIQNKDVTDAILSFKPGSAAGLDGISPQHLKDLTSHSVGDAGEQLVHSITKLVNFMYSGNVNPEIVPILFGANLIALTKKDGGVRPIAVGSTLRRLASKIAIRHILPKLNSEFEPVQLGFGVKGGCEAAVHALRSFLTYGQPDVLLKIDVKNAFNSVNRDTLLTEIKQHIPEIYNYLLLSYAEPTKLLYRSNELSSEVGCQQGDPLGPAIFSLAINPIIKKLNSKFNVWYLDDGTLGGDVDTVLSDLFIIKNKFEAIGLELNFSKCELFINNCDLNLNDVKLKFNILAPNIKIVNSNSLYLLGSPIFDESFAEYINNSITKFQNSADRLIEISPHYALCILKFCLFVPKFTYVLRCCSFWNRPDLLTQVDDLIKISLESVLNMQLNEHSWTQASLPIRYGGLGIRKISSVALPAFLASVHSSASLISTILRASPSNFEIAGLEEARNAFLIACPGQNFPSSPNSQRSWDDINCKLSYDNLLSCSTGSARARLLAVGTHEAGYWLHAYPSSKTGTFLEPDTLRIATCLRLGVPVCAPHKCPCGSDVDKLGHHGLSCQKSAGRFSRHAALNDIIRRSLTSVNVPSLLEPTGIARDDGKRPDGMSLIPWKMGRVLVWDATCSDTLAPSHLHGTNNRAGAACEAAEKAKGYKYRGLGSEYEFVPFGVETLGPWGPSAISLFKEIAKRLVDITGDRRAGSYLGQRISLAIQRGNAASIFGTLPKGTPLNNIF

SEQ ID NO: 17545 - protein, 954 aa, Clostera curtula
MQSGTQSCDGTSNAIHTCTQCNKSFKSLKGLNIHTTKTHRKCNSQISTPLDIHPILPSDPAYVANDPTPFHTYLSHLKNSIPIVKRIPRGARITVATHLAQLIQKCYLNNCAQDWMNLFLFSYSTLHIIKTDEPNLSLTQKIKNNCAVSSSPSPAPIFKHDAPHNRKKLIENKICDGDLKGAARLLFSNDVLSPDTPDTLQALRTKHPPAPVTPYFLDPPTAGQACLQIQNKDVTDAILSFKPGSAAGLDGISPQHLKDLTSHSVGDAGEQLVHSITKLVNFMYSGNVNPEIVPILFGANLIALTKKDGGVRPIAVGSTLRRLASKIAIRHILPKLNSEFEPVQLGFGVKGGCEAAVHALRSFLTYGQPDVLLKIDVKNAFNSVNRDTLLTEIKQHIPEIYNYLLLSYAEPTKLLYRSNELSSEVGCQQGDPLGPAIFSLAINPIIKKLNSKFNVWYLDDGTLGGDVDTVLSDLFIIKNKFEAIGLELNFSKCELFINNCDLNLNDVKLKFNILAPNIKIVNSNSLYLLGSPIFDESFAEYINNSITKFQNSADRLIEISPHYALCILKFCLFVPKFTYVLRCCSFWNRPDLLTQVDDLIKISLESVLNMQLNEHSWTQASLPIRYGGLGIRKISSVALPAFLSSVHSSASLISTILRASPSNFEIAGLEEARNAFLIACPGQNFPSSPNSQRSWDDINCKLSYDNLLSCSTGSARARLLAVGTHEAGYWLHAYPSSKTGTFLEPDTLRIATCLRLGVPVCAPHKCPCGSDVEKLGHHGLSCQKSAGRFSRHAALNDIIRRSLTSVNVPSLLEPTGIARDDGKRPDGMSLIPWKMGRVLVWDATCSDTLAPSHLHGTNNRAGAACEAAEKAKGYKYRGLGSEYEFVPFGVETLGPWGPSAISLFKEIAKRLVDITGDRRAGSYLGQRISLAIQRGNAASIFGTLPKGTPLNNIF

SEQ ID NO: 17546 - protein, 954 aa, Cosmia trapezina
MQSVTQSCDGTSNATHTCTQCNKSFKSLKGLNIHTTKTHRKCISQNSSPLDIHPIIPSAPTYVASDPTPFHIYLSHLKNSIPIVKRIPRGARITVATHLSQLIQKCYIRNCTQDWQNLFLFSYSTLHIIKTDEPYLSLTQKIKNNCAVSSSPSPAPPIKHDAPLNRNKLIENKICDGDLKGAARLLFSNDVLSPDTPDTLQALQTKHPPAPVNPYFLDPPTAGQACLQIQNKDVTAAILSFKPGSAAGLDGISPQHLKDLTSHSVGDAGEQLVNSITKLINFMYSGNVNPEIVPILFGANLIALTKKDGGVRPIAVGSTLRRLASKIAVRHILPKLNSEFEPVQLGFGVKGGCEASVHALRSFLTYGQPDVLLKIDVKNAFNSVNRDTLLTEIKQHIPEIYNYLLLSYANPTKLLYRSNELSSEVGCQQGDPLGPAIFSLAINPIIKNLNSKFNVWYLDDGTLGGDVDTVFSDLFLIKNKFEAIGLELNFSKCELFINNCNLNLNDVKQKFNILAPNIKIVNSNSLYLLGSPIFDESISEYFNNSITKFQNSADRLLEISPHYALCILKFCLFVPKFTYVLRCCSFWNHPDLLTQVDDLIKISLESILNMQLNEQSWTQASLPIRYGGLGIRKISSVALPAFLSSVHSSANLISKILRASPSNFEIAGLEEARNAFLIACPGQNFPVYSNSQRSWDDIICKLTHDNLLSCSTGSARARLLAVGAHEAGYWLHAYPSSNTGTFLEPDTLRIATCLRLGVPVCAPHKCPCGSDVDRLGHHGLSCQKSAGRFSRHAALNDIIRRSLATVNVPSLLEPTGIARDDGKRPDGMSLIPWKMGRVLVWDATCSDTLAPSHLHGTSIRAGAACEAAEKGKVSKYRGLGSEYDFVPFGVETLGPWGPTAIRLFNEITKRLVDVTGDRRAGSYLGQRISLAIQRGNAASIFGTLPKGTPFNNIF

SEQ ID NO: 17547 - protein, 953 aa, Notocelia uddmanniana
MHAATQSDDGTSNLNFICVQCDNSFKTQRGLNIHISKKHRLCLSQNGPALNLDPAFIPAPLSDKPNSIPFHLYLSDLKNNVPVVKRVPRGARISVANHLSGLITKCVENNQIDDWHNLLLFSFNTLHAKNDEAISLTQKIKNNCVSNTTPHFSRPPKRCASSTFNKTKLIECKISDGDLKGAARLLFTNDVLSPDTPDTLLALRSKHPPAPVIPYVIDPPTADQACLQIEGKDVIDAIISFKTGSAAGLDGISPQHLKDLISQSVGDAGEQLICSLTKLINFMFSGKINNEVVPLLYGANLIALTKKDGGVRPIAVGSTLRRLASKIAVRHIRSKLQSLFEPVQLGFGTKGGCEAAVHALRTYLSYDDCEIVVKIDVKNAFNSVNRDTLLAEVKDKIPEIYNYLLLCYADPSKLMYKSHELSSEVGCQQGDPLGPAIFSSAINPIIQKLKSKFNVWYLDDGTLGGDVDTVLSDLAFIKTNFENIGLELNFSKCELFIQKTSCSLFDLIQKFVHLAPGIRIVDKFSLCLLGSPIFEESFPGYISDTISKFQSHANRLLEISPHYALIILKFCLFVPKFTYVLRCCPFWKHQNLLSRMDDLIKTSLEMILNIQLTEPSWSQASLPIRYGGLGIRKVSSVASPAFLASTHSTSGLIGNILRALPTYCEIAGLEGAKNAFKVACPGKKFPDNPKSQRSWDNIYCDLNYNILLTSSAGPDRARLLAVGTREAGYWLHAHPSPNTGTFLDPTSLRLATELRLGVAVCTPHICSCGTDVDRLGHHGLCCQKSAGRFSRHATLNDIIRRSLATVNVPALLEPTGMVRDDGKRPDGVSLVPWSVGRMLVWDATCVDTLAPSHLQRTTVKAGAAAENAEILKRNKYKGLGREYMFVPFGVETLGSWGPSAHKLFAEIAKRLVDVTGDRRAGGFLAQRISIAIQRGNAASILGTMPQGPVLDLS

SEQ ID NO: 17548 - protein, 954 aa, Zeuzera pyrina
MQPVTQSCDGTSNATHICTQCNKSFKSSKGLNIHTTKTHRKCISQNSSPLDIHPIIPSAPTYVANDPTPFHTYLSHLKNSIPIVKRIPRGARITVATHLSQLIQKCYISNCTQDWQNLFLFSYSTLHILKTNEPNLSLTQKIKNNCAVSSSPSPKPLIKHDAPRNRNKLIEFKICDGDLKGAARLLFSNDVLSPDTSDTLQALRTKHPPAPVNPYSLDPPKAGQACLQIQNKDVTNAISSFKPGSAAGLDGISPQHLKDLTSHSVGDAGEKLVNSITKLINFMYSGNVNPEIVPILFGANLIALTKKDGGVRPIAVGSTLRRLASKIAVRHILPKLNSEFEPVQLRFGVKGGCEAAVHALRSFLTYGQPDVLLKIDVKNAFNSVNRDTLLKEIKQHIPEIYNYLLLSYVEPTKLLYRSNELSSEAGCQQGDPLGPAIFSLAINPIIKNLNSKFNVWYLDDGNLGSDVDTVFSDLFSIKNKFEAIGLELNFSKCELFINNCDLNLNDVKQKFNILAPNIKIVNSNSLYLLGSPIFDESISEYINNSITKFQNSADRLLEISPHYALCILKFCHFVPKFTYVLRCCSFWNHPDLLTQVDDLIKISLESILNMQLDEQSWAQASLPIRYGGLGIRKIFSVALPAFLSSAYSSANLISKILRASPSKFAIVGLEEARNAFLIACPGQNFPVSPNSLKSWDDINCKFTYDNLLNCSTGSARARLLAVGAHEAGYWLHAYPSSNIGTFLEPDTLRIATCLRLGVPVCTPHKCPCGSDVDKLGHHGLSCQKSAGRFSRHAALNDIIRRSLATVNVPSLLEPTGIARDEGKRPDGMSLIPWKMGRVLVWDATCSDTLAPSHQHGTNNRTGAACEAAEKVKACKYRGLGSEYDFVPFGVETLGPWGPSAIRLFKEIAKRLVDITGDRKAGSYLGQRISLAIQRGNAASIFGTLPKGTPFKNIF

SEQ ID NO: 17549 - protein, 959 aa, Tinea trinotella
MQTVTQSCDGTSNATHTCSQCRKSFKSLKGLNIHTTKIHRKCISQNSSPLDIHPIIPSAPTYVANNSTPFHKYLSNLKNSLPVVKRIPRGARITVATHLSKLIQKCYISNCTQDWQNLFLFSYNTLHIIKTNEPNLSLTQKIKNNCAVSSLPSPAPLAITRSIKHDAPRNRNKLIENKISDGDLKGAARLLFSNDVLSPDTPDTLQVLRTKHPPAPVNPYFLDPPTAGQACLQIQNKDVTDAILSFKPGSAAGLDGISPQHLKDLTSHSVGDAGEQLVNSITKLINFMYFGNVNPEIVPILFGANLIALTKKDGGVRPIAVGSTLRRLASKIAVRHILPKLNSEFEPVQLGFGVKGGCEAAVHALRSFLTYGQPDVLLKIDVKNAFNSVNRDTLLTEIKQHIPEIYNYLLLSYADPTKLLYRSNELSSEVGCQQGDPLGPAIFSLAINPIIKNLNSNFNVWYLDDGTLGGDVNTVFSDLFLIKSKFEAIGLELNFSKCELFINNCALNLNDVKQKFNILAPNIKIVNSNSLYLLGSPIFDASISEYINNSITKFQNSADRLLEISPHYALCILKFCLFVPKFTYVLRCCSFWNYPDLLKHVDDLIKNSLESILNMQLNEQSWTQASLPIRYGGLGIRKISSVALPAFLSSVHSSANLIGKILRATPSNFEIAALEEARNAFLIACPGQNFSISPNSQRSWDDINCKLTYDNLLSSSTGSARARLLAVGTHEAGYWLHAYPSSNTGTFLEPDTLRIATCLRLGVPVCAPHKCPCGSDVDKLGHHGLSCQKSAGRFSRHAALNDIIRRSLASVNVPSLLEPNGIARDDGKRPDGMSLIPWKMGRVLVWDATCSDTLAPSHLHGTNSRAGAACEAAEKAKACKYRGLGSEYDFVPFGVETLGPWGPSALRLFKEISKRLVDITGDRRVGSYLGQRISLAIQRGNAASIFGTLPKGTPFNNVF

SEQ ID NO: 17550 - protein, 954 aa, Clostera curtula
MQSGTQSCDGTSNAIHTCTQCNKSFKSLKGLNIHTTKTHRKCNSQISTPLDIHPIIPSAPAYVANDPTPFHTYLSHLKNSIPIVKRIPRGARITVATHLAQLIQKCYLNNCAQDWMNLFLFSYSTLHIIKTDEPNLSLTQKIKNNCAVSSSPSPAPIFKHDAPHNRKKLIENKICDGDLKGAARLLFSNDVLSPDTPDTLQALRTKHPPAPATPYFLDPPTAGQACLQIQNKDVTDAILSFKPGSAAGLDGISPQHLKDLTSHSVGDAGEQLVNSITKLINFMYSGNVNPEIVPILFGANLIALTKKDGGVRPIAVGSTLRRLASKIAIRHILPKLNSEFEPVQLGFGVKGGCEAAVHALRSFLTYGQPDVLLKIDVKNAFNSVNRDTLLTEIKQHIPEIYNYLLLSYAEPTKLLYRSNELSSEVGCQQGDPLGPAIFSLAINPIIKKLNSKFNVWYLDDGTLGGDVDTVLSDLFIIKNKFEAIGLELNFSKCELFINNCDLNLNDVKLKFNILAPNIKIVTSNSLYLLGAPIFDVSFAEYINNSITKFQNSADRLLEISPHYALCILKFCLFVPKFTYVLRCCSFWNRPDLLTQVDDLIKISLESVLNMQLNEHSWTQASLPIRYGGLGIRKISSVALPAFLSSVHSSASLISTILRASPSNFEIAGLEEGRNAFLIACPGQNFPSSPNSQRSWDDINCKLSYDNLLSCSTGSARARLLAVGAHEAGYWLHAYPSSKTGTFLEPDTLRIATCLRLGVPVCAPHKCPCGSDVDKLGHHGLSCQKSAGRFSRHAALNDIIRRSLTSVNVPSLLEPTGIARDDGKRPDGMSLIPWKMGRVLVWDATCSDTLAPSHLHGTNNRAGAACEAAEKAKAHKYRGLGSEYEFVPFGVETLGPWGPSAISLFKEIAKRLVDITGDRRAGSYLGQRISLAIQKGNAASIFGTLPKGTPLNNIF

SEQ ID NO: 17551 - protein, 954 aa, Clostera curtula
MQSGTQSCDGTSNAIHTCTQCNKSFKSLKGLNIHTTKTHRKCNSQISTPLDIHPIIPSDPAYVANDPTPFHTYLSHLKNSIPIVKRIPRGARITVATHLAQLIQKCYLNNCAQDWMNLFLFSYSTLHIIKTDEPNLSLTQKIKNNCAVSSSPSPAPIFKHDAPHNRKKLIENKICDGDLKGAARLLFSNDVLSPDTPDTLQALRTKHPPAPVTPYFLDPPTAGQACLQIQNKDVTDAILSFKPGSAAGLDGISPQHLKDLTSHSVGDAGEQLVNSITKLVNFMYSGNVNPEIVPILFGANLIALTKKDGGVRPIAVGSTLRRLASKIAIRHILPKLNSEFEPVQLGFGVKGGCEAAVHALRSFLTYGQPDVLLKIDVKNAFNSVNRDTLLTEIKQHIPEIYNYLLLSYAEPTKLLYRSNELSSEVGCQQGDPLGPAIFSLAINPIIKKFNSKFNVWYLDDGTLGGDVDTVLSDLFIIKNKFEAIGLELNFSKCELFINNCDLNLNDVKLKFNILAPNIKIVNSNSLYLLGSPIFDESFAEYINNSITKFQNSADRLIEISPHYALCILKFCLFVPKFTYVLRCCSFWNRPDLLTQVDDLIKISLESVLNMQLNEHSWTQASLPIRYGGLGIRKISSVALPAFLSSVHSSASLISTILRASPSNFEIAGLEEARNAFLIACPGQNFPSSPNSQRSWDDINCKLSYDNLLSCSTGSTRARFLAVGTHEAGYWLHAYPSSKTGTFLEPDTLRIATCLRLGVPVCAPHKCPCGSDVDKLGHHGLSCQKSAGRFSRHAALNDIIRRSLTSVNVPSLLEPTGIARDDGKRPDGMSLIPWKMGRVLVWDATCSDTLAPSHLHGTNNRAGAACEAAEKAKAYKYRGLGSEYEFVPFGVETLGPWGPSAISLFKEIAKRLVDITGDRRAGSYLGQRISLAIQRGNAASIFGTLPKGTPLNNIF

SEQ ID NO: 17552 - protein, 954 aa, Clostera curtula
MQSGTQSCDGTSNAIHTCTQCNKSFKSLKGLNIHTTKTHRKCNSQISTPLDIHPILPSDPAYVANDPTPFHTYLSHLKNSIPIVKRIPRGARITVATHLAQLIQKCYLNNCAQDWMNLFLFSYSTLHIIKTDEPNLSLTQKIKNNCAVSSSPSPTPIFKHDAPHNRKKLIENKICDGDLKGAARLLFSNDVLSPDTPDTLQALRTKHPPAPVTPYFLDPPTAGQACLQIQNKDVTDAILSFKPGSAAGLDGISPQHLKDLTSHSVGDAGEQLVHSITKLVNFMYSGNVNPEIVPILFGANLIALTKKDGGVRPIAVGSTLRRLASKIAIRHILPKLNSEFEPVQLGFGVKGGCEAAVHALRSFLTFGQPDVLLKIDVKNAFNSVNRDTLLTEIKQHIPEIYNYLLLSYAEPTKLLYRSNELSSEVGCQQGDPLGPAIFSLAINPIIKKLNSKFNVWYLDDGTLGGDVDTVLSDLFIIKNKFEAIGLELNFSKCELFINNCDLNLNDVKLKFNILAPNIKIVNSNSLYLLGSPIFDESFAEYINNSITKFQNSADRLIEISPHYALCILKFCLFVPKFTYVLRCCSFWNRPDLLTQVDDLIKISLESVLNMQLNEHSWTQASLPIRYGGLGIRKISSVALPAFLSSVHSSASLISTILRASPSNFEIAGLEEARNAFLIACPGQNFPSSPNSQRSWDDINCKLSYDNLLSCSTGSARARLLAVGTHEAGYWLHAYPSSKTGTFLEPDTLRIATCLRLGVPVCAPHKCPCGSDVDKLGHHGLSCQKSAGRFSRHAALNDIIRRSLTSVNVPSLLEPTGIARDDGKRPDGMSLIPWKMGRVLVWDATCSDTLAPSHLHGTNNRAGAACEAAEKAKGYKYRGLGSEYEFVPFGVETLGPWGPSAISLFKEIAKRLVDITGDRRAGSYLGQRISLAIQRGNAASIFGTLPKGTPLNNIF

SEQ ID NO: 17553 - protein, 954 aa, Ochlodes sylvanus
MQSVTQSCDGTSNASHPCTQCNKSFKSLKGLNIHSTKTHKKCISQNISTLDIHPAIPSAPTHVANDSTPFHTYLSHLKNSIPIVKRIPRGARITVATHLSKLIQKCYLNNYTQDWQNLFLFSYSSLHIIKTNEQNLSLTQKIKNNCALSSSPSPTPLNKHDAPRNRNKLIEKKICDGDLKGAARLLFSNDVLSPDTPDTLQALRTKHPPAPVNPYFLDPPTAGQACLQIQNKDVKDAILSFKPGSAAGLDGISPQHLKDLTSHSVGDAGEQLVNSITKLINFMYSGNVNSEIVPILFGANLIALTKKDGGVRPIAVGSTLRRLASKIAVRHILPKLNSEFEPVQLGFGVKGGCEAAVHALRSFLTYEQPDVLLKIDVKNAFNSVNRDTLLTEIKQHIPEIYNYLLLSYADPTKLLYRSNELSSEVGCQQGDPLGPAIFSLAINPIIKNLNSKFNVWYLDDGTLGGDVDTVFSDLFLIKNKFEAIGLELNFSKCELFINNCDLNLNEVKQKFNILAPNIKIVNSNSLYLLGSPIFDESIAEYINNSITKFQNSADRLFEISPHYALCILKFCLFVPKFTYVLRCCSFWNHPDLLTQVDNLIKISLESILNLQLTEQSWTQASLPIRYGGLGIRKISSVALPAFLSSVHSSANLISKILRASPSNFEIVGLEEARNAFLIACPGQNFPFSPNSQRSWDDIKCKLTYDNLLSCSTGSARARLLAVGAIEAGYWLHAYPSSNTGTFLEPDTLRIATCLRLGVPVCAPHKCPCGSDVDKLGHHGLSCQKSAGRFSRHAALNDIIRRSLATVNVPSLLEPTGIARDDGKRPDGMSLIPWKMGRVLVWDATCSDTLAPSHLHGTNNTAGAACEAAEKAKASKYRGLGSEYDFVPFGVETLGPWGPSAIKLYREIAKRLVDITGDRRAGSYLGQRISIAIQRGNAASIFGTLPKGTPFNNIF

SEQ ID NO: 17554 - protein, 950 aa, Bembecia ichneumoniformis
MQSVTQSCDGTSNATHTCTQCNKPFKSLKGLNIHTTKIHRKCISQNSAPLDIHPIIPSAPTNVAPFHTYLSHFKNSIPIVKRIPRGARIIVATHLSQLIQKCYISNCTQDWQNLFLFSYSTLHIIKTDEPNSSLTQKIKNNCAVSSSPSPAPLIKHDAPRNRNKLIENKICDGDLKGAARLLFSNDVLSPDTPDTLQALQTKHPPAPVNPYFFDPPTAGQTCLQIQNKDVTDAILSFKPGSAAGLDGISPQHLKDLTSHSVGDAGENLVNSITKLINFMYSGNVNPEFVPILFGANLIALTKKDGGVRPIAVGSTLRRLASKIAVRHILPKLNAEFEPVQLGFGVKGGCEAAVHSLRSFLTYGQPDVLLKIDVKNAFNSVNRDTLLTEIKQHIPEIYNYLLLSYADPTKLLYRSNELSSEVGCQQGDPLGPAIFSLAINPIIKNLNSKFNVWYLDDGTLGGDVDTVFSDLFLIKNKFEAIGLELNFSKCELFINNCNLNSNDVKEKFNILAPNIKIVNSNSLYLLGSPIFDESFSEYINNSITKFQNSADRLLEISPHYALCILKFCLFVPKFMYVLRCCSFWNHPDLLTQVDDLIKISLESILNMQLNEQSWSQASLPIRHGGLGIRKISSVALPAFLSSVYSSENLISKILRASPSNFEIAGLEEARNAFLIACPGQNFPVSPNSQRSWDDINCKLTYDNLLSCSTGSARARLLAVGAHEAGYWLHAYPSSNTGTFLEPDTLRIATCLRLGVPVCVPHKCPCGSDVDNLGHHGLSCQKSAGRFSRHAALNDIIRRSLASVKVPSLLEPTGIARDDGKRPDGMSLIPWKMGRVLVWDATCSDTLAPSHLHGTNNRAGAACEAAEKAKACKYRGLGSEYDFVPFGVETLGPWGPSAIRLFKEIVKRLVDITGDRRAGSYLGQRISLAIQRGNAASIFGTLPKGTPFNNIF

SEQ ID NO: 17555 - protein, 901 aa, Chrysoteuchia culmella
MQSVTQSCDGTSNATHTCTQCNKSFKSLKGLNIHITKTHRKCISQNSSPLDIHPIIPSAPTYVANDPTPFHTYLSHLKNSIPIVKRIPRGARITVATRLSQLIQKCYISNSTQDWQNLFLFSYSTLHILIKTDEPNLSLTQKIKNNCAVSSSPSPAPLIKHDAPRNRNRLIENKICDGDLKGAARLLFSNDVLSPDTPDTLQALRTKHPPAPVNPYFLDPPTAGQACLQIQNKDVMNAILSFKPGSAAGLDGISPQHLKDLTSHSVGDAGEQLVNSITKLINFMYSGNVNPEIVPILFGANLIALTKKDGGVRPIAVGSTQRRLASKIAVRHILPKLNSEFEPVKLGFGVKGGCEAAVHALRSFLTYGQPDVLLKIDVKNAFNSVNRDTLLTEIKQHIPEIYNYLLLSYADPTKLLYRTNELSSEVGCQQGDPLGPAIFSLAINPIIKNLNSKFNVWYLDDGTLGGDVDTVFSDLFVIKNKFEAIGLELNVSKCELFINNCDLNLNDVKQKFNILAPNIKIVDSNSLYLLGSPIFDESISEYINNSITKFQNSADRLLEISPHYALCIFKFCLFVPKFTYVLRCCSFWNHPGLLSQVDNIIKISLESILNMQLNEQSWTQASLPIRYGGLGIRKISSVALPAFLSSVHSSANLISNILRVSPSNFEIAGLEEARKAFLIACPGQNLPISPNSQRSWDDINCKLTYDNLVSCSTGSARARLLALGAHEAGYWLHAYPSSNTGTFLEPDTLRIATCLRLGVPVCAPHKCPCGSDVDKLGHHGLSCQKSAGRFSRHAALNDIMRRSLATVNVPSLLEPTGIARDDGKRPDGMSLIPWKMGRVLVWDATCSDTLAPSHLHGTNNRAGAACEAAEKAKSCKYRGLGSEYDFVPFGVEILVRGVLAL

SEQ ID NO: 17556 - protein, 959 aa, Tinea trinotella
MQSVTQSCDGTSNATHTCSQCSKSFKSLKGLNIHTTKIHRKCSSQNSSPIDIHPIIPSAPTYVANNSTPFHKYLSNLKNSIPVVKRIPRGARITVATHLSKLIQKCYISNCTQDWQNLFLFSYNTLHIIKTNEPNLSLTQKIKNNCAVSSLPSPAPLAITRSIKHDAPRNRNKLIENKISDGDLKGAARLLFSNDVLSPDTPDTLQALRTKHPPAPLNPYFLDPPTAGQACLQIQNKDVTDAILSFKPGSAAGLDGISPQHLKDLTSHSVGDAGEQLVNSITKLINFMYSGNVNPEIVPILFGANLIALTKKDGGVRPIAVGSTLRRLASKIAVRHILPKLNSEFEPVQLGFGVKGGCEAAVHALRSFLTYGQPDVLLKIDVKNAFNSVNRDTLLTEIKQHIPEIYNYLLLSYADPTKLLYRSNELSSEVGCQQGDPLGPAIFSLAINPIIKNLNSNFNVWYLDDGTLGGDVNTVFSDLFLIKSKFEAIGLELNFSKCELFINNCALNLNDVKQKFNILAPNIKIVNSNSLYLLGSPIFDESISEYIKNSVTKFQNSADRLLEISPHYALCILKFCLFVPKFTYVLRCCSFWNYPDLLKHVDNLIKNSLESILNMQLNEQSWTQASLPIRYGGLGIRKISSVALPAFLSSVHSSANLIGKILRATPSNFEIAALEEARNAFLIACPGQNFSISPNSQRSWDDINCKLTYDNLLSSSTGSARARLLAVGTHEAGYWLHAYPSSNTGTFLEPDTLRIATCLRLGVPVCAPHKCPCGSDVDKIGHHGLSCQKSAGRFSRHAALNDIIRRSLASVNVPSLLEPTGIARDDGKRPDGMSLIPWKMGRVLVWDATCSDTLAPSHLHGTNSRAGAACEAAEKAKACKYRGLGSEYDFVPFGVETLGPWGPSALRLFKEISKRLVDITGDRRVGSYLGQRISLAIQRGNAASIFGTLPKGTPFNNVF

SEQ ID NO: 17557 - protein, 954 aa, Clostera curtula
MQSGTQSCDGTSNAIHTCTQCNKSFKSLKGLNIHTTKTHRKCNSQISTPLDIHPIIPSAPAYVANDPTPFHTYLSHLKNSIPIVKRIPRGARITVATHLAQLIQKCYLNNCAQDWMNLFLFSYSTLHIIKTDEPNLSLTQKIKNNCAVSSSPSPAPIFKHDAPHHRKKLIENKICDGDLKGAARLLFSNDVLSPDTPDTLQALRTKHPPAPATPYFLDPPTAGQACLQIQNKDVTDAILSFKPGSAAGLDGISPQHLKDLTSHSVGDAGEQLVNSITKLINFMYSGNVNPEIVPILFGANLIALTKKDGGVRPIAVGSTLRRLASKIAIRHILPKLNSEFEPVQLGFGVKGGCEAAVHALRSFLTYGQPDVLLKIDVKNAFNSVNRDTLLTEIKQHIPEIYNYLLLSYAEPTKLLYRSNELSSEVGCQQGDPLGPAIFSLAINPIIKKLNSKFNVWYLDDGTLGGDVDTVLSDLFIIKNKFEAIGLELNFSKCELFINNCDLNLNDVKLKFNILAPNIKIVTSNSLYLLGAPIFDESFAEYINNSITKFQNSADRLIEISPHYALCILKFCLFVPKFTYVLRCCSFWNRPDLLTQVDDLIKISLESVLNMQLNEHSWTQASLPIRYGGLGIRKISSVALPAFLSSVYSSASLISTILRASPSNFEIAGLEEARNAFLIACPGQNFPSSPNSQRSWDDINCKLSYDNLLSCSTGSARARLLAVGAHEAGYWLHAYPSSKTGTFLEPDTLRIATCLRLGVPVCAPHKCPCGSDVDKLGHHGLSCQKSAGRFSRHAALNDIIRRSLTSVNVPSLLEPTGIARDDGKRPDGMSLIPWKMGRVLVWDATCSDTLAPSHLHGTNNRAGAACEAAEKAKAHKYRGLGSEYEFVPFGVETLGPCGPSAISLFKEIAKRLVDITGDRRAGSYLGQRISLAIQRGNAASIFGTLPKGTPLNNIF

SEQ ID NO: 17558 - protein, 954 aa, Clostera curtula
MQSGTQSCDGTSNAIHTCTQCNKSFKSLKGLNIHTTKTHRKCNSQISTPLDIHPIIPSAPAYVANDPTPFHTYLSHLKNSIPIVKRIPRGARITVATHLAQLIQKCYLNNCAQDWMNLFLFSYSTLHIIKTDEPNLSLTQKIKNNCAVSSSPSPAPIFKHDAPHNRKKLIENKICDGDLKGAARLLFSNDVLSPDTPDTLQALRTKHPPAPATPYFLDPPTAGQACLQIQNKDVTDAILSFKPGSAAGLDGISPQHLKDLTSHSVGDAGEQLVNSITKLINFMYSGNVNPEIVPILFGANLIALTKKDGGVRPIAVGSTLRRLASKIAIRHILPKLNSEFEPVQLGFGVKGGCEAAVHALRSFLTYGQPDVLLKIDVKNAFNSVNRDTLLTEIKQHIPEIYNYLLLSYAEPTKLLYRSNELSSEVGCQQGDPLGPAIFSLAINPIIKKLNSKFNVWYLDDGTLGGDVDTVLSDLFIIKNKFEAIGLELNFSKCELFINNCDLNLNDVKLKFNILAPNIKIVTSNSLYLLGAPIFDVSFAEYINNSITKFQNSADRLLEISPHYALCILKFCLFVPKFTYVLRCCSFWNRPDLLTQVDDLIKISLESVLNMQLNEHSWTQASLPIRYGGLGIRKISSVALPAFLSSVHSSASLISTILRASPSNFEIAGLEEARNAFLIACPGQNFPSSPNSQRSWDDINCKLSYDNLLSCSTGSARARLLAVGAHEAGYWLHAYPSSKTGTFLEPDTLRIATCLRLGVPVCAPHKCPCGSDVDKLGHHGLSCQKSAGRFSRHAALNDIIRRSLTSVNVPSLLEPTGIARDDGKRPDGMSLIPWKMGRVLVWDATCSDTLAPSHLHGTNNRAGAACEAAEKAKAHKYRGLGSEYEFVPFGVETLGPWGPSAISLFKEIAKRLVDITGDRRAGSYLGQRISLAIQKGNAASFFGTLPKGTPLNNIF

SEQ ID NO: 17559 - protein, 672 aa, Anthocharis cardamines
MFSGNVNPEIVPILFGANLIALTKKDGGVRPIAVGSTLRRLASKIAVRHILPKLNSEFEPVQLGFGVKGGCEAAVHALRSFLTYGQPDVLLKIDVKNAFNSVNRDTLLTEIKQHIPEIYNYLLLSYADPTKLLYRSNELSSEVGCQQGDPLGPAIFSLAINPIIKNLNSKFNVWYLDDGTLGGDVDTVFSDLLLIKNKFEAIGLELNFSKCELFINNCDLNLTDVKQKFNILAPNIKIVNSNSLYLLGSPIFDESFSEYIDISITKFKNSADRLLEISPHYALCILKFCLFVPKFTYVLRCCSFWNHPDLLSQVDDLFKISLESILNMQLNEQSWTQASLPIRYGGLGIRKISSVALPAFLSSVHSSANLISKILRESPSNFEIAGLEEARNAFLIACPGQNFPVSPNSQRSWDDINCKLSYENLLSCSTGSARARLLAVGAHEAGYWLHAYPSSNTGTFLEPDTLRIAACLRLGVPVCIPHKCPCGSDVDKLGHHGLSCLKSAGRFSRHAALNDIIRRSLATVNVPSLLEPTGIARDDGKRPDGMSLIPWKMGRVLVWDATCSDTLAPSHLHGTNNRVGAACEAAEKAKTCKYRGLGSEYDFVPFGVETLGPWGPSAIKLFKEIAKRLVDITGDRRAGSYLGQRISLAIQRGNAASIFGTLPKGTPFINIF

SEQ ID NO: 17560 - protein, 952 aa, Chilo suppressalis
MQSATQYCDGTSNTTRTCTQCHKSFKSLKGLNIHTTKIHRKCISQNSSDIHPIIPSGPAYVANDPTPFHTYLSHLKNSIPIVKRIPRGARITVATYLSQLIQKCYISNCSQDWQNLFLFSYSTLHILKTNELNLSLTQKIKNNCAVSSSPSPAPLIKHDAPRNRIKLIENKICDGDLKGAARLLFSNDVLSPDTPDTLQALRTKHPPAPVNPYFLDPPTAGQACLQIQNKDVTDAILSFKPGSAAGLDGISPQHLKDLTSHSVGDAGKQLINSITKLINFMYSGNVNHEIVSILFGANLIALTKKDGGVRPIAVGSTLRRLASKIAVRHILPKLNSEFEPVQLGFGVKGGCEAAVHALRSFLTYGQPDVLLKIDVKNAFNSVNRDTLLTEIKQHITEIYNYLLLSYADPTKLLYRSNELSSEVGCQQGDPLGPAIFSLAINPIIKNLNSKFNVWYLDDGTLGGDVDTVFSDLFLIKNKFEAIGLELNFSKCELFINNCDLNLNDVKQKFNILAPNIKIVNSNSLYLLGSPIFDESISEYINNSINKFQNSADRLLEISPHYALCILKFCLFVPKFTYVLRCCSFWNHLDLLTQVDDLIKNNLESILNMQLNEQSWTQASLPIRYGGLGIRKISSVALPAFLSSVHSSANLISKILRASPSNFEIAGLEEARNAFLIACPGQNFPVSPNSQRSWDDINCKLTYDILLSCSTGSARARLLAVGAHEAGYWLHAYPSSNTGTFLEPDTLRIATCLRLGVPVCAPHKCPCGSDVDKLGHHGLSCQKSAGRFSRHAALNDIIRRALATVNVPSLLEPTGIARDDGKRPDGMSLIPWKMGRVLVWDATCSDTLAPSHLHGTNNRAGAVCEAAEKAKASKYRGLGSEYDFVPFGVETLGPWGPSALRLFKEIAKRLVNITGDRRAGSYLGQRISLAIQRGNAASIFGSLPKGTLFNNIF

SEQ ID NO: 17561 - protein, 950 aa, Papilio antimachus
MQSVTQSCDGTSNATHTCTQCNKSFKSLKGLNIHTTKTHRKCISQNSSPLDIHPIISSAPTYVANDPTPFHTYLSHLKNSIPIVKRIPRGARITVATHLSQLIQKCYISNCTQDWQNLFLFSYSTLHIIKTDELNLSLTQKIKNNCAVSSSPSPAPLIKYDAPRNRNKLIENKICDGDLKGAARLLFSNDVLSPDTPDTLQALRTKHPPAPVNPYFLDRPTAGQACLQIHNKDVTGAILSFKPGSAAGLDGISPQHLKDLTSHSVGDAGEQLVNSITKLINFMYSGNVNPEIVPILFGANLIALTKKDGGVRPIAVGSTLRRLASKIAVRHILPKLNSEFEPVQLGFGVKGGCEAAVHALRSFLTYGHPDVLLKIDVKNAFNSVNRDTLLTEIKQHIPEIYNYLFLSYADPTKLLYRSNELSSEVGCQQGDPLGPAIFSLAINPIIKNLNSKFNVWYLDDGTLGGDMDTVFSDLFLIKNKFEAIGLELNFSKCELFINNCNLNLNDVKQKFNILAPNIKIVNSNSLYLLGSPIFNESISEYINNSITKFQNSADRLLEISPHYALCILKFCLFVPKFTYVLRCCSFWNHPDLLTQVDNLIKISLESILNMHLNEQSWTQASLPIRYGGLGIRKISSVSLPAFLSSVHSSANLISKILRASPSNFEIAGLEEARNAFLIACPGQNFPVSPNSQRSWDDINCKLTYDNLLSCSTGSARARLLAVGTHEAGYWLHAYPSSNTGTFLEPDTLRIATCLRLGVPVCVPHKCPCGSDVDKLGHHGLSCQKSAGRFSRHAALNDIIRRSLATVNVPSLLEPSGIARDDGKRPDGMSLIPWKMGRVLVWDATCSDTLAPSHLHGTNNRAGAACEAAEKAKACKYRGLGSEYVFVPFGVETLGPWGPSAIRLFKEIAKRLVDVTGDRRAGSYLGQRISLAIQRGNAASIFGTLPKGPPF

SEQ ID NO: 17562 - protein, 720 aa, Chrysoteuchia culmella
MNAILSFKPGSAAGLDGISPQHLKDLTSHSVGDAGEQLVNSITKLINFMYSGNVNPEIVPILFGANLIALTKKDGGVRPIAVGSTLRRLASKIAVRHILPKLNSEFEPVQLGFGVKGGCEAAVHALRSFLTYGQPDVLLKIDVKNAFNSVNRDTLLTEIKQHIPEIYNYLLLSYADPTKLLYRTNELSSEVGCQKGDPLGPAIFSLAINPIIKNLNSKFNVWYLDDGTLGGDVDTVFSDLFVIKNKFEAIGLELNVSKCELFINNCHLNLNDVKRKFNILAPNIKIVDSNSLYLLGSPIFDESISEYINNSITKFQNSADRLLEISPHYALCIFKFCLFVPKFTFVLRCCSFWNHPGLLSQVDNLIKISLESILNMQLNEQSWTQASLPIRYGGLGIRKISSVALPAFLSSVHSSANLISKILRVSPSNFEIAGLEEARKAFLIACPGQNLPISPNSQRSWDDINCKLTYDNLVSCSTGSARARLLAVGAHEAGYWLHAYPSSNTGTFLEPDTLRIATCLRLGVPVCAPHKCPCGSDVDKLGHHGLSCQKSAGRFSRHAALNDIIRRSLATVNVPSLLEPTGIARDDGKRPDGMSLIPWKMGRVLVWDATCSDTLAPSHLHGTNNRAGAAGEAAEKAKSCKYRGLGSEYDFVPFGVETLGPWGPSAIRLFKEIAKRLVDITGDRRAGSYLGQRISLAIQRGNAASIFGTLPKGTPFNNIF

SEQ ID NO: 17563 - protein, 671 aa, Cydia splendana
MFSGKINTNIVPILYGANLIALTKKDGGVRPIAVGSTLRRLASKIAVRHIRSKLQSLFEPIQLGFGTKGGCEAAVHALRTYLSLDDCEIVVKIDVKNAFNSVSRDTLLTEVKDKIPELYNYLFFCYSDSSKLMYKSHELSSEVGCQQDDPLGPAIFSLAINPIIKNLKSKFNVWYLDDGTLGGDVNTVLSDLSFIKSSFENIGLELNFSKCELFIQKSSCTLTNLQPKFDDLTPNIKSVDKYSLCLLGSPIFEESFPDYISNSITKFKSHTDRLLEISPHYALVILKFCLFVPKFTYVLRCCPFWKHQNLLSPIDDLIKISLETILNIQLSEPSWSQASLPIRFGGLGIRKISSVASPAFLASTHSTSGLIGNILRALPTNCEIAGFEDAKNAFKIACPGKQFPDNPNSQRSWDNVYCDLTYNTLLNNCTGPDRARLLAVGAREAGYWLHAHPSPNTGTFLDPASLRLATGLRLGVSVCTPHICSCGTDVDRLGHHGLSCQKSAGRFSRHASLNDIVRRSLATINVPALLEPTGIIRDDGKRPDGVSLVPWSLGRMLVWDATCVDTLAPSHLQRTTVKAGGAAESAEILKRNKYKSLGREYHFVPFGVETLGPWGPSAHKLFAEIAKRLVDVTGDRRAGGYLAQRISIAIQRGNAASILGTMPQGPILDLS

SEQ ID NO: 17564 - protein, 672 aa, Melitaea cinxia
MYSGNVNPEIVPILFGANLIALTKKDGGVRPIAVGSTLRRLASKIAVRYILPKLNSEFEPVQLGFGVKGGCEAAVHALRSFLTYDRPDVLLKIDVKNAFNSVNRDTLLTEIKHYIPELYNYLLLSYADPTKLLYRSNELSSEVGCQQGDPLGPAIFSLAINPIIKNLNSKFNVWYLDDGTLGGDVDTVFSDLFLIKNKFEAIGLELNFSKCELFINNCDLNLNDVKHKFNILAPNIKIVNSNSLYLLGSPIFDECISEYINNSFTKFQNSVDRLLEISPHYALCILKYCLFVPKFTYALRCCSFWNHPDLLTQVDDLIKISLESILNMQLNEQSWTQASLPIRYGGLGIRKISSVALPAFLSSVHSSANLISKILRASPSNFEIAGLEEARNAFLIACPGQNFPVSPNSQRSWDDINCKLTYENLLSCSTGSARARLLAVGTHEAGYWLHAHPSTNTGTFLEPDTLRIATCLRLGVPVCAPHKCPCGSDVDKLGHHGLSCLKSAGRFSRHAALNDIIRRSLATVNVPSLLEPTGIARDDGKRPDGMSLIPWKMGRVLVWDATCSDTLAPSHLHGTNNRAGAACEAAEKTKADKYRGLGSEYDFVPFGVETLGPWGPSAITLFKEISKRLFDVTGDRRAGSYFGQSISLAIQRGNAASIFETLPKGTPFNNIF

SEQ ID NO: 17565 - protein, 955 aa, Mellicta athalia
MQSGTQSCDGTSNATYTCTQCNKPFKSLKGLNIHTSKIHRTFFSQSSSPVDIHPIIPSTPTHVANDPTPFHTYLSHLKNSIPIVKRIPRGARITVATHLSQLIQKCYMSNCTQDWQNLFLFSYSTLHIIIKTDEPKLSLTQKIKNNCAVSSSLSPAPLIKHDAPRNRNKLIINKICDGDLKGAARLLFSNDVLSPDTPDTLQALLTKHPPAPVNPYFLDPPTAGQACLQIQNKDVTNAISSFKPGSASGLDGISPQHLKDLTSHSVGDAGTQLLNSITKLINFMYSGNVNPEIVPILFGANLIALTKKDGGVRPIAVGSTLRRLASKIAVRHILPKLNSEFEPVQLGFGVKGGCEAAVHALRSFLTYGQPDVLLKIDVKNAFNSINRDTLLTEIKQHIPELYNYLLLSYGDPTKLLYRSNELSSEVGCQQGDPLGPAIFSLAINPIIKNLNSKFNVWYLDDGTLAGDVDTVFSDLFLIKNKFEAIGLELNFSKCELFINNSVLNLNDIKQKFNILAPNIKIVNSNSLYLLGSPIFDDSIPEYINNSITKFQNCVDRLLEISSHYALCILKFCLFVPKFTYVLRCCSFWNHPDLLTKVDKLIKISLESILNMQLNEQSWTQASLPIRYGGLGIRKISSVALPAFLSSVHSSANLISKILRAPPPNFEIAGLEEARNAFLIACPGQNFPVSTNSQRSWDDIICKFTFDSLLSCSTGSARARLLAVGTHEAGYWLHAYPSSNTGTFLEPDTLRIATCLRLGVPVCAPHKCPCGSDVDKLGHHGLSCQKSAGRFSRHAALNDIIRRSLATVNVPSILEPSGIARDDGKRPDGMSLIPWKMGRVLVWDATCSDTLAPSHLHGTNNRAGAACEAAEKAKQSKYRGLGSEYDFVPFGVETLGPWGPNAIRLFKEIAKRLVDITGDRRAGSYLGQRISLAIQRGNAASIFGTLPKGTSFNNIF

SEQ ID NO: 17566 - protein, 954 aa, Mellicta athalia
MQSVTQSCDGTSNATHICTQCNKSFKSLKGLNIHTTKTHRKCFSQNSSPADTHPTIPNTPTHLANDQTPFHTYLSHLKNSIPIVKRIPRGARITVATHLSQLIQKCYISNCTQDWQNLFLFSYSTLHIIKTDEPNLSLTQKIKNNCAVSSSPSPVPLIKHDAPHNHKKLIINKICDGDLKGAARLLFSNDVLSPDSPDTLQALLTKHPPAPVNPYFLDPPTAGQACLQIQNKDVTNAISSFKPGSAAGLDGISPQHLKDLTSYSVGDAGKQLVNSITKLINFMYSGNVNPEIVPILFGANLIALTKKDGGVRPIAVGSTLRRLASKIAVRHILPKLNSEFEPVQLGFGVKGGCEAAVHALRSFLTYGQPDVLLKIDVKNAFNSVNRDTLLTEIKQHIPELYNYLLLSYADPTKLLYRSNELSSEVGCQQGDPLGPAIFSLAINPIIKNLNSKFNVWYLDDGTIGGDVDTVFSDLFLIKNKFQDIGLELNFSKCELFINNRDLNLNDIKQKFNILAPNIKIVNSNSLHLLGSPIFDEAIPEYINNSINKFQNSVDRLFEISSHYALCILKFCLFVPKFTYVLRCCSFWKHPDLLTQVDDLIKMSIESILNMQLNEQSWTQASLPIRYGGLGIRKISSVALPAFLSSVHSSANLISKILRASPSNFEIAGLEEARNAFLIACPGQNFPVSINSQRSWDDINCKFTYDNLLSCSTGSARARLLAVGTHEAGYWLHAYPSSNTGTFLEPDTLRIAICLRLGVPVCFPHKCPCGSDVDKLGHHGLSCQKSAGRFSRHAALNDIIRRSLATINVPSLLEPTGIARDDGKRPDGMSLIPWKMGRVLVWDATCSDTLAPSHLHGTNKRAGAACEAAEKAKAGKYRGLGSEYDFVPFGVETLGPWGPSAIRLFKEISKRLVDITGDRRAGSYLGQRISLAIQRGNAASIFGTLPKGTPFNNVF

SEQ ID NO: 17567 - protein, 950 aa, Tinea trinotella
MQSVTQSCDGTSNATHTCSQCSKSFKSLKGLNIHTTKIHRKCSSQNSSPIDIHPIIPSAPTYVANNSTPFHKYLSNLKNSIPVVKRIPRGARITVATHLSKLIQKCYISNCTQDWQNLFLFSYNTLHIIKTNEPNLSLTQKIKNNCAVSSLPSPAPLAITRSIKHDAPRNRNKLIENKISDGDLKGAARLLFSNDVLSPDTTDTLQALRTKHPPAPLNPYFLDPPTAGQACLQIQNKDVTDAILSFKPGSAAGLDGISPQHLKDLTSHSVGDAGEQLVNSITKLINFMYSGNVNPEIVPILFGANLIALTKKDGGVRPIAVGSTLRRLASKIAVRHILPKLNSEFEPVQLGFGVKGGCEAAVHALRSFLTYGKPDVLLKIDVKNAFNSVNRDTLLTEIKQHIPEIYNYLLLSYADPTKLLYRSNELSSEVGCQQGDPLGPAIFSLAINPIIKNLNSNFNVWYLDDGTLGGDVNTVFSDLFLIKSKFEAIGLELNFSKCELFINNCALNLNDVKQKFNILAPNIKIVNSNSLYLLGSPIFDESISEYIKNSINKFQNSADRLLEISPHYALCILKFCLFVPKFTYVLRCCSFWNYPDLLKHVDNLIKNSLESILNMQLNEQSWTQASLPIRYGGLGIRKISSVALPAFLSSVHSSANLIGKILRATPSNFEIAALEEARNAFLIACPGQNFSISPNSQRSWDDINCKLTYDNLLSSSTGSARARLLAVGTHEAGYWLHAYPSSNTGTFLEPDTLRIATCLRLGVPVCAPHKCPCGSDVDKLGHHGLSCQKSAGRFSRHAALNDIIRRSLASVNVPSLLEPTGIARDDGKRPDGMSLIPWKMGRVLVWDATCSDTLAPSHLNGTNSRAGAACEAAEKAKACKYRGLGSEYDFVPFGVETLGPWGPSALRLFKEISKRLVDITGDRRVGSYLGQRISLAIQRGNAASIYNNVF

SEQ ID NO: 17568 - protein, 959 aa, Tinea trinotella
MQSVTQSCDGTSNATHTCSQCSKSFKSLKGLNIHTTKIHRKCSSQNSSPIDIHPIIPSAPTYVANNSTPFHKYLSNLKNSIPVVKRIPRGARITVATHLSKLIQKCYISNCTQDWQNLFLFSYNTLHIIKTNEPNLSLTQKIKNNCAVSSLPSPAPLAITRSIKHDAPRNRNKLIENKISDGDLKGAARLLFSNDVLSPDTPDTLQALRTKHPPAPLNPYFLDPPTAGQACLQIQNKDVTDAILSFKPGSAAGLDGISPQHLKDLTSHSVGDAGEQLVNSITKLINFMYSGNVNPEIVPILFGANLIALTKKDGGVRPIAVGSTLRRLASKIAVRHILPKLNSEFEPVQLGFGVKGGCEAAVHALRSFLTYGKPDVLLKIDVKNAFNSVNRDTLLTEIKQHIPEIYNYLLLSYADPTKLLYRSNELSSEVGCQQGDPLGPAIFSLAINPIIKNLNSNFNVWYLDDGTLGGDVNTVFSDLFLIKSKFEAIGLELNFSKCELFINNCALNLNDVKQKFNILAPNIKIVNSNSLYLLGSPIFDESISEYIKNSINKFQNSADRLLEISPHYALCILKFCLFVPKFTYVLRCCSFWNYPDLLKHVDNLIKNSLESILNMQLNEQSWTQASLPIRYGGLGIRKISSVALPAFLSSVHSSANLIGKILRATPSNFEIAALEEARNAFLIACPGQNFSISPNSQRSWDDINCKLTYDNLLSSSTGSARARLLAVGAHEAGYWLHAYPSSNTGTFLEPDTLRIATCLRLGVPVCAPHKCPCGSDVDKLGHHGLSCQKSAGRFSRHAALNDIIRRSLASVNVPSLLEPTGIARDDGKRPDGMSLIPWKMGRVLVWDATCSDTLAPSHLHGTNSRAGAACEAAEKAKACKYRGLGSEYDFVPFGVETLGPWGPSALRLFKEISKRLVDITGDRRVGSYLGQRISLAIQRGNAASIFGTLPKGTPFNNVF

SEQ ID NO: 17569 - protein, 959 aa, Tinea trinotella
MQSVTQSCDGTSNATHTCSQCSKSFKSLKGLNIHTTKIHRKCSSQNSSPIDIHPIIPSAPTYVANNSTPFHKYLSNLKNSIPVVKRIPRGARITVATHLSKLIQKCYISNCTQDWQNLFLFSYNTLHIIKTNEPNLSLTQKIKNNCAVSSLPSPAPLAITRSIKHDAPRNRNKLIENKISDGDLKGAARLLFSNDVLSPDTPDTLQALRTKHPPAPLNPYFLDPPTAGQACLQIQNKDVTDAILSFKPGSAAGLDGISPQHLKDLTSHSVGDAGEQLVNSITKLINFMYSGNVNPEIVPILFGANLIALTKKDGGVRPIAVGSTLRRLASKIAVRHILPKLNSEFEPVQLGFGVKGGCEAAVHALRSFLTYGQPDVLLKIDVKNAFNSVNRDTLLTEIKQHIPEIYNYLLLSYADPTKLLYRSNELSSEVGCQQGDPLGPAIFSLAINPIIKNLNSNFNVWYLDDGTLGGDVNTVFSDLFLIKSKFEAIGLELNFSKCELFINNCALNLNDVKQKFNILAPNIKIVNSNSLYLLGSPIFDESISEYIKNSITKFQNSADRLLEISPHYALCILKFCLFVPKFTYVLRCCSFWNYPDLLKHVDNLIKNSLESILNMQLNEQSWTQASLPIRYGGLGIRKISSVALPAFLSSVHSSANLIGKILRATPSNFEIAALEEARNAFLIACPGQNFSISPNSQRSWDDINCKLTYDNLLSSSTGSARARLLAVGTHEAGYWLHAYPSSNTGTFLEPDTLRIATCLRLGVPVCAPHKCPCGSDVDKLGHHGLSCQKSAGRFSRHAALNDIIRRSLASVNVPSLLEPTGIARDDGKRPDGMSLIPWKMGRVLVWDATCSDTLAPSHLHGTNSRAGAACEAAEKAKACKYRGLGSEYDFVPFGVETLGPWGRSALRLFKEISKRLVDITGDRRVGSYLGQRISLAIQRGNAASIFGTLPKGTPFNNVF

SEQ ID NO: 17570 - protein, 954 aa, Clostera curtula
MQSGTQSCDGTSNAIHTCTQCNKSFKSLKGLNIHTTKTHRKCNSQISTPLDIHPIIPSAPAYVANDPTPFHTYLSHLKNSIPIVKRIPRGARITVATHLAQLIQKCYLNNCAQDWMNLFLFSYSTLHIIKTDEPNLSLTQKIKNNCAVSSSPSPAPIFKHDAPHNRKKLIENKICDGDLKGAARLLFSNDVLSPDTPDTLQALRTKHPPAPATPYFLDPPTAGQACLQIQNKDVTDAILSFKPGSAAGLDGISPQHLKDLTSHSVGDAGEQLVNSITKLINFMYSGNVNPEIVPILFGANLIALTKKDGGVRPIAVGSTLRRLASKIAIRHILPKLNSEFEPVQLGFGVKGGCEAAVHALRSFLTYGQPDVLLKIDVKNAFNSVNRDTLLTEIKQHIPEIYNYLLLSYAEPTKLLYRSNELSSEVGCQQGDPLGPAIFSLAINPIIKKLNSKFNVWYLDDGTLGGDVDTVLSDLFIIKNKFEAIGLELNFSKCELFINNCDLNLNDVKLKFNILAPNIKIVTSNSLYLLGAPIFDVSFAEYINNSITKFQNSADRLLEISPHYALCILKFCLFVPKFTYVLRCCSFWNRPDLLTQVDDLIKISLESVLNMQLNEHSWTQASLPIRYGGLGIRKISSVALPAFLSSVHSSASLISTILRASPSNFEIAGLEEARNAFLIACPGQNFPSSPNSQRSWDDINCKLSYDNLLSCSTGSARARLLAVGAHEAGYWLHAYPSSKTGTFLEPDTLRIATCLRLGVPVCAPHKCPCGSDVDKLGHHGLSCQKSAGRFSRHAALNDIIRRSLTSVNVPSLLEPTGIARDDGKRPDGMSLIPWKMGRVLVWDATCSDTLAPSHLHGTNNRAGAACEAAEKAKAHKYRGLGSEYEFVPFGVETLGPWGPSAISLFKEIAKRLVDITGDRRAGSYLGQRISLAIQKGNAASIFGTLPKGTPLNNIF

SEQ ID NO: 17571 - protein, 954 aa, Glaucopsyche alexis
MQSVTQSCDGTSNATHKCTQCNNSFKSLKGLNIHTTKIHRKCISQNSSPLDIHPIIPSAPTYVTNDTTPFHTYLSQLKNSIPLVKRIPRGARITVATHLSQLIQKCYISNCTQDWQNLFLFSYSTLHIIKTDEPNLSLTQKIKNNCALSSSPSPAPLIKHDNPRNRNKLIENKICEGDLKGAARLLFSNDVLSPDTPDTLQALRTKHPPAPVDTCFLDPPTAGQACLQIQNKDIMDAILSFKPGSAAGLDGISPQHLKDLTSHSVGNAGEQLVNSFTKLINFMYSGNVNPEIVPILFGANLIALTKKDGGVRPIAVGSTLRRLASKIAVRHILPKLNSEFEPVQLGFGVKGGCEAAVHALRSFLTYGQPDVLLKIDVKNAFNSVNRDTLLTEIKQHIPEIYNYLLLSYANPTKLLYRSNELSSEVGCQQGDPLGPAIFSLAINSIIKNLNSKFNVWYLDDGTLGGDVDTVFSDLFQIKNKFEAIGLELNFSKCELFINNCDLNLNDVKQKFNILAPNIKIVNSNSLYLLGSPIFDESISEYINNSITKFQNSADCLLEISPHYALCILKFCIFVPKFTYVLRCCSFWNHPDLLTQVDDLIKISLESILNMQLNEQSWTQASLPIRYGGLGIRKISSVALPAFLSSVHSSANLISKILRASPSNFEIAGLEEARNAFLIACPGQNFPVSPNSQRNWDDINCKSTYDNLLSRSTGSARARLLAVGTHEAGYWLHAYPSSNTGTFLEPDTLRIATCLRLGVPVCAPHKCPCGSDVDKLGHHGLSCQKSAGRFSRHAALNDIIRRSLATVNVPSLLEPTGIARDDGKRPDGMSLIPWKMGRVLVWDATCSDTLAPSHLHGTYNRAGAACEAAEKAKTCKYRGLGSEYDFVPFGVETLGPWGPSAIRLFIEIGKRLVDITGDRRAGSYLGQRISLAIQRGNAASIFGTLPKGTLFNNIF

SEQ ID NO: 17572 - protein, 954 aa, Lycaena phlaeas
MQSVTQSCDGTSNTTHTCIQCNQSFKSLKGLNIHTTKIHRKCNSQISSPSDINPIFPSTPTDVDNASTSFHTYLSQLKNSKPIVKRIPRGARITVATHLSHLIQKCYISNGIQDWQNLFLFSYSTLHVIKTDEPNLSLTQKIKNNCVVSSLPSPAPLIKHDAHFNRKKLIENKISDGDLKGAARLLFSNDVLSPDTPDTLQALRTKHPPTPVSPYFLDPPTAGQACLQIQSKDVSNAILSFKTGSAAGLDGISPQHLKDLTSHSVGDAGEQLLNSITKLINFMYSGNVNPEIVPILFGANLIALTKKDGGVRPIAVGSTLRRLASKIAVRHILPKLNSEFEPVQLGFGVKGGCEAAVHALRSFLTYGQPDVLLKIDVKNAFNSVNRDTLLTEIKKNIPEIYNYLLLSYADPTKLLYRSNELSSEVGCQQGDPLGPAIFSLAINPIIKNLNSKFNVWYLDDGTLGGDVDTVLSDLFSIKNKFEAIGLELNFSKCELFINNLDLNLNDVKQKFNILAPNIKIVKSDSLYLLGSPIFDESISEYINNSITKFKNSADRLLEISPHYAICILKFCLFVPKFTYLLRCCSFWNHPELLTQVDDLIKITLESILNMQLNEQSWSQASLPIRYGGLGIRKISSVALPAFLSSVHSSVNLISTILRASPSNFVIAGLEEARNAFLIACPGQNFPVSPNSQRSWDDINCKMIYDNLLSCSTGSARARLLASGTHEAGYWLHAYPSSNTGTFLEPDTLRIATCLRLGVSVCVPHKCPCGSDVDKLGHHGLSCQKSAGRFSRHAALNDIIRRSLATVNVPSLLEPPGIARDDGKRPDGMSLIPWKMGRVLVWDATCSDTLAPSHLHGTSNRAGAACEAAEKTKACKYRVLGAEYDFVPFGVETLGPWGPNALRLFKEIAKRLVDITGDRRAGSYLGQRISLAIQRGNAASIFGTLPKGTPFNNIF

SEQ ID NO: 17573 - protein, 952 aa, Drepana arcuata
MQTVTQSCDGTSNATHTCTQCNKSFKSLKGLNIHTTKTHKKSQNSSPLDIHPIIPSAPTYVANDPTPFHTYLSLLKNSIPIVKRIPRGARITVAIHLAQLIQKCFISNYTQDWQNLFLFSYSTLHIRKTDEPNLSLTQKIKNNCAVSSSPSPAPLIKHVAPHNHNKLIENKICDGDLKGAARLLFSNDVLSPDTPDTLQALRTKHPPAPVNPYFLDPPTAGQACLQIQNKDVTDAILSFKPGSAAGLDGISPQHLKDLTSHSVGDAGEQLVNSITKLINFMYSGNVNPEIVPILFGANLIALTKKDGGVRPIAVGSTIRRLASKIAVRHILPKLNSEFEPVQLGFGVKGGCEAAVHALRSFLTYGQPDVLLKIDVKNAFNSVNRDTLLTEIKQHIPEIYNYLLLSYADPTKLLYRSNELSSEVGCQQGDPLGPAIFSLAINPIIKNLNSKFNVWYLDDGTLGGDVDTVFSDLFLIKNKFEAIGLELNFSKCELFINNCDLNLNVVKQKFNILAPNIKIVNSNSLYLLGSPIFDESISEYINNSITKFQNSANRLLEISPHYALCILKFCLFVPKFTYVLRCCSFWNHPDLLTQVDDLIKISLESILNMQLNEQSWSQASLPIRYGGLGIRKISSVALPAFLSSVHSSETLISKILKASPSNFEISGLEEARNAFLIACPGQNFPVSPNSQRSWDDLNCKFMYDNLLSCSTGSARARLLAVGAHEAGYWLYAYPSSNTGTFLEPDTLRIATCLRLGVPVCAPHKCPCGSDVDKLGHHGLSCQKSAGRFSRHAALNDIIRRSLATVNVPSLLEPTGIARDDGKRPDSMSLIPWKMGRVLVWDATCSDTLAPSHLHGTNNRAGAACEAAEKAKVCKYRGLGSEYDFVPFGVETLGPWGPSATKLFKDIAKRLVDITGDRRAGSYLGQRISLAIQRGNAASIFGTLPKGTPFKNIF

SEQ ID NO: 17574 - protein, 952 aa, Cydia splendana
MHAATQSGDGTPYPNFNCVQCDNSFKTQRGLNIHISKKHRLCISQNDAGLNLGPSLLTTPLSDHPNSIPFHLHLSELKNNVPVIKRVPRGARITVAKHLSGLLTKCVENNQIDDWHNLFLFSFKTLHAKKDKTISLTQKIKNNCVSNTTPHISRPSGCSSSTFNRTKLIESKISDGDLKGAARLLFTNDVLSPDTPDTLSALQSKHPPAPSVPHSFAPPTADQACLQIEGKDVIDAIFSFKAGSAAGLDGISPQHLKDLISHSVGDAGEQLVCSLTKLINFMFSGKINTNIVPILYGANLIALTKKDGGVRPIAVGSTLRRLASKIAVRHIRSKLQSLFEPIQLGFGTKGGCEAAVHALRTYLSLDDCEIVVKIDVKNAFNSVSRDTLLTEVKDKIPELYNYLFFCYSDSSKLMYKSHELSSEVGCQQGDPLGPAIFSLAINPIIKNLKSKFNVWYLDDGTLGGDVNTVLSDLSFIKSSFENIGLELNFSKCELFIQKSSCTLTNLQPKFDDLTPNIKSVDKYSLCLLGSPIFEESFPDYISNSITKFKSHMDRLLEISPHYALVILKFCLFVPKFTYVLRCCPFWKHQNLLSPIDDLIKISLETILNIQLSEPSWSQASLPIRFGGLGIRKISSVASPAFLASTHSTSGLIGNILRALPTNCEIAGFEDAKNAFKIACPGKQFPDNPNSQRSWDNVYCDLTYNTLLNNCTGPDRARLLAVGAREAGYWLHAHPSPNTGTFLDPASLRLATGLRLGVSVCTPHICSCGTDVDRLGHHGLSCQKSAGRFSRHASLNDIVRRSLATINVPALLEPTGIIRDDGKRPDGVSLVPWSLGRMLVWDATCVDTLAPSHLQRTTVKAGGAAESAEILKRNKYKSLGREYHFVPFGVETLGPWGPSAHKLFAEIAKRLVDVTGDRRAGGYLAQRISIAIQRGNAASILGTMPQGPILDLS

SEQ ID NO: 17575 - protein, 952 aa, Cydia splendana
MHAATQSGDGTPYPNFNCVQCDNSFKTQRGLNIHISKKHRLCISQNDAGLNLGPSLLTTPLSDHPNSIPFHLHLSELKNNVPVIKRVPRGARITVAKHLSGLLTKCVENNQIDDWHNLFLFSFKTLHAKKDKTISLTQKIKNNCVSNTTPHISRPSGCSSSTFNRTKLIESKISDGDLKGAARLLFTNDVLSPDTPDTLSALRSKHPPAPSVPHSFAPPTADQACLQIEGKDVIDAILSFKAGSAAGLDGISPQHLKDLISHSVGDAGEQLVCSLTKLINFMFSGKINTNIVPILYGANLIALTKKDGGVRPIAVGSTLRRLASKIAVRHIRSKLQSLFEPIQLGFGTKGGCEAAVHALRTYLSLDDCEIVVKIDVKNAFNSVSRDTLLTEVKDKIPELYNYLFFCYSDSSKLMYKSHELSSEVGCQQGDPLGPAIFSLAINPIIKNLKSKFNVWYLDDGTLGGDVNTVLSDLSFIKSSFENIGLELNFSKCELFIQKSSCTLTNLQPKFDDLTPNIKSVDKYSLCLLGSPIFEESFPDYISNSITKFKSHTDRLLEISPHYALVILKFCLFVPKFTYVLRCCPFWKHQNLLSPIDDLIKISLETILNIQLSEPSWSQASLPIRFGGLGIRKISSVASPAFLASTHSTSGLIGNILRALPTNCEIAGFEDAKNAFKIACPGKQFPDNPNSQRSWDNVYCDLTYNTLLNNCTGPDRARLLAVGAREAGYWLHAHPSPNTGTFLDPASLRLATGLRLGVSVCTPHICSCGTDVDRLGHHGLSCQKSAGRFSRHASLNDIVRRSLATINVPALLEPTGIIRDDGKRPDGVSLVPWSLGRMLVWDATCVDTLAPSHLQRTTVKAGGAAESAEILKRNKYKSLGREYHFVPFGVETLGPWGPSAHKLFAEIAKRLVDVTGDRRAGGYLAQRISIAIQRGNAASILGTMPQGPILDLS

SEQ ID NO: 17576 - protein, 672 aa, Tinea trinotella
MYSGNVNPEIVPILFGANLIALTKKDGGVRPIAVGSTLRRLASKIAVRHILPKLNSEFEPVQLGFGVKGGCEAAVHALRSFLTYGQPDVLLKIDVKNAFNSVNRDTLLTEIKQHIPEIYNYLLLSYADPTKLLYRSNELSSEVGCQQGDPLGPAIFSLAINPIIKNLNSNFNVWYLDDGTLGGDVNTVFSDLFLIKSKFEAIGLELNFSKCELFINNCALNLNDVKQKFNILAPNIKIVNSNSLYLLGSPIFDESISEYIKNSITKFQNSADRLLEISPHYALCILKFCLFVPKFTYVLRCCSFWNYPDLLKHVDNLIKNSLESILNMQLNEQSWTQASLPIRYGGLGIRKISSVALPAFLSSVHSSANLIGKILRATPSNFEIAALEEARNAFLIACPGQNFSISPNSQRSWDDINCKLTYDNLLSSSTGSARARLLAVGTHEAGYWLHAYPSSNTGTFLEPDTLRIATCLRLGVPVCAPHKCPCGSDVDKLGHHGLSCQKSAGRFSRHAALNDIIRRSLASVNVPSLLEPTGIARDDGKRPDGMSLIPWKMGRVLVWDATCSDTLAPSHLHGTNSRAGAACEAAEKAKACKYRGLGSEYDFVPFGVETLGPWGPSALRLFKEISKRLVDITGDRRVGSYLGQRISLAIQRGNAASIFGTLPKGTPFNNVF

SEQ ID NO: 17577 - protein, 953 aa, Notocelia uddmanniana
MHAATQSDDGTSNLNFICVQCDNSFKTQRGLNIHISKKHRLCLSQNGPALNLDPAFIPAPLSDKPNSIPFHLYLSDLKNNVPVVKRVPRGARISVANHLSGLITKCVENNQIDDWHNLLLFSFNTLHAKNDEAISLTQKIKNNCVSNTTPHFCRPPKRCASSTFNKTKLIECKISDGDLKGAARLLFTNDVLSPDTPDTLLALRSKNPPAPVIPYVIDPPTADQACLQIEGKDVVDAIISFKTGSAAGLDGISPQHLKDLISQSVGDAGEQLICSLTKLINFMFSGKINNEVVPLLYGANLIALTKKDGGVRPIAVRSTLRRLASKIAVRHIRSKLQSLFEPVQLGFGTKGGCEAAVHALRTYLSYDDCEIVVKIDVKNAFNSVNRDTLLAEVKDKIPEIYNYLLLCYADPSKLMYKSHELSSEVGCQQGDPLGPAIFSLAINPIIQKLKSKFNVWYLDDGTLGGDVDTVLSDLAFIKTNFENIGLELNFSKCELFIQKTSCSLVDLIQKFVHLAPGIRIVDKFSLCLLGSPIFEESFPGYISDTISKFQSHANRLLEISPHYALIILKFCLFVPKFTYVLRCCPFWKHQNLLSRMDDLIKTSLEMILNIQLTEPSWSQASLPIRYGGLGIRKVSSVASPAFLASTHSTSGLIGNILRALPTYCEIAGLQGAKNAFKVACPGKKFPDNPKSQRSWDNIYCDLNYNILLNSSAGPDRARLLAVGTQEAGYWLHAHPSPNTGTFLDPTSLRLATGLRLGVAVCTPHICSCGTDVDRLGHHGLCCQKSAGRFSRHATLNDIIRRSLATVNVPALLEPTGMVRDDGKRPDGVSLVPWSVGRMLVWDATCVDTLAPSHLQRTTVKAGAAAENAEILKRNKYKGLGREYMFVPFGVETLGPWGPSAHKLFAEIAKRLVDVTGDRRAGGFLAQRISIAIQRGNAASILGTMPQGPALDLS

SEQ ID NO: 17578 - protein, 953 aa, Pammene fasciana
MHAATQSGDGTSNLNFICVRCDSSFKTQRGLNIHISKKHRLCISQNDAALNLDPSLSTTPLSDQPNSITFHLYLSELKNNVPVIKRVPRGARITVANHLSSLIIKCVENNQTNDWHNLFLFSFNTLHAKNDEAISLTQKIKNNCVSNTNPHISRLSKGCASSTYNRTKLIESKISDGDLKGAARLLFTNDVLSPDTPDTLSALISKHPPAPSVPHSFAPPSADQACLQIEGKDVIDAIISFKTGSAAGLDGISPQHLKDLISHSVGDAGEQLVGSLTKLINFMFSGKINPDIAPILYGANLIALTKKDGGVRPIAVGSTLRRLASKIAVRHFRSKLQSLFEPIQLGFGTKGGCEAAVHALRTYLSLDDCEIVVKIDVKNAFNSVSRDTLLTEVKENIPELYNYLFSCYSDSSKLMYKSHELSSEVGCQQGDPLGPAIFSLAINPIIKNLKSKFNVWYLDDGTLGGDVNTVLSDLSFIKSSFENIGLDLNFSKCELFIQKSSCTLADLKPKFDDLAPNIKSVDKNSLCLLVSPIFEESFPGYISNTISKFKSHTNRLIEISPHYALVILKFCLFVPKFTYVLRCCPFWKHQNLLSPIDDLIKISLETILNIQLSEPSWSQASLPIRFGGLGIRKISSVACPAFLASTHSTSGLIGNILRALPTNYEIAGFEDAKNAFKIACPGKTFPDNPKSQRSWDNVYCDLSYNTLLNNCTGPDRARLLAVGAREAGHWLHAHPSPNTGTFLDPTSLRLATGLRLGVSVCTPHICSCGTDVDRLGHHGLSCQKSAGRFSRHASLNDIIRRSLATINVPALLEPTGIIRDDGKRPDGVSLVPWSLGRMLVWDATCVDTLAPSHLQRTNVKAGAAAESAEISKRNKYKSLGREYHFVPFGVETLGPWGPSAHKFFAEIAKRLVDVTGDRRAGGFLAQRISIAIQRGNAASILGTMPQGPSLDLS

SEQ ID NO: 17579 - protein, 952 aa, Cydia splendana
MHAATQSGDGTPYPNFNCVQCDNSFKTQRGLNIHISKKHRLCISQNDAGLNLGPSLLTTPLSDHPNSIPFHLHLSELKNNVPVIKRVPRGARITVAKHLSGLLTKCVENNQIDDWHNLFLFSFKTLHAKKDKTISLTQKIKNNCVSNTTPHISRPSGCSSSTFNRTKLIESKISDGDLKGAARLLFTNDVLSPDTPDTLSALRSKHPPAPSVPHSFAPPTADLACLQIEGKDVIDAIFSFKAGSAAGLDGISPQHLKDLISHSVGDAGEQLVCSLTKLINFMFSGKINTNIVPILYGANLIALTKKDGGVRPIAVGSTLRRLASKIAVRHIRSKLQSLFEPIQLGFGTKGGCEAAVHALRTYLSLDDCEIVVKIDVKNAFNSVSRDTLLTEVKDKIPELYNYLFFCYSDSSKLMYKSHELSSEVGCQQGDPLGPAIFSLAINPIIKNLKSKFNVWYLDDGTLGGDVSTVLSDLSFIKSSFENIGLELNFSKCELFIQKSSCTLTNLQPKFDDLTPNIKSVDKYSLCLLGSPIFEESFPDYISNSITKFKSHTDRLLEISPHYALVILKFCLFVPKFTYVLRCCPFWKHQNLLSPIDDLIKISLETILNIQLSEPSWSQASLPIRFGGLGIRKISSVASPAFLASTHSTSGLIGNILRALPTNCEIAGFEDAKNAFKIACPGKQFPDNPNSQRSWDNVYCDLTYNTLLNNCTGPDRARLLAVGAREAGYWLHAHPSPNTGTFLDPASLRLATGLRLGVSVCTPHICSCGTDVDRLGHHGLSCQKSAGRFSRHASLNDIVRRSLATINVPALLEPTGIIRDDGKRPDGVSLVPWSLGRMLVWDATCVDTLAPSHLQRTTVKAGGAAESAEILKRNKYKSLGREYHFVPFGVETLGPWGPSAHKLFAEIAKRLVDVTGDRRAGGYLAQRISIAIQRGNAASILGTMPQGPILDLS

SEQ ID NO: 17580 - protein, 952 aa, Cydia splendana
MHAATQSGDGTPYPNFNCVQCDNSFKTQRGLNIHISKKHRLCISQNDAGLNLGPSLLTTPLSDHPNSIPFHLHLSELKNNVPVIKRVPRGARITVAKHLSGLLTKCVENNQIDDWHNLFLFSFKTLHAKKDKTISLTQKIKNNCVSNTTPHISRPSGCSSSTFNRTKLIESKISDGDLKGAARLLFTNDVLSPDTPDTLSALRSKHPPAPSVPHSFAPPTADQACLQIEGKDVIDAIFSFKTGSAAGLDGISPQHLKDLISHSVGDAGEQLVCSLTKLINFMFSGKINTNIVPILYGANLIALTKKDGGVRPIAVGSTLRRLASKIAVRHIRSKLQSLFEPIQLGFGTKGGCEAAVHALRTYLSLDDCEIVVKIDVKNAFNSVSRDTLLTEVKDKIPELYNYLFFCYSDSSKLMYKSHELSSEVGCQQGDPLGPAIFSLAINPIIKNLKSKFNVWYLDDGTLGGDVNTVLSDLSFIKSSFENIGLELNFSKCELFIQKSSCTLTNLQPKFDDLTPNIKSVDKYSLCLLGSPIFEESFPDYISNSITKFKSHTDRLLEISPHYALVILKFCLFVPKFTYVLRCCPFWKHQNLLSPIDDLIKISLETILNIQLSEPSWSQASLPIRFGGLGIRKISSVASPAFLASTHSTSGLIGNILRALPTNCEIAGFEDAKNAFKIACPGKQFPDNPNSQRSWDNVYCDLTYNTLLNNCTGPDRARLLAVGAREAGYWLHAHPSPNTGTFLDPASLRLATGLRLGVSVCTPHICSCGTDVDRLGHHGLSCQKSAGRFSRHASLNDIVRRSLATINVPALLEPTGIIRDDGKRPDGVSLVPWSLGRMLVWDATCVDTLAPSHLQRTTVKAGGAAESAEILKRNKYKSLGREYHFVPFGVETLGPWGPSAHKLFAEIAKRLVDVTGDRRAGGYLAQRISIAIQRGNAASILGTMPQGPILDLS

SEQ ID NO: 17581 - protein, 959 aa, Tinea trinotella
MQSVTQSCDGTSNATHTCSQCSKSFKSLKGLNIHTTKIHRKCSSQNSSPIDIHPIIPSAPTYVANNSTPFHKYLSNLKNSIPVVKRIPRGARITVATHLSKLIQKCYISNCTQDWQNLFLFSYNTLHIIKTNEPNLSLTQKIKNNCAVSSLPSPAPLAITRSIKHDAPRNRNKLIENKISDGDLKGAARLLFSNDVLSPDTPDTLQALRTKHPPAPLNPYFLDPPTAGQACLQIQNKDVTDAILSFKPGSAAGLDGISPQHLKDLTSHSVGDAGEQLVNSITKLINFMYSGNVNPEIVPILFGANLIALTKKDGGVRPIAVGSTLRRLASKIAVRHILPKLNSEFEPVQLGFGVKGGCEAAVHALRSFLTYGQPDVLLKIDVKNAFNSVNRDTLLTEIKQHIPEIYNYLLLSYADPTKLLYRSNELSSEVGCQQGDPLGPAIFSLAINPIIKNLNSNFNVWYLDDGTLGGDVNTVFSDLFLIKSKFEAIGLELNFSKCELFINNCALNLNDVKQKFNILAPNIKIVNSNSLYLLGSPIFDESISEYIKNSITKFQNSADRLLEISPHYALCILKFCLFVPKFTYVLRCCSFWNYPDLLKHVDNLIKNSLESILNMQLNEQSWTQASLPIRYGGLGIRKISSVALPAFLSSVHSSANLIGKILRATRSNFEIAALEEARNAFLIACPGQNFSISPNSQRSWDDINCKLTYDNLLSSSTGSARSRLLAVGTHEAGYWLHAYPSSNTGTFLEPDTLRIATCLRLGVPVCAPHKCPCGSDVDKLGHHGLSCQKSAGRFSRHAALNDIIRRSLASVNVPSLLEPTGIARDDGKRPDGMSLIPWKMGRVLVWDATCSDTLAPSHLHGTNSRAGAACEAAEKAKACKYRGLGSEYDFVPFGVETLGPWGPSALRLFKEISKRLVDITGDRRVGSYLGQRISLAIQRGNAASIFGTLPKGTPFNNVF

SEQ ID NO: 17582 - protein, 959 aa, Tinea trinotella
MQTVTQSCDGTSNATHTCSQCRKSFKSLKGLNIHTTKIHRKCISQNSSPLDIHPIIPSAPTYVANNSTPFHKYLCNLKNSLPVVKRIPRGARITVATHLSKLIQKCYISNCTQDWQNLFLFSYNTLHIIKTNEPNLSLTQKIKNNCAVSSLPSPAPLAITRSIKHDAPRNRNKLIENKISDGDLKGAARLLFSNDVLSPDTPDTLQVLRTKHPPAPVNPYFLDPPTAGQACLQIQNKDVTDAILSFKPGSAADLDGISPQHLKDLTSHSVGDAGEQLVNSITKLINFMYFGKVNPEIVPILFGANLIALTKKDGGVRPIAVGSTLRRLASKIAVRHILPKLNSEFEPVQLGFGVKGGCEAAVHALRSFLTYGQPDVLLKIDVKNAFNSVNRDTLLTEIKQHIPEIYNYLLLSYADPTKLLYRSNELSSEVGCQQGDPLGPAIFSLAINPIIKNLNSNFNVWYLDDGTLGGDVNTVFSDLFLIKSKFEAIGLELNFSKCELFINNCALNLNDVKQKFNILAPNIKIVNSNSLYLLGSPIFDESISEYINNSITKFQNSADRLLEISPHYALCILKFCLFVPKFTYVLRCCSFWNYPDLLKHVDDLIKNSLESILNMQLNEQSWTQASLPIRYGGLGIRKISSVALPAFLSSVHSSANLIGKILRATPSNFEIAALEEARNAFLIACPGQNFSISPNSQRSWDDINCKLTYDNLLSSSTGSARARLLAVGTHEAGYWLHAYPSSNTGTFLEPDTLRIATCLRLGVPVCAPHKCPCGSHVDKLGHHGLSCQKSAGRFSRHAALNDIIRRSLASVNVPSLLEPNGIARDDGKRPDGMSLIPWKMGRVLVWDATCSDTLAPSHLHGTNSRAGAACEAAEKAKACKYRGLGSEYDFVPFGVETLGPWGPSALRLFKEISKRLVDITGDRRVGSYLGQRISLAIQRGNAASIFGTLPKGTPFNNVF

SEQ ID NO: 17583 - protein, 922 aa, Anthocharis cardamines
MQSVTQSCVSTSNATYTCIQCNKSFKSLKGLNIHTTKTHRKCFSQNSSPLDIHPIIPSAPTYVANDPTPFHTYLSHLKNSTPIVKRIPRGARITVATHLSQLIQKCYISNCTQDWQNLFLFSYSTLHIIKTDEPNLSLTQKIKNNCAVSSSPSPAPLIKHDAPHNRNKLIENKICDGDLKGAARLLFSNDVLSPDTPDTLQALRTKHPPAPVNPYFLDPPTAGQACLQIQKKDVTNAILSFKPGSAAGLDGISPQHLKDLTSHSVGDAGEQLVNSITKLINFMFSGNVNPEIVPILFGANLIALTKKDGGVRPIAVGSTLRRLASKIAVRHILPKLNSEFEPVQLGFGVKGGCEAAVHALRSFLTYGQPDVLLKIDVKNAFNSVNRDTLLTEIKQHIPEIYNYLLLSYADPTKLLYRSNELSSEVGCQQGDPLGPAIFSLAINPIIKNLNSKFNVWYLDDGTLGGDVDTVFSDLLLIKDKFESIGLELNFSKCELFINNCDLNLTDVKQKFNILAPNIKIVNSNSLYLLGSPIFDESFSEYIDISITKFKNSADRLLEISPHYALCILKFCLFVPKFTYVLRCCSFWNHPDLLSQVDDLFKISLESILNMQLNEQSWTQASLPIRYGGLGIRKISSVALPAFLSSVHSSANLISKILRESPSNFEIAGLEEARNAFLIACPGQNFPVSPNSQRSWDDINCKLSYENLLSCSTGSARARLLAVGAHEAGYWLHAYPSSNTGTFLEPDTLRIAACLRLGVPVCIPHKCPCGSDVDKLGHHGLSCLKSAGRFSRHAALNDIIRRSLATVNVPSLLEPTGIARDDGKRPDGMSLIPWKMGRVLVWDATCSDTLAPSHLHGTNNRVGAACEAAEKAKTCKYRGLGSEYDFVPFGVETLGPWGPSAIKLLAYSNLKILFIFEANILTG

SEQ ID NO: 17584 - protein, 954 aa, Pieris napi
MQAVTLSCDGTSIASHTCTFCNKSFKSLKGLKIHISKIHRNCISQTSSPSEIHPIIPSAPTFAANAPTPFHTLLSHLKNSIPIIKRIPRGARITVATHLSKLIQKCYISNCTQDWQNLFLFSYSTLHIIKTDEPNLSLTQKIKNNCAVSSSPSPAPQIKHDAPFNRKKLIENKICDGDLKGAARLLFSNDVLSPDTPDTLEALRTKHPPAPVNPYFLDPPTAGQACLQIRNKDVTDAILSFKPGSAAGLDGISPQHLKDLTSHSVGDAGEQLINSITKLINFMFSGDVNTEIVPILFGANLIALTKKDGGVRPIAVGSTLRRLASKIAVRHILPKLNSEFEPVQLGFGVKGGCEAAVHALRSFLSHGQPDVLLKIDVKNAFNSVNRDTLLTEIKQHIPEIYNYLLLSYADPSKLLYRSNELSSEVGCQQGDPLGPAIFSLAINPIIKNLNSNFNVWYLDDGTLGGDVDTVFSDLLLIKNKFEAIGLELNFNKCELFINNCDLNLNDVKKKFQILAPNIKIVNRNSLYLLGSPIFNESISDYIHTSITKFQNSADRLLEISPHYALCILKFCLFLPKFTYVLRCCSFWNHPDILTPLDDLIKISLESLLNMQLNEQSWTQASLPIRYGGLGIRKISSVALPAFLSSVHSSANLISKILRASPSNFEIAGLEEARNAFLIACPGQNFPLSLNSQRSWDDIHCKLTFDDLLSRSTGSARARLLAVGTHEAGYWLHAYPSSNTGTFLEPDTLRIATCLRLGVPVCAPHICSCGSDVDKLGHHGLSCQKSAGRFSRHAALNDIIRRSLATVNVPSLLEPSGIARDDGKRPDGMSLIPWKMGRVLVWDATCSDTLAPSHLHGTNYRAGAACEAAEKNKACKYRGLGSEYDFVPFGVETLGPWGPSALRLFKEISKRLVDITGDRRSGSYLGQRISLAIQRGNAASIFGTLPKGTPFNDIF

SEQ ID NO: 17585 - protein, 949 aa, Thymelicus sylvestris
MQSVTQSCDGTSNATHTCTQCNRSFKSLKGLNIHITKTHRKCISQNHPIIPSAPTYVANNPTPFHTYLSHLKNSIPIVKRIPRGARITVATHLSQLIQKCYLSNCTQDWQNLFLFSYSTLHIIKTDEPNLSLTQKIKNNCTVSSSPSPAPLIKHDAPRNRNKLIENKICDGDLKGAARLLFSNDVLSPDTPDTLQALRTKHPPAPVNPYFLDPPTAGQACLQIQNKDVTDAILSFKAGSAAGLDGISPQHLKDLTSHSVGDAGDQLVNSITKLINFMYSGNVNPEIVPILFGANLIALTKKDGGVRPIAVGSTLRRLASKIAVRHILPKLNSEFEPVQLGFGVKGGCEAAVHALRSFLTYGKPDVLLKIDVKNAFNSVNRDTLLTEIKQHIPEIYNYLLLSYADPTKLLYRSHELSSEVGCQQGDPLGPAIFSLAINPIIKNLNSKFNVWYLDDGTLGGDVDTVFSDLFFIKNKFEAIGLELNFSKCELFVNNCNLNLNDIKQKFNILAPNIKIVNSNSLYLLGSPIFDESISEYVNNSITKFQNSADRLLEISPHYALCTLKFCLFVPKFTYVLRCCSFWNHPDLLTQLDDLIKISLESILNMQLNEQSWTQASLPIRYGGLGIRKISSVALPAFLSSVHSSANLISKILRASPSNFEIAGLEEARNAFLIACPGQNFPFSPNSQRSWDDINSKLTYENLLSCSTGSARARLLAVGAHEAGYWLHAYPSSNTGTFLEPDTLRIATCLRLGVPVCAPHKCPCGSDVDKLGHHGLSCQKSAGRFSRHAALNDIIRRSLATVNVPSILEPTGIARDDGKRPDGMSLIPWKMGRVLVWDATCSDTLAPSHLHGTNIRAGAACEAAEKVKACKYRGLGSEYDFVPFGVETLGPWGPSALRLFKEITKRLVDITGDRRAGSYLGQRISLAIQRGNAASIFGTLPKGTPFNNNIF

SEQ ID NO: 17586 - protein, 952 aa, Pammene fasciana
MHAATQSGDGTSNLNFICVRCDSSFKTQRGLNIHISKKHRLCISQNDAALNLDPSLSTTPLSDQPNSITFHLYLSELKNNVPVIKRVPRGARITVANHLSSLIIKCVENNQTNDWHNLFRFSFNTLHAKNDEAISLTQKIKNNCVSNTNPHISRLSKGCMKGYNRTKLIESKISDGDLKGAARLLFSNDVLSPDTPDTLLALISKHPPAPSVPHSFAPPSADQACLQIEGKDVIDAIISFKTGSAAGLDGISPQHLKDLISHSVGDAGEQLVGSLTKLMNFMFSGKINPDIAPILYGANLIALTKKDGGVRPIAVGSTLRRLASKIAVRHFRSKLQSLFEPIQLGFGTKGGCEAAVHALRTYLSLDDCEIVVKIDVKNAFNSVSRDTLLTEVKEKIPELYNYLFSCYSDSSKLMYKSHELSSEVGCQQGDPLGPAIFSLAINPIIKNLKSKFNVWYLDDGTLGGDVNTVLSDLSFIKSSFENIGLDLNFSKCELFIHKSSCTLADLKPKFDDLAPNIKSVDKNSLCLLGSPIFEESFPGYISNTISKFKSHTNRLIEISPHYALVILKFCLFVPKFTYVLRCCPFWKHQNLLSPIDDLIKISLETILNIQLSEPSWSQASLPIRFGGLGIRKISSVACPAFLASTHSTSGLIGNILRALPTNYEIAGFEDAKNAFKIACPGKTFPDNPKSQRSWDNVYCDLSYNTLLNNCTGPDRARLLAVGAREAGHWLHAHPSPNTGTFLDPTSLRLATGLRLGVSVCTPHICSCGTDVDRLGHHGLSCQKSAGRFSRHASLNDIIRRSLATINVPALLEPTGIIRDDGKRPDGVSLVPWSLGRMLVWDATCVDTLAPSHLQRTNVKAGAAAESAEISKRNKYKSLGREYHFVPFGVETLGPWGPSAHKFFAEIAKRLVDVTGDRRAGGFLAQRISIAIQRGNAASILGTMPQGPSLDLS

SEQ ID NO: 17587 - protein, 954 aa, Mellicta athalia
MQSVTQSGDGTSNTIHTCTQCNKSFKSLKGLNIHTTKTHRKCFSQDISSVDTHPIIPNTPSHASNDQIPFHTYLSHLKNSIPIIKRIPRGARITVATHLSQLIQKCYISNCTQDWQNLFLFSYSTLHIIKTDEPNLSLTQKIKNKCAASSSPSPAPLIKHDDPLNRKKLIINKICDGDLKGAARLLFSNDVLSPDTPDTLQALLTKHPPAPVNPYFLDPPTAGQACLQIQNKDVTNAISSFKPGSASGLDGISPQHLKDLTSHSVGDAGTQLLNSITKLINFMYSGNVNPEIVPILFGANLIALTKKDGGVRPIAVGSTLRRLASKIAVRHILPKLNSEFEPVQLGFGVKGGCEAAVHALRSFLTYGQPDVLLKIDVKNAFNSINRDTLLTEIKQHIPELYNYLLLSYGDPTKLLYRSNELSSEVGCQQGDPLGPAIFSLAINPIIKNLNSKFNVWYLDDGTLAGDMDTVFSDLFLIKNKFEAIGLELNFSKCELFINNSVLNLNDIKQKFNILAPNIKIVNSNSLYLLGSPIFDDSIPEYINNSITKFQNSVDRLLEISSHYALCILKFCLFIPKFTYVLRCCSFWNHPDLLTKVDKLIKISLESILNMQLNEQSWTQASLPIRYGGLGIRKISSVALPAFLSSVHSSANLISKILRASPSNFEIAGLEEARNAFLIACPGQNFPVSTNSQRSWDDINCKFTFDDLLSCSTGSARARLLAVGTHEAGYWLHAYPSPNTGTFLEPDTLRIATCLRLGVPVCVPHKCPCGSDVDKLGHHGLSCQKSAGRFSRHAALNDIIRRSLATINVPSLLEPTGIARDDGKRPDGMSLIPWKMGRVLVWDATCSDTLAPSHLHGTNNRAGAACEAAEKAKAGKYRGLGPEYDFVPFGVETLGPWGPSALRLFKEIAKRLVDITGDRRAGSYLGQRISLAIQRGNAASIFGTLPKGTPFNNIF

SEQ ID NO: 17588 - protein, 955 aa, Mellicta athalia
MQSGTQSCDGTSNATYTCTQCNKSFKSLKGLNIHTSKIHRTFFSPNSSPVDFHPIIPNTPTHVDNDPTPFHTYLSHLKNSIPIVKRIPRGARITVATHLSQLIQKCYMSNCTQDWQNLFLFSYSTLHITIKTDEPKLSLTQKIKNNCAVSSSPSPAALIKHDAPRNRNKLIINKICDGDLKGAARLLFSNDVLSPDTPDTLQTLLKKHPPAPVNPYFLDPPTAEQACLQIQNKDVTNAISSFKPGSAAGLDGISPQHLKDLTSHSVGDAGKQLVNSITKLINFMYSGNVNPEFVPILFGANLIALTKKDGGVRPIAVGSTLRRLASKIAVRHILPKLNSEFEPVQLGFGVKGGCEAAVHALRSFLTYEKPDVLLKIDVKNAFNSVNRETLLTEIKQHIPELYNYLLLSYADPTKLLYRSNELSSEVGCQQGDPLGPAIFSLTINPIIKKLNSKFNVWYLDDGSLGGDVNTVFSDLFLIKNKFEAIGLELNFSKCELFINNRDLNLNDINENFNILAPNIKIVNSNSLYLLGSPIFDESIPGYINNSITKFQNSVDRLLEISSHYALCILKFCLFVPKFTYVLRCCSFWNHPDLLTQVDNLIKICLESILNMQLNEQSWTQASLPIRYGGLGIRKISSVALPAFLSSVHSSANLISKILRASPSNFEIAGLEEARNAFLIACPGQNFPVSTNSQRSWDDINCKFTFDRLLSCSTGSARARLLAVGTHEAGYWLHAYPSSNTGTFLEPDTLRIATCLRLGVPVCAPHKCPCGSDVDKLGHHGLSCQKSAGHFSRHAALNDIIRRSLATVNVPSILEPSGIARDDGKRPDGMSLIPWKMGRVLVWDATCSDTLAPSHLHGTNNRAGAACEAAEKAKQGKYRGLGPEYDFVPFGVETLGPWGPSAIKLFKEIAKRLVDITGDRSAGSYLGQRISLAIQRGNAASIFGTLPKGTSFNNIF

SEQ ID NO: 17589 - protein, 959 aa, Tinea trinotella
MQTVTQSCDGTSNATHTCSQCRKSFKSLKGLNIHTTKIHKKCISQNSSPLDIHPIIPSAPTYVANNSTPFHKYLSNLKNSIPVVKRIPRGARITVATHLSKLIQKCYISNCTQDWQNLFLFSYNTLHIIKTNEPNLSLTQKIKNNCAVSSLPSPAPLAITRSIKHDASRNRNKLIENKISDGDLKGAARLLFSNDVLSPDTPDTLQALRTKHPPAPVNPYFLDPPTAGQACLQIQNKDVTDAILSFKPGSAAGLDGISPQHLKDLTSHSVGDAGEQLVNSITKLINFMYFGNVNPEIVPILFGANLIALTKKDGGVRPIAVGSTLRRLASKIAVRHILPKLNSEFEPVQLGFGVKGGCEAAVHALRSFLTYGQPDVLLKIDVKNAFNSVNRDTLLTEIKQHIPEIYNYLLLSYADPTKLLYRSNELSSEVGCQQGDPLGPAIFSLAINPIIKNLNSNFNVWYLDDGTLGGDVNTVFSDLFLIKSKFEAIGLELNFSKCELFINNCALNLNDVKQKFNILAPNIKIVNSNSLYLLGSPIFDESISEYINNSITKFQNSADRLLEISPHYALCILKFCLFVPKFTYVLRCCSFWNYPDLLKHVDDLIKNSLESILNMQLNEQSWTQASLPIRYGGLGIRKISSVALPAFLSSVHSSANLIGKILRATPSNFEIAALEEARNAFLIACPGQNFSISPNSQRSWDDINCKLTYDNLLSSSTGSARARLLAVGAHEAGYWLHAYPSSNTGTFLEPDTLRIATCLRLGVPVCAPHKCPCGSDVDKLGHHGLSCQKSAGRFSRHAALNDIIRRSLASVNVPSLLEPNGIARDDGKRPDGMSLIPWKMGRVLVWDATCSDTLAPSHLHGTNSRAGAACEEAEKAKACKYRGLGSEYDFVPFGVETLGPWGPSALRLFKEISKRLVDITGDRRVGSYLGQRISLTIQRGNAASIFGTLPKGIPFNNVF

SEQ ID NO: 17590 - protein, 954 aa, Glaucopsyche alexis
MQSVTQSCDCTSNATHTCTQCNNSFKSLKGLNIHTTKIHRKCISQNSSPLDIHPIIPSAPTYVTNDTTPFHTYLSHLKNSIPLVKRIPRGARITVATYLSQLIQKCYISNCTQDWQNLFLFSYSTLHIIKTDEPNLSLTQKIKNNCALSSSPSTAPLIKHDAPRNSNKLIENKICEGDLKGAARLLFSNDVLSPDTPDTLQALRTKHPPAPVDTYFLDPPTAGQACLQIQNKDIMDAILSFKPGSAAGLDGISPQHLKDLTSHSVGDTGEQLVNSITKLINFMYSGNINLEIVPILFGANLIALTKKDGGVRPIAVGSTLRRLASKIAVRHILPKLNSEFEPVQLGFGVKGGCEAAVHALRSFLTYGQPDVLLKIDVKNAFNSVNRDTLLTEIKQHIPEIYSYLLLSYANPTKLLYRSNELSSEVGCQQGDPLGPAIFSLAINPIIKNLNSKFNVWYLDDGTLGGDVNTVLSDLFLIKNKFEAIGLELNFSKCELFINNCDLNLNDVKQKFNILAPNIKIVNSNSLYLLGSPIFDESISEYINDSITKFQNSAVRLLEISPHYALCILKFCLFVPKFTYVLRCCSFWNHPDLLTQVDDIIKISLESILNMQLNEQSWTQASLPIRYGGLGIRKISSVALPAFLASVHSSANLISKILRASPSNFEIAGLEEARNAFLIACPGQNLPVSPNSQRGWDDINCKLTYDNLLSISTDSARARLLAVGAHEAGYWLHAYPSSNTGTFLEPDTLRIATCLRLGVPVCVPHKCPCGSDVDKLGHHGLSCQKSAGRFSRHAALNDIIRRSLATVNAPSLLEPTGIARDDGKRPDGMSLIPWKMGRVLVWDATCSDTLAPSHLHGTNSRAGAACEAAEKAKTCKYRGLGSEYDFVPFGVETLGPWGPSAIRLFKEIGKRLVDVTGDRRAGSYLGQRISLAIQRGNAASIFGTLPKGTPFNNIF

SEQ ID NO: 17591 - protein, 904 aa, Pieris macdunnoughi
MQAVTLSCDGTSIASHTCTFCNKSFKSLKGLKIHISKTHRNCISQTSSLLEIHPIIPSAPTFAANAPTPFHTLLSHLKNSIPIVKRIPRGARITVATHLSKLIQKCYISNCTQDWQNLFLFSYSTLHIIKTDEPNLSLTQKIKNNCAVSSSPSPAPLIKHDAPFNRKKLIENKICDGDLKGAARLLFSNDVLSPDTPDTLEALRTKHPPAPVNPYFLDPPTAGQACLKIRNKDVTDAILSFKPGSAAGLDGISPQHLKDLTSHSVGDAGEQLINSIAKLINFMYSGDVNTEIVPILFGANLIALTKKDGGVRPIAVGSTLRRLASKIAVRHILPKLNSEFEPVQLGFGVKGGCEAAVHALRSFLSHGQPDVLLKIDVKNAFNSVNRDTLLTEIKQHIPEIYNYLLLSYADPTKLLYRSNELSSEVGCQQGDPLGPAIFSLAINPIIKNLNSNFNVWYLDDGTLGGDVDTVFSDLLLIKNKFEAIGLELNFNKCELFINNCDLNLNDVKKKFQILAPNIKIVNRNSLYLLGSPIFNESISDYIHTSITKFQNSADRLLEISPHYALCILKFCLFLPKFTYVLRCCSFWNHPDILTPLDDLIKISLESLLNMQLNEKSWTQASLPIRYGGLGIRKISSVALPAFLSSVHSSANIISKILRASPSNFEIAGLEEARNAFLIACPGQNFPLSLNSQRSWDDIHCKLTFDNLLSRSTGSARARLLAMGTHEAGYWLHAYPSSNTGTFLEPDTLRIATCLRLGVPVCAPHICPCGSDVDKLGHHGLSCQKSAGRFSRHAALNDIIRRSLATVNVPSLLEPSGIARDDGKRPDGMSLIPWKMGRVLVWDATCSDTLAPSHLHGTNYRAGAACEAAEKNKAGKYRGLGSEYDFVPFGVETLGPWGPSALRLF

SEQ ID NO: 17592 - protein, 671 aa, Notocelia uddmanniana
MFSGKINNEVVPLLYGANLIALTKKDGGVRPIAVGSTLRRLASKIAVRHIRSKLQSLFEPVQLGFGTKGGCEAAVHALRTYLSYDDCEIVVKIDVKNAFNSVNRDTLLAEVKDKIPEIYNYLLLCYADPSKLMYKSHELSSEVGCQQGDPLGPAIFSLAINPIIQKLKSKFNVWYLDDGTLGGDVDTVLSDLAFIKTNFENIGLELNFSKCELFIQKTSCSLVDLIQKFVHLAPGIRIVDKFSLCLLGSPIFEESFPGYISDTISKFQSHANRLLEISPHYALIILKFCLFVPKFTYVLRCCPFWKHQNLLSRMDDLIKTSLEMILNIQLTEPSWSQASLPIRYGGLGIRKVSSVASPAFLASTHSTSGLIGNILRALPTYCEIAGLEGAKNAFKVACPGKKFPDNPKSQRSWDNIYCDLNYNILLTSSAGPDRARLLAVGTREAGYWLHAHPSPNTGTFLDPTSLRLATGLRLGVAVCTPHICSCGTDVDRLGHHGLCCQKSAGRFSRHATLNDIIRRSLATVNVPALLEPTGMVRDDGKRPDGVSLVPWSVGRMLVWDATCVDTLAPSHLQRTTVKAGAAAENAEILKRNKYKGLGREYMFVPFGVETLGSWGPSAHKLFAEIAKRLVDVTGDRRAGGFLAQRISIAIQRGNAASILGTMPQGPVLDLS

SEQ ID NO: 17593 - protein, 954 aa, Lycaena phlaeas
MQSVTQSCDGTSNTTHTCIQCNQSFKSLKGLNIHTTKIHRKCNSQISSPSDINPIFPSTPTDVDNASTSFHTYLSQLKNSKPIVKRIPRGARITVATHLSHLIQKCYISNGIQDWQNLFLFSYSTLHVIKTDEPNLSLTQKIKNNCVVSSLPSPAPLIKHDAHFNRKKLIENKISDGDLKGAARLLFSNDVLSPDTPDTLQALRTKHPPAPVSPYFLDPPTAGQACLQIQSKDVSNAILSFKTGSAAGLDGISPQHLKDLTSLSVGDAGEQLLNSITKLINFMYSGNVNPEIVPILFGANLIALTKKDGGVRPIAVGSTLRRLASKIAVRHILPKLNSEFEPVQLGFGVKGGCEAAVHALRSFLTYGQPDVLLKIDVKNAFNSVNRDTLLTEIKKNIPEIYNYLLLSYADPTKLLYRSNELSSEVGCQQGDPLGPAIFSLAINPIIKNLNSKFNVWYLDDGTLGGDVDTVLSDLFSIKNKFEAIGLELNFSKCELFINNRDLNLNDVKQKFNILAPNIKIVKSDSLYLLGSPIFDESISEYINNSITKFKNSADRLLEISPHYAICILKFCLFVPKFTYLLRCCSFWNHPELLTQVDDLIKITLESILNMQLNEQSWSQASLPIRYGGLGIRKISSVALPAFLSSVHSSANLISTILRASPSNFVIAGLEEARNAFLIACPGQNFPVSPNSQRSWDDINCKMIYDNLLSCSTGSARARLLASGTHEAGYWLHAYPSSNTGTFLEPDTLRIATCLRLGVPVCVPHKCPCGSDVDKLGHHGLSCQKSAGRFSRHAALNDIIRRSLATVNVPSLLEPPGIARDDGKRPDGMSLIPWKMGRVLVWDATCSDTLAPSHLHGTSNRAGAACEAAEKTKACKYRVLGAEYDFVPFGVETLGPWGPNALRLFKEIAKRLVDITGDRRAGSYLGQRISLAIQRGNAASIFGTLPKGTPFNNIF

SEQ ID NO: 17594 - protein, 956 aa, Pieris napi
MQAVTLSCDGTSNASHICTFCNKSFKSLKGLKIHITKTHRNCISQTSSLLEILPIIPSAPTSVSVANAPTSFHTLLSHLKNNVPIVKRIPRGARITVATHLSKLIQKCYISNCTQDWQNLFLFSYSTLHIIKTDEPNLSLTQKIKNNCAVSSSPSPAPLIKHDAPFNRKKLIENKICDGDLKGAARLLFSNDVLSPDTPHTLEALRTKHPPAPVNPYFLDPPTAGQACLKIRNKDVTDAILSFKPGSAAGLDGISPQHLKDLTSHSVGDAGEQLINSITKLINFMYSGDVNTEIVPILFGANLIALTKKDGGVRPIAVGSTLRRLASKIAVRHILPKLNSEFEPVQLGFGVKGGCEAAVHALRSFLSHGQPDVLLKIDVKNAFNSVNRDTLLTEIKQHIPEIYNYLLLSYADPTKLLYRSNELSSEVGCQQGDPLGPAIFSLAINPIIKNLNSNFNVWYLDDGTLGGDVDTVFSDLLLIKNKFEAIGLELNFDKCELFINNCDLNLNDVKKKIQILTPNIKIVNRNSLYLLGSPIFNESISDYIHTSITKFQNSADRLLEISPHYALCILKFCLFLPKFTYVLRCCSFWNHPDLLTPLDDLIKISLESLLNMQLNEQSWTQASLPIRYGGLGIRKISSVALPAFLSSVHSSANLISKILRASPSNFEIAGLEEARNAFLIACPGQNFPLSLNSQRSWDDIHCKLTFDDLLSCSTGSARARLLAVGTHEAGYWLQAYPSTNTGTFLEPDTLRIATCLRLGVPVCAPHICPCGSDVDKLGHHGLSCQKSAGRFSRHAALNDIIRRSLATVNVPSILEPSGIARDDGKRPDGMSLIPWKMGRVLVWDATCSDTLAPSHLHGTNYRAGAACEAAEKNKACKYRGLGSEYDFVPFGVETLGPWGPNALRLFKEISKRLVDITGDRRSGSYLGQRISLAIQRGNAASIFGTLPKGTPFNDIF

SEQ ID NO: 17595 - protein, 949 aa, Thymelicus sylvestris
MQSVTQSCDGTSNATHTCTQCNRSFKSLKGLNIHITKTHRKCISQNHPIIPSAPTYVANNPTPFHTYLSHLKNSLPIVKRIPRGARITVATHLSKLIQKCYISNCTQDWQNLFLFSYNTLHIIKTDEPNLSLTQKIKNNCAVSSSPSPAPLIKHDAPRNRNKLIENKICDGDLKGAARLLFSNDVLSPDTPDTLQALRTKHPPAPVNPYFLDPPTAGQACLQIQKKDVTDAILSFKPGSAAGLDGISPQHLKDLTSHSVGDAGEQLVNSITKLINFMYSGNVNPEIVPILFGANLIALTKKDGGVRPIAVGSTLRRLASKIAVRHILPKLNSEFEPIQLGFGVKGGCEAAVHALRSFLTYGKPDVLLKIDVKNAFNSVNRDTLLTEIKQHIPEIYNYLLLSYADPTKLLYLSNELSSEVGCQQGDPLGPAIFSLAINPVIKNLNSKFNVWYLDDGTLGGDVDTVFSDLFLIKNKFEAIGLELNFSKCELFVNNCDLNLNDIKQKFNILAPNIKIVNSNSLYLLGSPIFDEAISEYVNNSITKFQNSADRLLEISPHYALCILKFCLFVPKFTYVLRCCSFWNHPDLLTQLDDLIKISLESILNMQLNEQSWTQASLPIRYGGLGIRKISSVALPAFLSSVHSSANLISKILRASPSNFEIAGLEEARKAFIIACPGQNFPVSPNSQRSWDDINSKLTYENLLSCSTGSARARLLAVGAHEAGYWLHAYPSSNTGTFLEPDTLRIATCLRLGVPVCAPHKCPCGSDVDKLGHHGLSCQKSAGRFSRHAALNDIIRRSLATVNVPSILEPTGIARDDGKRPDGMSLIPWKMGRVLVWDATCSDTLAPSHLHGTNIRAGAACEAAEKVKACKYRGLGSEYDFVPFGVETLGPWGPSALRLFKEISKRLVDITGDRRAGSYLGQRISLAIQRGNAASIFGTLPKGTPFNNNIF

SEQ ID NO: 17596 - protein, 953 aa, Pammene fasciana
MHAATQSGDGTSNLNFICVRCDSSFKTQRGLNIHISKKHRLCISQNDAALNLDPSLSTTPLSDQPNSITFHLYLSELKNNVPVIKRVPRGARITVANHLSSLIIKCVENNQTNDWHNLFLFSFNTLHAKNDEAISLTQKIKNNCVSNTNPHISRLSKGCASSTYNRTKLIESKISDGDLKGAARLLFTNDVLSPDTPDTLSALISKHPPAPSVPHSFAPPSADQACLQIEGKDVIDAIISFKTGSAAGLDGISPQHLKDLISHSVGDAGEQLVGSLTKLINFMFSGKINPDIAPILYGANLIALTKKDGGVRPIAVGSTLRRLASKIAVRHFRSKLQSLFEPIQLGFGTKGGCEAAVHALRTYLSLDDCEIVVKIDVKNAFNSVSRDTLLAEVKEKIPELYNYLFSCYSDSSKLMYKSHELSSEVGCQQGDPLGPAIFSLAINPIIKNLKSKFNVWYLDDGTLGGDVNTVLSDLSFIKSSFENIGLDLNFSKCELFIHKSSCTLADLKPKFDDLAPNIKSVDKNSLCLLGSPIFEESFPGYISNTISKFKSHTNRLIEISPHYALVILKFCLFVPKFTYVLRCCPFWKHQNLLSPIDDLIKISLETILNIQLSEPSWSQASLPIRFGGLGIRKISSVACPAFLASTHSTSGLIGNILRALPTNYEIAGFEDAKNAFKIACPGKTFPDNPKSQRSWDNVYCDLSYNTLLNNCTGPDRARLLAVGAREAGHWLHAHPSPNTGPFLDPTSLRLATGLRLGVSVCTPHICSCGTDVDRLGHHGLSCQKSAGRFSRHASLNDIIRRSLATINVPALLEPTGIIRDDGKRPDGVSLVPWSLGRMLVWDATCVDTLAPSHLQRTNVKAGAAAESAEISKRNKYKSLGREYHFVPFGVETLGPWGPSAHKFFAEIAKRLVDVTGDRRAGGFLAQRISIAIQRGNAASILGTMPQGPSLDLS

SEQ ID NO: 17597 - protein, 952 aa, Cydia splendana
MHAATQSGDGTPYPNFNCVQCDNSFKTQRGLNIHISKKHRLCISQNDAGLNLGPSLLTTPLSDHPNSIPFHLHLSELKNNVPVIQRVPRGARITVAKHLSGLLTKCVENNQIDDWHNLFLFSFKTLHAKKDKTISLTQKIKNNCVSNTTPHISRPSGCSSSTFNRTKLIESKISDGDLKGAARLLFTNDVLSPDTPDTLSALRSKHPPAPSVPHSFAPPTADQACLQIEGKDVIDAILSFKAGSAAGLDGISPQHLKDLISHSVGDAGEQLVCSLTKLINFMFSGKINTNIVPILYGANLIALTKKDGGVRPIAVGSTLRRLASKIAVRHIRSKLQSLFEPIQLGFGTKGGCEAAVHALRTYLSLDDCEIVVKIDVKNAFNSVSRDTLLTEVKDKIPELYNYLFFCYSDSSKLMYKSHELSSEVGCQQGDPLGPAIFSLAINPIIKNLKSKFNVWYLDDGTLGGDVNTVLSDLSFIKSSFENIGLELNCSKCELFIQKSSCTLTNLQPKFDDLTPNIKSVDKYSLCLLGSPIFEESFPDYISNSITKFKSHTDRLLEISPHYALVILKFCLFVPKFTYVLRCCPFWKHQNLLSPIDDLIKISLETILNIQLSEPSWSQASLPIRFGGLGIRKISSVASPAFLASTHSTSGLIGNILRALPTNCEIAGFEDAKNAFKIACPGKQFPDNPNSQRSWDNVYCDLTYNTLLNNCTGPDRARLLAVGAREAGYWLHAHPSPNTGTFLDPASLRLATGLRLGVSVCTPHICSCGTDVDRLGHHGLSCQKSAGRFSRHASLNDIVRRSLATINVPALLEPTGIIRDDGKRPDGVSLVPWSLGRMLVWDATCVDTLAPSHLQRTTVKAGGAAESAEILKRNKYKSLGREYHFVPFGVETLGPWGPSAHKLFAEIAKRLVDVTGDRRAGGYLAQRISIAIQRGNAASILGTMPQGPILDLS

SEQ ID NO: 17598 - protein, 954 aa, Glaucopsyche alexis
MQSVTQSCDGTSNATHKCTQCNNSFKSLKGLNIHTTKIHRKCISQNSSPLDIHPIIPSAPTYVTNDTTPFHTYLSQLKNSIPLVKRIPRGARITVATHLSQLIQKCYISNCTQDWQNLFLFSYSTLHIIKTDEPNLSLTQNIKNNCALSSSPSPAPLIKHDNPRNRNKLIENKICEGDLKGAARLLFSNDVLSPDTPDTLQALRTKHPPAPVDTCFLDPPTAGQACLQIQNKDIMDAILSFKPGSAAGLDGISPQHLKDLTSHSVGNAGEQLVNSFTKLINFMYSGNVNPEIVPILFGANLIALTKKDGGVRPIAVGSTLRRLASKIAVRHILPKLNSEFEPVQLGFGVKGGCEAAVHALRSFLTYGQPDVLLKIDVKNAFNSVNRDTLLTEIKQHIPEIYNYLLLSYANPTKLLYRSNELSSEVGCQQGDPLGPAIFSLAINSIIKNLNSKFNVWYLDDGTLGGDVDTVFSDLFQIKNKFEAIGLELNFSKCELFINNCDLNLNDVKQKFYILAPNIKIVNSNSLYLLGSPIFDESISEYINNSITKFQNSADCLLEISPHYALCILKFCLFVPKFTYVLRCCSFWNHPDLLTQVDDLIKISLESILNMQLNEQSWTQASLPIRYGGLGIRKISSVALPAFLSSVHSSANLISKILRASPSNFEIAGLEEARNAFLIACPGQNFPVSPNSQRSWDDINCKSTYDNLLSRSTGSARARLLAVGTHEAGYWLHAYPSSNTGTFLEPDTLRIATCLRLGVPVCAPHKCPCGSDVDKLGHHGLSCQKSAGRFSRHAALNDIIRRSLATVNVPSLLEPTGIARDDGKRPDGMSLIPWKMGRVLVWDATCSDTLAPSHLHGTYNRAGAACEAAEKAKTCKYRGLGSEYDFVPFGVETLGPWGPSAIRLFIEIGKRLVDITGDRRAGSYLGQRISLAIQRGNAASIFGTLPKGTLFNNIF

SEQ ID NO: 17599 - protein, 945 aa, Cosmia trapezina
MARRTRPIHAQCNKSFKSLKGLNIHTTKTHRKCISQNSSPLDIHPIIPSAPTYVASDPTPFHIYLSHLKNSIPIVKRIPRGARITVATHLSQLIQKCYISNCTQDWQNLFLFSYSTIHIIKTDEQYLSLTQKIKNNCAVSSSPSPAPPIKHDAPRNRNKLIENKICDGDLKGAARLLFSNDVLSPDTPDTLQALQTKHPPAPVNPYFLDPPTAGQACLQIQNKDVTAAILSFKPGSAAGLDGISPQHLKDLTSHSVGDAGEQLVNSITKLINFMYSGNVNPEIVPILFGANLIALTKKDGGVRPIAVGSTLRRLASKIAVRHILPKLNSEFEPVQLGFGVKGGCEASVHALRSFLTYGQPDVLLKIDVKNAFNSVNRDTLLTEIKQHIPEIYNYLLLSYADPTKLLYRSNELSSEVGCQQGDPLGPAIFSLAINPIIKNLNSKFNVWYLDDGTLGGDVDTVFSDLFLIKNKFEAIGLELNFSKCELFINNCNLNLNDVKQKFNILAPNIKIVNSNSLYLLVSPIFDESISEYFNNSITKFQNSADRLLEISPHYALCILKFCLFVPKFTYVLRCCSFWNHPDLLTQVDDLIKISLESILNMQLNEQSWTQASLPIRYGGLGILKISSVALPAFLSSVHSSANLISKILRASPSNFEIAGLEEARNAFLIACPGQNFPVSSNSQRSWDDIICKLTHDNLLSCSTGSARARLLAVGAHEAGYWLHACPSSNTGTFLEPDTLRIATCLRLGVPVCAPHKCPCGSDVDRLGHHGLSCQKSAGRFSRHAALNDIIRRSLATVNVPSLLEPTGIARDDGKRPDGMSLIPWKMGRVLVWDATCSDTLAPSHLHGTSIRAGAACEAAEKGKVSKYRGLGSEYDFVPFGVETLGPWGPTAIRLFNEITKRLVDVTGDRRAGSYLGQRISLAIQRGNAASIFGALPKGTPFNNIF

SEQ ID NO: 17600 - protein, 953 aa, Notocelia uddmanniana
MHAATQSDDGTSNLNFICVQCDNSFKTQRGLNIHISKKHRLCLSQNGPALNLDPAFIPAPLSDKPNSIPFHLYLSDLKNNVPVVKRVPRGARISVANHLSGLITKCVENNQIDDWHNLLLFSFNTLHAKNDEAISLTQKIKNNCVSNTTPHFSRPPKRCASSTFNKTKLIECKISDGDLKGAARLLFTNDVLSPDTPDTLLALRSKHPPAPVIPYVIDPPTADQACLQIEGKDVIDAIISFKTGSAAGLDGISPQHLKDLISQSVGDAGEQLICSLTKLINFMFSGKINNEVVPLLYGANLIALTKKDGGVRPIAVGSTLRRLASKIAVRHIRSKLQSLFEPVQLGFGTKGGCEAAVHALRTYLSYDDCEIVVKIDVKNAFNSVNRDTLLAEVKDKIPEIYNYLLLCYADPSKLMYKSHELSSEVGCQQGDPLGPAIFSLAINPIIQKLKSKFNVWYLDDGTLGGDVDTVLSDLAFIKTNFENIGLELNFSKCELFIQKTSCSLVDLIQKFVHLAPGIRIVDKFSLCLLGSPIFEESFPGYISDTISKFQSHANRLLEISPHYALIILKFCLFVPKFTYVLRCCPFWKHQNLLSRMDDLIKTSLEMILNIQLTEPSWSQASLPIRYGGLGIRKVSSVASPAFLASTHSTSGLIGNILRALPTYCEIAGLEGAKNAFKVACPGKKFPDNPKSQRSWDNIYCDLNYNILLNSSAGPDRARLLAVGTREAGYWLHAHPSPNTGTFLDPTSLRLATGLRLGVAVCTPHICSCGTDVDRLGHHGLCCQKSAGRFSRHATLNDIIRRSLATVNVPALLEPTGMVRDDGKRPDGVSLVPWSVGRMLVWDATCVDTLAPSHLQRTTVKAGAAAENAEILKRNKYKGLGREYMFVPFGVETLGSWGPSAHKLFAEIAKRLVDVTGDRRAGGFLAQRISIAIQRGNAASILGTMPQGPVLDLS

SEQ ID NO: 17601 - protein, 954 aa, Pieris napi
MQAVTLSCDGTSIASHTCTFCIKSFKSLKGLKIHISKTHRNCISQTSSLLEIHPIIPSAPTFAANAPTPFHTLLSHLKNSIPIVKRIPRGARITVATHLSKLIQKCYISNCTQDWQNLFLFSYSTLHIIKTDEPNLSLTQKIKNNCAVSSSPSPAPLIKHDAPFNRKKLIENKICDGDLKGAARLLFSNDVLSPDTPDTLEALRTKHPPAPVNPYFLDPPTAGQACLQIRNKDVTDAILSFKPGSAAGLDGISPQHLKDLTSHSVGDAGEQLINSITKLINFMYSGDVNTEIVPILFGANLIALTKKDGGVRPIAVGSTLRRLASKIAVRHILPKLNSEFEPVQLGFGVKGGCEAAVHALRSFLSHGQPDVLLKIDVKNAFNSVNRDTLLTEIKQHIPEIYNYLLLSYADPTKLLYRSNELSSEVGCQQGDPLGPAIFSLAINPIIKNLNSNFNVWYLDDGTLGGDVDTVFSDLLLIKNKFEAIGLELNFNKCELFINNCDLNLNDVKKKIQILAPNIKIVNRNSLYLLGSPIFYESISDYIHTSITKFQNSADRLLEISPHYALCILKFCLFLPKFTYVLRCCSFWNHPDILTPLDDLIKISLESLLNMQLNEQSWTQASLPIRYGGLGIRKISSVALPAFLSSVHSSANLISKILRASPSNFEIAGLEEARNAFLIACPGQNFPLSLNSQRSWDDIHCKLTFDDLLSRSTGSARARLLAVGTHEAGYWLHAYPSSNTGTFLEPDTLRIATCLRLGVPVCAPHICPCGSDVDKLGHHGLSCQKSAGRFSRHAALNDIIRRSLATVNVPSLLEPSGIARDDGKRPDGMSLIPWKMGRVLVWDATCSDTLAPSHLHGTNYRAGAACEAAEKNKACKYRGLGSEYDFVPFGVETLGPWGPSALRLFKEISKRLVDITGDRRSGSYLGQRISLAIQRGNAASIFGTLPKGTPFNDIF

SEQ ID NO: 17602 - protein, 952 aa, Cydia splendana
MHAATQSGDGTPYPNFNCVQCDNSFKTQRGLNIHISKKHRLCISQNDAGLNLGPSLLTTPLSDHPNSIPFHLHLSELKNNVPVIKRVPRGARITVAKHLSGLLTKCVENNQIDDWHNLFLFSFKTLHAKKDKTISLTQKIKNNCVSNTTPHISRPSGCSSSTFNRTKLIESKISDGDLKGAARLLSTNDVLSPDTPDTLSALRSKHPSAPSVPHSFAPPTADQACLQIEGKDVIDAIFSFKAGSAAGLDGISPQHLKDLISHSVGDAGEQLVCSLTKLINFMFSGKINTNIVPILYGANLIALTKKDGGVRPIAVGSTLRRLASKIAVRHIRSKLQSLFEPIQLGFGTKGGCEAAVHALRTYLSLDDCEIVVKIDVKNAFNSVSRDTLLIEVKDKIPELYNYLFFCYSDSSKLMYKSHELSSEVGCQQGDPLGPAIFSLAINPIIKNLKSKFNVWYLDDGTLGGDVNTVLSDLSFIKSSFENIGLELNFSKCELFIQKSPCTLTNLQPKFDDLTPNIKSVDKYSLCLLGSPIFEESFPDYISNSITKFKSHTDRLLEISPHYALVILKFCLFVPKFTYVLRCCPFWKHQNLLSPIDDLIKISLETILNIQLSEPSWSQASLPIRFGGLGIRKISSVASPAFLASTHSTSGLIGNILRALPTNCEIAGFEDAKNAFKIACPGKQFPDNPNSQRSWDNVYCDLTYNTLLNNCTGPDRARLLAVGAREAGYWLHAHPSPNTGTFLDPASLRLATGLRLGVSVCTPHICSCGTDVDRLGHHGLSCQKSAGRFSRHASLNDIFRRSLATINVPALLEPTGIIRDDGKRPDGVSLVPWSLGRMLVWDATCVDTLAPSHLQRTTVKAGGAAESAEILKRYKYKSLGREYHFVPFGVETLGPWRPSAHKLFAEIAKRLVDVTGDRRAGGYLAQRISIAIQRGNAASILGTMPQGPILDLS

SEQ ID NO: 17603 - protein, 954 aa, Mellicta athalia
MQSVTQSCDGTSNTTHICTQCNKSFKSLKGLNIHTTKTHRKCFSQNISPVDTHPTIPNTPTHLANDQTPFHTYLSHLKNSIPIVKRIPRGARITVATHLSQLIQKCYLSNCTQDWQNLFLFSYSTLHIIKTDEPNLSLTQKIKNNCAVSSSPSPAPLIKHDAPHNHNRLIINKICDGDLKGAARLLFSNDVLSPDTPDTLQALLTKHPPAPVNPYFLDPPTAGQACLQIQNKDVTNAISSFKPGSAAGLDGISPQHLKDLTSYSVGDAGKQLVNSITKLINFMYSGNVNPEIVPILFGANLIALTKKDGGVRPIAVGSTLRRLASKIAVRHILPKLNSEFEPVQLGFGVKGGCEAAVHALRSFLTYGQPDVLLKIDVKNAFNSVNRDTLLTEIKQHIPELYNYLLLSYADPTKLLYRSNELSSEVGCQQGDPLGPAIFSLAINPIIKNLNSKFNVWYLDDGTIGGDVDTVFSDLFLIKNKFEAIGLELNFSKCELFINNRVLNLNDIKQKFNILAPNIKIVNSNSLYLLGSPIFDEAIPEYINNSISKFQNSVDRLFEISSHYALCILKFCLFVPKFTYVLRCCSFWKHPDLLTQVDDLIKISIESILNMQLNEQSWTQASLPIRYGGLGIRKISSVALPAFLSSVHSSANLISKILRASPSNFEIAGLEEARNAFLIACPGQNFPVSTNSQRSWDDINCKFTFDNLLSCSTGSARARLLAVGTHEAGYWLHAYPSSNTGTFLEPDTLRIAICLRLGVPVCFPHKCPCGSDVDKLGHHGLSCQKSAGRFSRHAALNDIIRRSLATINVPSLLEPTGIARDDGKRPDGMSLIPWKMGRVLVWDATCSDTLAPSHLHGTNNRAGAACEAAEKAKAGKYRGLGSEYDFVPFGVETLGPWGPSAIRLFKEIAKRLVDITGDRRAGSYLGQRISLAIQRGNAASIFGTLPKGTPFNNIF

SEQ ID NO: 17604 - protein, 954 aa, Cosmia trapezina
MQSVTQSCDGTSNATHTCTQCNKSFKSLKGLNIHTTKTHRKCISQNSSPLDIHPIIPSAPTYVASDPTPFHIYLSHLKNSIPIVKRIPRGARITVATHLSQLIQKCYIRNCTQDWQNLFLFSYSTLHIIKTDEPYLSLTQKIKNNCAVSSSPSPAPPIKHDAPRNRNKLIENKICDGDLKGAARLLFSNDVLSPDTPDTLQALQTKHPPAPVNPYFLDPPTAGQACLQIQNKDVTAAILSFKPGSAAGLDGISPQHLKDLTSHSVGDAGEQLVNSITKLINFMYSGNVNPEIVPILFGANLIALTKKDGGVRPIAVGSTLRRLASKIAVRHILPKLNSEFEPVQLGFGVKGGCEASVHALRSFLTYGQPDVLLKIDVKNAFNSVNRDTLLTEIKQHIPEIYNYLLLSYADPTKLLYRSNELSSEVGCQQGDPLGPAIFSLAINPIIKNLNSKFNVWYLDDGTLGGDVDTVFSDLFLIKNKFEAIGLELNFSKCELFIHNCNLNLNDVKQKFNILAPNIKIVNSNSLYLLGSPIFDESISEYFNNSITKFQNSADRLLEISPHYALCILKFCLFVPKFTYVLRCCSFWNHPDLLTQVDDLIKISLESILNMQLNEQSWTQASLPIRYGGLGIRKISSVALPAFLSSVHSSANLISKILRASPSNFEIAGLEEARNAFLIACPGQNFPVYSNSQRSWDDIICKLTHDNLLSCSTGSARARLLAVGAHEAGYWLHAYPSSNTGTFLEPDTLRIATCLRLGVPVCAPHKCPCGSDVDRLGHHGLSCQKSAGRFSRHAALNDIIRRSLATVNVPSLLEPTGIARDDGKRPDGMSLIPWKMGRVLVWDATCSDTLAPSHLHGTSIRAGAACEAAEKGKVSKYRGLGSEYDFVPFGVETLGPWGPTAIRLFNEITKRLVDVTGDRRAGSYLGQRISLAIQRGNAASIFGTLPKGTPFNNIF

SEQ ID NO: 17605 - protein, 953 aa, Notocelia uddmanniana
MHAATQSDDGTSNLNFICVQCDNSFKTQRGLNIHISKKHRLCLSQNGPALNLDPAFIPAPLSDKPNSIPFHLYLSDLKNNVPVVKRVPRGARISVANHLSGLITKCVENNQIDDWHNLLLFSFNTLHAKNDEAISLTQKIKNNCFSNTTPHFSRPPKRCASSTFNKTKLIESKISDGDLKGAARLLFTNDVLSPDTPDTLLALRSKHPPAPVIPYVIDPPTADQACLQIEGKDVIDAIISFKTGSAAGLDGISPQHLKDLISQSVGDAGEQLICSLTKLINFMFSGKINNEVVPLLYGANLIALTKKDGGVRPIAVGSTLRRLASKIAVRHIRSKLQSLFEPVQLGFGTKGGCEAAVHALRTYLSYDDCEIVVKIDVKNAFNSVNRDTLLAEVKDKIPEIYNYLLLCYADPSKLMYKSHELSSEVGCQQGDPLGPAIFSLAINPIIQKLKSKFNVWYLDDGTLGGDVDTVLSDLAFIKTNFENIGLELNFSKCELFIQKTSCSLVDLIQKFVHLAPGIRIVDKFSLCLLGSPIFEESFPGYISDTISKFQSHANRLLEISPHYALIILKFCLFVPKFTYVLRCCPFWKHQNLLSRMDDLIKTSLEMILNIQLTEPSWSQASLPIRYGGLGIRKVSSVASPAFLASTHSTSGLIGNILRALPTYCEIAGLEGAKNAFKVACPGKKFPDNPKSQRSWDNIYCDLNYNILLTSSAGPDRARLLAVGTREAGYWLHAHPSPNTGTFLDPTSLRLATGLRLGVAVCTPHICSCGTDVDRLGHHGLCCQKSAGRFSRHATLNDIIRRSLATVNVPALLEPTGMVRDDGKRPDGVSLVPWSVGRMLVWDATCVDTLAPSHLQRTTVKAGAAAENAEILKRNKYKGLGREYMFVPFGVETLGSWGPSAHKLFAEIAKRLVDVTGDRRAGGFLAQRISIAIQRGNAASILGTMPQGPVLDLS

SEQ ID NO: 17606 - protein, 956 aa, Pieris napi
MQAVTLSCDGTSNASHICTFCNKSFKSLKGLKIHITKTHRNCISQTSSLLEILPIIPSAPTSVSVANAPTSFHTLLSHLKNNVPIVKRIPRGARITVATHLSKLIQKCYISNCTQDWQNLFLFSYSTLHIIKTDEPNLSLTQKIKNNCAVSSSPSPAPLIKHDAPFNRKKLIENKICDGDLKGAARLLFSNDVLSPDTPDTLEALRTKHPPAPVNPYFLDPPTAGQACLKIRNKDVTDAILSFKPGSAAGLDGISPQHLKDLTSHSVGDAGEQLINSITKLINFMYSGDVNTEIVPILFGANLIALTKKDGGVRPIAVGSTLRRLASKIAVRHILPKLNSEFEPVQLGFGVKGGCEAAVHALRSFLSHGQPDVLLKIDVKNAFNSVNRDTLLTEIKQHIPEIYNYLLLSYADPTKLLYRSNELSSEVGCQQGDPLGPAIFSLAINPIIKNLNSNFNVWYLDDGTLGGDVDTVFSDLLLIKNKFEAIGLELNFDKCELFINNCDLNLNDVKKKIQILAPNIKIVNRNSLYLLGSPIFNESISDYIHTSITKFQNSADRLLEISPHYALCILKFCLFLPKFTYVLRCCSFWNHPDLLTPLDDLIKISLESILNMQLNEQSWTQASLPIRYGGLGIRKISSVALPAFLSSVHSSANLISKILRASPSNFEIAGLEEARNAFLIACPGQNFPLSLNSQRSWDDIHCKLTFDDLLSCSTGSARARLLAVGTHEAGYWLQAYPSSNTGTFLEPDTLRIATCLRLGVPVCAPHICPCGSDVDKLGHHGLSCQKSAGRFSRHAALNDIIRRSLATVNVPSILEPSGIARDDGKRPDGMSLIPWKMGRVLVWDATCSDTLAPSHLHGTNYRAGAACEAAEKNKACKYRGLGSEYDFVPFGVETLGPWGPKALTLFKEISKRLVDITGDRRSGSYLGQRISLAIQRGNAASIFGTLPKGTPFNDIF

SEQ ID NO: 17607 - protein, 953 aa, Melitaea cinxia
MQSVTQSCDGTSNTIHTCIQCNKKFKSLKGLKIHTTKTHRKCSQNSSPSDIHPIIPRAPTYVANDATPFHTYLSHLKNSIPIAKRIPRGARITVAKHLSQLIQKCYISNCTQDWQNLFLFSYSTLHIIKTDEPNLSLTQKIKNNCAVRSSPSPAPPIKHDAPRNRNKVIENKICDGDLKGAARLLFSNDVLSPDTPDTLQALQTKHPPAPVNPFFLDPPTARQECLQIQNKDVTGAILSFKPGSAAGLDGISPQHLKDLTSHSVGDAGEQLVNSITKLINFMYSGNVNPEIVPILFGANLIALTKKDGGVRPIAVGSTLRRLASKIAVRHILPKLNSEFEPVQLGFGVKGGCEAAVHALRSFLTYDRPDVLLKIDVKNAFNSVNRDTLLTEIKQYIPELYNYLLLSYADPTKLLYRSNELSSEVGCQQGDPLGPAIFSLAINPIIKNLNSKFNVWYLDDGTLGGDVDTVFSDLFLIKNKFEAIGLKLNFSKCELFINNCDLNLNDVKQKFNILAPNIKIVNSNSLYLLGSPIFDECISEYINNSFTKFQNSVDRLLEISPHYALCILKYCLFVPKFTYALRCCSFWNHPDLLTQVDDLIKISLESILNMQLNEQSWTQASLPIRYGGLGIRKISSVALPAFLSSVHSSANLISKILRASPSNFEIAGLEEARNAFLIACPGQNFPVSPNSQRSWDDINCKLTYENLLSCSTGSARARLLAVGTHEAGYWLHAYPSTNTGTFLEPDTLRIATCLRLGVPVCAPHKCPCGSDVDKLGHHGLSCLKSAGRFSRHAALNDIIRRSLATVNVPSLLEPTGIARDDGKRPDGMSLIPWKMGRVLVWDATCSDTLAPSHLHGTNNRAGAACEAAEKTKADKYRGLGSEYDFVPFGVETLGPWGPSAITLFKEISKRLFDVTGDRRAGSYFGQRISLAIQRGNAASIFGTLPKGTPFNNIF

SEQ ID NO: 17608 - protein, 953 aa, Melitaea cinxia
MQSVTQSCDGTSNTIHTCTQCNKKFKSLKGLKIHTTKTHRKCSQNSSPSDIHPIIPRAPTYVANDATPFHTYLSHLKNSIPIAKRIPRGARITVAKHLSQLIQKCYISNCTQDWQNLFLFSYSTLHIIKTDEPNLSLTQKIKNNCAVRSSPSPAPPIKHDAPRNRNKVIENKICDGDLKGAARLLFSNVVLSPDTPDTLQALQTKHPPAPVNPFFLDPPTARQECLQIQNKDVTGAILSFKPGSAAGLDGISPQHLKDLTSHSVGDAGEQLVNSITKLINFMYSGNVNPEIVPILFGANLIALTKKDGGVRPIAVGSTLRRLASKIAVRHILPKLNSEFEPVQLGFGVKGGCEAAVHALRSFLTYDRPDVLLKIDVKNAFNSVNRDTLLTEIKQYIPELYNYLLLSYADPTKLLYRSNELSSEVGCQQGDPLGPAIFSLAINPIIKNLNSKFNVWYLDDGTLGGDVDTVFSDLFLIKNKFEAIGLELNFRKCELFINNCDLNLNDVKQKFNILAPNIKIVNSNSLYLLGSPIFDECISEYINNSFTKFQNSVDRLLEISPHYALCILKYCLFVPKFTYALRCCSFWNHPDLLTQVDDLIKISLESILNMQLNEQSWTQASLPIRYGGLGIRKISSVALPAFLSSVHSSANLISKILRASPSNFEIAGLEEARNAFLIACPGQNFPVSPNSQRSWDDINCKLTYENLLSCSTGSARARLLAVGTHEAGYWLHAYPSTNTGTFLEPDTLRIATCLRLGVPVCAPHKCPCGSDVDKLGHHGLSCLKSAGRFSRHAALNDIIRRSLATVNVPSLLEPTGIARDDGKRPDGMSLIPWKMGRVLVWDATCSDTLAPSHLHGTNNRAGAACEAAEKTKADKYRGLGSEYDFVPFGVETLGPWGPSAITLFKEISKRLFDVTGDRRAGSYFGQRISLAIQRGNAASIFGTLPKGTPFNNIF

SEQ ID NO: 17609 - protein, 959 aa, Tinea trinotella
MQTVTQSCDGTSNATHTCSQCRKSFKSLKGLNIHTTKIHRKCISQNSSPLDIHPIIPSAPTYVANNSTPFHKYLSNLKNSLPVVKRIPRGARITVATHLSKLIQKCYISNCTQDWQNLFLFSYNTLHIIKTNEPNLSLTQKIKNNCAVSSLPSPAPLAITRSIKHDAPRNRNKLIENKISDGDLKGAARLLFSNDVLSPDTPDTLQVLRTKHPPAPVNPYFLDPPTAGQACLQIQNKDVTDAILSFKPGSAAGLDGISPQHLKDLTSHSVGDAGEQLVNSITKLINFMYFGNVNPEIVPILFGANLIALTKKDGGVRPIAVGSTLRRLASKIAVRHILPKLNSEFEPVQLGFGVKGGCEAAVHALRSFLTYGQPDVLLKIDVKNAFNSVNRDTLLTEIKQHIPEIYNYLLLSYADPTKLLYRSNELSSEVGCQQGDPLGPAIFSLAINPIIKNLNSNFNVWYLDDGTLGGDVNTVFSDLFLIKSKFEAIGLELNFSKCELFINNCALNLNDVKQKFNILAPNIKIVNSNSLYLLGSPIFDASISEYINNSITKFQNSADRLLEISPHYALCILKFCLFVPKFTYVLRCCSFWNYPDLLKHVDDLIKNSLESILNMQLNEQSWTQASLPIRYGGLGIRKISSVALPAFLSSVHSSANLIGKILRATPSNFEIAALEEARNAFLIACPGQNFSISPNSQRSWDDINCKLTYDNLLSSSTGSARARLLAVGTHEAGYWLHAYPSSNTGTFLEPDTLRIATCLRLGVPVCAPHKCPCGSHVDKLGHHGLSCQKSAGRFSRHAALNDIIRRSLASVNVPSLLEPNGIARDDGKRPDGMSLIPWKMGRVLVWDATCSDTLAPSHLHGTNSRAGAACEAAEKAKACKYRGLGSEYDFVPFGVETLGPWGPSALRLFKEISKRLVDITGDRRVGSYLGQRISLAIQRGNAASIFGTLPKGTPFNNVF

SEQ ID NO: 17610 - protein, 959 aa, Tinea trinotella
MQSVTQSCDGTSNATHTCSQCSKSFKSLKGLNIHTTKIHRKCSSQNSSPIDIHPIIPSAPTYVANNSTPFHKYLSNLKNSIPVVKRIPRGARITVATHLSKLIQKCYISNCTQDWQNLFLFSYNTLHIIKTNEPNLSLTQKIKNNCAVSSLPSPAPLAITRSIKHDAPRNRNKLIENKISDGDLKGAARLLFSNDVLSPDTPDTLQALRTKHPPAPLNPYFLDPPTAGQACLQIQNKDVTDAILSFKPGSAAGLDGISPQHLKDLTSHSVGDAGEQLVNSITKLINFMYSGNVNPEIVPILFGANLIALTKKDGGVRPIAVGSTLRRLASKIAVRHILPKLNSEFEPVQLGFGVKGGCEAAVHALRSFLTYGQPDVLLKIDVKNAFNSVNRDTLLTEIKQHIPEIYNYLLLSYADPTKLLYRSNELFSEVGCQQGDPLGPAIFSLAINPIIKNLNSNFNVWYLDDGTLGGDVNTVFSDLFLIKSKFEAIGLELNFSKCELFINNCALNLNDVKQKFNILAPNIKIVNSNSLYLLGSPIFDESISEYIKNSITKFQNSADRLLEISPHYALCILKFCLFVPKFTYVLRCCSFWNYPDLLKHVDNLIKNSLESILNMQLNEQSWTQASLPIRYGGLGIRKISSVALPAFLSSVHSSANLIGKILRATPSNFEIAALEEARNAFLIACPGQNFSISPNSQRSWDDINCKLTYDNLLSSSTGSARARLLAVGAHEAGYWLHAYPSSNTGTFLEPDTLRIATCLRLGVPVCAPHKCPCGSDVDKLGHHGLSCQKSAGRFSRHAALNDIIRRSLASVNVPSLLEPTGIARDDGKRPDGMSLIPWKMGRVLVWDATCSDTLAPSHLHGTNSRAGAACEAAEKAKACKYRGLGSEYDFVPFGVETLGPWGPSALRLFKEISKRLVDITGDRRVGSYLGQRISLAIQRGNAASIFGTLPKGTPFNNVF

SEQ ID NO: 17611 - protein, 672 aa, Tinea trinotella
MYSGNVNPEIVPILFGANLIALTKKDGGVRPIAVGSTLRRLASKIAVRHILPKLNSEFEPVQLGFGVKGGCEAAVHALRSFLTYGKPDVLLKIDVKNAFNSVNRDTLLTEIKQHIPEIYNYLLLSYADPTKLLYRSNELSSEVGCQQGDPLGPAIFSLAINPIIKNLNSNFNVWYLDDGTLGGDVNTVFSDLFLIKSKFEAIGLELNFSKCELFINNCALNLNDVKQKFNILAPNIKIVNSNSLYLLGSPIFDESISEYIKNSINKFQNSADRLLEISPHYALCILKFCLFVPKFTYVLRCCSFWNYPELLKHVDNLIKNSLESILNMQLNEQSWTQASLPIRYGGLGIRKISSVALPAFLSSVHSSANLIGKILRATPSNFEIAALEEARNAFLIACPGQNFSISPNSQRSWDDINCKLTYDNLLSSSTGSARARLLAVGTHEAGYWLHAYPSSNTGTFLEPDTLRIATCLRLGVPVCAPHKCPCGSDVDKLGHHGLSCQKSAGRFSRHAALNDIIRRSLASVNVPSLLEPTGIARDDGKRPDGMSLIPWKMGRVLVWDATCSDTLAPSHLHGTNSRAGAACEAAEKAKACKYRGLGSEYDFVPFGVETLGPWGPSALRLFKEISKRLVDITGDRRVGSYLGQRISLAIQRGNAASIFGTLPKGTPFNNVF

SEQ ID NO: 17612 - protein, 954 aa, Glaucopsyche alexis
MQSVTQSCDGTSNATHTCTQCNNSFKSLKGLNIHTTKIHRKCISQNSSPLDIHPIIPSAVTYVTNDTTPFHTYLSHLKNSIPLVKRIPRGARITVATYLSQLIQKCYISNCTQDWQNLFLFSYSTLHIIKTDEPNLSLTQKIKNNCALSSSPFTAPLIKHDAPRNSNKLIENKICEGDLKGAARLLFSNDVLSPDTPDTLQALRTKHPPAPVDTYFLDPPTAGQACLQIQNKDIMDAILSFKPGSAAGLDGISPQHLKDLTSHSVGDAGEQLVNSITKLINFMYSGNVNLEIVPILFGANLIALTKKDGGVRPIAVGSTLRRLASKIAVRHILPKLNSEFEPVQLGFGVKGGCEAAVHALRSFLTYGQPDVLLKIDVKNAFNSVNRDTLLTEIKQHIPEIYNYLLLSYANPTKLLYRSNELSSEVGCQQGDPLGPAIFSLAINPIIKNLNSKFNVWYLDDGTLGGDVNTVLLDLFLIKNKFEAIGLELNFSKCELFINNCDLNLNDVKQKFNILAPNIKIVNSNSLYLLGSPIFDESIYEYINDSITKFQNSADRLLEISPHYALCILKFCLFVPKFTYVLRCCSFWNHPDLLTQVDDIIKISLESILNMQLNEQSWTQASLPIRYGGLGIRKISSVALPAFLASVHSSANLISKILRASPSNFEIAGLEEARNAFLIACPGQNFPVSPNSQRSWDDINCKLTYDNLLSISTGSARARLLAVGAHEAGYWLHAYPSSNTGTFLEPDTLRIATCLRLGVPVCVPHKCPCGSDVDKLGHHGLSCQKSAGRFSRHAALNDIIRRSLATVNVPSLLEPTGIARDDGKRPDGMSLIPWKMGRVLVWDATCSDTLAPSHLHGTNSRAGAACEAAEKAKTCKYRGLGSEYDFVPFGVETLGPWGPSAIRLFKEIGKRLVDVTGDRRAGSYLGQRISLAIQRGNAASIFGTLPKGTPFNNIF

SEQ ID NO: 17613 - protein, 954 aa, Glaucopsyche alexis
MQSVTQSCDGTSNATHKCTQCNNSFKSLKGLNIHTTKIHRKCISQNSSPLDIHPIIPSAPTYVTNDTTPFHTYLSQLKNSIPLVKRIPRGARITVATHLSQLIQKCYISNCTQDWQNLFLFSYSTLHIIKTDEPNLSLTQKIKNNCALSSSPSPAPLIKHDNPRNRNKLIENKICEGDLKGAARLLFSNDVLSPDTPDTLQALRTKHPPAPVDTCFLDPPTAGQACLQIQNKDIMDAILSFKPGSAAGLDGISPQHLKDLTSHSVGNAGEQLVNSFTKLINFMYSGNVNPEIVPILFGANLIALTKKDGGVRPIAVGSTLRRLASKIAVRHILPKLNSEFEPVQLGFGVKGGCEAAVHALRSFLTYGQPDVLLKIDVKNAFNSVNRDTLLTEIKQHIPEIYNYLLLSYANPTKLLYRSNELSSEVGCQQGDPLGPAIFSLAINSIIKNLNSKFNVWYLDDGTLGGDVDTVFSDLFQIKNKFEAIGLELNFSKCELFINNCDLNLNDVKQKFNILAPNIKIVNSNSLYLLGSPIFDESISEYINNSITKFQNSADCLLEISPHYALCILKFCLFVPKFTYVLRCCSFWNHPDLLTQVDDLIKISLESILNMQLNEQSWTQASLPIRYGGLGIRKISSVALPAFLSSVHSSANLISKILRASPSNFEIAGLEEARNAFLIACPGQNFPVSPNPQRSWDDINCKSTYDNLLSRSTGSARARLLAVGTHEAGYWLHAYPSSNTGTFLEPDTLRIATCLRLGVPVCAPHKCPCGSDVDKLGHHGLSCQKSAGRFSRHAALNDIIRRSLATVNVPSLLEPTGIARDDGKRPDGMSLIPWKMGRVLVWDATCSDTLAPSHLHGTYNRAGAACEAAEKAKTCKYRGLGSEYDFVPFGVETLGPWGPSAIRLFIEIGKRLVDITGDRRAGSYLGQRISLAIQRGNAASIFGTLPKGTLFNNIF

SEQ ID NO: 17614 - protein, 954 aa, Cosmia trapezina
MQSVTQSCDGTSNATHTCTQCNKSFKSLKGLNIHTTKTHRKCISQNSSPLDIHPIIPSAPTYVASDPTPFHIYLSHLKNSIPIVKRIPRGARITVATHLSQLIQKCYISNCTQDWQNLFLFSYSTLHIIKTDEPYLSLTQKIKNNCAVSSSPSPAPPIKHDAPRNRNKLIENKICDGDLKGAARLLFSNDVLSPDTPDTLQALQTKHPPAPVNPYFLDPPTAGQACLQIQNKDVTAAILSFKPGSAAGLDGISPQHLKDLTSHSVGDAGEQLVNSITKLINFMYSGNVNPEIVPILFGANLIALTKKDGGVRPIAVGSTLRRLASKIAVRHILPKLNSEFEPVQLGFGVKGGCEASVHALRSFLTYGQPDVLLKIDVKNAFNSVNRDTLLTEIKQHIPEIYNYLLLSYADPTKLLYRSNELSSEVGCQQGDPLGPAIFSLAINPIIKNLNSKFNVWYLDDGTLGGDVDTVFSDLFLIKNKFEAIGLELNFSKCELFINNCNLNLNDVKQKFNILAPNIKIVNSNSLYLLGSPIFDESISEYFNNSITKFQNSADRLLEISPHYALCILKFCLFVPKFTYVLRCCSFWNHPDLLTQVDDLIKISLESILNMQLNEQSWTQASLTIRYGGLGIRKISSVALPAFLSSVHSSANLISKILRASPSNFEIAGLEEARNAFLIACPGQNFPVSSNSQRSWDDIICKLTHDNLLSCSTDSARARLLDVGAHEAGYWLHAYPSSNTGTFPEPDTLRIATCLRLGVPVCAPHKCPCGSDVDRLGHHGLSCQKSAGRFSRHAALNDIIRRSLATVNVPSLLEPTGIARDDGKRPDGMSLIPLKMGRVLVWDATCSDTLAPSHLHGTSIRAGAACEAAEKGKVSKYRGLGSEYDFVPFGVETLGPWGPTAIRLFNEITKRLVDVTGDRRAGSYLGQRISLAIQRGNAASIFGTLPKGTPFNNIF

SEQ ID NO: 17615 - protein, 942 aa, Pieris napi
MARRSRPIRDKGKGKDKGLKIHISKIHRNCISQTSSPSEIHPIIPSAPTFAANAPTPFHTLLSHLKNSIPIIKRIPRGARITVATHLSKLIQKCYISNCTQDWQNLFLFSYSTLHIIKTDEPNLSLTQKIKNNCAVSSSPSPAPQIKHDAPFNRKKLIENKICDGDLKGAARLLFSNDVLSPDTPDTLEALRTKHPPAPVNPYFLDPPTAGQACLQIRNKDVTDAILSFKPGSAAGLDGISPQHLKDLTSHSVGDAGEQLINSITKLINFMFSGDVNTEIVPILFGANLIALTKKDGGVRPIAVGSTLRRLASKIAVRHILPKLNSEFEPVQLGFGVKGGCEAAVHALRSFLSHGQPDVLLKIDVKNAFNSVNRDTLLTEIKQHIPEIYNYLLLSYADPTKLLYRSNELSSEVGCQQGDPLGPAIFSLAINPIIKNLNSNFNVWYLDDGTLGGDVDTVFSDLLLIKNKFEAIGLELNFNKCELFINNCDLNLNDVKKKFQILAPNIKIVNRNSLYLLGSPIFNESISDYIHTSITKFQNSADRLLEISPHYALCILKFCLFLPKFTYVLRCCSFWNHPDILTPLDDLIKISLESLLNMQLNEQSWTQASLPIRYGGLGIRKISSVALPAFLSSVHSSANLISKILRASPSNFEIAGLEEARNAFLIACPGQNFPLSLNSQRSWDDIHCKLTFDDLLSRSTGSARARLLAVGTHEAGYWLHAYPSSNTGTFLEPDTLRIATCLRLGVPVCAPHICPCGSDVDKLGHHGLSCQKSAGRFSRHAALNDIIRRSLATVNVPSLLEPSGIARDDGKRPDGMSLIPWKMGRVLVWDATCSDTLAPSHLHGTNYRAGAACEAAEKNKACKYRGLGSEYDFVPFGVETLGPWGPSALRLFKEISKRLVDITGDRRSGSYLGQRISLAIQRGNAASIFGTLPKGTPFNDIF

SEQ ID NO: 17616 - protein, 954 aa, Furcula furcula
MQTVTQSCDGTSNATHTCTQCNKSFKSLKGLNIHTTKTHRKCISQNSSPSDIHTIIPSAPTYVANDPTPFHTYLSHLKNSVPIVKRIPRGARITVATHLSQLIQKCYISNCTQDWQNLFLFSYSTLHIIKTDEPNLSLTQKIKNNCTVSSSPSPAPLIKHDAPRNRNKLIENKICDGDLKGAARLLFSNDVLSPDTSDTLQALRTKHPPAPVNPYFFDPPTAGQAWLQIQNKDVTDAILCFKPGSAAGLDGISPQHLKDLTSFSVGDAGEQLVNSITKLINFMYSGNVNPEIVPILFGANLIALTKKDGGVRPIAVGSTLRRLASKIAVRHILPKLNSEFEPVQLGFGVKGGCEAAVHALRSFLTYGQPDVLLKIDVKNAFNSVNRDTLLTEIKQHIPEIYNYLLLSYADPTKLLYRSNELSSEVGCQQGDPLGPAIFSLAINPIIQKLNSKFNVWYLDDGTLGGDVDTVFSDLFLIKNKFEAIGLELNFSKCELFINNSVLNLNDVKQKFNILAPNIKIVNSNSLYLLGSPIFDESIPGYISKSITKFQNSADRLLEISPHYALCILKFCFFVPKFTYVLRCCSFRNQPVLLTQVDDLIKISLESILNMQLNEQSWTQASLPIRYGGLGIRKISSVALPAFLSSVHSSANLISKLLRASPSNFEIAGLEEARNAFLIACPGQNFPVSPNSQRSWDDINCKLTYDNLLSCSTGSARARLLAVGTHEAGYWLHAYPSSNTGTFLEPDTLRIATCLRLGVPVCAPHKCPCGSDVDKLGHHGLSCQKSAGRFSRHAALNDIIRRSLATVNVPSLLEPTGIARDDGKRPDGMSLIPWKMGRVLVWDATCSDTLAPSHLHGTKNRAGAACEAVEKAKACKYRGLGSEYDFVPFGVETLGPWGPSAVKLFMEMAKRLVDITGDRRAGSYLGQRISLAIQRGNAASIFGTLPKGTSFNNIF

SEQ ID NO: 17617 - protein, 955 aa, Mellicta athalia
MQSGTQSCDGTSNATYTCTQCNKPFKSLKGLNIHTSKIHRTFFSHSSSPVDIHPIIPSTPTHVANDPTPFHTYLSHLKNSIPIVKRIPRGARITVATHLSQLIQKCYMSNCTQDWQNLFLFSYSTLHIIIKTDEPKLSLTQKIKNNCAVSSSLSPAPLIKHDAPRNRNKLIINKICDGDLKGAARLLFSNDVLSPDTPDTLQALLTKHPPAPVNPYFLDPPTAEQACLQIQNKDVTNAISSFKPGSAAGLDGISPQHLKDLTSHSVGDAGKQLVNSITKLINFMYSGNVNPEFVPILFGANLIALTKKDGGVRPIAVGSTLRRLASKIAVRHILPKLNSEFEPVQLGFGVKGGCEAAVHALRSFLTYEKPDVLLKIDVKNAFNSVHRDTLLTEIKQHIPELYNYLLLSYADPTKLLYRSNELSSEVGCQQGDPLGPAIFSLAINPIIKKLNSKFNVWYLDDGTLGGDVNTVFSDLFLIKNKFEAIGLELNFSKCELFINNRDLNLNDINEKFNILAPNIKIVNSNSLYLLGSPIFDESIPGYINNSITKFKNSVDRLLEISSHYALCVLKFCLFVPKFTYVLRCCSFWNHPDLLTQVDSLIKISLESILNMQLNEQSWTQASLPIRYGGLGIRKISSVALPAFLSSVHSSANLISKILRASPSNFEIAGLEEARNAFLIACPGQNFPVSTNSQRSWDDIICKFTFDSLLSCSTGSARARLLAVGTHEAGYWLHAYPSSNTGTFLEPDTLRIATCLRLGVPVCAPHKCPCGSDVDKLGHHGLSCQKSAGRFSRHAALNDIIRRSLATVNVPSILEPSGIARDDGKRPDGMSLIPWKMGRVLVWDATCSDTLAPSHLHGTNNRAGAACEAAEKAKQSKYRGLGSEYDFVPFGVETLGPWGPSAIRLFKEIAKRLVDITGDRRAGSYLGQRISLAIQRGNAASIFGTLPKGTSFNNIF

SEQ ID NO: 17618 - protein, 954 aa, Cosmia trapezina
MQSVTQSCDGTSNATHTCTQCNKSFKSLKGLNIHTTKTHRKCISQNSSPLDIHPIILSAPTHVAIDPTPFHTYLSHLKNSIPIVKRIPRGARITVATHLSQLIQKCYISNCTQDWQNLFLFSYSTLHIIKTDEPNLSLTQKIKNNCAVSSSPSPAPPIKHDAPRNRNKLIENKICDGDLKGAARLLFSNDVLSPDTPDTLQALQTKHPPAPVNPYFLDPPTAGQACLQIQNKDVTDAFLSFKPGSAAGLDGISPQHLKDLTSHSVGDAGEQLVNSITKLINFMYSGNVNPEIVPILFGANLIALTKKDGGVRPIAVGSTLRRLASKIAVRHILPKLNSEFEPVQLGFGVKGGCEASVHALRSFLTYGQPDVLLKIDVKNAFNSVNRDTLLTEIKQHIPEIYNYLLLSYADPTKLLYRSNELSSEVGCQQGDPLGPAIFSLAINPIIKNLNSKFNVWYLDDGTLGGDVDTVFSDLFLIKNKFEAIGLELNFSKCELFINNCNLNLNDVKQKFNILAPNIKIVNSNSLYLLGSPIFDESISEYFNNSITKFQNSADRLLEISPHYALCILKFCLFVPKFTYVLRCCSFWNHPDLMTQVDDLIKISLESILNMQLNEQSWTQASLPIRYGGLGIRKISSVALPAFLSSVHSSANLISKILRASPSNFEIAGLEEARNAFLIACPGQNFPVSSNSQRSWDDINCKLTHDNLLSCSTGSARARLLAVGAHEAGYWLHAYPSSNTGTFLEPDTLRIATCLRLGVPVCAPHKCPCGSDVDRLGHHGLSCQKSAGRFSRHAALNDIIRRSLATVNVPSLLEPTGIARDDGKRPDGMSLIPWKMGRVLVWDATCSDTLAPSHLHGTSIRAGAACEAAEKGKVSKYRGLGSEYDFVPFGVETLGPWGPTAIRLFKEITKRLVDVTGDRRAGSYLGQRISLAIQRGNAASIFGTLPKGTPFNNIF

SEQ ID NO: 17619 - protein, 954 aa, Cosmia trapezina
MQSVTQSCDGTSNATHTCTQCNKSFKSLKGLNIHTTKTQRKCISQNSSPLDIHPIIPSAPTYVASDPTPFHIYLSHLKNSIPIVKRIPRGARITVATHLSQLIQKCYISNCTEDWQNLFLFSYSTLHIIKTDEPYLSLTQKIKNNCAVSSSPSPALPIKHDAPRNRNKLIENKICDGDLKGAARLLFSNDVLSPDTPDTLQALQTKHPPAPVNPYFLDPPTAGQACLQIQNKDVTAAILSFKPGSAAGLDGISPQHLKDLTSHSVGDAGEQLVNSITKLINFMYSGKVNPEIVPILFGANLIALTKKDGGVRPIAVGSTLQRLASKIAVRHILPKLNSEFEPVQLGFGVKGGCEASVHALRSFLTYGQPDVLLKIDVKNAFNSVNRDTLLTEIKQHIPEIYNYLLLSYADPTKLLYSSNELSSEVGCQQGDPLGPAIFSLAINPIIKNLNSKFNVWYLDDGTLGGDVDTVFSDLFLIKNKFEAIGLELNFSKCELFINNCNLNLNDVKQKFNILAPNIKIVNSNSLYLLGSPIFDESISEYFNNSITKFQNSADRLLEISPHYALCILKFCLFVPKFTYVLRCCSFWNHPDLLTQVDDLIKISLESILNMQLNEQSWTQASLPIRYGGLGIRKISSVALPAFLSSVHSSANLISKILRASPSNFEIAGLEEARNAFLIACPGQNFPVSSNSQRSWDDIICKLTHDNLLSCSTGSARARLLAVGAHEAGYWLHAYPSSNTGTFLEPDTLRIATCLRLGVPVCAPHKCPCGSDVDRLGHHGLSCQKSAGRFSRHAALNDIIRRSLATVNVPSLLEPTGIARDDGKRPDGMSLIPWKMGRVLVWDATCSDTLAPSHLHGTSIRAGAACEAAEKGKVSKYRGLGSEYDFVPFGVETLGPWGPTAIRLFNEITKRLVDVTGDRRAGSYLGPRISLAIQRGNAASIFGTLPKGTPFNNIF

SEQ ID NO: 17620 - protein, 949 aa, Thymelicus sylvestris
MQSVTQSCDGTSNATHTCTQCNRSFKSLKGLNIHITKTHRKCISQNHPIIPSAPTYVANNPTPFHTYLSHLKNSLPIVKRIPRGARITVATHLSKLIQKCYISNCTQDWQNLFLFSYNTLHIIKTDEPNLSLTQKIKNNCAVSSSPSPAPLIKHDAPRNRNKLIENKICDGDLKGAARLLFSNDVLSPDTPDTLQALRTKHPPAPVNPYFLDPPTAGQACLQIQNKDVTDAILSFKPGSAAGLDGISPQHLKDLTSHSVGDAGEQLVNSITKLINFMYSGNVNPEIVPILFGANLIALTKKDGGVRPIAVGSTLRRLASKIAVRHILPKLNSEFEPVQLGFGVKGGCEAAVHALRSFLTYGKPDVLLKIDVKNAFNSVNRDTLLTEIKQHIPEIYNYLLLSYADPTKLLYRSNELSSEVGCQQGDPLGPAIFSLAINPVIKNLNSKFNVWYLDDGTLGGDVDTVFSDLFLIKNKFEAIGLELNFSKCELFVNNCDSNLNDIKQKFNILAPNIKIVNSNSLYLLGSPIFDEAISEYVNNSITKFQNSADRLLEISPHYALCILKFCLFVPKFTYVLRCCSFWNHPDLLTQLDDLIKISLESILNMQLNEQSWTQASLPIRYGGLGIRKISSVALPAFLSSVHSSANLISKILRASPSNFEIAGLEEARKAFIIACPGQNFPVSPNSQRSWDDINSKLTYENLLSCSTGSARARLLAVGAHEAGYWLHAYPSSNTGTFLEPDTLRIATCLRLGVPVCAPHKCPCGSDVDKLGHHGLSCQKSAGRFSRHAALNDIIRRSLATVNVPSILEPSGIARDDGKRPDGMSLIPWKMGRVLVWDATCSDTLAPSHLHGTNIRVGAACEAAEKVKACKYRGLGSEYDFVPFGVETLGPWGPSALRLFKEISKRLVDITGDRRAGSYLGQRISLAIQRGNAASIFGTLPKGTPFNNNIF

SEQ ID NO: 17621 - protein, 955 aa, Mellicta athalia
MPSGTQSCDGTSNATYTCTQCNKPFKSLKGLNIHTSRIHRTFFSQSSSPVDIHPIIPSTPTHVANDPTPFHTYLSHLKNSIPIVKRIPRGARITVATHLSQLIQKCYMSNCTQDWQNLFLFSYSTLHIIIKTDEPKLSLTQKIKNNCAVSSSLSPAPLIKHDAPRNRNKLIINKICDGDLKGAARLLFSNDVLSPDTPDTLQALLTKHLPAPVNPYFLDPPTAEQACLQIQNKDVTNAISSFKPGSAAGLDGISPQHLKDLTSHSVGDAGKQLVNSITKLINFMYSGNVNPEFVPILFGANLIALTKKDGGVRPIAVGSTLRRLASKIAVRHILPKLNSEFEPVQLGFGVKGGCEAAVHALRSFLTYEKPDVLLKIDVKNAFNSVHRDTLLTEIKQHIPELYNYLLLSYADPTKLLYRSNELSSEVGCQQGDPLGPAIFSLAINPIIKKLNSKFNVWYLDDGTLGGDVNTVFSDLFLIKNKFEAIGLELNFSKCELFINNRDLNLNDINEKFNILAPNIKIVNSNSLYLLGSPIFDESIPGYINNSITKFQNSVDRLLEISSHYALCVLKFCLFVPKFTYVLRCCSFWNHPDLLTQVDSLIKISLESILNMQLNEQSWTQASLPIRYGGLGIRKISSVALPAFLSSVHSSANLISKILRASPSNFEIAGLEEARNAFLIACPGQNFPVSTNSQRSWDDIICKFTFDSLLSCSTGSARARLLAVGTHEAGYWLHAYPSSNTGTFLEPDTLRIATCLRLGVPVCAPHKCPCGSDVDKLGHHGLSCQKSAGRFSRHAALNDIIRRSLATVNVPSILEPSGIARDDGKRPDGMSLIPWKMGRVLVWDATCSDTLAPSHLHGTNNRAGAACEAAEKAKQSKYRGLGSEYDFVPFGVETLGPWGPSAIRLFKEIAKRLVDITGDRRAGSYLGQRISLAIQRGNAASIFGTLPKGTSFNNIF

SEQ ID NO: 17622 - protein, 959 aa, Tinea trinotella
MQSVTQSCDGTSNATHTCSQCSKSFKSLKGLNIHTTKIHRKCSSQNSSPIDIHPIIPSAPTYVANNSTPFHKYLSNLKNSIPVVKRIPRGARITVATHLSKLIQKCYISNCTQDWQNLFLFSYNTLHIIKTNEPNLSLTQKIKNNCAVSSLPSPAPLAITRSIKHDAPRNRNKLIENKISDGDLKGAARLLFSNDVLSPDTPDTLQALRTKHPPAPLNPYFLDPPTAGQACLQIQNKDVTDAILSFKPGSAAGLDGISPQHLKDLTSHSVGDAGEQLVNSITKLINFMYSGNVNPEIVPILFGANLIALTKKDGGVRPIAVGSTLRRLASKIAVRHILPKLNSEFEPVQLGFGVKGGCEAAVHALRSFLTYGQPDVLLKIDVKNAFNSVNRDTLLTEIKQHIPEIYNYLLLSYADPTKLLYRSNELSSEVGCQQGDPLGPAIFSLAINPIIKNLNSNFNVWYLDDGTLGGDVNTVFSDLFLIKSKFEAIGLELNFSKCELFINNCALNLNDVKQKFNILAPNIKIVNSNSLYLLGSPIFDESISEYIKNSITKFQNSADRLLEISPHYALCILKFCLFVPKFTYVLRCCSFWNYPDLLKHVDNLIKNSLESILNMQLNEQSWTQASLPIRYGGLGIRKISSVALPAFLSSVHSSANLIGKILRATPSNFEIAALEEARNAFLIACPGQNFSISPNSQRSWDDINCKLTYDNLLSSSTGSARARLLAVGAHEAGYWLHAYPSSNTGTFLEPDTLRIATCLRLGVPVCAPHKCPCGSDVDKLGHHGLSCQKSAGRFSRHAALNDIIRRSLASVNVPSLLEPTGIARDDGKRPDGMSLIPWKMGRVLVWDATCSDTLAPSHLHGTNSRAGAACEAAEKAKACKYRGLGSEYDFVPFGVETLGPWGPSALRLFKEISKRLVDITGDRRVGSYLGQRISLAIQRGNAASIFGTLPKGTPFNNVF

SEQ ID NO: 17623 - protein, 954 aa, Anthocharis cardamines
MQSVTQSCVSTSNATHTCIQCNKSFKSLKGLNIHTTKTHRKCFSQNSSPLDIHPIIPSAPTYVANDPTPFHTYLSHLKNSTPIVKRIPRGARITVATHLSQLIQKCYISNCTQDWQNLFLFSYSTLHIIKTDEPNLSLTQKIKNNCAVSSSPSPAPLIKHDAPHNRNKLIENKICDGDLKGAARLLFSNDVLSPDTPDTLQALRTKHPPAPVNPYFLDPPTAGQACLQIQKKDVTNAILSFKPGSAAGLDGISPQHLKDLTSHSVGDAGEQLVNSITKLINFMFSGNVNPEIVPILFGANLIALTKKDGGVRPIAVGSTLRRLASKIAVRHILPKLNSEFEPVQLGFGVKGGCEAAVHALRSFLTYGQPDVLLKIDVKNAFNSVNRDTLLTEIKQHIPEIYNYLLLSYADPTKLLYRSNELSSEVGCQQGDPLGPAIFSLAINPIIKNLNSKFNVWYLDDGTLGGDVDTVFSDLLLIKNKFEAIGLELNFSKCELFINNCDLNLTDVKQKFNILAPNIKIVNSNSLYLLGSPIFDESFSEYIDISITKFKNSADRLLEISPHYALCILKFCLFVPKFTYVLRCCSFWNHPDLLSQVDDLFKISLESILNMQLNEQSWTQASLPIRYGGLGIRKISSVALPAFLSSVHSSANLISKILRESPSNFEIAGLEEARNAFLIACPGQNFPVSPNSQRSWDDINCKLSYENLLSCSTGSARARLLAVGAHEAGYWLHAYPSSNTGTFLEPDTLRIAACLRLGVPVCIPHKCPCGSDVDKLGHHGLSCLKSAGRFSRHAALNDIIRRSLATVNVPSLLEPTGIARDDGKRPDGMSLIPWKMGRVLVWDATCSDTLAPSHLHGTNNRVGAACEAAEKAKTCKYRGLGSEYDFVPFGVETLGPWGPSAIKLFKEIAKRLVDITGDRRAGSYLGQRISLAIQRGNAASIFGTLPKGTPFINIF

SEQ ID NO: 17624 - protein, 953 aa, Notocelia uddmanniana
MHAATQSDDGTSNLNFICVQCDNSFKTQRGLNIHISKKHRLCLSQNGPALNLDSAFIPAPLSDKPNSIPFHLYLSDLKNNVPVVKRVPRGARISVANHLSGLITKCVENNQIDDWHNLLLFSFNTLHAKNDEAISLTQKIKNNCVSNTTPHFSRPPKRCASSTFNKTKLIECKISDGDLKGAARLLFTNDVLSPDTPDTLLALRSKHPPAPVIPYVIDPPTADQACLQIEGKDVIDAIISFKTGSAAGLDGISPQHLKDLISQSVGDAGEQLICSLTKLINFMFSGKINNEVVPLLYGANLIALTKKDGGVRPIAVGSTLRRLASKIAVRHIRSKLQSLFEPVQLGFGTKGGCEAAVHALRTYLSYDDCEIVVKIDVKNAFNSVNRDTLLAEVKDKIPEIYNYLLLCYADPSKLMYKSHELSSEVGCQQGDPLGPAIFSLAINPIIQKLKSKFNVWYLDDGTLGGDVDTVLSDLAFIKTNFENIGLELNFSKCELFIQKTSCSLVDLIQKFVHLAPGIRIVDKFSLCLLGSPIFEESFPGYISDTISKFQSHANRLLEISPHYALIILKFCLFVPKFTYVLRCCPFWKHQNLLSRMDDLIKTSLEMILNIQLTEPSWSQASLPIRYGGLGIRKVSSVASPAFLASTHSTSGLIGNILRALPTYCEIAGLEGAKNAFKVACPGKKFPDNPKSQRSWDNIYCDLNYNILLTSSAGPDRARLLAVGTREAGYWLHAHPSPNTGTFLDPTSLRLATGLRLGVAVCTPHICSCGTDVDRLGHHGLCCQKSAGRFSRHATLNDIIRRSLATVNVPALLEPTGMVRDDGKRPDGVSLVPWSVGRMLVWDATCVDTLAPSHLQRTTVKAGAAAENAEILKRNKYKGLGREYMFVPFGVETLGSWGPSAHKLFAEIAKRLVDVTGDRRAGGFLAQRISIAIQRGNAASILGTMPQGPVLDLS

SEQ ID NO: 17625 - protein, 953 aa, Notocelia uddmanniana
MHAATQSDDGTSNLNFICVQCDNSFKTQRGLNIHISKKHRLCLSQNGPALNLDPAFIPAPLSDKPNSIPFHLYLSDLKNNVPVVKRVPRGARISVANHLSGLITKCVENNQIDDWHNLLLFSFNTLHAKNDEAISLTQKIKNNCVSNTTPHFSRPPKRCASSTFNKTKLIECKISDGDLKGAARLLFTNDVLSPDTPDTLLALRSKHPPAPVIPYVIDPPTADQACLQIEGKDVIDAIISFKTGSAAGLDGISPQHLKDLISQSVGDAGEQLICSLTKLINFMFSGKINNEVVPLLYGANLIALTKKDGGVRPIAVGSTLRRLASKIAVRHIRSKLQSLFEPVQLGFGTKGGCEAAVHALRTYLSYDDCEIVVKIDVKNAFNSVNRDTLLAEVKDKIPEIYNYLLLCYADPSKLMYKSHELSSEVGCQQGDPLGPAIFSLAINPIIQKLKSKFNVWYLDDGTLGGDVDTVLSDLAFIKTNFENIGLELNFSKCELFIQKTSCSLVDLIQKFVHLAPGIRIVDKFSLCLLGSPIFEESFPGYISDTISKFQSHANRLLEISPHYALIILKFCLFVPKFTYVLRCCPFWKHQNLLSRMDDLIKTSLEMILNIQLTEPSWSQASLPIRYGGLGIRKVSSVASPAFLASTHSTSGLIGNILRALPTYCEIAGLEGAKNAFKVACPGKKFPGNPKSQRSWDNIYCDLNYNILLTSSAGPDRARLLAVGTREAGYWLHAHPSPNTGTFLDPTSLRLATGLRLGVAVCTPHICSCGTDVDRLGHHGLCCQKSAGRFSRHATLNDIIRRSLATVNVPALLEPTGMVRDDGKRPDGVSLVPWSVGRMLVWDATCVDTLAPSHLQRTTVKAGAAAENAEILKRNKYKGLGREYMFVPFGVETLGSWGPSAHKLFAEIAKRLVDVTGDRRAGGFLAQRISIAIQRGNAASILGTMPQGPVLDLS

SEQ ID NO: 17626 - protein, 959 aa, Pieris napi
MQAVTLSCDGTSIASHTCTFCNKSFKSLKGLKIHISKTHRKCISQTSSPLEIHPIIPSAPTIVANTNPMERSCPFHTLLSHLKNSIPIVKRIPRGARLTVATHLSKLIQKCYVSNCTQDWQNLFLFSYSTLHIIKTDEPNLSLTQKIKNNCAVSSSPSPAPLNKHDAPFNRKKLIESKICDGDLKGAARLLFSNDVLSPDTPDTLEALRTKHPPAPVNPYFLDPPTAGQACLQIRNKDVTDAILSFKPGSAAGLDGISPQHLKDLTSHSVGDAVEQLINSITKLINFMYSGDVNTEIVPILFGANLIALTKKDGGVRPIAVGSTLRRLASKIAVRHILPKLNSEFEPVQLGFGVKGGCEAAVHALRSFLSHGQPDVLLKIDVKNAFNSVNRDTLLTEIKQHIPEIYNYLLLSYADPTKLLYRSNELSSEVGCQQGDPLGPAIFSLAINPIIKNLNSNYKVWYLDDGTLGGDVDTVFSDLLLIKNKFEAIGLELNFNKCELFINNCELNINDVKKNFQILAPNIKIVNRNSLYLLGSPIFNESISDYIHTSITKFQNSADRLLEISPHYALCILKFCLFLPKFTYVLRCCSFWNHSDLLTPLDDLIKISLESLLNMQLNEQSWTQASLPIRYGGLGIRKISSVALPAFLSSDHSSANLISKILRASPSNFEIAGLEEARNAFLIACPGQNFPLSLNSQRSWDDIHCKLTFDDLLSCSTGSARARLLAVGTHEAGYWLHAYPSSNTGTFLEPDTLRIATCLRLGVPVCAPHICPCGSDVDKLGHHGLSCKKSAGRFSRHAALNDIIRRSLATVNVPSLLELSGIARDDGKRPDGMSLIPWKMGRVLVWDATCSDMLAPSHLHGTNYRAGAACEAAEKNKACKYRGLGSEYDFVPFGVETLGPWGPSALRLFKEISKKLVDITGDRRSGSYLGQRISLAIQRGNAASIFGTLPKGTPFNDIF

SEQ ID NO: 17627 - protein, 954 aa, Zeuzera pyrina
MQSVTQSCDGTSNATHICTQCNKSFKSSKGLNIHTTKTHRKCISQNSSPLDIHPIIPSAPTYVANDPTPFHTYLSHLKNSIPIVKRIPRGARITVATHLSQLIQKCYISNCTQDWQNLFLFSYSTLHILKTNEPNLSLTQKIKNNCAVSSSPSPTPLIKHDAPRNRNKLIEYKICDGDLKGAARLLFSNDVLSPDTSDTLQALRTKHPPAPVNPYSLDPPKAGQACLQIQNKDVTNAISSFKPGSAAGLDGISPQHLKDLTSHSVGDAGEKLVNSITKLINFMYSGNVNPEIVPILFGANLIALTKKDGGVRPIAVGSTLRRLASKIAVRHILPKLNSEFEPVQLGFGVKGGCEAAVHALRSFLTYGQPDVLLKIDVKNAFNSVNRDTLLKEIKQHIPEIYNYLLLSYAEPTKLLYRSNELSSEAGCQQGDPLGPAIFSLAINPNIKNLNSKFNVWYLDDGNLGGDVDTVFSDLFSIKNKFEAIGLELNFSKCELFINNCDLNFNDVKQKFYILAPNIKIVNSNSLYLLGSPIFDESISEYINNSITKFQNSADRLLEISPHYALCILKFCHFVPKFTYVLRCCSFWNHPDLLTQVDDLIKISLESILNMQLDEQSWAQASLPIRYGGLGIRKISSVALPAFLSSVHSSANLISKILRASPSKFAIDGLEEARNAFLIACPGQNFPVSPNSQKSWDDINCKFTYDNLLNCSTGSARARLLVVGAHEAGYWLHAYPSSNIGTFLEPDTLRIATCLRLGVPVCTPHKCPCGSDVDKLGHHGLSCQKSAGRFSRHAALNDIIRRSLATVNVPSLLEPTGIARDVGKRPDGMSLIPWKMGRVLVWDATCSDTLAPSHLHGTNNRTGAACEAAEKVKACKYRGLGSEYDFVPFGVETLGPWGPSAIRLFKEIAKRLVDITGDRKAGSYLGQRISLAIQRGNAASIFGTLPKGTPFKNIF

SEQ ID NO: 17628 - protein, 952 aa, Cydia splendana
MHAATQSGDGTPYPNFNCVQCDNSFKTQRGLNIHISKKHRLCISQNDAGLNLGPSLLTTPLSDHPNSIPFHLHLSELKNNVPVIKRVPRGARITVAKHLSGLLTKCVENNQIDDWHNLFLFSFKTLHAKKDKTISLTQKIKNNCVSNTTPHISRPSGCSSSTFNRTKLIESKISDGDLKGAARLLFTNDVLSPDTPDTLSALRSKHPPAPSVPHSFAPPTADQACLQIEGKDVIDAIFSFKAGSAAGLDGISPQHLKDLISHSVGDAGEQLVCSLTKLINFMFSGKINTNIVPILYGANLIALTKKDGGVRPIAVGSTLRRLASKIAVRHIRSKLQSLFEPIQLGFGTKGGCEAAVHALRTYLSLDDCEIVVKIDVKNAFNSVSRDTLLTEVKDKIPELYNYLFFCYSDSSKLMYKSHELSSEVGCQQGDPLGPAIFSLAINPIIKNLKSKFNVWYLDDGTLGGDVNTVLSDLSFIKSSFENIGLELNFSKCELFIQKSSCTLTNLQPKFDDLTPNIKSVDKYSLCLLGSPIFEESFPDYISNSITKFKSHTDRLLEISPHYALVILKFCLFVPKFTYVLRCCPFWKHQNLLSPIDDLIKISLETILNIQLSEPSWSQASLPIRFGGLGIRKISSVASPAFLASTHSTSGLIGNILRALPTNCEIAGFEDAKNAFKIACPGNQFPDNPNSQRSWDNVYCDLTYNTLLNNCTGPDRARLLAVGAREAGYWLHAHPSPNTGTFLDPASLRLATGLRLGVSVCTPHICSCGTDVDRLGHHGLSCQKSAGRFSRHASLNDIVRRSLATINVPALLEPTGIIRDDGKRPDGVSLVPWSLGRMLVWDATCVDTLAPSHLQRTTVKAGGAAESAEILKRNKYKSLGREYHFVPFGVETLGPWGPKAHKLFAEIAKRLVDVTGDRRAGGYLAQRISIAIQRGNAASILSTMPQGPILDLS

SEQ ID NO: 17629 - protein, 953 aa, Melitaea cinxia
MQSVTQSCDGTSNTTHTCTQCNKKFKSLKGLKIHTTKTHRKCSQNSSPSDIHPIIPRAPTYVANDATSFHTYLSHLKNSIPIAKRIPRGARITVAKHLSQLIQKCYISNCTQDWQNLFLFSYSTLHIIKTDEPNLSLTQKIKNNCAVSSSPSPAPPIKHDAPRNRNKVIENKICEGDLKGAARLLFSNDVLSPDTPDTLQALRTKHPPAPVNPFFLDPPTARQECLQIQNKDVTGAILSFKPGSAAGLDGISPQHLKDLTSHSVGDAGEQLVNSITKLINFMYSGNVNPEIVPILFGANLIALTKKDGGVRPIAVGSTLRRLASKIAVRYILPKLNSEFEPVQLGFGVKGGCEAVVHALRSFLTYDRPDVLLKIDVKNAFNSVNRDTLLAEIKQYIPELYNYLLLSYADPTKLLYRSNELSSEVGCQQGDPLGPAIFILAINPIIKILNSKFNVWYLDDGTLGGDVDTVFSDLFLIKNKFEAIGLELNFSKCELFINNCDLNLNGVKQKFNILAPNIKIVNSNSLYLLGSPIFDECISEYINNSFTKFQNSVDRLLEISPHYALCILKYCLFVPKFTYALRCCSFWNHPDLLTQVDDLIKISLESILNMQLNEQSWTQASLPIRYGGLGIRKISSVALPSFLSSVHSSANLISKILRASPSNFEIAGLEEARNAFLIACPGQNFPVSPNSQRSWDDINCKLTYENLLSCSTGWARARLLAVGTHEAGYWLHAYPSTNTGTFLEPDTLRIATCLRLGVPVCAPHKCPCGSDVDKLGHHGLSCIKSAGRFSRHAALNDIIRRSLATVNVPSLLEPTGIARDDGKRPDGMSLIPWKMGRVLVWDATCSDTLAPSHLHGTNKSAGAACEAAEKTKADKYRGLGSEYDFVPFGVETLGPWGPSAITLFKEISKRLFDVTGDRRAGSYFGQRISIAIQRGNAASIFGTLPKGTPFNNIF

SEQ ID NO: 17630 - protein, 951 aa, Melitaea cinxia
MQSVTQSCDGTSKTTHTCTQCNKIFKSLKGLKIHTTKTHRECSQNSSPLDIHPTIPRAPTYVANDATPFHTYLSHLKNSIPIIKRIPRGARITVATHLSQLIQKCYISNCTQDWQNLFLFSYSTLNIIKTDEPNLSLTQKIKNNCAVSSSPSPAPPIKHDRNRNKIIEKKICDGDLKGAARLLFSNDVLSPDTPDTLQALRTKHPPAPVNPFFLDPPTAGQECLQIQKKDVTDAILSFKPGSAAGLDGISPQHLKDLTSHSVGDAGEQLVNSITKLINFMYSGNVNPEIVPIFFGANLIALTKKDGGVRPIAVGSTLRRLASKIAVRHILPKLNSEFEPVQLGFGVKGGCEAAVHALRSFLTYGQPDVLLKIDVKNAFNSVNRDTLLTEIKQHIPEVYNYLLLSYADPTKLLYRSNELSSEVGCQQGDPLGPAIFSLAINPIIKNLNSKFNVWYLDDGTLGGDVDTVFSDLFLIKNKFEAIGLELNFSKCELFINNCDLNLNDVKQKFNILAPNIKIVNSNSLYLLGSPIFDESIPEYINNSITKFQHSVDSLLEISPHYALCILKYCLFVPKFTYALRCCSFWNHPDLLTQVDDLIKISLESILNMQMNEQSWTQASLPIRYGGLGIRKISSVALPAFLSSVHSSANLISKILRASPSNFEIAGLEEARNAFLIACPGQNFPVSPNSQRSWDDINCKLTYDNLLSCSTGSARARLLAVGTQEAGYWLHAYPSTNTGTFLEPDTLRIATCLRLGVPVCAPHKCPCGSDVDKLGHHGLSCLKSAGRFSRHAALNDIIRRSLATVNVPSLLEPTGIARDDGKRPDGMSLIPWKMGRVLVWDATCSDTLAPSHLHGTNNRAGAACEAAEKTKVDKYRGLGSEYDFVPFGVETLGPWGPSAITLFKEIAKRLVDVTGDRRAGSYFGQRISLAIQRGNAASIFGTLPKGTPFNNIF

SEQ ID NO: 17631 - protein, 959 aa, Tinea trinotella
MQSVTQSCDGTSNAIHTCSQCSKSFKSLKGLNIHTTKIHRKCSSQNCSPIDIHPIIPSAPTYVANNSTPFHKYLSNLKNSIPVVKRIPRGARITVATHLSKLIQKCYISNCTQDWQNLFLFSYNTLHIIKTNEPNLSLTQKIKNNCAVSSLPSPAPLAITRSIKHDAPRNRNKLIENKISDGDLKGAARLLFSNDVLSPDTPDTLQALRTKHPPAPLNPYFLDPPTAGQACLQIQNKDVTDAILSFKPGSAAGLDGISPQHLKDLTSHSVGDAGEQLVNSITKLINFMYSGNVNPEIVPILFGANLIALTKKDGGVRPIAVGSTLRRLASKIAVRHILPKLNSEFEPVQLGFGVKGGCEAAVHALRSFLTYGKPDVLLKIDVKNAFNSVNRDTLLTEIKQHIPEIYNYLLLSYADPTKLLYRSNELSSEVGCQQGDPLGPAIFSLAINPIIKNLNSNFNVWYLDDGTLGGDVNTVFSDLFLIKSKFEAIGLELNFSKCELFINNCALNLNDVKQKFNILAPNIKIVNSNSLYLLGSPIFDESISEYIKNSINKFQNSADRLLEISPHYALCILKFCLFVPKFTYVLRCCSFWNYPDLLKHVDNLIKNSLESILNMQLNEQSWTQASLPIRYGGLGIRKISSVALPAFLSSVHSSANLIGKILRATPSNFEIAALEEARNAFLIACPGQNFSISPNSQRSWDDINCKLTYDNLLSSSTGSARARLLAVGTHEAGYWLHAYPSSNTGTFLEPDTLRIATCLRLGVPVCAPHKCPCGSDVDKLGHHGLSCQKSAGRFSRHAALNDIIRRSLASVNVPSLLEPTGIARDDGKRPDGMSLIPWKMGRVLVWDATCSDTLAPSHLHGTNSRAGAACEAAEKAKACKYRGLGSEYDFVPFGVETLGPWGPSALRLFKEISKRLVDITGDRRVGSYLGQRISLAIQRGNAASIFGTLPKGTPFNNVF

SEQ ID NO: 17632 - protein, 954 aa, Clostera curtula
MQSGTQSCDGTSNAIHTCTQCNKSFKSLKGLNIHTTKTHRKCNSQISTPLDIHPIIPSDPAYVANDPTPFHTYLSHLKNSIPIVKRIPRGARITVATHLAQLIQKCYLNNCAQDWMNLFLFSYSTLHIIKTDEPNLSLTQKIKNNCAVSSSPSPAPIFKHDAPHNRKKLIENKICDGDLKGAARLLFSNDVLSPDTPDTLQALRTKHPPAPVTPYFLDPPTAGQACLQIQNKDVTDAILSFKPGSAAGLDGISPQHLKDLTSHSVGDAGEQLVNSITKLVNFMYSGNVNPEIVPILFGANLIALTKKDGGVRPIAVGSTLRRLASKIAIRHILPKLNSEFEPVQLGFGVKGGCEAAVHALRSFLTYGQPDVLLKIDVKNAFNSVNRDTLLTEIKQHIPEIYNYLLLSYAEPTKLLYRSNELSSEVGCQQGDPLGPAIFSLAINPIIKKLNSKFNVWYLDDGTLGGDVDTVLSDLFIIKNKFEAIGLELNFSKCELFINNCDLNLNDVKLKFNILAPNIKIVNSNSLYLLGSPIFDESFAEYINNSITKFQNSADRLIEISPHYALCILKFCLFVPKFTYVLRCCSFWNRRDLLTQVDDLIKISLESVLNMQLNEHSWTQASLPIRYGGLGIRKISSVALPAFLSSVHSSASLISTILRASPSNFEIAGLEEARNAFLIACPGQNFPSSPNSQRSWDDINCKLSYDNLLSCSTGSTRARLLAVGTHEAGYWLHAYPSSKTGTFLEPDTLRIATCLRLGVPVCAHHKCPCGSDVDKLGHHGLSCQKSAGRFSRHAALNDIIRRSLTSVNVPSLLEPTGIARDDGKRPDGMSLIPWKMGRVLVWDATCSDTLAPSHLHGTNNRAGAACEAAEKAKAYKYRGLGSEYEFVPFGVETLGPWGPSAISLFKEIAKRLVDITGDRRAGSYLGQRISLAIQRGNAASIFGTLPKGTPLNNIF

SEQ ID NO: 17633 - protein, 954 aa, Clostera curtula
MQSGTQSCDGTSNAIHTCTQCNKSFKSLKGLNIHTTKTHRKCNSQISTPLDIHPIIPSAPAYVANDPTPFHTYLSHLKNSIPIVKRIPRGARITVATHLAQLIQKCYLNNCAQDWMNLFLFSYSTLHIIKTDEPNLSLTQKIKNNCAVSSSPSPAPIFKHDAPHNRKKLIENKICDGDLKGAARLLFSNDVLSPDTPDTLQALRTKHPPAPATPYFLDPPTAGQACLQIQNKDVTDAILSFKPGSAAGLDGISPQHLKDLTSHSVGDAGEQLVNSITKLINFMYSGNVNPEIVPILFGANLIALTKKDGGVRPIAVGSTLRRLASKIAIRHILPKLNSEFEPVQLGFGVKGGCEAAVHALRSFLTYGQPDVLLKIDVKNAFNSVNRDTLLTEIKQHIPEIYNYLLLSYAEPTKLLYRSNELSSEVGCQQGDPLGPAIFSLAINPIIKKLNSKFNVWYLDDGTLGGDVDTVLSDLFIIKNKFEAIGLELNFSKCELFINNCDLNLNDVKLKFNILAPNIKIVTSNSLYLLGAPIFDESFAEYINNSITKFQNSADRLIEISPHYALCILKFCLFVPKFTYVLRCCSFWNRPDLLTQVDDLIKISLESVLNMQLNEHSWTQASLPIRYGGLGIRKISSVALPAFLSSVHSSASLISTILRASPSNFEIAGLEEARNAFLIACPGQNFPSSPNSQRSWDDINCKLSYDNLLSCSTGSARARLLAVGAHEAGYWLHAYPSSKTGTFLEPDTLRIATCLRLGVPVCAPHKCPCGSDVDKLGHHGLSCQKSAGRFSRHAALNDIIRRSLTSVNVPSLLEPTGIARDDGKRPDGMSLIPWKMGRVLVWDATCSDTLAPSHLHGTNNRAGAACEAAEKAKAHKYRGLGSEYEFVPFGVETLGPWGPSAISLFKEIAKRLVDITGDRRAGSYLGQRISLAIQRGNAASIFGTLPKGTPLNNIF

SEQ ID NO: 17634 - protein, 954 aa, Cosmia trapezina
MQSVTQSCDGTSNATHTCTQCNKSFKSLKGLNIHTTKTHRKCISQNSSPLDIHPIIPSAPTYVASDPTPFHIYLSHLKNSIPIVKRIPRGARITVATHLSQLIQKCYIRNCTQDWQNLFLFSYSTLHIIKTDEPYLSLTQKIKNNCAVSSSPSPAPPIKHDAPRNRNKLIENKICDGDLKGAARLLFSNDVLSPDTPDTLQALQTKHPPAPVNPYFLDPPTAGQACLQIQNKDVTAAFLSFKPGSAAGLDGISPQHLKDLTSHSVGDAGEQLVNSITKLINFMYSGNVNPEIVPILFGANLIALTKKDGGVRPIAVGSTLRRLASKIAVRHILPKLNSEFEPVQLGFGVKGGCEASVHALRSFLTYGQPDVLLKIDVKNAFNSVNGDTLLTEIKQHIPEIYNYLLLSYADPTKLLYRSNELSSEVGCQQGDPLGPAIFSLAINPIIKNLNSKFNVWYLDDGTLGGDVDTVFSDLFLIKNKFEAIGLELNFSKCELFINNCNLNLNDVKQKFNILAPNIKIVNSNSLYLLGSPIFDESISEYFNNSITKFQNSADRLLEISPHYALCILKFCLFVPKFTYVLRCCSFWNHPDLLTQVDDLIKISLESILNMQLNEQSWTQASLPIRYGGLGIRKISSVALPAFLSSVHSSANVISKILRASPSNFEIAGLEEARNAFLIACPGQNFPVYSNSQRSWDDIICKLTHDNLLSCSTGSARARLLAVGAHEAGYWLHAYPSSNTGTFLEPDTLRIATCLRLGVPVCAPHKCPCGSDVDRLGHHGLSCQKSAGRFSRHAALNDIIRRSLATVNVPSLLEPTGIARDDGKRPDGMSLIPWKMGRVLVWDATCSDTLAPSHLHGTSIRAGAACEAAEKGKVSKYRGLGSEYDFVPFGVETLGPWGPTAIRLFNEIMKRLVDVTGDRRAGSYLGQRISLAIQRGNAASIFGTLPKGTPFNNIF

SEQ ID NO: 17635 - protein, 953 aa, Notocelia uddmanniana
MHAATQSDDGTSNLNFICVQCDNSFKTQRGLNIHISKKHRLCLSQNGPALNLDPAFIPAPLSDKPNSIPFHLYLSDLKNNVPVVKRVLRGARISVANHLSGLITKCVENNQIDDWHNLLLFSFNTLHAKNDEAISLTQKIKNNCVSNTTPHFSRPPKRCASSTFNKTKLIECKISDGDLKGAARLLFTNDVLSPDTPDTLLALRSKHPSASVIPYVIDPPTADQACLQIEGKDVIDAIISFKTGSAAGLDGISPQHLKDLISQSVGDAGEQLICSLTKLINFMFSGKINNEVVPLLYGANLIALTKKDGGVRPIAVGSTLRRLASKIAVRHIRSKLQSLFEPVLLDFGTKGGCEAAVHALRTYLSYDDCEIVVKIDVKNAFNSVNKDTLLAEVKDKIPEIYNYLLLCYADPSKLMYKSHELSSEVGCQQGDPLGPAIFSLAINPIVQKLKSKFNVWYLDDGTLGGDVDTVLSDLAFIKTNFENIGLELNFSKCELFIQKTSCSLVDLIQKFVHLAPGIRIVDKFSLCLLGSPIFEESFPGYISDTISKFQSHANRLLEISPHYALIILKFCLFVPKFTYVLRCCPFWKHQNLLSRMDDLIKTSLEMILNIQLTELSWSQASRPIRYGGLGIRKVSSVASPAFLASTHSTSGLIGNILRALPTYCEIAGLEGAKNAFKVACPAKKFPDNPKSQRSWDNIYCDLNYNILLNSSAGPDRARLLAVGTREAGYWLHAHPSPNTGTFLDPTSLRLATELRLGVAICTPHICSCGTDVDRLGHHGLCCQKSAGRFSRHATLNDIIRRSLATVNVPALLEPTGMVRDDGKRPDGVSLVPWSVGRMLVWDATCVDTLAPSHLQRTTVKAGAAAENAEILKRNKYKGLGREYMFVPFGVKTLGPWGPSAHKLFAEIAKRLVDVTGDRRAGGFLAQRISIAIQRGNAASILGTMPQGPVLDLS

SEQ ID NO: 17636 - protein, 673 aa, Thymelicus sylvestris
MYSGNVNPEIVPILFGANLIALTKKDGGVRPIAVGSTLRRLASKIAVRHILPKLNSEFEPVQLGFGVKGGCEAAVHALRSFLTYGKPDVLLKIDVKNAFNSVNRDTLLTEIKQHIPEIYNYLLLSYADPTKLLYRSNELSSEVGCQQGDPLGPAIFSLAINPVIKNLNSKFNVWYLDDGTLGGDVDTVFSDLFLIKNKFEAIGLELNFSKCELFVNNCDSNLNDIKQKFNILAPNIKIVNSNSLNLLGSPIFDEAISEYVNNSITKFQNSADRLLEISPHYALCILKFCLFVPKFTYVLRCCSFWNHPDLLTQLDDLIKISLESILNMQLNEQSWTQASLPIRYGGLGIRKISSVALPAFLSSVHSSANLISKILRASPSNFEIAGLEEARKAFIIACPGQNFPVSPNSQRSWDDINSKLTYENLLSCSTGSARARLLAVGAHEAGYWLHAYPSSNTGTFLEPDTLRIATCLRLGVPVCAPHKCPCGSDVDKLGHHGLSCQKSAGRFSRHAALNDIIRRSLATVNVPSILEPSGIARDDGKRPDGMSLIPWKMGRVLVWDATCSDTLAPSHLHGTNIRVGAACEAAEKVKACKYRGLGSEYDFVPFGVETLGPWGPSALRLFKEISKRLVDITGDRRAGSYLGQRISLAIQRGNAASIFGTLPKGTPFNNNIF

SEQ ID NO: 17637 - protein, 954 aa, Pyrgus malvae
MQSVTQSCDGTSNATHTCTQCNKSFKSLRGLNIHTTKTHRKCFSQNISPLDIHHIIPSAPTYVANDQTPFHIYLSHLKNSIPIVKRIPRGARITVATHLSQLIHKCYLSNCTLDWQNLFLFSYSTLHIIKTDEPNLSLTQKIKNNCAVNSSPSPATIIKHNSPRNRNKLIENKICDGDLKGAARLLFSNDVLSPDTPDTLQALQTKHPPAPVNPYFLDPPTAGQACLQIQNKDVRDAILSFKPGSAAGLDGISPQHLKDLISHSVGDAGEQLLNSITKLINFMYSGNVNPEIVPILFGANLIALTKKDGGVRPIAVGSTLRRLASKIAVRHILPKLNSVFEPVQLGFGVKGGCEAAVHALRSFLTYEQPDILLKIDVKNAFNSINRDTLLTEIKQHIPEIYNYLLLSYADPTKLLYRSNELSSEVGCQQGDPLGPAIFSLAINPIIKNLNSKFNVWYLDDGTLGGDLDTVFPDLFLIKNKFEAIGLELNFSKCELFVNNCNLNLNDIKQKFNILAPNIKIVNNSSLYLLGSPIFDESISEYINNSITKFQNSADRLLEISPHYALCILKFCLFLPKFTYVLRCCSFWNHPDLLTQVDDLIKISLEAILNMQLNEQSWTQASLPIRYGGLGIRKISSVALPAFLSSVHSSANLISKILRAPPSNFEIAGLEEARNAFLIACPGQNLPFSPISQRSWDDIYCKLTYDNLLSCSTDSARARLLAVGAHEAGYWLHAYPSSNTGTFLEPDTLRIATCLRLGVPVCAPHKCPCGSDVDKLGHHGLSCQKSAGRFSRHAALNDIIHRSLATVNVPSLREPTGIARDDGKRPDGMSLIPWKMGRVLVWDATCSDTLAPSHLHGTNIRAGAACEAAEKAKACKYRGLGTEYDFVPFGVETLGPWGPSALRLFKEMTKRLVDVTGDRRAGSYLGQRISLAIQRGNAASIFGTLPKGTPFNTIF

SEQ ID NO: 17638 - protein, 952 aa, Cydia splendana
MHAATQSGDGTPYPNFNCVQCDNSFKTQRGLNIHISKKHRLCISQNDAGLNLGPSLLTTPLSDHPNSIPFHLHLSELKNNVPVIKRVPRGARITVAKHLSGLLTKCVENNQIDDWHNLFLFSFKTLHAKKDKTISLTQKIKNNCVSNTTPHISRPSGCSSSTFNRTKLIESKISDGDLKGAARLLFTNDVLSPDTPDTLSALRSKHPPAPSVPHSFAPPTADQACLQIEGKDVIDAIFSFKAGSAAGLDGISPQHLKDLISHSVGDAGEQLVCSLTKLINFMFSGKINTNIVPILYGANLIALTKKDGGVRPIAVGSTLRRLASKIAVRHIRSKLQSLFEPIQLGFGTKGGCEAAVHALRTYLSLDDCEIVVKIDVKNAFNSVSRDTLLTEVKDKIPELYNYLFFCYSDSSKLMYKSHELSSEVGCQQGDPLGPAIFSLAINPIIKNLKSKFNVWYLDDGTLGGDVSTVLSDLSFIKSSFENIGLELNFSKCELFIQKSSCTLTNLQPKFDDLTPNIKSVDKYSLCLLGSPIFEESFPDYISNSITKFKSHTDRLLEISPHYALVILKFCLFVPKFTYVLRCCPFWKHQNLLSPIDDLIKISLETILNIQLSEPSWSQASLPIRFGGLGIRKISSVASPAFLASTHSTSGLIGNILRALPTNCEIAGFEDAKNAFKIACPGKQFPDNPNSQRSWDNVYCDLTYNTLLNNCTGPDRARLLAVGAREAGYWLHAHPSPNTGTFLDPASLRLATGLRLGVSVCTPHICSCGTDVDRLGHHGLSCQKSAGRFSRHASLNDIVRRSLATINVPALLEPTGIIRDDGKRPDGVSLVPWSLGRMLVWDATCVDTLAPSHLQRTTVKAGGAAESAEILKRNKYKSLGREYHFVPFGVETLGPWGPSAHKLFAEIAKRLVDVTGDRRAGGYLAQRISIAIQRGNAASILGTMPQGPILDLS

SEQ ID NO: 17639 - protein, 959 aa, Tinea trinotella
MQSVTQSCDGTSNATHTCSQCSKSFKSLKGLNIHTTKIHRKCFSQNSSPIDIHPIIPSAPTYVANNSTPFHKYLSNLKNSIPVVKRIPRGARITVATHLSKLIQKCYISNCTQDWQNLFLFSYNTLHIIKTNEPNLSLTQKIKNNCAVSSLPSPAPLAITRSIKHDAPRNRNKLIENKISDGDLKGAARLLFSNDVLSPDTPDTLQALRTKHPPAPLNPYFLDPPTAGQACLQIQNKDVTDAILSFKPGSAAGLDGISPQHLKDLTSHSVGDAGEQLVNSITKLINFMYSGNVNPEIVPILFGANLIALTKKDGGVRPIAVGSTLRRLASKIAVRHILPKLNSEFEPVQLGFGVKGGCEAAVHALRSFLTYGQPDVLLKIDVKNAFNSVNRDTLLTEIKQHIPEIYNYLLLSYADPTKLLYRSNELSSEVGCQQGDPLGPAIFSLAINPIIKNLNSNFNVWYLDDGTLGGDVNTVFSDLFLIKSKFEAIGLELNFSKCELFINNCALNLNDVKQKFNILAPNIKIVNSNSLYLLGSPIFDESISEYIKNSITKFQNSADRLLEISPHYALCILKFCLFVPKFTYVLRCCSFWNYPDLLKHVDNLIKNSLESILNMQLNEQSWTQASLPIRYGGLGIRKISSVALPAFLSSVHSSANLIGKILRATPSNFEIAALEEARNAFLIACPGQNFSISPNSQRSWDDINCKLTYDNLLSSSTGSARARLLAVGTHEAGYWLHAYPSSNTGTFLEPDTLRIATCLRLGVPVCAPHKCPCGSDVDKLGHHGLSCQKSAGRFSRHAALNDIIRRSLASVNVPSLLEPTGIARDDGKRPDGMSLIPWKMGRVLVWDATCLDTLAPSHLHGTNSRAGAACEAAEKAKACKYRGLGSEYDFVPFGVETLGPWGPSALRLFKEISKRLVDITGDRRVGSYLGQRISLAIQRGNAASIFGTLPKGTPFNNVF

SEQ ID NO: 17640 - protein, 959 aa, Tinea trinotella
MQSVTQSCDGTSNAIHTCSQCSKSFKSLKGLNIHTTKIHRKCSSQNCSPIDIHPIIPSAPTYVANNSTPFHKYLSNLKNSIPVVKRIPRGARITVATHLSKLIQKCYISNCTQDWQNLFLFSYNTLHIIKTNEPNLSLTQKIKNNCAVSSLPSPAPLAITRSIKHDAPRNRNKLIENKISDGDLKGAARLLFSNDVLSPDTPDTLQALRTKHPPAPLNPYFLDPPTAGQACLQIQNKDVTDAILSFKPGSAAGLDGISPQHLKDLTSHSVGDAGEQLVNSITKLINFMYSGNVNPEIVPILFGANLIALTKKDGGVRPIAVGSTLRRLASKIAVRHILPKLNSEFEPVQLGFGVKGGCEAAVHALRSFLTYGKPDVLLKIDVKNAFNSVNRDTLLTEIKQHIPEIYNYLLLSYADPTKLLYRSNELSSEVGCQQGDPLGPAIFSLAINPIIKNLNSNFNVWYLDDGTLGGDVNTVFSDLFLIKSKFEAIGLELNFSKCELFINNCALNLNDVKQKFNILAPNIKIVNSNSLYLLGSPIFDESISEYIKNSITKFQNSADRLLEISPHYALCILKFCLFVPKFTYVLRCCSFWNYPDLLKHVDNLIKNSLESILNMQLNEQSWTQASLPIRYGGLGIRKISSVALPAFLSSVHSSANLIGKILRATPSNFEIAALEEARNAFLIACPGQNFSISPNSQRSWDDINCKLTYDNLLSSSTGSARARLLAVGTHEAGYWLHAYPSSNTGTFLEPDTLRIATCLRLGVPVCAPHKCPCGSDVDKLGHHGLSCQKSAGRFSRHAALNDIIRRSLASVNVPSLLEPTGIARDDGKRPDGMSLIPWKMGRVLVWDATCSDTLAPSHLHGTNSRAGAACEAAEKAKACKYRGLGSEYDFVPFGVETLGPWGPSALRLFKEISKRLVDITGDRRVGSYLGQRISLAIQRGNAASIFGTLPKGTPFNNVF

SEQ ID NO: 17641 - protein, 954 aa, Anthocharis cardamines
MQSVTQSCVSTSNATHTCIQCNKSFKSLKGLNIHTTKTHRKCFSQNSSPLDIHPIIPNAPTYVANDSTPFHTYLSHLKNSTPIVKRIPRGARITVATHLSQLIQKCYISNCTQDWQNLFLFSYSTLHIIKTDEPNLSLTQKIKNNCAVSSSPSPAPLIKHDAPHNRNKLIENKICDGDLKGAARLLFSNDVLSPDTPDTLQALRTKHPPAPVNPYFLDPPTAGQACLQIQKKDVTNAILSFKPGSAAGLDGISPQHLKDLTSHSVGDAGEQLVNSITKLINFMFSGNVNPEIVPILFGANLIALTKKDGGVRPIAVGSTLRRLASKIAVRHILPKLNSEFEPVQLGFGVKGGCEAAVHALRSFLTYGQPDVLLKIDVKNAFNSVNRDTLLTEIKQHIPEIYNYLLLSYADPTKLLYRSNELSSEVGCQQGDPLGPAIFSLAINPIIKNLNSKFNVWYLDDGTLGGDVDTVFSDLLLIKNKFEAIGLELNFSKCELFINNCDLNLTDVKQKFNILAPNIKIVNSNSLYLLGSPIFDESFSEYIDISITKFKNSADRLLEISPHYALCILKFCLFVPKFTYVLRCCSFWNHPDLLSQVDDLFKISLESILNMQLNEQSWTQASLPIRYGGLGIRKISSVALPAFLSSVHSSANLISKILRESPSNFEIAGLEEARNAFLIACPGQNFPVSPNSQRSWDDINCKLSYENLLSCSTGSARARLLAVGAHEAGYWLHAYPSSNTGTFLEPDTLRIAACLRLGVPVCIPHKCPCGSDVDKLGHHGLSCLKSAGRFSRHAALNDIIRRSLATVNVPSLLEPTGIARDDGKRPDGMSLIPWKMGRVLVWDATCSDTLAPSHLHGTNNRVGAACEAAEKAKTCKYRGLGSEYDFVPFGVETLGPWGPSAIKLFKEIAKRLVDITGDRRAGSYLGQRISLAIQRGNAASIFGTLPKGTPFINIF

SEQ ID NO: 17642 - protein, 954 aa, Cosmia trapezina
MQSVTQSCDGTSNATHTCTQCNKSFKSLKGLNIHTTKTHRKCISQNSSPLDIHPIIPSAPTYVASDPTPFHIYLSHLKNSIPIVKRIPRGARITVATHLSQLIQKCYISNCTQDWQNIFLFSYSTLHIIKTDEPYLSLTQKIKNNCAVSSSPSPAPPIKHDAPRNRNKLIENKICDGDLKGAARLLFSNDVLSPDTPDTLQALQTKHPPAPVNPYFLDPPTAGQACLQIQNKDVTAAILSFKPGSAAGLDGISPQHLKDLTSHSVGDAGEQLVNSITKLINFMYSGNVNPEIVPILFGANLIALTKKDGGVRPIAVGSTLRRLASKIAVRHILPKLNSEFEPVQLGFGVKGGCEASVHALRSFLTYGHPDVLLKIDVKNAFNSINRDTLLTEIKQHIPEIYNYLLLSYADPTKFLYRSNELSSEVGCQQGDPLGPAIFSLAINPIIKNLNSKFNVWYLDDGTLGGDVDTVFSDLFLIKNKFEAIGLELNFSKCELFINNCNLNLNDVKQKFNILAPNIKIVNSNSLYLLGSPIFDESISEYFNNSITKFQNSADRLLEISPHYALCILKFCLFVPKFTYVLRCCSFWNHPDLLTQVDDLIKISLESILNMQLNEQSWTQASLPIRYGGLGIRKISSVALPAFLSSVHSSANLISKILRASPSNFEIAGLEEARNAFLIACPGQNFPVSSNSQRSWDDIICKLTHDNLLSCSTGSARARLLAVGAHEAGYWLHAYPSSNTGTFLEPDTLRIATCLRLGVPVCAPHKCPCGSDVDRLGHHGLSCQKSAGRFSRHAALNDIIRRSLATVNVPSLLEPTGIARDDGKRPDGMSLIPWKMGRVLVWDATCSDTLAPSHLHGTSIRAGAACEAAEKGKVSKYRGLGSEYDFVPFGVETLGPWGPTAIRLFKEITKRLVDVTGDRRAGSYLGQRISLAIQRGNAASIFGTLPKGTPFNNIF

SEQ ID NO: 17643 - protein, 954 aa, Zeuzera pyrina
MQSVTQSCDGKSNATHICTQCNKSFKSSKGLNIHTTKTHRKCISQNSSPLDIHPIIPSAPTYVANDPTPFHTYLSHLKNSIPIVKRIPRGARITVATHLSQLIQKCYISNCTQDWQNLFLFSYSTLHILKTNEPNLSLTQKIKNNCAVSSSPSPKPLIKHDAPRNRNKLIEFKICDGDLKGAARLLFSNDVLSPDTSDTLQALRTKHPPAPVNPYSLDPPKAGQACLQIQNKDVTNAISSFKPGSAAGLDGISPQHLKDLTSHSVGDAGEKLVNSITKLINFMYSGNVNPEIVPILFGANLIALTKKDGGVRPIAVGSTLQRLASKIAVRHILPKLNSEFEPVQLGFGVKGGCEAAVHALRSFLTYGQPDVLLKIDVKNAFNSVNRDTLLKEIKQHIPEIYNYLLLSYAEPTKLLYRSNELSSEAGCQQGDPLGPAIFSLAINPIIKNLNSKFNVWYLDDGNLGGDVDTVFSDLFSIKNKFEAIGLELNFSKCELFINNCDLNLNDVKQKFNILAPNIKIVNSNSLYLLGSPIFHESISEYINNSITKFQNSADRLLEISPHYALCILKFCHFVPKFTYVLRCCSFWNHPDLLTQVDDLIKISLESILNMQLDEQSWAQASLPIRYGGLGIRKISSVALPAFLSSAYSSANLISKILRASPSKFAIVGLEEARNAFLIACPGQNFPVSPNSQKSWDDINCKFTYDNLLNCSTGSARARLLAVGAHEAGYWLHAYPSSNIGTFLEPDTLRIATCLRLGVPVCTPHKCPCGSDVDKLGHHGLSCQKSAGRFSRHAALNDIIRRSLATVNVPSLLEPTGIARDDGKRPDGMSLIPWKMGRVLVWDATCSDTLAPSHLHGTNNRTGAACEAAEKVKACKYRGLGSEYDFVPFGVETLGPWGPSAIRLFKEIAKRLVDITGDRKAGSYLGQRISLAIQRGNAASIFGTLAKGTPFKNIF

SEQ ID NO: 17644 - protein, 948 aa, Thymelicus sylvestris
MQSVTQSCDGTSNATHTCTQCNRSFKSLKGLNIHITKTHRKCISQNHPIIPSATYVANNPTPFHTYLSHLKNSLPIVKRIPRGARITVATHLSKLIQKCYISNCTQDWQNLFLFSYNTLHIIKTDEPNLSLTQKIKNNCAVSSSPSPAPLIKHDAPRNRNKLIENKICDGDLKGAARLLFSNDVLSPDTPDTLQALRTKHPPAPVNPYFLDPPTAGQACLQIQNKDVTDAILSFKPGSAAGLDGISPQHLKDLTSHSVGDAGEQLVNSITKLINFMYSGNVNPEIVPILFGANLIALTKKDGGVRPIAVGSTLRRLASKIAVRHILPKLNSEFEPVQLGFGVKGGCEAAVHALRSFLTYGKPDVLLKIDVKNAFNSVNRDTLLTEIKQHIPEIYNYLLLSYADPTKLLYRSNELSSEVGCQQGDPLGPAIFSLAINPVIKNLNSKFNVWYLDDGTLGGDVDTVFSDLFLIKNKFEAIGLELNFSKCELFVNNCDSNLNDIKQKFNILAPNIKIVNSNSLYLLGSPIFDEAISEYVNNSITKFQNSADRLLEISPHYALCILKFCLFVPKFTYVLRCCSFWNHPDLLTQLDDLIKISLESILNMQLNEQSWTQASLPIRYGGLGIRKISSVALPAFLSSVHSSANLISKILRASPSNFEIAGLEEARKAFIIACPGQNFPVSPNSQRSWDDINSKLTYENLLSCSTGSARARLLAVGAHEAGYWLHAYPSSNTGTFLEPDTLRIATCLRLGVPVCAPHKCPCGSDVDKLGHHGLSCQKSAGRFSRHAALNDIIRRSLATVNVPSILEPSGIARDDGKRPDGMSLIPWKMGRVLVWDATCSDTLAPSHLHGTNIRVGAACEAAEKVKACKYRGLGSEYDFVPFGVETLGPWGPSALRLFKEISKRLVDITGDRRAGSYLGQRISLAIQRGNAASIFGTLPKGTPFNNNIF

SEQ ID NO: 17645 - protein, 950 aa, Atrophaneura dixoni
MQSVTQSSDDTANATLICTQCNKSFKSLKGLNIHTTKTHRKCISQNSSPLDIHPFIPNTPTFAANFPTPFHTYLSHLKNSIQTVKRIPRGARITVATHLSQLIQKCYISNCTQDWQNLFLFSYSTLHITKTDKPNLSLTQKIKNNCTVSSSPSPAPLIKHDAPRNRNKLIENKICDGDLKGAARLLFSNEVLSPDTPDTLQALRSKHPLAPVNPYFFDRPTVGQACLQIQNKDVTDAILSFKPGSAAGLDGISPQHLKDLTSHSVGDAGEQLVNSITKLINFMYSGNVNPEIVPILFGANLIALTKKDGGVRPIAVGSTLRRLASKIAVRHILQKLNSEFEPVQLGFGVKGGCEAAVHALRSFLTYGHPDVLLKIDVKNAFNSVNRGTLLTEINQHIPEIYNYLLLSYADPTKLLYRSNELSSEVGCQQGDPLGPAIFSLAINPIIKSLNSKFNIWYLDDGTLGGDMETVFSDLFSIKNKFEAIGLELNFSKCELFINNCNLNLNDVKHKFNTLAPNIKIVNSNSLYLLGSPIFSASISEYINNSIAKFQNSADSLLEISPHYALCILKSCLFVPKFTYVLRCCSFWNHPDLLTQVDNLIKISLESILNIHMNEQSWTQASLPIRYGGLGIRKISSVSLPAFLSSVHSSANLISKILRASPSNFEIAGLEEARNAFLITCPGQNFQFPLNSQRSWDDINCKLTYDNLLSFSTGSARARLLAVGTHEAGYWLHAYPSSNTGTFLEPDTLRIATCLRLGVPVCAPHKCPCGSDVDKLGYHGLSCQKSAGRFSRHAALNDIIRRSLATVNVPSLLEPSGIARDDGKRPDGMSLIPWRMGRVLVWDATCSDTLAPSHLRGTNNRAGAACEAAEKAKVCKYRGLGSEYIFVPFGVETLGPWGPSAISLFKEIAKRLIDVTGDRRAGSYLGQRISLAIQRGNAASIFGTLPKGPLF

SEQ ID NO: 17646 - protein, 954 aa, Aeromachus stigmata
MQSVTQSCDGTSNANHSCTQCNKSFKSLKGLNIHTTKTHRKCISQNSSPLDIHPIIPSAPTHVANDPTPFHTHLSHLKNSIPVVKRIPRGARITVASHLSQLIQKCYISNCTQDWQNLFLFSYSTLHIIKTNEPNVSLTQKIKNNCDVSSSPSPAHLIKHDAPRNRNKLIENKICDGDLKGAARLLFSNDVLSPDTPDTLQALRTKHPPAPVNPYFLDPPTSVQACLQIQNKDVTDAILSFKPGSAAGLDGISPQHLKDLTSHSVGDAGKQLVNSITKLINFMYSGNVNPEIIPILFGANLIALTKKDGGVRPIAVGSTLRRLASKIAVRHILPKLNSEFEPVQLGFGVKGGCEAAVHALRSFLTYGQPDVLLKIDVKNAFNSVNRDTLLTEIKQHIPEIYNYLLLSYADPTKLLYRSNELSSEVGCQQGDPLGPAIFSLAINPIIKNLNSKFNVWYLDDGTLGGDVDTVFSDLFFIKNKFEAIGLELNFSKCELFINNCDLNLNDVKQKFNILAPNIKIVNSNSLYLLGSPIFDESISEYINNSITKFQNSADRLFEISPHYALCILKFCLFVPKFTYVLRCCSFWNHPDLLAQVDDLMKINIESILNMQLNEQSWTQASLPIRYGGLGIRKISSVALPAFLSSVHSSVNLISKILRASPSNFEIAGLEEARNAFLIACPGQNFPVSPNSQRSWDDINCKLTYENLLSRSTGSARARLLAVGTHEAGHWLHAYPSSNTGTFLEPDTLRIATCLRLGVPVCVPHQCPCGSDVDRLGHHGLSCQKSAGRFSRHAALNDIMRRSLATINVPSLLEPTGIARGDGKRPDGMSLIPWKMGRVLVWDATCSDTLAPSHLHGTNNRAGAACEAAEKAKANKYRGLGSEYVFVPFGVETLGPWGPGAKSLFKEIAKRLVGITGDRRAGSYLGQRISLAIQRGNAASIFGTLPKGTPFSNIF

SEQ ID NO: 17647 - protein, 969 aa, Leucinodes orbonalis
MQSVTQSCDGTSNSHTCTQCKKTFQSLRGLNIHITKIHRKCISQNSSPIDIHPITSETTYEPNDRTPFLTYLSHLKNSLPLVKRIPRGARITVATHLYQLVQKCYISNRTQDWQNLFLFSYRSLHVTKTDISNLSLTQKIKNNCVVSCPPTPAPLNNYVAPHNTKKLIENKISDGDLKGAARLLFSNDVLSPDTPDTLQALRMKHPPAPLNPYFLDPPTARQACLQIQNKDVMDGLSSFKPGSAAGLDGISPQHLKDLTSHSVGDAGEQLVNSITKLINFMYSGNVNPEIVPILFGANLIALTKKDGGVRPIAVGSTLRRLASKIAVRHILPKLNSEFEPVQLGFGIKGGCEAAVHALRSFLTYGQPDVLLKIDVKNAFNSVNRDTLLTEIKKHIPEIYNYLLLSYADPTKLLYRSNELSSEVGCQQGDPLGPAIFSLAINPIIKNLNSKFNVWYLDDGIIGGDMDTAFSDLSLIKNKFEAIGLELNLSKCELFINNSNLNLNNVKQKFNTLAPNIKIVNRNSLYLLGSPIFDISASEYINNSISKFKNSADRLLEISPHYALCILKYCLFVPKFTYVLRCCSFWNHPDLLTQVDGLVKISLESIFNMQLNEQSWIQATLPIRYGGLGIRKISSIALPAFLSSVHSTGNLISKILRAFPSNFEIAGLEEARNAFSNACPGQNFPDSPNSQRSWDDKICKLTYDSLLSSSSGSERARLLALGAREAGYWLHAYPSSNTGTFLEPDTLRIVTCLRLGVPVCAPHTCPCGSDVDKLGHHGLSCQKSAGRFSRHAALNDIIRRSLATVNVPSLLEPSGIARDDGKRPDGMSLIPWKLGRVLVWDATCSDTLAPSHLHGTNNRAGAACEAAEKAKTCKYRGLGSEYDFVPFGVETLGPWGPSAIRLFKEISKRLVDITGDRRSGSYLGQRISLAIQRGNAASVFGTLPKGVLLIILFSYYIIFFFNILVIIFNF

SEQ ID NO: 17648 - protein, 671 aa, Cydia splendana
MFSGKINTNIVPILYGANLIALTKKDGGVRPIAVGSTLRRLASKIAVRHIRSKLQSLFEPIQLGFGTKGGCEAAVHALRTYLSLDDCEIVVKIDVKNAFNSVSRDTLLTEVKDKIPELYNYLFFCYSDSSKLMYKSHELSSEVGCQQGDPLGPAIFSLAINPIIKNLKSKFNVWYLDDGTLGGDVNTVLSDLSFIKSSFENIGLELNFSKCELFIQKSSCTLTDLQPKFDDLTPNIKSVDKYSLCLLGSPIFEESFPDYISNSITKFKSHTDRLLEISPHYALVILKFCLFVPKFTYVLRCCPFWIHQNLLSPIDDLIKISLETILNIQLSEPSWSQASLPIRFGGLGIRKISSVASPAFLASTHSTSGLIGNILRALPTNCEIAGFEDAKNAFKIACPGKQFPDNPNSQRSWDNVYCDLTYNTLLNNCTGPDRARLLAVGAREAGYWLHAHPSPNTGTFLDPASLRLATGLRLGVSVCTPHICSCGTDVVRLGHHGLSCQKSAGRFSRHASLNDIVRRSLATINVPALLEPTGIIRDDGKRPDGVSLVPWSLGRMLVWDATCVDTLAPSHLQRTTVKAGGAAESAEILKRNKYKSLGREYHFVPFGVETLGPWGPSAHNLFAEIAKRLVDVTGDRRAGGYLAQRISIAIQRGNAASILGTMPQGPILDLS

SEQ ID NO: 17649 - protein, 951 aa, Melitaea cinxia
MQSVTQSSDGTSKTTHTCTQCNKIFKSLKGLKIHTTKTHRECSQNSSPLDIHPTIPRAPTYVANDTKPFHTYLSHLKNSIPIIKRIPRGARITVATYLSQLIQKCYISNCTQDWQNLFLFSYSTLHIIKTDEPNLSLTQKIKNNCAISSSPSPAPPIKHDRNRNKIIEKKICDGDLKGAARLLFSNDVLSPDTPDTLQALRTKHPPAPVNPFFLDPPTAGQECLQIQKKDVTDAILSFKPGSAAGLDGISPQHLKDLTSHSVGDAGEQLVNSITKLINFMYSGNVNPEIVPIFFGANLIALTKKDGGVRPIAVGSTLRRLASKIAVRHILPKLNSEFEPVQLGFGVKGGCEAAVHALRSFLTYGQPDVLLKIDVKNAFNSVNRDTLLTEIKQHIPEVYNYLLLSYADPTKLLYRSNELSSEVGCQQGDPLGPAIFSLAINPIIKNLNSKFNVWYLDDGTLGGDVDTVLSDLFLIKNKFEAIGLELNFSKCELFINNCDLNLHDVKQKFNILAPNIKIINSNSLYLLGSPIFDESISEYINNSITKFQNSVDSLLEISPHYALCILKYCLFVPKFTYALRCCSFWNHPDLLTQIDDLIKITLESILNMQLNEQSWTQASLPIRYGGLGIRKISSVTLPAFLSSVHSSANLISKILRASPSNFEIAGLEEARNAFLIACPGQNFPVSPNSQRSWDNINCKLTYDNLLSCSTGSARARLLAVGTHEAGYWLHAYPSTNTGTFLEPDTLRIATCLRLGVPVCAPHKCPCGSDVDKLGHHGLSCLKSAGRFSRHAALNDIIRRSLATVNVPSLLEPTGIARDDGKRPDGMSLIPWKMGRVLVWDATCSDTLAPSHLHGTNNRAGAACEAAEKTKADKYRGLGSEYDFVPFGVETLGPWGPSAIRLSKEIAKRLFDVTGDRRAGSYFGQRISLAIQRGNAASIFGTLPKGTPFSNIF

SEQ ID NO: 17650 - protein, 955 aa, Mellicta athalia
MQSGTQSCDGTSNATYTCTQCNKSFKSLKGLNIHTSKIHRTFFSQNSSPVDFHPIIPNTPTHVDNDPTPFHTYLSHLKNSIPIVKRIPRGAQITVATHLSQLIQKCYMSNCTQDWQNLFLFSYSTLHITIKTDEPKLSLTQKIKNNCAVSSSPSPAALIKHDAPRNRNKLIINKICDGDLKGAARLLFSNDVLSPDTPDTLQTLLKKHPPAPVNPYFLDPPTAEQACLQIQNKDVTNAISSFKPGSAAGLDGISPQHLKDLTSHSVGDAGKQLVNSITKLINFMYSGNVNPEFVPILFGANLIALTKKDGGVRPIAVGSTLRRLASKIAVRHILPKLNSEFEPVQLGFGVKGGCEAAVHALRSFLTYEKPDVLLKIDVKNAFNSVNRETLLTEIKQHIPELYNYLLLSYADPTKLLYRSNELSSEVGCQQGDPLGPAIFSLAINPIIKKLNSKFNVWYLDDGTLGGDVNTVFSDLFLIKNKFEAIGLELNFSKCELFINNRDLNLNDINEKFNILAPNIKIVNSNSLYLLGSPIFDESIPGYINNSITKFQNSVDRLLEISSHYALCILKFCLFVPKFTYVLRCCSFWNHPDLLTQVDNLIKICLESILNMQLNEQSWTQASLPIRYGGLGIRKISSVALPAFLSSVHSSANLISKILRASPSNFEIAGLEEARNAFLIACPGQNFPVSTNSQRSWDDINCKFTFDRLLSCSTGSARARLLAVGTHEAGYWLHAYPSSNTGTFLEPDTLRIATCLRLGVPVCAPHKCPCGSDVDKLGHHGLSCQKSAGRFSRHAALNDIIRRSLATVNVPSILEPSGIARDDGKRPDGMSLIPWKMGRVLVWDATCSDTLAPSHLHGTNNRAGAACEAAEKAKQGKYRGLGPEYDFVPFGVETLGPWGPSAIKLFKEIAKRLVDITGDRSAGSYLGQRISLAIQRGNAASIFGTLPKGTSFNNIF

SEQ ID NO: 17651 - protein, 905 aa, Tinea trinotella
MNFFALLKVANNSTPFHKYLSNLKNSIPVVKRIPRGARITVATHLSKLIQKCYISNCTQDWQNLFLFSYNTLLIIKTNEPNLSLTQKIKNNCAVSSLPSPAPLAITRSIKHDAPRNRNKLIENKISDGDLKGAARLLFSNDVLSPDTPDTLQALRTKHPPAPLNPYFLDPPTAGQACLQIQNKDVTDAILSFKPGSAAGLDGISPQHLKDLTSHSVGDAGEQLVNSITKLINFMYSGNVNPEIVPILFGANLIALTKKDGGVRPIAVGSTLRRLASKIAVRHILPKLNSEFEPVQLGFGVKGGCEAAVHALRSFLTYGKPDVLLKIDVKNAFNSVNRDTLLTEIKQHIPEIYNYLLLSYADPTKLLYRSNELSSEVGCQQGDPLGPAIFSLAINPIIKNLNSNFNVWYLDDGTLGGDVNTVFSDLFLIKSKFEAIGLELNFSKCELFINNCALNLNDVKQKFNILAPNIKIVNSNSLYLLGSPIFDESISEYIKNSINKFQNSADRLLEISPHYALCILKFCLFVPKFTYVLRCCSFWNYPDLLKHVDNLIKNSLESILNMQLNEQSWTQASLPIRYGGLGIRKISSVALPAFLSSVHSSANLIGKILRATPSNFEIAALEEARNAFLIACPGQNFSISPNSQRSWDDINCKLTYDNLLSSSTGSARARLLAVGTHEAGYWLHAYPSSNTGTFLEPDTLRIATCLRLGVPVCAPHKCPCGSDVDKLGHHGLSCQKSAGRFSRHAALNDIIRRSLASVNVPSLLEPTGIARDDGKRPDGMSLIPWKMGRVLVWDATCSDTLAPSHLHGTNSRAGAACEAAEKAKACKYRGLGSEYDFVPFGVETLGPWGPSALRLFKEISKRLVDITGDRRVGSYLGQRISLAIQRGNAASIFGTLPKGTRFNNVF

SEQ ID NO: 17652 - protein, 959 aa, Tinea trinotella
MQTVTQSCDGTSNATHTCSQCRKSFKSLKGLNIHTTKIHKKCISQNSSPLDIHPIIPSAPTYVANNSTPFHKYLSNLKNSIPVVKRIPRGARITVATHLSKLIQKCYISNCTQDWQNLFLFSYNTLHIIKTDEPNLSLTQKIKNNCAVSSLPSPAPLAITRSIKHDASRNRNKLIENKISDGDLKGAARLLFSNDVLSPDTPDTLQALRTKHPPAPVNPYFLDPPTAGQACLQIQNKDVTDAILSFKPGSAAGLDGISPQHLKDLTSHSVGDAGEQLVNSITKLINFMYFGNVNPEIVPILFGANLIALTKKDGGVRPIAVGSTLRRLASKIAVRHILPKLNSEFEPVQLGFGVKGGCEAAVHALRSFLTYGQPDVLLKIDVKNAFNSVNRDTLLTEIKQHIPEIYNYLLLSYADPTKLLYRSNELSSEVGCQQGDPLGPAIFSLAINPIIKNLNSNFNVWYLDDGTLGGDVNTVFSDLFLIKSKFEAIGLELNFSKCELFINNCALNLNDVKQKFNILAPNIKIVNSNSLYLLGSPIFDESISEYINNSITKFQNSADRLLEISPHYALCILKFCLFVPKFTYVLRCCSFWNYPDLLKHVDDLIKNSLESILNMQLNEQSWTQASLPIRYGGLGIRKISSVALPAFLSSVHSSANLIGKILRATPSNFEIAALEEARNAFLIACPGQNFSISPNSQRSWDDINCKLTYDNLLSSSTGSARARLLAVGTHEAGYWLHAYPSSNTGTFLEPDTLRIATCLRLGVPVCAPHKCPCGSDVDKLGHHGLSCQKSAGRFSRHAALNDIIRRSLASVNVPSLLEPNGIARDDGKRPDGMSLIPWKMGRVLVWDATCSDTLAPSHLHGTNSRAGAACEEAEKAKACKYRGLGSEYDFVPFGVETLGPWGPSALRLFKEISKRLVDITGDRRVGSYLGQRISLTIQRGNAASIFGTLPKGIPFNNVF

SEQ ID NO: 17653 - protein, 917 aa, Cydia splendana
MSPMWILVSELLQFSENWQNLPKPFSTKLIKHLVLINNTSELKNNVPVIKRVPRGARITVAKHLSGLLTKCVENNQIDDWHNLFLFSFKTLHAKKDKTISLTQKIKNNCVSNTTPHISRPSGCSSSTFNRTKLIESKISDGDRKGAARLLFTNDVLSPDTPDTLSALRSKHPPAPSVPHSFAPPTADQACLQIEGKDVIDAIFSFKTGSAAGLDGISPQHLKDLISHSVGDAGEQLVCSLTKLINFMFSGKINTNIVPILYGANLIALTKKDGGVRLIAVGSTLRRLASKIAVRHIRSKLQSLFEPIQLGFGTKGGCEAAVHALRTYLSLDDCEIVVKIDVKNAFNSVSRDTLLTEVKDKIPELYNYLFFCYSDSSKLMYKSHELSSEVGCQQGDPLGPAIFSLAINPIIKNLKSKFNVWYLDDGTLGGDVNTVLSDLSFIKSSFENIGLELNFSKCELFIQKSSCTLTNLQPKFDDLTPNIKSVDKYSLCLLGSPIFEESFPDYISNSITKFKSHTDRLLEISPHYALVILKFCLFVPKFTYVLRCCPFWIHQNLLSPIDDLIKISLETILNIQLSEPSWSPASLPIRFGGLGIRKISSVASPAFLASTHSTSGLIGNILRALPTNCEIAGFEDAKNAFKIACPGKQFPDNPNSQRSWDNVYCDLTYNTLLSNCTGPDRTRLLAVGAREAGYWLHAHPSPNTGTFLDPASLRLATGLRLGVSVCTPHICSCGTDVDRLGHHGLSCQKSAGRFSRHASLNDIVRRSLATINVPALLEPTGIFRDDGKRPDGVSLVPWSLGRMLVWDATCVDTLAPSHLQRTTVKAGGAAESAEILKRNKYKSLGREYHFVPFGVETLGPWGPSAHKLFAEIAKRLVDVTGDRRAGGYLAQRISIAIQRGNAASILGTMPQGPILDVS

SEQ ID NO: 17654 - protein, 954 aa, Mellicta athalia
MQSVTQSCDGTSNATHICTQCNKSFKSLKGLNIHTSKTHRKCFSQNISPVDTHPTIPNTPTHLANDQTPFHTYLSHLKNSIPIVKRIPRGARITVATHLSQLIQKCYISNCTQDWQNLFLFSYSTLHIIKTDQPNLSLTQKIKNNCAVSSSPSPAPLIKHDAPHNHNRLIINKICDGDLKGAARLLFSNDVLSPDTPDTLQALLTKHPPAPVNPYFLDPPTAGQACLQIQSKDVTNAISSFKPGSAAGLDGISPQHLKDLTSYSVGDAGKQLVNSITKLINFMYSGNVNPEIVPIHFGANLIALTKKDGGVRPIAVGSTLRRLASKIAVRHILPKLNSEFEPVQLGFGVKGGCEAAVHALRSFLTYGQPDVLLKIDVKNAFNSVNRDTLLTEIKQHIPELYNYLLLSYADPTKLLYRYNELSSEVGCQQGDPLGPAIFSLAINPIIKNLNSKFNVWYLDDGTIGGDVDTVFSDLFLIKNKFEAIGLELNFSKCELFINNRVLNLNDIKQKFNILAPNIKIVNSNSLYLLGSPIFDEAIPEYINNSISKFQNSVARLFEISSHYALCILKFCLFVPKFTYVTRCCSFWKHPDLLTQVDDLIKISIESILNMQLNEQSWTQASLPIRYGGLGIRKISSVALPAFLSSVHSSANLISKILRASPSNFEIAGLEEARNAFLIACPGQNFPVSTNSQRSWDDINCKFTFDNLLSCSTGSARARLLAVGTHEAGYWLHAYPSSNTGTFLEPDTLRIAICLRLGVPVCFPHKCPCGSDVDKLGHHGLSCQKSAGRFSRHAALNDIIRRSLATINVPSLLEPTVIARDDGKRPDGMSLIPWKMGRVLVWDATCSDTLAPSHLHGTNNRAGAACEAAEKAKASKYRGLGSEYDFVPFGVETLGPWGPSAIRLFKEIAKRLVDITGDRRAGSYLGQRISLAIQRGNAASIFGTLPKGTPFNDIF

SEQ ID NO: 17655 - protein, 954 aa, Mellicta athalia
MQSVTQSCDGTSNATHICTQCNKSFKSLKGLNIHTTKTHRKCFSQNISPVDTHPTIPNTPTHLANDQTPFHTYLSHLKNSIPIVKRIPRGARITVATHLSQLIQKCYISNCTQDWQNLFLFSYSTLHIIKTDEPNLSLTQKIKNNCAVSSSSSPAPLIKHDAPHNHNRLIINKICDGDLKGAARLLFSNDVLSPDTPDTLQALLTKHPPAPVNPYFLDPPTAGQACLQIQNKDVTNAISSFKPGSAAGLDGISPQHLKDLTSYSVGDAGKQLVNSITKLINFMYSGNVNPEIVPILFGANLIALTKKDGGVRPIAVGSTLRRLASKIAVRHILPKLNSEFEPVQLGFGVKGGCEAAVHALRSFLTYGQPDVLLKIDVKNAFNSVNRDTLLTEIKQHIPELYNYLLLSYADPTKLLYRSNELSSEVGCQQGDPLGPAIFSLAINPIIKNLNSKFNVWYLDDGTIGGDVDTVFSDLFLIKNKFEAIGLELNFSKCELFINNRVLNLNDIKQKFNILAPNIKIVNSNSLYLLGSPIFDEAIPEYINNSISKFQNSVDRLFEISSHYALCILKFCLFVPKFTYVLRCCSFWKHPDLLTQVDDLIKISIESILNMQLNEQSWTQASLPIRYGGLGIRKISSVVLPAFLSSVHSSANLISKILRASPSNFEIAGLEEARNAFLIACPGQNFPVSTNSQRSWDDINCKFTFDNLLSCSTGSARARLLAVGTHEAGYWLHAYPSSNTGTFLEPDTLRIAICLRLGVPVCFPHKCPCGSDVDKLGHHGLSCQKSAGRFSRHAALNDIIRRSLATINVPSLLEPTGIARDDGKRPDGMSLIPWKMGRVLVWDATCSDTLAPSHLHGTNNRAGAACEAAEKAKAGKYRGLGSEYDFVPFGVETLGPWGPSALRLFKEIAKRLVDITGDRRAGSYLGQRISLAIQRGNAASIFGTLPKGTPFYNIF

SEQ ID NO: 17656 - protein, 959 aa, Tinea trinotella
MQTVTQSCDGTSNATHTCSQCRKSFKSLKGLNIHTTKIHRKCISQNSSPLDIHPIIPSAPTYVANNSTPFHKYLSNLKNSLPVVKRIPRGARITVATHLSKLIQKCYISNCTQDWQNLFLFSYNTLHIIKTNEPNLSLTQKIKNNCAVSSLPSPAPLAITRSIKHDAPRNRNKLIENKISDGDLKGAARLLFSNDVLSPDTPDTLQVLRTKHPPAPVNPYFLDPPTAGQACLQIQNKDVTDAILSFKPGSAAGLDGISPQHLKDLTSHSVGDAGEQLVNSITKLINFMYFGNVNPEIVPILFGANLIALTKKDGGVRPIAVGSTLRRLASKIAVRHILPKLNSEFEPVQLGFGVKGGCEAAVHALRSFLTYGQPDVLLKIDVKNAFNSVNRDTLLTEIKQHIPEIYNYLLLSYADPTKLLYRSNELSSEVGCQQGDPLGPAIFSLAINPIIKNLNSNFNVWYLDDGTLGGDVNTVFSDLFLIKSKFEAIGLELNFSKCELFINNCALNLNDVKQKFNILAPNIKIVNSNSLYLLGSPIFDESISEYINNSITKFQNSADRLLEISPHYALCILKFCLFVPKFTYVLRCCSFWNYPDLLKHVDDLIKNSLESILNMQLNEQSWTQASLPIRYGGLGIRKISSVALPAFLSSVHSSANLIGKILRATPSNFEIAALEEARNAFLIACPGQNFSISPNSQRSWDDINCKLTYDNLLSSSTGSARARLLAVGTHEAGYWLHAYPSSNTGTFLEPDTLRIATCLRLGVPVCAPHKCPCGSHVDKLGHHGLSCQKSAGRFSRHAALNDIIRRSLASVNVPSQLEPNGIARDDGKRPDGMSLIPWKMGRVLVWDATCSDTLAPSHLHGTNSRAGAACEAAEKAKACKYRGLGSEYDFVPFGVETLGPWGPSALRLFKEISKRLVDITGDRRVGSYLGQRISLAIQRGNAASIFGTLPKGTPFNNVF

SEQ ID NO: 17657 - protein, 954 aa, Glaucopsyche alexis
MQSVTQSCDGTSNATHKCTQCNNSFKSLKGLNIHTTKTHRKCISQNSSPLDIHPIITSAPTYVTNDTTSFHTYLSQLKNSIPLVKRIPRGARITVATHLSQLIQKCYISNCTQDWQNLFLFSYSTLHIIKTDEPNLSLTQKIKNNCALSSSPSPAPLIKHDNPRNRNKLIENKICEGDLKGAARLLFSNDMLSPDTPDTLQVLRTKHPPAPVDTCFLDPPTAGQACLQIQNKDIMDAILSFKPGSAAGLDGISPQHLKDLTSHSVGNAGEQLVNSITKLINFMYSGNVNPEIVPILFGANLIALTKKDGGVRPIAVGSTLRHLASKIAVRHILPKLNSEFEPVQLGFGVKGGCEAAVHALRSFLTYGQPDVLLKIDVKNAFNSVNRDTLLTEIKQHIPEIYNYLLLSYANPTKLLYRSNELSSEVGCQQGDPLGPAIFSLAINSIIKNLNSKFNVWYLDDGTLGGDVDTVFSDLFLIKNKFEAIGLELNFSKCELFINNCDLNLNDVKQKFNILAPNIKIVNSNSLYLLGSPIFDESISEYINNSITKFQNSADRLLEISPHYALCILKFCLFVPKFTYVLRCCSFWNHPDLLTQVDDLIKISLESILNMQLNEQSWTQASLPIRYGGLGIRKISSVALPAFLSSVHSSANLISKILRASPSNFEIAGLEEARNAFLIACPGQNFPVSPNSQRSWDDINCKSTYDNLLSRSTGSARARLLAVGAHEAGYWLHAYPSSNTGTFLEPDTLRIATCLRLGVPVCAPHKCPCGSDVDKLGHHGLSCQKSAGRFSRHAALNDIIRRSLATVNVPSLLEPTGIARDDGKRPDGMSLIPWKMGRVLVWDATCSDTLAPSHLHGTNNRAGAACEAAEKAKTCKYRGLGSEYDFVPFGVETLGPWGPSAIRLFIEIGKRLVDITGDRRAGSYLGQRISLAIQRGNAASIFGTLPKGTLFNNIF

SEQ ID NO: 17658 - protein, 953 aa, Pammene fasciana
MHAATQSGDGTSNLNFICVRCDSSFKTQRGLNIHISKKHRLCISQNDAALNLDPSLSTTPLSDQPNSITFHLYLSELKNNVPVIKRVPRGARITVANHLSSLIIKCVENNQTNDWHNLFLFSFNTLHAKNDEAISLTQKIKNNCVSNTNPHISRLSKGCASSTYNRTKLIESKISDGDLKGAARLLFTNDVLSPDTPDTLSALISKHPPAPSVPHSFAPPSADQACLQIEGKDVIDAIISFKTGSAAGLDGISPQHLKDLISHSVGDAGEQLVGSLTKLINFMFSGKINPDIAPILYGANLIALTKKDGGVRPIAVGSTLRRLASKIAVRHFRSKLQSLFEPIQLGFGTKGGCEAAVHALRTYLSLDDCEIVVKIDVKNAFNSVSRDTLLTEVKEKIPELYNYLFSCYSDSSKLMYKSHELSSEVGCQQGDPLGPAIFSLAINPIIKNLKSKFNVWYLDDGTLGGDVNTVLSDLSFIKSSFENIGLDLNFSKCELFIQKSSCTLADLKPKFDDLAPNIKSVDKNSLCLLGSPIFEESFPGYISNTISKFKSHTNRLIEISPHYALVILKFCLFVPKFTYVLRCCPFWKHQNLLSPIDDLIKISLETILNIQLSEPSWSQASLPIRFGGLGIRKISSVACPAFLASTHSTSGLIGNILRALPTNYEIAGFEDAKNAFKIACPGKTFPDNPKSQRSWDNVYCDLSYNTLLNNCTGPDRARLLAVGAREAGHWLHAHPSPNTGTFLDPTSLRLATGLRLGVSVCTPHICSCGTDVDRLGHHGLSCQKSAGRFSRHASLNDIIRRSLATINVPALLEPTGIIRDDGKRPDGVSLVPWSLGRMLVWDATCVDTLAPSHLQRTNVKAGAAAESAEISKRNKYKSLGREYHFLPFGVETLGPWGPSAHKFFAEIAKRLVDVTGDRRAGGFLAQRISIAIQRGNAASILGTMPQGPSLDLS

SEQ ID NO: 17659 - protein, 936 aa, Melitaea cinxia
MYTVQQEIQIIERPQNTYYKNTQKCSQNSSPSDIHPIIPRAPTYVANDATPFHTYLSHLKNSIPIAKRIPRGARITVAKHLSQLIQKCYISNCTQDWQNLFLFSYSTLHIIKTDEPNLSLTQKIKNNCAVSSSPSPAPPIKHDAPRNRNKVIENKICDGDLKGAARLLFSNDVLSPDTPDTLQALRTKHPPAPVNPFFLDPPTARQECLQIQNKDVTGAILSFKPGSAAGLDGISPQHLKDLTSYSVGDAGEQLVNSITKLINFMYSGNVNPEIVPILFGANLIALTKKDGGVRPIAVGSTLRRLASKIAVRHILPKLNSEFEPVQLGFGVKGGCEAAVHALRSFLTYDRPDVLLKIDVKNAFNSVNRDTLLTEIKQYIPELYNYLLLSYADPTKLLYRSNELSSEVGCQQGDPLGPAIFSLAINPIIKNLNSKFNVWYLDDGTLGGDVDTVFSDLFLIKNKFEAIGLELNFSKCELFINNCDLNLNDVKQKFNILAPNIKIVNSNSLYLLGSPIFDECISEYINNSFAKFQNSVDRLLEISPHYALCILKYCLFVPKFTYALRCCSFWNHPDLLTQVDDLIKISLESILNMQLNEQSWTQASLPIRYGGLGIRKISSVALPAFLSSVHSSANLISKILRASPSNFEIAGLEEARNAFLIACPGQNFPVSPNSQRSWDDINCKLTYENLLSCSTGSARARLLAVGTHEAGYWLHAYPSTNTGTFLEPDTLRIATCLRLGVPVCAPHKCPCGSDVDKLGHHGLSCLKSAGRFSRHAALNDIIRRSLATVNVPSLLEPTGIARDDGKRPDGMSLIPWKMGRVLVWDATCSDTLAPSHLHGTNNRAGAACEAAEKTKADKYRGLGSEYDFVPFGVETLGPWGPSAITLFKEISKRLFDVTGDRRAGSYFGQRISLAIQRGNAASIFGTLPKGTPFNNIF

SEQ ID NO: 17660 - protein, 954 aa, Mellicta athalia
MQSVTQSCDGTSNATHICTQCNKSFKSLKGLNIHTTKTHRKCFSQNSSPADTHPTIPNTPTHLANDQTPFHTYLSHLKNSIPIVKRIPRGARITVATHLSQLIQKCYISNCTQDWQNLFLFSYSTLHIIKTDEPNLSLTQKIKNNCAVSSSPSPVPLIKHDAPHNHKKLIINKICDGDLKGAARLLFSNDVLSPDTPDTLQALLTKHPPAPVNPYFLDPPTAGQACLQIQNKDVTNAISSFKPGSAAGLDGISPQHLKDLTSYSVGDAGKQLVNSITKLINFMYSGNVNPEIVPILFGANLIALTKKDGGVRPIAVGSTLRRLASKIAVRHILPKLNSEFEPVQLGFGVKGGCEAAVHALRSFLTYGQPDVLLKIDVKNAFNSVNRDTLLTEIKQHIPELYNYLLLSYADPTKLLYRSNELSSEVGCQQGDPLGPAIFSLAINPIIKNLNSRFNVWYLDDGTIEGDVDTVFSDLFLIKNKFEAIGLELNFSKCELFINNRDLNLNDIKQKFNILAPNIKIVNSNSLYLLGSPIFDEAIPEYINNSINKFQNSVDRLFEISSHYALCILKFCLFVPKFTYVLRCCSFWKHPDLLTQVDDLIKMSIESILNMQLNEQSWTQASLPIRYGGLGIRKISSVALPAFLSSVHSSANLISKILRASPSNFEIVGLEEARNAFLIACPGQNFPVSTNSQRSWDDINCKFTYDNLLSCSTGSARARLLAVGTHEAGYWLHAYPSSNTGTFLEPDTLRIAICLRLGVPVCFPHKCPCGSDVDKLGHHGLSCQKSAGRFSRHAALNDIIRRSLATINVPSLLEPTGIARDDGKRPDGMSLIPWKMGRVLVWDATCSDTLAPSHLHGTNNRAGAACEAAEKAKAGKYRGLGSEYDFIPFGVETLGPWGPSAIRLFKEISKRLVDITGDRRAGSYLGQRISLAIQRGNAASIFGTLPKGTPFNNVF

SEQ ID NO: 17661 - protein, 959 aa, Tinea trinotella
MQSVTQSCDGTSNATHTCSQCSKSFKSLKGLNIHTTKIHRKCSSQNSSPIDIHPIIPSAPTYVANNSTPFHKYLSNLKNSIPVVKRIPRGARITVATHLSKLIQKCYISNCTQDWQNLFLFSYNTLHIIKTNEPNLSLTQKIKNNCAVSSLPSPAPLAITRSIKHDAPRNRNKLIENKISDGDLKGAARLLFSNDVLSPDTPDTLQALRTKHPPAPLNPYFLDPPTAGQACLQIQNKDVTDAILSFKPGSAAGLDGISPQHLKDLTSHSVGDAGEQLVNSITKLINFMYSGNVNPEIVPILFGANLIALTKKDGGVRPIAVGSTLRRLASKIAVRHILPKLNSEFEPVQLGFGVKGGCEAAVHALRSFLTYGKPDVLLKIDVKNAFNSVNRDTLLTEIKQHIPEIYNYLLLSYADPTKLLYRSNELSSEVGCQQGDPLGPAIFSLAINPIIKNLNSNFNVWYLDDGTLGGDVNTVFSDLFLIKSKFEAIGLELNFSKCELFINNCALNLNDVKQKFNILAPNIKIVNSNSLYLLGSPIFDESISEYIKNSINKFQNSADRLLEISPHYALCILKFCLFVPKFTYVLRCCSFWNYPDLLKHVDNLIKNSLESILNMQLNEQSWTQASLPIRYGGLGIRKISSVALPAFLSSVHSSANLIGKILRATPSNFEIAALEEARNAFLIACPGQNFSISPNSQRSWDDINCKLTYDNLLSSSTGSARARLLAVGTHEAGYWLHAYPSSNTGTFLEPDTLRIATCLRLGVPVCAPHKCPCGSDVDKLGHHGLSCQKSAGRFSRHAALNDIIRRSLASVNVPSLLEPTGIARDDGKRPDGMSLIPWKMGRVLVWDATCSDTLAPSHLHGTNSRAGAACEAAEKAKACKYRGLGSEYDFVPFGVETLGPWGPSALRLFKEISKRLVDITGDRRVGSYLGQRISLAIQRGNAASIFGTLPKGTPFNNVF

SEQ ID NO: 17662 - protein, 954 aa, Clostera curtula
MQSGTQSCVGTSNAIHTCTQCNKSFKSLKGLNIHTTKTHRKCNSQISTPLDIHPIIPSAPAYVANDPTPFHTYLSHLKNSIPIVKRIPRGARITVATHLAQLIQKCYLNNCAQDWMNLFLFSYSTLHIIKTDEPNLSLTQKIKNNCAVSSSPSPAPIFKHDAPHNRKKLIENKICDGDLKGAARLLFSNDVLSPDTPDTLQALRTKHPPAPATPYFLDPPTAGQACLQIQNKDVTDAILSFKPGSAAGLDGISPQHLKDLTSHSVGDAGEQLVNSITKLINFMYSGNVNPEIVPILFGANLIALTKKDGGVRPIAVGSTLRRLASKIAIRHILPKLNSEFEPVQLGFGVKGGCEAAVHALRSFLTYGQPDVLLKIDVKNAFNSVNRDTLLTEIKQHIPEIYNYLLLSYAEPTKLLYRSNELSSEVGCQQGDPLGPAIFSLAINPIIKKLNSKFNVWYLDDGTLGGDVDTVLSDLFIIKNKFEAIGLELNFSKCELFINNCDLNLNDVKLKFNILAPNIKIVTSNSLYLLGAPIFDVSFAEYINNSITKFQNSADRLLEISPHYALCILKFCLFVPKFTYVLRCCSFWNRPDLLTQVDDLIKISLESVLNMQLNEHSWTQASLPIRYGGLGIRKISSVALPAFLSSVHSSASLISTILRASPSNFEIAGLEEARNAFLIACPGQNFPSSPNSQRSWDDINCKLSYDNLLSCSTGSARARLLAVGAHEAGYWLHAYPSSKTGTFLEPDTLRIATCLRLGVPVCAPHKCPCGSDVDKLGHHGLSCQKSAGRFSRHAALNDIIRRSLTSVNVPSLLEPTGIARDDGKRPDGMSLIPWKMGRVLVWDATCSDTLAPSHLHGTNNRAGAACEAAEKAKAHKYRGLGSEYEFVPFGVETLGPWGPSAISLFKEIAKRLVDISGDRRAGSYLGQRISLAIQRGNAASIFGTLPKGTPLNNIF

SEQ ID NO: 17663 - protein, 953 aa, Notocelia uddmanniana
MHAATQSDDGTSNLNFICVQCDNSFKTQRGLNIHISKKHRLCLSQNGPALNLDPAFIPAPLSDKPNSIPFHLYLSDLKNNVPVVKRVPRGARISVANHLSGLITKCVENNQIDDWHNLLLFSFNTLHAKNDEAISLTQKIKNNCVSNTTPHFCRPPKRCASSTFNKTKLIECKISDGDLKGAARLLFTNDVLSPDTPDTLLALRSKHPPAPVIPYVIDPPTADQACLQIEGKDVVDAIISFKTGSAAGLDGISPQHLKDLISQSVGDAGEQLICSLTKLINFMFSGKINNEVIPLLYGANLIALTKKDGGVRPIAVGSTLRRLASKIAVRHIRSKLQSLFEPVQLGFGTKGGCEAAVHALRTYLSYDDCEIVVKIDVKNAFNSVNRDTLLAEVKDKIPEIYNYLLLCYADPSKLMYKSHELSSEVGCQQGDPLGPAIFSLAINPIIQKLKSKFNVWYLDDGTLGGDVDTVLSDLAFIKTNFENIGLELNFSKCELFIQKTSYSLVDLIQKFVHLAPGIRIVVKFSLCLLGSPIFEESFPGYISDTISKFQSHANRLLEISPHYALIILKFCLFVPKFTYVLRCCPFWKHQNLLSRMDDLIKTSLEMILNIQLTEPSWSQASLPIRYGGLGIRKVSSVASPAFLASTHSTSGFIGNILRALPTYCEIAGLEGAKNAFKVACPGKKFPDNPKSQRSWDNIYCDLNYNILLNSSAGPDRARLLAVGTREAGYWLHAHPSPNTGTFLDPTSLRLATGLRLGVAVCTPHICSCGTDVDRLGHHGLCCQKSAGRFSRHATLNDIIRRSLATVNVPALLEPTGMVRDDGKRPDGVSLVPWSVGRMLVWDATCVDTLAPSHLQRTTVKAGAAAENAEILKRNKYKGLGREYMFVPFGVETLGPWGPSAHKLFAEIAKRLVDVTGDRRAGGFLAQRISIAIQRGNAASILGTMPQGPVLDLS

SEQ ID NO: 17664 - protein, 952 aa, Cydia splendana
MHAATQSGDGTPYPNFNCVQCDNSFKTQRGLNIHISKKHRLCISQNDAGLNLGPSLLTTPLSDHPNSIPFHLHLSELKNNVPVIKRVPRGARITVAKHLSGLLTKCVENNQIDDWHNLFLFSFKTLHAKKDKTISLTQKIKNNCVSNTTPHISRPSGCSSSTFNRTKLIESKISDGDLKGAARLLFTNDVLSPDTPDTLSALRSKHPPAPSVPYSFAPPTADQACLQIEGKDVIDAILSFKAGSAAGLDGISPQHLKDLISHSVGDAGEQLVCSLTKLINFMFSGKINTNIVPILYGANLIALTKKDGGVRPIAVGSTLRRLASKIAVRHIRSKLQSLFEPIQLGFGTKGGCEAAVHALRTYLSLDDCEIVVKIDVKNAFNSVSRDTLLTEVKDKIPELYNYLFFCYSDSSKLMYKSHELSSEVGCQQGDPLGPAIFSLAINPIIKNLKSKFNVWYLDDGTLGGDVNTVLSDLSFIKISFENIGLELNFSKCELFIQKSSCTLTNLQPKFDDLTPNIKSVDKYSLCLLGSPIFEESFPDYISNSITKFKSHTDRLLEISPHYALVILKFCLFVPKFTYVLRCCPFWKHQNLLSPIDDLIKISLETILNIQLSEPSWSQASLPIRFGGLGIRKISSVASPAFLASTHSTSGLIGNILRALPTNCEIAGFEDAKNAFKIACPGKQFPDNPNSQRSWDNVYCDLTYNTLLNNCTGPDRARLLAVGAREAGYWLHAHPSPNTGTFLDPASLRLATGLRLGVSVCTPHICSCGTDVDRLGHHGLSCQKSAGRFSRHASLNDIVRRSLATINVPALLEPTGIIRDDGKRPDGVSLVPWSLGRMLVWDATCVDTLAPSHLQRTTVKAGGAAESAEILKRNKYKSLGREYHFVPFGVETLGPWGPSAHKLFAEIAKRLVDVTGDRRAGGYLAQRISIAIQRGNAASILGTMPQGPILDLS

SEQ ID NO: 17665 - protein, 945 aa, Zeuzera pyrina
MARRTRPIYVHSATSLSNPRKASTYTLQKHRKCISQNSSPLDIHPIIPSAPTYVANDPTPFHTYLSHLKNSIPIVKRIPRGARITVATHLSQLIQKCYISNCTQDWQNLFLFSYSTLHILKTNEPNLSLTQKIKNNCAVSSSPSPTPLIKHDAPRNRNKLIEYKICDGDLKGAARLLFSNDVLSPDTSDTLQALRTKHPPAPVNPYSLDPPKAGQACLQIQNKDVTNAISSFKPGSAAGLDGISPQHLKDLTSHSVGDAGEKLVNSITKLINFMYSGNVNPEIVPILFGANLIALTKKDGGVRPIAVGSTLRRLASKIAVRHILPKLNLEFEPVQLGFGVKGGCEAAVHALRSFLTYGQPDVLLKIDVKNAFNSVNRDTLLKEIKQHIPEIYNYLLLSYAEPTKLLYRSNELSSEAGCQQGDPLGPAIFSLAINPIIKNLNSKFNVWYLDDGNLGGDVDTVFSDLFSIKNKFEAIGLELNFSKCELFINNCDLNLNDVKQKFNILAPNIKIVNSNSLYLLGSPIFDESISEYINNSITKFQNSADRLLEISPHYALCILKFCHFVPKFTYVLRCCSFWNHPDLLTQVDDLIKISLESILNMQLDEQSWAQASLPIRYGGLGIRKISSVALPAFLSSVHSSANLISKILRASPSKFAIDGLEEARNAFLIACPGQHFPVSPNSQKSWDDINCKFTYDNLLNCSTGSARARLLAVGAHEAGYWLHAYPSSNIGTFLEPDTLRIATCLRLGVPVCTPHKCPCGSDVDKLGHHGLSCQKSAGRFSRHAALNDIIRRSLATVNVPSLLEPTGIARDDGKRPDGMSLIPWKMGRVLVWDATCSDTLAPSHLHGTNNRTGAACEAAEKVKACKYRGLGSEYDFVPFGVETLGPWGPSALRLFKEIAKRLVDITGDRKAGSYLGQRISLAIQRGNAASIFGTLPKGTPFKNIF

SEQ ID NO: 17666 - protein, 949 aa, Thymelicus sylvestris
MQSVTQSCDGTSNATHTCTQCNRSFKSLKGLNIHITKTHRKCISQNHPIIPSAPTYVANNPTPFHTYLSHLKNSLPIVKRIPRGARITVATHLSKLIQKCYISNCTQDWQNLFLFSYNTLHIIKTDEPNLSLTQKIKNNCAVSSSPSPAPLIKHDAPRNRNKLIENKICDGDLKGAARLLFSNDVLSPDTPDTLQALRTKHPPAPVNPYFLDPPTAGQACLQIQNKDVTDAILSFKPGSAAGLDGISPQHLKDLTSHSVGDAGEQLVNSITKLINFMYSGNVNPEIVPILFGANLIALTKKDGGVRPIAVGSTLRRLASKIAVRHILPKLNSEFEPVQLGFGVKGGCEAAVHALRSFLTYGKPDVLLKIDVKNAFNSVNRDTLLTEIKQHIPEIYNYLLLSYADPTKLLYRSNELSSEVGCQQGDPLGPAIFSLAINPVIKNLNSKFNVWYLDDGTLGGDVDTVFSDLFLIKNKFEAIGLELNFSKCELFVNNCDLNLNDIKQKFNILAPNIKIVNSNSLYLLGSPIFDEAISEYVNNSITKFQNSADCLLEISPHYALCILKFCLFVPKFTYVLRCCSFWNHPDLLTQLDDLIKISLGSILNMQLNEQSWTQASLPIRYGGLGIRKISSVALPAFLSSVHSTANLISKILRASPSNFEIAGLEEARKAFIIACPGQNFPVSPNSQRSWDDINSKLTYENLLSCSTGSARARLLAVGAHEAGYWLHAYPSSNTGTFLEPDTLRIATCLRLGVPVCAPHKCPCGSDVDKLGHHGLSCQKSAGRFSRHAALNDIIRRSLATVNVPSILEPTGIARDDGKRPDGMSLIPWKMGRVLVWDATCSDTLAPSHLHGTNIRVGAACEAAEKVKACKYRGLGSEYDFVPFGVETLGPWGPSALRLFKEISKRLVDITGDRRAGSYLGQRISLAIQRGNAASIFGTLPKGTPFNNNIF

SEQ ID NO: 17667 - protein, 952 aa, Cydia splendana
MHAATQSGDGTPYPNFNCVQCDNSFKTQRGLNIHISKKHRLCISQNDAGLNLGPSLLTTPLSDHPNSIPFHLHLSELKNNVPVIKRVPRGARITVAKHLSGLLTKCVENNQIDDWHNLFLFSFKTLHAKKDKTISLTQKIKNNCVSNTTPHISRPSGCSSSTFNRTKLIESKISDGDLKGAARLLFTNDVLSPDTPDTLSALQSKHPPAPSVPHSFAPPTADQACLQIEGKDVIDAIFSFKAGSAAGLDGISPQHLKDLISHSVGDAGEQLVCSLTKLINFMFSGKINTNIVPILYGANLIALTKKDGGVRPIAVGSTLRRLASKIAVRHIRSKLQSLFEPIQLGFGTKGGCEAAVHALRTYLSLDDCEIVVKIDVKNAFNSVSRDTLLTEVKDKIPELYNYLFFCYSDSSKLMYKSHELSSEVGCQQGDPLGPAIFSLAINPIIKNLKSKFNVWYLDDGTLGGDVNTVLSDLSFIKSSFENIGLELNFSKCELFIQKSSCTLTNLQPKFDDLTPNIKSVDKYSLCLLGSPIFEESFPDYISNSITKFKSHTDRLLEISPHYALVILKFCLFVPKFTYVLRCCPFWKHQNLLSPIDDLIKISLETILNIQLSEPSWSQASLPIRFGGLGIRKISSVASPAFLASTHSTSGLIGNILRALPTNCEIAGFEDAKNAFKIACPGKQFPDNPNSQRSWDNVYCDLTYNTLLNNCTGPDRARLLAVGAREAGYWLHAHPSPNTGTFLDPASLRLATGLRLGVSVCTPHICSCGTDVDRLGHHGLSCQKSAGRFSRHASLNDIVRRSLATINVPALLEPTGIIRDDGKRPDGVSLVPWSLGRMLVWDATCVDTLAPSHLQRTTVKAGGAAESAEILKRNKYKSLGREYHFVPFGVETLGPWGPSAHKLFAEIAKRLVDVTGDRRAGGYLAQRISIAIQRGNAASILGTMPQGPILDLS

SEQ ID NO: 17668 - protein, 952 aa, Cydia splendana
MHAATQSGDGTPYPNFNCVQCDNSFKTQRGLNIHISKKHRLCISQNDAGLNLGPSLLTTPLSDHPNSIPFHLHLSELKNNVPVIKRVPRGARITVAKHLSGLLTKCVENNQIDDWHNLFLFSFKTLHAKKDKTISLTQKIKNNCVSNTTPHISRPSGCSSSTFNRTKLIESKISDGDLKGAARLLFTNDVLSPDTPDTLSALRSKHPPAPSVPHSFAPPTADQACLQIEGKDVIDAIFSFKTGSAAGLDGISPQHLKDLISHSVGDAGEQLVCSLTKLVNFMFSGKINTDIVPILYGANLIALTKKDGGVRPIAVGSTLRRLASKIAVRHIRSKLQSLFEPIQLGFGTKGGCEAAVHALRTYLSLDDCEIVVKIDVKNAFNSVSRDTLLTEVKDKIPELYNYLFFCYSDSSKLMYKSHELSSEVGCQQGDPLGPAIFSLAINPIIKNLKSKFNVWYLDDGTLGGDVNTVLSDLSFIKSSFENIGLELNFSKCELFIQKSSCTLTNLQPKFDDLTPNIKSVDKYSLCLLGSPIFEESFPDYISNSITKFKSHTDRLLEISPHYALVILKFCLFVPKFTYVLRCCPFWKHQNLLSPIDDLIKISLETILNIQLSEPSWSQASLPIRFGGLGIRKISSVASPAFLASTHSTSGLIGNILRALPTNCEIAGFEDAKNAFKIACPGKQFPDNPNSQRSWDNVYCDLTYNTLLNNCTGPDRARLLAVGAREAGYWLHAHPSPNTGTFLDPASLRLATGLRLGVSVCTPHICSCGTDVDRLGHHGLSCQKSAGRFSRHASLNDIVRRSLATINVPALLEPTGIIRDDGKRPDGVSLVPWSLGRMLVWDATCVDTLAPSHLQRTTVKAGGAAESAEILKRNKYKSLGREYHFVPFGVETLGPWGPSAHKLFAEIAKRLVDVTGDRRAGGYLAQRISIAIQRGNAASILGTMPQGPILDLS

SEQ ID NO: 17669 - protein, 955 aa, Mellicta athalia
MQSGTQSCDGTSNATYTCTQCNKPFKSLKGLNIHTSKIHRTFFSQSSSPVDIHPIIPSTPTHVANDPTPFHTYLSHLKNSIPIVKRIPRGARITVATHLSQLIQKCYMSNCTQDWQNLFLFSYSTLHIIIKTDEPKLSLTQKIKNNCAVSSSLSPAPLIKHDAPRNRNKLIINKICDGDLKGAARLLFSNDVLSPDTPDTLQALLTKHPPAPVNPYFLDPPTAGQACLQIQNKDVTNAISSFKPGSASGLDGISPQHLKDLTSHSVGDAGTQLLNSITKLINFMYSGNVNPEIVPILFGANLIALTKKDGGVRPIAVGSTLRRLASKIAVRHILPKLNSEFEPVQLGFGVKGGCEAAVHALRSFLTYGQPDVLLKIDVKNAFNSINRDTLLTEIKQHIPELYNYLLLSYGDPTKLLYRSNELSSEVGCQQGDPLGPAIFSLAINPIIKNLNSKFNVWYLDDGTLAGDVDTVFSDLFLIKNKFEAIGLELNFSKCELFINNSVLNLNDIKQKFNILAPNIKIVSSNSLYLLGSPIFDDSIPEYINNSITKFQNCVDRLLEISSHYALCILKFCLFVPKFTYVLRCCSFWNHPDLLTKVDKLIKISLESILNMQLNEQSWTQASLPIRYGGLGIRKISSVALPAFLSSVHSSANLISKILRAPPPNFEIAGLEEARNAFLIACPGQNFPVSTNSQRSWDDIICKFTFDSLLSCSTGSARARLLAVGTHEAGYWLHAYPSSNTGTFLEPDTLRIATCLRLGVPVCAPHKCPCGSDVDKLGHHGLSCQKSAGRFSRHAALNDIIRRSLATVNVPSILEPSGIARDDGKRPDGMSLIPWKMGRVLVWDATCSDTLAPSHLHGTNNRAGAACEAAEKTKQSKYRGLGSEYDFVPFGVETLGPWGPNAIRLFKEIAKRLVDITGDRRAGSYLGQRISLAIQRGNAASIFGTLPKGTSFNNIF

SEQ ID NO: 17670 - protein, 954 aa, Mellicta athalia
MQSVTQSGDGTSNTIHTCTQCNKSFKSLKGLNIHTTKTHRKCFSQDISSVDTHPIIPNTPSHASNDQIPFHTYLSHLKNSIPIIKRIPRGARITVATHLSQLIQKCYISNCTQDWQNLFLFSYSTLHIIKTDEPNLSLTQKIKNKCAASSSPSPAPLIKHDDPLNRKKLIINKICDGDLKGAARLLFSNDVLSPDTPDTLQALLTKHPPAPVNPYFLDPPTAGQACLQIQNKDVTNAISSFKPGSASGLDGISPQHLKDLTSHSVGDAGTQLLNSITKLINFMYSGNVNPEIVPILFGANLIALTKKDGGVRPIAVGSTLRRLASKIAVRHILPKLNSEFEPVQLGFGVKGGCEAAVHALRSFLTYGQPDVLLKIDVKNAFNSINRDTLLTEIKQHIPELYNYLLLSYGDPTKLLYRSNELSSEVGCQQGDPLGPAIFSLAINPIIKNLNSKFNVWYLDDGTLAGDVDTVFSDLFLIKNKFETIGLELNFSKCELFINNSVLNLNDIKQKFNILAPNIKIVNSNSLYLLGSPIFDDSIPEYINNSITKFQNSVDRLLEISSHYALCILKFCLFVPKFTYVLRCCSFWNHPDLLTKVDKLIKISLESILNMQLNEQSWTQASLPIRYGGLGIRKISSVALPAFLSSVHSSANLISKILRASPSNFEIAGLEEARNAFLIACPGQNFPVSTNSQRSWDDINCKFTFDDLLSCSTGSARARLLAVGTHEAGYWLHAYPSPNTGTFLEPDTLRIATCPRLGVPVCVSHKCPCGSDVDKLGHHGLSCQKSAGRFSRHAALNDIIRRSLATINVPSLLEPTGIARDDGKRPDGMSLIPWKMGRVLVWDATCSDTLAPSHLHGTNNRAGAACEAAEKAKAGKYRGLGPEYDFVPFGVETLGPWGPSALRLFKEIAKRLVDITGDRRAGSYLGQRISLAIQRGNAASIFGTLPKGTPFNNIF

SEQ ID NO: 17671 - protein, 959 aa, Tinea trinotella
MQTVTQSCDGTSNATHTCSQCRKSFKSLKGLNIHTTKIHRKCISQNSSPLDIHPIIPSAPTYVANNSTPFHKYLSNLKNSLPVVKRIPRGARITVATHLSKLIQKCYISNCTQDWQNLFLFSYNTLHIIKTNEPNLSLTQKIKNNCAVSSLPSPAPLAITRSIKHDAPRNRNKLIENKISDGDLKGAARLLFSNDVLSPDTPDTLQVLRTKHPPAPVNPYFLDPPTAGQACLQIQNKDVTDAILSFKPGSAAGLDGISPQHLKDLTSHSVGDAGEQLVNSITKLINFMYFGNVNPEIVPILFGANLIALTKKDGGVRPIAVGSTLRRLASKIAVRHILPKLNSEFEPVQLGFGVKGGCEAAVHALRSFLTYGQPDVLLKIDVKNAFNSVNRDTLLTEIKQHIPEIYNYLLLSYADPTKLLYRSNELSSEVGCQQGDPLGPAIFSLAINPIIKNLNSNFNVWYLDDGTLGGDVNTVFSDLFLIKSKFEAIGLELNFSKCELFINNCALNLNDVKQKFNILAPNIKIVNSNSLYLLGSPIFDASISEYINNSITKFQNSADRLLEISPHYALCILKFCLFVPKFTYVLRCCSFWNYPDLLKHVDDLIKNSLESILNMQLNEQSWTQASLPIRYGGLGIRKISSVALPAFLSSVHSSANLIGKILRATPSNFEIAALEEARNAFLIACPGQNFSISQNSQRSWDDINCKLTYDNLLSSSTGSARARLLAVGTHEAGYWLHAYPSSNTGTFLEPDTLRIATCLRLGVPVCAPHKCPCGSHVDKLGHHGLSCQKSAGRFSRHAALNDIIRRSLASVNVPSLLEPNGIARDDGKRPDGMSLIPWKMGRVLVWDATCSDTLAPSHLHGTNSRAGAACEAAEKAKACKYRGLGSEYDFVPFGVETLGPWGPSALRLFKEISKRLVDITGDRRVGSYLGQRISLAIQRGNAASIFGTLPKGTPFNNVF

SEQ ID NO: 17672 - protein, 672 aa, Tinea trinotella
MYFGNVNPEIVPILFGANLIALTKKDGGVRPIAVGSTLRRLASKIAVRHILPKLNSEFEPVQLGFGVKGGCEAAVHALRSFLTYGQPDVLLKIDVKNAFNSVNRDTLLTEIKQHIPEIYNYLLLSYADPTKLLYRSNELSSEVGCQQGDPLGPAIFSLAINPIIKNLNSNFNVWYLDDGTLGGDVNTVFSDLFLIKSKFEAIGLELNFSKCELFINNCALNLNDVKQKFNILAPNIKIVNSNSLYLLGSPIFDESISEYINNSITKFQNSADRLLEISPHYALCILKFCLFVPKFTYVLRCCSFWNYPDLLKHVDDLIKNSLESILNMQLNEQSWTQASLPIRYGGLGIRKISSVALPAFLSSVHSSANLIGKILRATPSNFEIAALEEARNAFLIACPGQNFSISPNSQRSWDDINCKLTYDNLLSSSTGSARARLLAVGTHEAGYWLHAYPSSNTGTFLEPDTLRIATCLRLGVPVCAPHKCPCGSHVDKLGHHGLSCQKSAGRFSRHAALNDIIRRSLASVNVPSLLEPNGIARDDGKRPDGMSLIPWKMGRVLVWDATCSDTLAPSHLHGTNSRAGAACEAAEKAKACKYRGLGSEYDFVPFGVETLGPWGPSALRLFKEISKRLVDITGDRRVGSYLGQRISLAIQRGNAASIFGTLPKGTPFNNVF

SEQ ID NO: 17673 - protein, 954 aa, Ochlodes sylvanus
MQSVTQSCDGTSNASHPCTQCNKSFKYLKGLNIHSTKTHKKCISQNISSLDIHPVIPSAPTHVANVSTPFHTYLSHLKNSIPIVKRIPRGARITVATHLSKLIQKCYLNNYTQDWQNLFLFSYSSLHIIKTNEQNLSLTQKIKNNCALSSSPSPTPLNKHDAPRNRNKLIEKKISDGDLKGAARLLFSNDVLSPDTPDTLQALRTKHPPAPVNPYFLDPPTAGQACLQIQNKDVKDAILSFKPGSAAGLDGISPQHLKDLTSHSVGDAGEQLVNSITKLINFMYSGNVNSEIVPILFGANLIALTKKDGGVRPIAVGSTLRRLASKIAVRHILPKLNSEFEPVQLGFGVKGGCEAAVHALRSFLTYEQPDVLLKIDVKNAFNSVNRDTLLTEIKQHIPEIYNYLLLSYADPTKLLYRSNELSSEVGCQQGDPLGPAIFSLAINPIIKNLNSKFNVWYLDDGTLGGDVDTVFSDLFLIKNKFEAIGLELNFSKCELFINNCDLNLNEVKQKFNILAPNIKIVNSNSLYLLGSPIFDESIAEYINNSITKFQNSADRLFEISPHYALCILKFCLFVPKFTYVLRCCSFWNHPDLLTQVDNLIKISLESILNLQLTEQSWTQASLPIRYGGLGIRKISSVALPAFLSSVHSSANLISKILRASPSNFEIVGLEEARNAFLIACPGQNFPFSPNSQRSWDDIKCKLTYDNLLSCSTGSARARLLAVGAHEAGYWLHAYPSSNTGTFLEPDTLRIATCLRLGVPVCAPHKCPCGSDVDKLGHHGLSCQKSAGRFSRHAALNDIIRRSLATVNVPSLLEPTGIARDDGKRPDGMSLIPWKMGRVLVWDATCSDTLAPSHLHGTNNTAGAACEAAEKAKASKYRGLGSEYDFVPFGVETLGPWGPSAIKLFKEIAKRLVDITGDRRAGSYLGQRISLAIQRGNAASIFGTLPKGTPFNNIF

SEQ ID NO: 17674 - protein, 959 aa, Tinea trinotella
MQSVTQSCDGTSNATHTCSQCSKSFKSLKGLNIHTTKIHRKCSSQNSSPIDIHPIIPSAPTYVANNSTPFHKYLSNLKNSIPVVKRIPRGARITVATHLSKLIQKCYISNCTQDWQNLFLFSYNTLHIIKTNEPNLSLTQKIKNNCAVSSLPSPAPLAITRSIKHDAPRNRNKLIENKISDGDLKGAARLLFSNDVLSPDTPDTLQALRTKHPPAPLNPYFLDPPTAGQACLQIQNKDVTDAILSFKPGSAAGLDGISPQHLKDLTSHSVGDAGEQLVNSITKLINFMYSGNVNPEIVPILFGANLIALTKKDGGVRPIAVGSTLRRLASKIAVRHILPKLNSEFEPVQLGFGVKGGCEAAVHALRSFLTYGKPDVLLKIDVKNAFNSVNRDTLLTEIKQHIPEIYNYLLLSYADPTKLLYRSNELSSEVGCQQGDPLGPAIFSLAINPIIKNLNSNFNVWYLDDGTLGGDVNTVFSDLFLIKSKFEAIGLELNFSKCELFINNCALNLNDVKQKFNILAPNIKIVNSNSLYLLGSPIFDESISEYIKNSINKFQNSADRLLEISPHYALCILKFCLFVPKFTYVLRCCSFWNYPDLLKHVDNLIKNSLESILNMQLNEQSWTQASLPIRYGGLGIRKISSVALPAFLSSVHSSANLIGKILRATPLNFEIAALEEARNAFLIACPGQNFSISPNSQRSWDDINCKLTYDNLLSSSTGSARARLLAVGTHEAGYWLHAYPSSNTGTFLEPDTLRIATCLRLGVPVCAPHKCPCGSDVDKLGHHGLSCQKSAGRFSRHAALNDIIRRSLASVNVPSLLEPTGIARDDGKRPDGMSLIPWKMGRVLVWDATCSDTLAPSHLHGTNSRAGAACEAAEKAKACKYRGLGSEYDFVPFGVETLGPWGPSALRLFKEISKRLVDITGDRRVGSYLGQRISLAIQRGNAASIFGTLPKGTPFNNVF

SEQ ID NO: 17675 - protein, 959 aa, Tinea trinotella
MQSVTQSCDGTSNATHTCSQCSKSFKSLKGLNIHTTKIHRKCSSQNSSPIDIHPFIPSAPTYVAKNSTPFHKYLSNLKNSIPVVKRIPRGARITVATHLSKLIQKCYISNCTQDWQNLFLFSYNTLHIIKTNEPNLSLTQKIKNNCAVSSLPSPAPLAITRSIKHDAPRNRSKLIENKISDGDLKGAARLLFSNDVLSPETPDTLQALRTKHPPAPLNPYFLDPPTAGQACLQIQNKDVTDAILSFKPGSAAGLDGISPQHLKDLTSHSVGDAGEQLVNSITKLINFMYSGNVNPEIVPILFGANLIALTKKDGGVRPIAVGSTLRRLASKIAVRHILPKLNSEFEPVQLGFGVKGGCEAAVHALRSFLTYGQPDVLLKIDVKNAFNSVNRDTLLTEIKQHIPEIYNYLLLSYADPTKLLYRSNELSSEVGCQQGDPLGPAIFSLAINPIIKNLNSNFNVWYLDDGTLGGDVNTVFSDLFLIKSKFEAIGLELNFSKCELFINNCALNLNDVKQKFNILAPNIKIVNSNSLYLLGSPIFDESISEYIKNSITKFQNSADRLLEISPHYALCISKFCLFVPKFTYVLRCCSFWNYPDLLKHVDNLIKNSLESILNMQLNEQSWTQASLPIRYGGLGIRKISSVALPAFLSSVHSSANLIGKILRATPSNFEIAALEEARNAFLIACPGQNFSISPNSQRSWDDINCKLTYDNLLSSSTGSARARLLAVGTHEAGYWLHAYPSSNTGTFLEPDTLRIATCLRLGVPVCAPHKCPCGSDVDKLGHHGLSCQKSAGRFSRHAALNDIIRRSLASVNVPSLLEPTGIARDDGKRPDGMSLIPWKMGRVLVWDATCSDTLAPSHLHGTNSRAGAACEAAEKAKACKYRGLGSEYDFVPFGVETLGPWGPSALRLFKEISKRLVDITGDRRVGSYLGQRISLAIQRGNAASIFGTLPTGTPFNNVF

SEQ ID NO: 17676 - protein, 954 aa, Chilo suppressalis
MQSATQSSDGTSNTTRKCTQCHKSFKSLKGLKIHTTKIHRKCISQNSSPLDIHPIIPSGPTYVANDPTPFHTYLSHLKNSIPIVKRIPRGARITVATHLSQLIQKCYISNCSQDWQNLFLFSYSTLNILKTNELNLSLTQKIKNNCAVSSLPSPAPLIKHNAPRNRIKLIENKICDGDLKGAARLLFSNDVLSPDTPDTLQALRTKHPPAPVNPYFFDPPTAGQACLQIQNKDVTDAILSFKPGSAAGLDGISPQHLKDLTSHSVGDAGKQLINSITKLINFMYSGNVNQEIVPILFGANLIALTKKDGGVRPIAVGSTLRRLASKIAVRHILPKLNSEFEPVQLGFGVKGGCEAAVHALRSFLTYGQPDVLLKIDVKNAFNSVNRDTLLTEIKQHIPEIYNYLLLSYADPTKLLYRSNELSSEVGCQQGDPLGPAIFSLAINPIIKKLNSKFNVWYLDDGTLGGDVDTVFSDLFLIKNKFEAIGLELNFSKCELFINNCDLNLNDVKQKFNILAPNIKIVNRNSLYLLGSPIFDESISEYFNNSINKFQNSADRLLEISPHYALCILKFCLFVPKLTYVLRCCSFWNHSDLLAQVDGLIKNNLESILNMQLNEQSWTQASLPIRYGGLGIRKISSVALPAFLSSVHSSANLISKILRASPSNFEIAGLEEARNAFLIACPGQNFPVSPNSQRSWDDINCKLTYDNLLSCSTGSARARLLAVGAHEAGYWLHAYPSANTGTFLEPDTLRIATCLRLGVPVCAPHKCPCGSDVDKLGHHGLSCQKSAGRFSRHAALNDIIRRSLATVNVPSLLEPTGIARDDGKRPDGMSLIPWKMGRMLVWDATCSDTLAPSHLHGTNNRAGAACEAAEKAKAGKYRGLGSEYDFVPFGVETLGPWGPSALRLFKEIAKRLVDVTGDRRAGSYLGQRISLAIQRGNAASIFGSLPKGTPFNNIF

SEQ ID NO: 17677 - protein, 715 aa, Cydia pomonella
MSFKTGSAAGLDGISPQHLKDLICHSVGDSGEQLICSLTKLINFMFSGKINTEIVPILYGANLIALTKKDGGVRPIAVGSTLRRLASKIAVRHFRSKLQSLLEPVQLGFGTKGGCEAAVHALRTYLSSDDCEIVVKIDVKNAFNSVNRDTLLTEVKDKIPELYNYLFFCYSDSSKLMYKSHELSSEVGCQQGDPLGPAIFSLAINPIIKNLKSKFNVWYLDDGTLGGDVNTVLSDLSFVRSSFENIGLDLNFSKCELFIHKSSCTLTDLKPKFDDLAPNIKLVDKDSLCLLGSPIFEESFPDYVSNSISKFKSHTNSLLEISPHYALVILKFCLFVPKFTYVLRCCPFWKHQNLLSPIDDLIKISIETILNIQLSEPSWSQASLPIRFGGLGIRKISSVASPAFLASINSTSGLIGNILRALPTNYEITGFEDAKNAFKIACPGKQFPDNPKSQRSWDNIYCDLTYNTLLNNCTGPDHARLLAVGAREAGYWLHAHPSPNTGTFLDPTSLRLATGLRLGVSVCTPHICSCGTDVDRLGHHGLSCQKSAGRFSRHASLNDIIRRSLATINVPALLEPTGIIRDDGKRPDGVSLVPWSLGRMLVWDATCVDTLAPSHLQRTNVKAGAAAESAEILKRNKYKSLGREYHFVPFGVETLGPWGPSAHKFFGEIAKRLVDVTGDRRAGGFLAQRISIAIQRGNAASILGTMPQGPILDIS

SEQ ID NO: 17678 - protein, 954 aa, Pyrgus malvae
MQSVTQSCDGTSNATHTCTQCNKSFKSLRGLNIHTTKTHRKCFSQNISPLDIHHIIPSAPTYVANDQTPFHIYLSHLKNSIPIVKRIPRGARITVATHLSQLIHKCYSSNCTLDWQNLFLFSYSTLHIIKTDEPNLSLTQKIKNNCAVNSSPSPTTIIKHNSPRNRNKLIENKICDGDLKGAARLLFSNDVLSPDTPDTLQALQTKHPPAPVNPYFLDPPTAGQACLQIQNKDVRDAILSFKPGSAAGLDGISPQHLKDLISHSVGDAGEQLLNSITKLINFMYSGNVNPEIVPILFGANLIALTKKDGGVRPIAVGSTLRRLASKIAVRHILPKLNSVFEPVQLGFGVKGGCEAAVHALRSFLTYEQPDILLKIDVKNAFNSINRDTLLTEIKQHIPEIYNYLLLSYADPTKLLYRSNELSSEVGCQQGDPLGPAIFSLAINPIIKNLNSKFNVWYLDDGTLGGDLDTVFSDLFLIKNKFEAIGLELNFSKCELFVNNCNLNLNDIKQKFNILAPNIKIVNNSSLYLLGSPIFDESISEYINNSITKFQNSADRLLEISPHYALCILKFCLFLPKFTYVLRCCSFWNHPDLLTQVDDLIKISLEAILNMQLNEQSWTQASLPIRYGGLGIRKISSVALPAFLSSVHSSANLISKILRAPPSNFEIAGLEEARNAFLIACPGQNLPFSPISQRSWDDIYCKLTYDNLLSCSTDSARARLLAVGAHEAGYWLHAYPSSNTGTFLEPDTLRIATCLRLGVPVCAPHKCPCGSDVDKLGHHGLSCQKSAGRFSRHAALNDIIHRSLATVNVPSLREPTGIARDDGKRPDGMSLIPWKMGRVLVWDATCSDTLAPSHLHGTNIRAGAACEAAEKAKACKYRGLGTEYDFVPFGVETLGPWGPSALRLFKEMTKRLVDVTGDRRAGSYLGQRISLAIQRGNAASIFGTLPKGTPFNTIF

SEQ ID NO: 17679 - protein, 954 aa, Muschampia musta
MQSVTQSCDGTSNATHTCTQCNKSFKSLKGLNIHTTRTHRKCISQNSSPLDIHPIIPSAPTYVANNPTPFHTYLSHLKNSIPIVKRIPRGARITVATYLSQLIQKCCESNCTQDWQNLFLFSYSTLNIIKTDEQNLSLTQKIKNNCTVSSLPSPAPLIKHNAPCNRNKLVENKICDGDLKGATRLLFSNDVLSPDTPDTLQALRTKHPPAPVNPYFLDPPTAGQACLQIQKKDVTVAILSFKPGSAAGLDGISPQHLKDLTSHSVGDAGEQLVNSITKLINFMYSGNVNPEIVPILFGANLIALTKKDGGVRPIAVGSTLRRLASKIAVRHILPKLNSEFEPVQLGFGVKGGCEAAVHALRSFLTYGQPDVLLKIDVKNAFNSVNRDTLLTEIKQHIPEIYNYLLLSYADPTKLLYRSNELSSEVGCQQGDPLGPAIFSLAINPIIKNLNSKFNVWYLDDGTLGGDVDTVFSDLFLIKNKFEAIGLELNFSKCELFINNCNLNLNDVKQKFNTLAPNIKIVNSNSLYLLGSPIFDESISEYINNSITKFQNSVDRLLEISPHYALCILKFCLFVPKFTYALRCCSFWNQPDLLAKVDDLIKISLESIFNMQLNEQSWTQASLPIRYGGLGIRKISSVALPAFLSSVHGSANLISKILRASPSNFEIVGLEEARNAFLIACPGQNFPVSTNSQRSWDNINCKLTFDNLLSCSTGSARARLLAVCTHEAGYWLHAYPSSNTGTFLEPDTLRIATCLRLGVPVCTPHKCPCGSDVDRLGHHGLSCQKSAGRFSRHAALNDIIRRSLATVNVPSLLEPTGIARDDGKRPDGMSLIPWKVGRVLVWDATCSDTLAPSHLHGTNNRAGAACEAAEKAKTCKYRGLGSEYDFVPFGVETLGPWGPNAIKLFKEIAKRLVDITGDRRAGSYLGQRISLAIQRGNAASIFGTLPKGTPFNNIF

SEQ ID NO: 17680 - protein, 953 aa, Melitaea cinxia
MQSVTQSCDGTSNTIHTCIQCNKKFKSLKGLKIHTTKTHRKCSQNSSPSDIHPIIPRAPTYVANDATPFHTYLSHLKNSIPIAKRIPRGARITVAKHLSQLIQKCYISNCTQDWQNLFLFSYSTLHIIKTDEPNLSLTQKIKNNCAVRSSPSPAPPIKHDAPRNRNKVIENKICDGDLKGAARLLFSNDVLSPDTPDTLQALQTKHPPAPVNPFFLDPPTARQECLQIQNKDVTGAILSFKPGSAAGLDGISPQHLKDLTSHSVGDAGEQLVNSITKLINFMYSGNVNPEIVPILFGANLIALTKKDGGVRPIAVGSTLRRLASKIAVRHILPKLNSEFEPVQLGFGVKGGCEAAVHALRSFLTYDRPDVLLKIDVKNAFNSVNRDTLLTEIKQYIPELYNYLLLSYADPTKLLYRSNELSSEVGCQQGDPLGPAIFSLAINPIIKNLNSKFNVWYLDDGTLGGDVDTVFSDLFLIKNKFEAIGLELNFSKCELFINNCDLNLNDVKQKFNILAPNIKIVNSNSLYLLGSPIFDECISEYINNSFTKFQNSVDRLLEISPHYALCILKYCLFVPKFTYALRCCSFWNHPDLLTQVDDLIKISLESILNMQLNEQSWTQASLPIRYGGLGIRKISSVALPAFLSSVHSSANLISKILRASPSNFEIAGLEEARNAFLIACPGQNFPVSPNSQRSWDDINCKLTYENLLSCSTGSARARLLAVGTHEAGYWLHAYPSTNTGTFLEPDTLRIATCLRLGVPVCAPHKCPCGSDVDKLGHHGLSCLKSAGRFSRHAALNDIIRRSLATVNVPSLLEPTGIARDDGKRPDGMSLIPWKMGRVLVWDATCSDTLAPSHLHGTNNRAGAACEAAEKTKADKYRGLGSEYDFVPFGVETLGPWGPSAITLFKEISKRLFDVTGDRRAGSYFGQRISLAIQRGNAASIFGTLPKGTPFNNIF

SEQ ID NO: 17681 - protein, 959 aa, Tinea trinotella
MQSVTQSCDGTSNATHTCSQCSKSFKSLKGLNIHTTKIHRKCSSQNSSPIDIHPIIPSAPTYVANNSTPFHKYLSNLKNSIPVVKRIPRGARITVATHLSKLIQKCYISNCTQDWQNLFLFSYNTLHIIKTNEPNLSLTQKIKNNCAVSSLPSPAPLAITRSIKHDAPRNRNKLIENKISDGDLKGAARLLFSNDVLSPDTPDTLQALRTKHPPAPLNPYFLDPPTAGQACLQIQNKDVTDAILSFKPGSAAGLDGISPQHLKDLTSHSVGDAGEQLVNSITKLIIFMYSGNVNPEIVPILFGANLIALTKKDGGVRPIAVGSTLRRLASKIAVRHILPKLNSEFEPVQLGFGVKGGCEAAVHVLRSFLTYGQPDVLLKIDVKNAFNSVNRDTLLTEIKQYIPEIYNYLLLSYADPTKLLYHSNELSSEVGCQQGDPLGPAIFSLAINPIIKNLNSNFKVWYLDDGTLGGDVNTVFSDLFLIKSKFEAIGLELNFSKCELFINNCALNLNDVKQKFNILAPNIKIVNNNSLYLLGSPIFDESISEYIKNSITKFQNSADRLLEISPHYALCILKFCLFVPKFTYVLRCCSFWNYPDLLKHVDNLIKNSLESILNMQLNEQSWTQASLPIRYGGLGIRKISSVALPAFLSSVHSSANLIGKILRATPSNFEIAALEEARNAFLIACPGQNFSISPNSQRSWDDINCKLTYDNLLSSSTGSARARLLAVGTHEAGYWLHAYPSSNTGTFLEPDTLRIATCLRLGVPVCAPHKCPCGSDVDKLGHHGLSCQKSAGRFSRHAALNDIIRRSLASVNVPSLLEPTGIARDDGKRPDGMSLIPWKMGRVLVWDATCSDTLAPSHLHGTNSRAGAACEAAEKAKACKYRGLGSEYDFVQFGVETLGPWGPSALRLFKEISKRLVDITGDRRVGSYLGQRISLAIQRGNAASIFGTLPKGTPFNNVF

SEQ ID NO: 17682 - protein, 884 aa, Clostera curtula
MELTSHLKNSIPIVKRIPRGARITVATHLAQLIQKCYLNNCAQDWMNLFLFSYSTLHIIKTDEPNLSLTQKIKNNCAVSSSPSPAPIFKHDAPHNRKKLIENKICDGDLKGAARLLFSNDVLSPDTPDTLQALRTKHPPAPATPYFLDPPTAGQACLQIQNKDVTDAILSFKPGSAAGLDGISPQHLKDLTSHSVGDAGEQLVNSITKLINFMYSGNVNPEIVPILFGANLIALTKKDGGVRPIAVGSTLRRLASKIAIRHILPKLNSEFEPVQLGFGVKGGCEAAVHALRSFLTYGQPDVLLKIDVKNAFNSVNRDTLLTEIKQHIPEIYNYLLLSYAEPTKLLYRSNELSSEVGCQQGDPLGPAIFSLAINPIIKKLNSKFNVWYLDDGTLGGDVDTVLSDLFIIKNKFEAIGLELNFSKCELFINNCDLNLNDVKLKFNILAPNIKIVTSNSLYLLGAPIFDESFAEYINNSITKFQNSADRLIEISPHYALCILKFCLFVPKFTYVLRCCSFWNRPDLLTQVDDLIKISLESVLNMRLNEHSWTQASLPIRYGGLGIRKISSVALPAFLSSVHSSASLISTILRASPSNFEIAGLEEARNAFLIACPGQNFPSSPNSQRSWDDINCKLSYDNLLSCSTGSARARLLAVGAHEAGYWLHAYPSSKTGTFLEPDTLRIATCLRLGVPVCAPHKCPCGSEVDKLGHHGLSCQKSAGRFSRHAALNDIIRRSLTSVNVPSLLEPTGIARDDGKRPDGMSLIPWKMGRVLVWDATCSDTLAPSHLHGTNNRAGAACEAAEKAKAHKYMGLGSEYEFVPFGVETLGPWGPSAISLFKEIAKRLVDITGDRRAGSYLGQRISLAIQRGNAASIFGTLPKGTPLNNIF

SEQ ID NO: 17683 - protein, 954 aa, Glaucopsyche alexis
MQSVTQSCDGTSNATHKCTQCNNSFKSLKGLNIHTTKIHRKCISQNSSPLDIHPIIPSAPTYVTNDTTPFHTYLSQLKNSIPLVKRIPRGARITVATHLSQLIQKCYISNCTQDWQNLFLFSYSTLHIIKTDEPNLSLTQKIKNNCALSSSPSPAPLIKHDNPRNRNKLIENKICEGDLKGAARLLFSNDVLSPDTPDTLQALRTKHPPAPVDTCFLDPPTAGQACLQIQNKDIMDAILSFKPGSAAGLDGISPQHLKDLTSHSVGNAGEQLVNSITKLINFMYSGNVNPEIVPILFGANLIALTKKDGGVRPIAVGSTLRRLASKIAVRHILPKLNSEFEPVQLGFGVKGGCEAAVLALRSFLTYGQPDVLLKIDVKNAFNSVNRDTLLTEIKQHIPEIYNYLLLSYANPTKLLYRSNELSSEVGCQQGDPLGPAIFSLAINSIIKNLNSKFNVWYLDDGTLGGDVDTVFSDLFLIKNKFEAIGLELNFSKCELFINNCDLNLNDVKQKFNILAPNIKIVNSNSLYLLGSAIFDESISEYINNSITKFQNSADRLLEISPHYALCILKFCLFVPKFTYVLRCCSFWNHPDLLTQVDDLIKISLESILNMQLNEQSWTQASLPIRYGGLGIRKISSVALPAFLSSVHSSANLISKILRASPSNFEIAGLEEARNAFLIACPGQNFPVSPNSQRSWDDINCKSTYDNLLSRGTGSARARLLAVGTHEAGYWLHAYPSSNTGTFLEPDTLRIATCLRLGVSVCAPHKCPCGSDVDKLGHHGLSCQKSAGRLTRHAALNDIIRRSLATVNVPSLLEPTGIARDDGKRPDGMSLIPWKMGRVLVWDATCSDTLAPSHLHGTYNRAGAACEAAEKAKTCKYRGLGSEYDFVPFGVETLGPWGPSAIRLFIEIGKRLVDITGDRRAGSYLGQRISLAIQRGNAASIFGTLPKGTLFNNIF

SEQ ID NO: 17684 - protein, 954 aa, Cosmia trapezina
MQSVTQSCDGTSNATHTCTQCNKSFKSLKGLNIHTTKTHRKCISQNSSPLDIHPIIPSAPTYVASDPTPFHIYLSHLKNSIPIVKRIPRGARITVATHLSQLIQKCYIRNCTQDWQNLFLFSYSTLHIIKTDEPYLSLTQKIKNNCAVSSSPSPAPPIKHDAPRNRNKLIENKICDGDLKGAARLLFSNDVLSPDTPDTLQALQTKHPPAPVNPYFLDPPTAGQACLQIQNKDVTAAILSFKPGSAAGLDGISPQHLKDLTSHSVGDAGEQLVNSITKLINFMYSGNVNPEIVPILFGANLIALTKKDGGVRPIAVGSTLRRLASKIAVRHILPKLNSEFEPVQLGFGVKGGCEASVHALRSFLTYGQPDVLLKIDVKNAFNSVNRDTLLTEIKQHIPEIYNYLLLSYADPTKLLYRSNELSSEVGCQQGDPLGPAIFSLAINPIIKNLNSKFNVWYLDDGTLGGDVDTVFSDLFLIKNKFEAIGLELNFSKCELFINNCNLNLNDVKQKFNILAPNIKIVNSNSLYLLGSPIFDESISEYFNNSITKFQNSADRLLEISPHYALCILKFCLFVPKFTYVLRCCSFWNHPDLLTQVDDLIKISLESILNMQLNDQSWTQASLPIRYGGLGIRKISSVALPAFLSSVHSSANLISKILRASPSNFEIAGLEEARNAFLIACPGQNFPVSSNSQRSWDDIICKLTHDNLLSCSTGSARARLLAVGAHEAGYWLHAYPSSNTGTFLEPDTLRIATCLRLGVPVCAPHKCPCGSDVDRLGHHGLSCQKSAGRFSRHAALNDIIRRSLATVNVPSLLEPTGIARDDGKRPDGMSLIPWKMGRVLVWDATCSDTLAPSHLHGTSIRAGAACEAAEKGKVSKYRGLGSEYDFVPFGVETLGPWGPTAIRLFNEITKRLVDVTGDRRAGSYLGQRISLAIQRGNAASIFGTLPKGTPFNNIF

SEQ ID NO: 17685 - protein, 954 aa, Pyrgus malvae
MQSVTQSCDGTSNATHTCTQCNKSFKSLRGLNIHSTKIHRKCFSQNSSPLDIHPIIPSAPTYVTNDQTPFHTYLSHLKNSIPIVKRIPRGARITVATHLSKLIQKCYISNCTQDWQNLFLFSYSTLHIIKTDEPHLSLTQKIKNNCAVSSSPSPAPVINHNAPHNRNKLIENKICNGDLKGAARLLFSSDVLSPDTPDTLQALRTKHPPGPVNPYFLDPPTAGQACLQIQNKDVTDAILSFKPGSAAGLDGISPQHLKDLTSHSVGDAGEQLVNSITKLINFMYSGNVNTEIVPIFFGANLIALTKKDGGVRPIAVGSTLRRLASKIAVRHILPKLNSEFEPVQLGFGVKGGCEAAVHALRSFLTYEQPDILLKIDVKNAFNSINRDTLLTEIKQHIPEIYNYLLLSYADPTKLLYHSNELSSEVGCQQGDPLGPAIFSLAINPIIKNLNSKFNVWYLDDGTLGGDVDTVYSDLFLIKNKFEAIGLELNFSKCELFINNCELNLNDVKQKFNILAPNIKIVNSNSLYLLGCPIFDESISEYINNSITKFQNSADRLLEISPHYALCILKFCLFVPKFTYVLRCCSFWNHSDLLRQVDDLNKISLESILNMQLNEQSWTQASLPIRYGGLGIRKISSVALPAFLSSVHSSANLIRKILRPSPSNFEIADLEEARNAFLIACPGQNLTFSPILQRSWDDIFCKLTYENLLSCSTGSARARLLAVCAHEAGYWLHAYPSSNTGTFLEPDTLRIATCLRLGVPVCVPHKCPCGSDVDKLGHHGLSCQKSAGRFSRHAALNDIIHRSLATVNVPSVREPTGIARDDGKRPDGMSLIPWKMGRVLVWDATCSDTLAPSHLHGTNIRAGAACEAAEKVKAFKYRGLGSEYDFVPFGVETLGPWGPSAMKLFKEIGKRLVDVTGDRRAGSYLGQRISIAIQRGNAASIFGTLPKGTPFNNIF

SEQ ID NO: 17686 - protein, 959 aa, Tinea trinotella
MQSVTQSCDGTSNATHTCSQCSKSFKSLKGLNIHTTKIHRKCSSQNSSPIDIHPIIPSAPTYVANNSTPFHKYLSNLKNSIPVVKRIPRGARITVATHLSKLIQKCYISNCTQDWQNLFLFSYNTLHIIKTNEPNLSLTQKIKNNCAVSSLPSPAPLAITRSIKHDAPRNRNKLIENKISDGDLKGAARLLFSNDVLSPDTPDTLQALRTKHPPAPLNPYFLDPPTAGQACLQIQNKDVTDAILSFKPGSAAGLDGISPQHLKDLTSHSVGDAGEQLVNSITKLINFMYSGNVNPEIVPILFGANLIALTKKDGGVRPIAVGSTLRRLASKIAVRHILPKLNSEFEPVQLGFGVKGGCEAAVHALRSFLTYGQPDVLLKIDVKNAFNSVNRDTLLTEIKQHIPEIYNYLLLSYADPTKLLYRSNELSSEVGCQQGDPLGPAIFSLAINPIIKNLNSNFNVWYLDDGTLGGDVNTVFSDLFLIKSKFEAIGLELNFSKCELFINNCALNLNDVKQKFNILAPNIKIVNSNSLYLLGSPIFDESISEYIKNSITKFQNSADRLLEISPHYALCILKFCLFVPKFTYVLRCCSFWNYPDLLKHVDNLIKNSLESILNMQLNEQSWTQASLPIRYGGLGIRKISSVALPAFLSSVHSSANLIGKILRATRSNFEIAALEEARNAFLIACPGQNFSISPNSQRSWDDINCKLTYDNLLSSSTGSARARLLAVGTHEAGYWLHAYPSSNTGTFLEPDTLRIATCLRLGVPVCAPHKCPCGSDVDKLGHHGLSCQKSAGRFSRHAALNDIIRRSLASVNVPSLLEPTGIARDDGKRPDGMSLIPWKMGRVLVWDATCSDTLAPSHLHGTNSRAGAACEAAEKAKACKYRGLGSEYDFVPFGVETLGPWGPSALRLFKEISKRLVDITGDRRVGSYLGQRISLAIQRGNAASIFGTLPKGTPFNNVF

SEQ ID NO: 17687 - protein, 952 aa, Leucinodes orbonalis
MQSVTQSCDGTSNSHTCTQCKKTFQSLRGLNIHITKIHRKCISQNSSPIDIHPITSETIYEPNDRTPFLTYLSHLKNSLHLVKRIPRGARITVATHLYQLVQKCYISNRTQDWQNLFLFSYRSLHVTKTDISNLSLTQKIKNNCVVSCPPTPAPLNNYVAPHNTKKLIENKISDGDLKGAARLLFSNDVLSPDTPDTLQALRMKHPPAPLNPYFLDPPTARQACLQIQNKDVMNGLSSFKPGSAAGLDGISPQHLKDLTSHSVGDAGEQLVNSITKLINFMYSGNVNPEIVPILFGANLIALTQKDGGVRPIAVGSTLRRLASKIAVRHILPKLNSEFEPVQLGFGIKGGCEAAVHALRSFLTYGQPDVLLKIDVKNAFNSVNRDTLLTEIKKHIPEIYNYLLLSYADLTKLLYRSNELSSEVGCQQGDPLGPAIFSLAINPIIKNLNSKFNVWYLDDGIIGGDMDTAFSDLSLIKNKFEAIGLELNLSKCELFINNSNLNLNNVKQKFNTLAPNIKIVNRNSLYLLGSPIFDISASEYINNSISKFKNSADRLLEISPHYALCILKYCLFVPKFTYVLRCCSFWNHPDLLTQVDGLVKISLESIFNMQLNEQSWIQATLPIRYGGLGIRKISSIALPAFLSSVHSTGNLISKILRAFPSNFEIAGLEEARNAFSNACPGQNFPDSPNSQRSWDDKICKLTYDSLLSSSSGSERARLLALGAREAGYWLHAYPSSNTGTFLEPDTLRIVTCLRLGVPVCAPHTCPCGSDVDKLGHHGLSCQKSAGRFSRHAALNDIIRRSLATVNVPSLLEPSGIARDDGKRPDGMSLIPWKLGRVLVWDATCSDTLAPSHLHGTNNRAGAACEAAEKAKTCKYRGLGSEYDFVPFGVETLGPWGPSAIRLFKEISKRLVDITGDRRSGSYLGQRISLAIQRGNAASVFGTLPKGGSFNYFI

SEQ ID NO: 17688 - protein, 954 aa, Mellicta athalia
MQSMTQSGDGTSNTIHTCTQCNKSFKSLKGLNIHTTKTHRKCFSQDISSVDTHPIIPNTPSHASNDQIPFHTYLSHLKTSIPIIKRIPRGARITVATHLSQLIQKCYISNCTQDWQNLFLFSYSTLHIIKTDEPNLSLTQKIKNKCAASSSPSPAPLIKHDDPLNRKKLIINKICDGDLKGAARLLFSNDVLSPDTPDTLQALLTKHPPAPVNPYFLDPPTAGQACLQIQNKDVTNAISSFKPGSASGLDGISPQHLKDLTSHSVGDAGTQLLNSITKLINFMYSGNVNPEIVPILFGANLIALTKKDGGVRPIAVGSTLRRLASKIAVRHILPKLNSEFEPVQLGFGVKEGCEAAVHALRSFLTYGQPDVLLKIDVKNAFNSINRDTLLTEIKQHIPELYNYLLLSYGDPTKLLYRSNELSSEVGCQQGDPLGPAIFSLAINPIIKNLNSKFNVWYLDDGTLAGDVDTVFSDLFFIKNKFEAIGLELNFSKCELFINNSVLNLNDIKQKFNILAPNIKIVNSNSLYLLGSPIFDDSIPEYINNSITKFQNSVDRLLEISSHYALCILKFCLFVPKFTYVLRCCSFWNHPDLLTKVDKLIKISLESILNMQLNEQSWTQASLPIRYGGLGIRKISSVALPAFLSSVHSSANLISKILRASPSNFEIAGLEEARNAFLIACPGQNFPVSTNSQRSWDDINCKFTFDDLLSCSTGSARARLLAVGTHEAGYWLHAYPSPNTGTFLEPDTLRIATCLRLGVPVCVPHKCPCGSDVDKLGHHGLSCQKSAGRFLRHAALNDIIRRSLATINVPSLLEPTGIGRDDGKRPDGMSLIPWKMGRVLVWDATCSDTLAPSHLHGTNNRAGAACEAAEKAKAGKYRGLGPEYDFVPFGVETLGPWGPSALRLFKEIAKRLVDITGDRRAGSYLGQRISLAIQRGNAASIFGTLPKGTPFNNIF

SEQ ID NO: 17689 - protein, 954 aa, Mellicta athalia
MQSVTQSGDGTSNTIHTCTQCNKSFKSLKGLNIHTTKTHRKCFSQDISSVDTHPIIPNTPSHASNDQIPFHTYLSHLKNSIPIIKRIPRGARITVATHLSQLIQKCYISNCTQDWQNLFLFSYSTLHIIKTDEPNLSLTQKIKNKCAASSSPSPAPLIKHDDPLNRKKLIINKICDGDLKGAARLLFSNDVLSPDTPDTLQALLTKHPPAPVNPYFLDPPTAGQACLQIQNKDVTNAISSFKPGSASGLDGISPQHLKDLTSHSVGDAGTQLLNSITKLINFMYSGNGNPEIVPILFGANLIALTKKDGGVRPIAVGSTLRRLASKIAVRHILPKLNSEFEPVQLGFGVKGGCEAAVHALRSFLTYGQSDVLLKIDVKNAFNSINRDTLLTEIKQHIPELYNYLLLSYGDPTKLLYRSNELSSEVGCQQGDPLGPAIFSLAINPIIKNLNSKFNVWYLDDGTLAGDVDTVFSDLFLIKNKFQAIGLELNFSKCELFINNSVLNLNDIKQKFNILAPNIKIVNSNSLYLLGSPIFDDSIPEYINNSITKFQNSVDRLLEISSHYALCILKFCLFVPKFTYVLRCCSFWNHPDLLTKVDKLIKISLESILNMQLNEQSWTQASLPIRYGGLGIRKISSVALPAFLSSVHSSANLISKILRASPSNFEIAGLEEARNAFLIACPGQNFPVSTNSQRSWDDINCKFTFDDLLSCSTGSARARLLAVGTHEAGYWLHAYPSPNTGTFLEPDTLRIATCLRLGVPVCVPHKCPCGSDVDKLGHHGLSCQKSAGRFSRHAALNDIIRRSLATINVPSLLEPTGIARDDGKRPDGMSLIPWKMGRVLVWDATCSDTLAPSHLHGTNNRAGAACEAAEKAKAGKYRGLGPEYDFVPFGVETLGPWGPSALRLFKEIAKRLVDITGDRRAGSYLGQRISLAIQRGNSASIFGTLPKGTPFNNIF

SEQ ID NO: 17690 - protein, 959 aa, Tinea trinotella
MQSVTQSCDGTSNATHTCSQCSKSFKSLKGLNIHTTKIHRKCSSQNSSPIDIHPIIPSAPTYVANNSTPFHKYLSNLKNSIPVVKRIPRGARITVATHLSKLIQKCYISNCTQDWQNLFLFSYNTLHIIKTNEPNLSLTQKIKNNCAVSSLPSPAPLAITRSIKHDAPRNRNKLIENKISDGDLKGAARLLFSNDVLSPDTPDTLQALRTKHPPAPLNPYFLDPPTAGQACLQIQNKDVTDAILSFKPGSAAGLDGISPQHLKDLMSHSVGDAGEQLVNSITKLINFMYSGNVNPEIVPILFGANLIALTKKDGGVRPIAVGSTLRRLASKIAVRHILPKLNSEFEPVQLGFGVKGGCEAAVHALRSFLTYGQPDVLLKIDVKNAFNSVNRDTLLTEIKQHIPEIYNYLLLSYADPTKLLYRSNELSSEVGCQQGDPLGPAIFSLAINPIIKNLNSNFNVWYLDDGTLGGDVNTVFSDLFLIKSKFEAIGLELNFSKCELFINNCALNLNDVKQKFNILAPNIKIVNSNSLYLLGSPIFDESISEYIKNSITKFQNSADRLLEISPHYALCILKFCLFVPKFTYVLRCCSFWNYPDLLKHVDDLIKNSLESILNMQLNEQSWTQASLPIRYGGLGIRKISSVALPAFLSSVHSSANLIGKILRATPSNFEIAALEEARNAFLIACPGQNFSISPNSQRSWDDINCKLTYDNLLSSSTGSARARLLAVGTHEAGYWLHAYPSSNTGTFLEPDTLRIATCLRLGVPVCAPHKCPCGSDVDKLGHHGLSCQKSAGRFSRHAALNDIIRRSLASVNVPSLLEPTGIARDDGKRPDGMSLIPWKMGRVLVWDATCSDTLAPSHLHGTNSRAGAACEAAEKAKACKYRGLGSEYDFVPFGVETLGPWGPSALRLFKEISKRLVDITGDRRVGSYLGQRISLAIQRGNAASIFGTLPKGTPFNNVF

SEQ ID NO: 17691 - protein, 659 aa, Tinea trinotella
MYSGNVNPEIVPILFGANLIALTKKDGGVRPIAVGSTLRRLASKIAVRHILPKLNSEFEPVQLGFGVKGGCEAAVHALRSFLTYGKPDVLLKIDVKNAFNSVNRDTLLTEIKQHIPEIYNYLLLSYADPTKLLYRSNELSSEVGCQQGDPLGPAIFSLAINPIIKNLNSNFNVWYLDDGTLGGDVNTVFSDLFLIKSKFEAIGLELNFSKCELFINNCALNLNDVKQKFNILAPNIKIVNSNSLYLLGSPIFDESISEYIKNSITKFQNSADRLLEISPHYALCILKFCLFVPKFTYVLRCCSFWNYPDLLKHVDNLIKNSLESILNMQLNEQSWTQASLPIRYGGLGIRKISSVALPAFLSSVHSSANLIGKILRATPSNFEIAALEEARNAFLIACPGQNFSISPNSQRSWDDINCKLTYDNLLSSSTGSARARLLAVGTHEAGYWLHAYPSSNTGTFLEPDTLRIATCLRLGVPVCAPHKCPCGSDVDKLGHHGLSCQKSAGRFSRHAALNDIIRRSLASVNVPSLLEPTGIARDDGKRPDGMSLIPWKMGRVLVWDATCSDTLAPSHLHGTNSRAGAACEAAEKAKACKYRGLGSEYDFVPFGVETLGPWGPSALRLFKEISKRLVDITGDRRVGSYLGQRISLAIQRGNAASIL

SEQ ID NO: 17692 - protein, 959 aa, Tinea trinotella
MQSVTQSCDGTSNATHTCSQCSKSFKSLKGLNIHTTKIHRKCSSQNSSPIDIHPIIPSTPTYVANNSTPFHKYLSNLKNSIPVVKRIPRGARITVATHLSKLIQKCYISNCTQDWQNLFLFSYNTLHIIKTNEPNLSLTQKIKNNCAVSSLPSPAPLAITRSIKHDAPRNRNKLIENKISDGDLKGAARLLFSNDVLSPDTPDTLQALRTKHPPAPLNPYFLDPPTAGQACLQIQNKDVTDAIISFKPGSAAGLDGISPQHLKDLTSHSVGDAGEQLVNSITKLINFMYSGNVNPEIVPILFGANLIALTKKDGGVRPIAVGSTLRRLASKIAVRHILPKLNSEFEPVQLGFGVKGGCEAAVHALRSFLTYGKPDVLLKIDVKNAFNSVNRDTLLMEIKQHIPEIYNYLLLSYADPTKLLYRSNELSSEVGCQQGDPLGPAIFSLAINPIIKNLNSNFNVWYLDDGTLGGDVNTVFSDLFLIKSKFEAIGLELNFSKCELFINNCALNLNDVKQKFNILAPNIKIVNSNSLYLLGSPIFDESISEYIKNSINKFQNSADRLLEISPHYALCILKFCLFVPKFTYVLRCCSFWNYPDLLKHVDNLIKNSLESILNMQLNEQSWTQASLPIRYGGLGIRKISSVALPAFLSSVHSSANLIGKILRATPSNFEIAALEEARNAFLIACPGQNFSISPNSQRSWDDINCKLTYDNLLSSSTGSARARLLAVGTHEAGYWLHAYPSSNTGTFLEPDTLRIATCLRLGVPVCAPHKCPCGSDVDKLGHHGLSCQKSAGRFSRHAALNDIIRRSLASVNVPSLLEPTGIARDDGKRPDGMSLIPWKMGRVLVWDATCSDTLAPSHLHGTNSRAGAACEAAEKAKACKYRGLGSEYDFVPFGVETLGPWGPSALRLFKEISKRLVDITGDRRVGSYLGQRISLAIQRGNAASIFGTLPKGTPFNNVF

SEQ ID NO: 17693 - protein, 953 aa, Notocelia uddmanniana
MHAATQSDDGTSNLNFICVQCDNSFKTQRGLNIHISKKHRLCLSQNGPALNLDPAFIPAPLSDKPNSIPFHLYLSDLKNNVPVVKRVPRGARISVANHLSGLITKCVENNQIDDWHNLLLFSFNTLHAKNDEAISLTQKIKNNCVSNTTPHFCRPPKRCASSTFNKTKLIECKISDGDLKGAARLLFTNDVLSPDTPDTLLALRSKHPPAPVIPYVIDPPTADQACLQIEGKDVVDAIISFKTGSAAGLDGISPQHLKDLISQSVGDAGEQLICSLTKLINFMFSGKINNEVIPLLYGANLIALTKKDGGVRPIAVGSTLRRLASKIAVRHIRSKLQSLFEPVQLGFGTKGGCEAAVHALRTYLSYDDCEIVVKIDVKNAFNSVNRDTLLAEVKDKIPEIYNYLLLCYADPSKLMYKSHELSSEVGCQQGDPLGPAIFSLAINPIIQKLKSKFNVWYLDDGTLGGDVDTVLSDLAFIKTNFENIGLELNFSKCELFIQKTSYSLVDLIQKFVHLAPGIRIVDKFSLCLLGSPIFEESFPGYISDTISKFQSHANRLLEISPHYALIILKFCLFVPKFTYVLRCCPFWKHQNLLSRMDDLIKTSLEMILNIQLTEPSWSQASLPIRYGGLGIRKVSSVASPAFLASTHSTSGLIGNILRALPTYCEIAGLEGAKNAFKVACPGKKIPDNPKSQRSWDNIYCDLNYNILLNSSAGPDRARLLAVGTREAGYWLHAHPSPNTGTFLDPTSLRLATGLRLGVAVCTPHICSCGTDVDRLGHHGLCCQKSAGRFSRHATLNDIIRRSLATVNVPALLEPTGMVRDDGKRPDGVSLVPWSVGRMLVWDATCVDTLAPSHLQRTTVKAGAAAENAEILKRNKYKGLGREYMFVPFGVETLGPWGPSAHKLFAEIAKRLVDVTGDRRAGGFLAQRISIAIQRGNAASILGTMPQGPVLDLS

SEQ ID NO: 17694 - protein, 945 aa, Parnassius apollo
MQSVTQSSDDTANATLICTQCNKSFKSLKGLNIHTIKTHRKCISQNSSPLDIHPFIPNTPTFAANFPTPFHTYLSHLKNSIPTVKRIPRGARITVATHLSQVIQKCYISNCTQDWQNLFLFSYSTLHITKTDKPNLSLTQKIKNNCTVSSSPSPAPLIKHDAPRNRNKLIENKICDGDLKGAARLLFSNEVLSPDTPDTLQALRSKHPLAPVNPYFLDRPTVGQACLQIQNKDVTDAILSFKPGSAAGLDGISPQHLKDLTSHSVGDAGEQLVNSITKLINFMYSGNVNPEIVPILFGANLIALTKKDGGVRPIAVGSTLRRLASKIAVRHILQKLNSEFEPVQLGFGVKGGCEAAVHALRSFLTYGHPDVLLKIDVKNAFNSVNRGTLLTEINQHIPEIYNYLLLSYADPTKLLYRSNELSSEVGCQQGDPLGPAIFSLAINPIIKSLNSKFNIWYLDDGTLGGDMETVFSDLFSIKNKFEAIGLELNFSKCELFINNCNLNLNDVKHKFNTLAPNIKIVNSNSLYLLGSPIFNESMSEYINNSIAKFQNSADRLLEISPHYALCILKSCLFVPKFTYVLRCCSFWNHPDLLTQVDNLIKISLESILNIHMNEQSWTQASLPIRYGGLGIRKISSVSLPAFLSSVYSSANLISKILRASSSNFEIGGLEEARNAFLIACPGQNFQFPLNSQRSWDDINCKLTYDNLLSFSTGSARARLLAVGTHEAGYWLHAYPSSNTGTFLEPDTLRIATCLRLGVPVCAPHKCPCGSDVDKLGYHGLSCQKSAGRFSRHAALNDIIRRSLATVNVPSLLEPSGIARDDGKRPDGMSLIPWRMGRVLVWDATCSDTLAPSHLRGTNNRAGAACEAAEKAKVCKYRGLGSEYIFVPFGVETLGPWGPSAISLFKEIAKRLIDVTGDRRAGSYLGQRISLAIQRGKRCQYLRNLA

SEQ ID NO: 17695 - protein, 953 aa, Pammene fasciana
MHAATQSGDGTSNLNFICVRCDSSFKTQRGLNIHISKKHRLCISQNDAALNLDPSLSTTPLSDQPNSITFHLYLSQLKNNVPVIKRVPRGARITVANHLSSLIIKCVENNQTNDWHNLFLFSFNTLHAKNDEAISLTQKIKNNCVSNTNPHISRLSKGCASSTYNRTKLIESKISDGDLKGAARLLFTNDVLSPDTPDTLSALISKHPPAPSVPHSFAPPSADQACLQIEGKDVIDAIISFKTGSAAGLDGISPQHLKDLISHSVGDAGEQLVGSLTKLINFMFSGKINPDIAPILYGANLIALTKKDGGVRPIAVGSTLRRLASKIAVRHFRSKLQALFEPIQLGFGTKGGCEAAVHALRTYLSLDDCEIVVKIDVKNAFNSVSRDTLLTEVKEKIPELYNYLFSCYSDSSKLMYKSHELSSEVGCQQGDPLGPAIFSLAINPIIKNLKSKFNVWYLDDGTLGGDVNTVLSDLSFIKSSFENIGLDLNFSKCELFIQKSSCTLADLKPKFDDLAPNIKSVDKNSLCLLGSPIFEESFPGYISNTISKFKSHTNRLIEISPHYALVILKFCLFVPKFTYVLRCCPFWKHQNLLSPIDDLIKISLETILNIQLSEPSWSQASLPIRFGGLGIRKISSVACPAFLASTHSTSGLIGNILRALPTNYEIAGFEDAKNAFKIACPGKTFPDNPKSQRSWDNVYCDLSYNTLLNNCTGPDRARLLAVGAREAGHWLHAHPSPNTGTFLDPTSLRLATGLRLGVSVCTPHICSCGTDVDRLGHHGLSCQKSAGRFSRHASLNDIIRRSLATINVPALLEPTGIIRDDGKRPDGVSLVPWSLGRMLVWDATCVDTLAPSHLQRTNVKAGAAAESAEISKRNKYKSLGREYHFVPFGVETLGPWGPSAHKFFAEIAKRLVDVTGDRRAGGFLAQRISIAIQRGNAASILGTMPQGPSLDLS

SEQ ID NO: 17696 - protein, 672 aa, Bembecia ichneumoniformis
MYSGNVNPEFVPILFGANLIALTKKDGGVRPIAVGSTLRRLASKIAVRHILPKLNAEFEPVQLGFGVKGGCEAAVHSLRSFLTYGQPDVLLKIDVKNAFNSVNRDTLLTEIKQHIPEIYNYLLLSYADPTKLLYRSNELSSEVGCQQGDPLGPAIFSLAINPIIKNLNFKFNVWYLDDGTLGGDVDTVFSDLFLIKNKFEAIGLELNFNKCELFINNCNLNSNDVKEKFNILAPNIKIVNSNSLYLLGSPIFDESFSEYINNSITYFQNFADRLLEISPHYALCILKFCLFVPKFMYVLRCCSVWNHPDLLTQVDDLIKISLESILNMQLNEQSWSQASLPIRHGGLGIRKISSVALPAFLSSVYSSENLISKILRASPSNFEIAGLEEARNAFLIACPGQNFPVSPNSQRSWDDINCKLTYDNLLSCSTGSARARLLAVGAHEAGYWLHAYPSSNTGTFLEPDTLRIATCLRLGVPVCVPHKCPCGNDVDNLGHHGLSCQKSAGRFSRHAALNDIIRRSLASVKVPSLLEPTGIARDDGKRPDGMSLIPWKMGRVLVWDATCSDTLAPSHLHGTNNRAGAACEAAEKAKACKYRGLGSEYDFVPFGVETLGPWGPNAIRLFKEIVKRLVEITGDRRAGSYLGQRISLAIQRGNAASIFGTLPKGTPFNNIF

SEQ ID NO: 17697 - protein, 671 aa, Cydia splendana
MFSGKINTNIVPILYGANLIALTKKDGGVRPIAVGSTLRRLASKIAVRHIRSKLQSLFEPIQLGFGTKGGCEAAVHALRTYLSLGDCEIVVKIDVKNAFNSVSRDTLLTEVKDKIPELYNYLFFCYSDSSKLMYKSHELSSEVGCQQGDPLGPAIFSLAINPIIKNLKSKFNVWYLDDGTLGGDVNTVLSDLSFIKSSFENIGLELNFSKCELFIQKSSCTLTNLQPKFDDLTPNIKSVDKYSLCLLGSPIFEESFPDYISNSITKFKSHTDRLLEISPHYALVILKFCLFVPKFTYVLRCCPFWKHQNLLSPIDDLIKISLDTILNIQLSEPSWSQASLPIRFGGLGIRKISSVASPAFLASTHSTSGLIGNILRALPTNCEIAGFEDAKNAFKIACPGKQFPDNPNSQRSWDNVYCDLTYNTLLNNCTGPDRARLLAVGAREAGYWLHAHPSPNTGTFLDPASLRLATGLRLGVSVCTPHICSCGTDVDRLGHHGLSCQKSAGRFSRHASLNDIVRRSLATINVPALLEPTGIIRDDGKRPDGVSLVPWSLGRMLVWDATCVDTLAPSHLQRTTVKAGGAAESAEILKRNKYKSLGREYHFVPFGVETLGPWGPSAHKLFAEIAKRLVDVTGDRRAGGYLAQRISIAIQRGNAASILGTMPQGPILDLS

SEQ ID NO: 17698 - protein, 939 aa, Mellicta athalia
MQSVTQSCDGTSNATHICTQCNKSFKSLKGLNIHTTKTHRKFFSQNISPVDTHPTIPNTPTHLANDQTPFHTYLSHLKNSIPIVKRIPRGARITVATHLSQLIQKCYLSNCTQNWQNLFLFSYSTLHIIKTDEPNLSLTQKIKNNCAVSSSPCPAPLIKHDAPHNHNRLIINKICDGDLKGAARLLFSNDVLSPDTPDTLQALLTKHPPAPVNPYFLDPPTAGQACLQIQNKDVTNAISSFKPGSAAGLDGISPQHLKDLTSYSVGDAGKQLVNSITKLINFMYSGNVNPEIVPILFGANLIALTKKDGGVRPIAVGSTLRRLASKIAVRHILPKLNSEFEPVQLGFGVKGGCEAAVHALRSFLTYGQPDVLLKIDVKNAFNSVNRDTLLTEIKQHIPELYNYLLLSYADPTKLLYRSNELSSEVGCQQGDPLGPAIFSLAINPIIKNLNSKFNVWYLDDGTIGGDVDTVFSDLFLIKNKFEAIGLELNFSKCELFINNRVLNLNDIKQKFNILAPNIKIVNSNSLYLLGSPIFDEAIPEYINNSISKFQNSVDRLFEISSHYALCILKFCLFVPKFTYVLRCCSFWKHPDLLTQVDDLIKISIESILNMQLNEQSWTQASLPIRYGGLGIRKISSVALPAFLSSVHSSANLISKILRASPSNFEIAGLEEARNAFLIACPGQNFPVSINSQRSWDDINCKFTFDNLLSCSTGSARARLLAVGTHEAGYWLHAYPSSNTGTFLEPDTLRIAICLRLGVPVCFPHKCPCGSDVDKLGHHGLSCQKSAGRFSRHAALNDIIRRSLATINVPSLLEPTGIARDDGKRPDGMSLIPWKMGRVLVWDATCSDTLAPSHLHGTNNRAGAACEAAEKAKAGKYRGLGSEYDFVPFGVETLGPWGPSAIRLFKEIAKRLVDITGDRRAGSYLGQKIRIIRYNSKITC

SEQ ID NO: 17699 - protein, 959 aa, Tinea trinotella
MQSVTQSCDGTSNATHTCSQCSKSFKSLKGLNIHTTKIHRKCSSQNSSPIDIHPIIPSAPTYVANNSTPFHKYLSNLKNSIPVVKRIPRGARITVATHLSKLIQKCYISNCTQDWQNLFLFSYNTLHIIKTNEPNLSLTQKIKNNCAVSSLPSPAPLAITRSIKHDAPRNRNKLIENKISDGDLKGAARLLFSNDVLSPDTPDTLQALRTKHPPAPLNPYFLDPPTAGQACLQIQNKDVTDAILSFKPGSAAGLDGISPQHLKDLTSHSVGDAGEQLVNSITKLINFMYSGNVNPEIVPILFGANLIALTKKDGGVRPIAVGSTLRRLASKIAVRHILPKLNSEFEPVQLGFGVKGGCEAAVHALRSFLTYGKPDVLLKIDVKNAFNSVNRDTLLTEIKQHIPEIYNYLLLSYADPTKLLYRSNELSSEVGCQQGDPLGPAIFSLAINPIIKNLNSNFNVWYLDDGTLGGDVNTVFSDLFLIKSKFEAIGLELNFSKCELFINNCALNLNDVKQKFNILAPNIKIVNSNSLYLLGSPIFDESISEYIKNSINKFQNSADRLLEISPHYALCILKFCLFVPKFTYVLRCCSFWNYPELLKHVDNLIKNSLESILNMQLNEQSWTQASLPIRYGGLGIRKISSVALPAFLSSVHSSANLIGKILRATPSNFEIAALEEARNAFLIACPGQNFSISPNSQRSWDDINCKLTYDNLLSSSTGSARARLLAVGTHEAGYWLHAYPSSNTGTFLEPDTLRIATCLRLGVPVCAPHKCPCGSDVDKLGHHGLSCQKSAGRFSRHAALNDIIRRSLASVNVPSLLEPTGIARDDGKRPDGMSLIPWKMGRVLVWDATCSDTLAPSHLHGTNSRAGAACEAAEKAKACKYRGLGSEYDFVPFGVETLGPWGPSALRLFKEISKRLVDITGDRRVGSYLGQRISLAIQRGNAASIFGTLPKGTPFNNVF

SEQ ID NO: 17700 - protein, 954 aa, Clostera curtula
MQSGTQSCDGTSNAIHTCTQCNKSFKSLKGLNIHTTKTHRKCNSQISTPLDIHPILPSDPAYVANDPTPFHTYLSHLKNSIPIVKRIPRGARITVATHLAQLIQKCYLNNCAQDWMNLFLFSYSTLHIIKTDEPNLSLTQKIKNNCAVSSSPSPTPIFKHDAPHNRKKLIENKICDGDLKGAARLLFSNDVLSPDTPDTLQALRTKHPPAPVTPYFLDPPTAGQACLQIQNKDVTDAILSFKPGSAAGLDGISPQHLKDLTSHSVGDAGEQLVHSITKLVNFMYSGNVNPEIVPILFGANLIALTKKDGGVRPIAVGSTLRRLASKIAIRHILPKLNSEFEPVQLGFGVKGGCEAAVHALRSFLTYGQPDVLLKIDVKNAFNSVNRDTLLTEIKQHIPEIYNYLLLSYAEPTKLLYRSNELSSEVGCQQGDPLGPAIFSLAINPIIKKLNSKFNVWYLDDGTLGGDVDTVLSDLFIIKNKFEAIGLELNFSKCELFINNCDLNLNDVKLKFNILAPNIKIVNSNSLYLLGSPIFDESFAEYINNSITKFQNSADRLIEISPHYALCILKFCLFVPKFTYVLRCCSFWNRPDLLTQVDDLIKISLESVLNMQLNEHSWTQASLPIRYGGLGIRKISSVALPAFLASVHSSASLISTILRASPSNFEIAGLEEARNAFLIACPGQNFPSSPNSQRSWDDINCKLSYDNLLSCSTGSARARLLAVGTHEAGYWLHAYPSSKTGTFLEPDTLRIATCLRLGVPVCAPHKCPCGSDVDKLGHHGLSCQKSAGRFSRHAALNDIIRRSLTSVNVPSLLEPTGIARDDGKRPDGMSLIPWKMGRVLVWDATCSDTLAPSHLHGTNNRAGAACEAAEKAKGYKYRGLGSEYEFVPFGVETLGPWGPSAISLFKEIAKRLVDITGDRRAGSYLGQRISLAIQRGNAASIFGTLPKGTPLYNIF

SEQ ID NO: 17701 - protein, 952 aa, Cydia splendana
MHAATQSGDGTPYPNFNCVQCDNSFKTQRGLNIHISKKHRLCFSQNDAGLNLGPSLLTTPLSDHPNSIPFHLHLSELKNNVPVIKRVPRGARITVAKHLSGLLTKCVENNQIDDWHNLFLFSFKTLHAKKDKTISLTQKIKNNCVSNTTPHISRPSGCSSSTFNRTKLIESKISDGDLKGAARLLFTNDVLSPDTPDTLSALRSKHPPAPSVPHSFAPPTADQACLQIEGKDVIDAIFSFKAGSAAGLDGISPQHLKDLISHSVGDAGEQLVCSLTKLINFMFSGKINTNIVPILYGANLIALTKKDGGVRPIAVGSTLRRLASKIAVRHIRSKLQSLFEPIQLGFGTKGGCEAAVHALRTYLSLDDCEIVVKIDVKNAFNSVSRDTLLTEVKEKIPELYNYLFFCYSDSSKLMYKSHELSSEVGCQQGDPLGPAIFSLAINPIIKNLKSKFNVWYLDDGTLGGDVNTVLSDLSFIKSSFENIALELNFSKCELFIQKSSCTLTNLQPKFDDLTPNIKSVDKYSLCLLGSPIFEESFSDYISNSITKFKSHTDRLLEISPHYALVILKFCLFVPKFTYVLRCCPFWKHQNLLSPIDDLIKISLETILNIQLSEPSWSQASLPIRFGGLGIRKISSVASPAFLASTHSTSGLIGNILRALPTNCEIAGFEDAKNAFKIACPGKQFPDNPNSQRSWDNVYCDLTYNTLLNNCTGPDRARLLAVGAREAGYWLHAHPSPNTGTFLDPASLRLATGLRLGISVCTPHICSCGTDVDRLGHHGLSCQKSAGRFSRHASLNDIVRRSLATINVPALLEPTGIIRDDGKRPDEVSLVPWSLGRMLVWDATCVDTLAPSHLQRTTVKAGGAAESAEILKRNKYKSLGREYHFVPFGVETLGPWGPSAHKLFAEIAKRLVDVTGDRRAGGYLAQRISIAIQRGNAASILGTMPQGPILDLS

SEQ ID NO: 17702 - protein, 954 aa, Cosmia trapezina
MQSVTQSCDGTSNATHTCTQCNKSFKSLKGLNIHTTKTHRKCISQNSSPLDIHPIIPSAPTYVASDPTPFHIYLSHLKNSIPIVKRIPRGARITVATHLSQLIQKCYIRNCTQDWQNLFLFSYSTLHIIKTDEPYLSLTQKIKNNCAVSSSPSPAPPIKHDAPRNRNKLIENKICDGDLKGAARLLFSNDVLSPDTPDTLQALQTKHPPAPVNPYFLDPPTAGQACLQIQNKDVTAAILSFKPGSAAGLDGISPQHLKDLTSHSVGDAGEQLVNSITKLINFMYSGNVNPEIVPILFGANLIALTKKDGGVRPIAVGSTLRRLASKIAVRHILPKLNSEFEPVQLGFGVKGGCEASVHALRSFLTYGQPDVLLKIDVKNAFNSVNRDSLLTEIKQHIPEIYNYLLLSYADPTKLLYRSNELSSEVGCQQGDPLGPAIFSLAINPIIKNLNSKFNVWYLDDGTLGGDVETVFSDLFLIKNKFEAIGLELNFSKCELFINNCNLNLNDVKQKFNILAPNIKIVNSNSLYLLGSPIFDESISEYFNNSITKFQNSADRLLEISPHYALCILKFCLFVPKFTYVLRCCSFWNHPDLLTQVDDLIKISLESILNMQLNEQSWTQASLPIRYGGLGIRKISSVALPAFLSSVHSSANLISKILRASPSNFEIAGLEEARNAFLIACPGQNFPVSSNSQRSWDDIICKLTHDNLLSCSTGSARARLLAVGAHEAGYWLHAYPSSNTGTFLEPDTLRIATCLRLGVPVCAPHKCPCGSDVDRLGHHGLSCQKSAGRFSRHAALNDIIRRSLATVNVPSLLEPTGIARDDGKRPDGMSLIPWKMGRVLVWDATCSDTLAPSHLHGTSIRAGAACEAAEKGKVSKYRGLGSEYDFVPFGVETLGPWGPSAIRLFNEITKRLVDVTGDRRAGSYLGQRISLAIQRGNAASIFGTLPKGTPFNNIF

SEQ ID NO: 17703 - protein, 945 aa, Cydia splendana
MHAATQSGDGTPYPNFNCVQCDNSFKTQRGLNIHISKKHRLCISQNDAGLNLGPSLLTTPLSDHPNSIPFHLHLSELKNNVPVIKRVPRGARITVAKHLSGLLTKCVENNQIDDWHNLFLFSFKTLHAKKDKTISLTQKIKNNCVSNTTPHISRPSGCSSSTFNRTKLIESKISDGDLKGAARLLFTNDVLSPDTPDTLSALRSKHPPAPSVPHSFAPPTADQACLQIEGKDVIDAIFSFKAGSAAGLDGISPQHLKDLISHSVGDAGEQLVCSLTKLINFMFSGKINTNIVPILYGANLIALTKKDGGVRPIAVGSTLRRLASKIAVRHIRSKLQSLFEPIQLGFGTKGGCEAAVHALRTYLSLDDCEIVVKIDVKNAFNSVSRDTLLTEVKDKIPELYNYLFFCYSDSSKLMYKSHELSSEVGCQQGDPLGPVIFSLAINPIIKNLKSKFNVWYLDDGTLGGDVNTVLSDLSFIKSSFENIGLELNFSKCELFIQKSSCTLTNLQPKFDDLTPNIKSVDKYSLCLLGSPIFEESFPDYISNSITKFKSHTDRLLEISPHYALVILKFCLFVPKFTYVLRCCPFWKHQNLLSPIDDLIKISLETILNIQLSEPSWSQASLPIRFGGLGIRKISSVASPAFLASTHSTSGLIGNNCEIAGFEDAKNAFKIACPGKQFPDNPNSQRSWDNVYCDLTYNTLLNNCTGPDRARLLAVGAREAGYWLHAHPSPNTGTFLDPASLRLATGLRLGVSVCTPHICSCGTDVDRLGHHGLSCQKSAGRFSRHASLNDIVRRSLATINVPALLEPTGIIRDDGKRPDGVSLVPWSLGRMLVWDATCVDTLAPSHLQRTTVKAGGAAESAEILKRNKYKSLGREYHFVPFGVETLGPWGPSAHKLFAEIAKRLVDVTGDRRAGGYLAQRISIAIQRGNAASILGTMPQGPILDLS

SEQ ID NO: 17704 - protein, 958 aa, Notocelia uddmanniana
MHASSQPSDSTSLANHTCHLCQRVFQSRRGLNIHYSKIHRNCLSQNLQDITPATTSNHPQCTPDATHPSTSLHCHLSQLKNNVPVIKRIPRGARICVATRLSHLLDKCVETNSIESWRDLLSFAYCTLHTTTTTEDKHTSLTQKIKNNCLKPLDPTFNLQSTRKKPPVYNFSKNVENKISDGDLKGAARLLFSSDVLSPDTPDTLSALQSKHPPAPATPPFLDPPTAIQDCLQIEEKHIVEGISSFKTGSAAGLDGISPQHLKDLISHGVGDTAKKLITSLKNVVNLMLSGGVNSEIVPILYGANLIALTKKDGGVRPIAVGATLRRLASKTAVRHIIPKLQPRFEPTQLGFGTKGGCEAAVHALRTYLSSDQCEVLLKVDVKNAFNSLNRDTLLAEVRDNIPELYNYLLHSYADPSKLMYRNNQLSSEVGCQQGDPLGPAIFSLGINPVIQNLSSKFNVWYLDDGTLGGNVDTVLSDLTILKNKFESIGLVLNFSKCELYIHSTTLNHAEIIEKFDKLTPNIKIVTKDSLNLLGTPIFDEAFPDHINKTISKFQNCSDRLLEISSHSALFILKFCLFVPKFTYMLRCSPFWQHQNLLSPIDSLIKTNLELILNIRLNEESWCQASLPVRYGGLGLRKISSVALPAFLSSAHSSYNLVGKILGDLPSHYKIAGLDCAVNAWLLACPGQNVPVNPKSQKCWDGVISKLTYNTLLNGSSGVERARLTAVGCKEAGQWMNAYPCPSTGTFLDSATLRLAVSLRLGVPICAPHKCPCGSDVDRLGHHGLSCAKSAGRFSRHAALNDIIRRSLASVNVPAVLEPVGIVRDDGKRPDGMSLIPWKMGRVLVWDATCVDTLASSHLHSTIHRAGAAAEAAEALKMRKYRGLDAGYKFVAFGVETLGPWGPGATELFNQLAKRLIDVTGDKRAGSFLAQRLGIAIQRGNAASILGTMPQGPFLDFY

SEQ ID NO: 17705 - protein, 958 aa, Notocelia uddmanniana
MHASSQPSDSTSLANHTCHLCQRVFQSRRGLNIHYSKIHRNCLSQNLQDITPATTSNHPQCTPDATHPSTSLHCHLSQLKNNVPVIKRIPRGARICVATRLSHLLDKCVETNSIESWRDLLSFAYCTLHTTTTTEDKHTSLTQKIKNNCLKPLDPTFNLQSTRKKPPVYNFSKNVENKISDGDLKGAARLLFSSDVLSPDTPDTLSALQSKHPPAPATPPFLDPPTAIQDCLQIEEKHIVEGISSFKTGSAAGLDGISPQHLKDLISHGVGDTAKKLITSLKNVVNLMLSGGVNSEIVPILYGANLIALTKKDGGVRPIAVGATLRRLASKTAVRHIIPKLQPRFEPTQLGFGTKGGCEAAVHALRTYLSSDQCEVLLKVDVKNAFNSLNRDTLLAEVRDNIPELYNYLLHSYADPSKLMYRNNQLSSEVGCQQGDPLGPAIFSLGINPVIQNLSSKFNVWYLDDGTLGGNVDTVLSDLTILKNKFESIGLVLNFSKCELYIHSTTLNHAEIIEKFDKLTPNIKIVTKDSLNLLGTPIFDEAFPDHINKTISKFQNCSDRLLEISSHSALFILKFCLFVPKFTYMLRCSPFWQHQNLLSPIDSLIKTNLELILNIRLNEESWCQASLPVRYGGLGLRKISSVALPAFLSSAHSSYNLVGKILGDLPSHYKIAGLDCAVNAWLLACPGQNVPVNPKSQKCWDGVISKLTYNTLLNGSSGVERARLTAVGCKEAGQWMNAYPCPSTGTFLDSATLRLAVSLRLGVPICAPHKCPCGSDVDRLGHHGLSCAKSAGRFSRHAALNDIIRRSLASVNVPAVLEPVGIVRDDGKRPDGMSLIPWKMGRVLVWDATCVDTLASSHLHSTIHRAGAAAEAAEALKMPKYRGLDAGYKFVAFGVETLGPWGPGATELFNQLAKRLIDVTGDKRAGSFLAQRLGIAIQRGNAASILGTMPQGPFLDFY

SEQ ID NO: 17706 - protein, 958 aa, Notocelia uddmanniana
MHASSQPSDSTSLANHTCHLCQRVFQSRRGLNIHYSKIHRNCLSQNLQDITPATTSNHPQCTPDATHPSTSLHCHLSQLKNNVPVIKRIPRGARICVATRLSHLLDKCVETNSIESWRDLLSFAYCTLHTTTTTEDKHTSLTQKIKNNCLKPLDPTFNLQSTRKKPPVYNFSKNVENKISDGDLKGAARLLFSSDVLSPDTPDTLSALQSKHPPAPATPPFLDPPTAIQDCLQIEEKHIVEGISSFKTGSAAGLDGISPQHLKDLISHGVGDTAKKLITSLKNVVNLMLSGGVNSEIVPILYGANLIALTKKDGGVRPIAVGATLRRLASKTAVRHIIPKLQPRFEPTQLGFGTKGGCEAAVHALRTYLSSDQCEVLLKVDVKNAFNSLNRDTLLAEVRDNIPELYNYLLHSYADPSKLMYRNNQLSSEVGCQQGDPLGPAIFSLGINPVIQNLSSKFNVWYLDDGTLGGNVDTVLSDLTILKNKFESIGLVLNFSKCELYIHSTTLNHAEIIEKFDKLTPNIKIVTKDSLNLLGTPIFDEAFPDHINKTISKFQNCSVRLLEISSHSALFILKFCLFVPKFTYMLRCSPFWQHQNLLSPIDSLIKTNLELILNIRLNEESWCQASLPVRYGGLGLRKISSVALPAFLSSAHSSYNLVGKILGDLPSHYKIAGLDCAVNAWLLACPGQNVPVNPKSQKCWDGVISKLTYNTLLNGSSGVERARLTAVGCKEAGQWMNAYPCPSTGTFLDSATLRLAVSLRLGVPICAPHKCPCGSDVDRLGHHGLSCAKSAGRFSRHAALNDIIRRSLASVNVPAVLEPVGIVRDDGKRPDGMSLIPWKMGRVLVWDATCVDTLASSHLHSTIHRAGAAAEAAEALKMRKYRGLDAGYKFVAFGVETLGPWGPGATELFNQLAKRLIDVTGDKRAGSFLAQRLGIAIQRGNAASILGTMPQGPFLDFY

SEQ ID NO: 17707 - protein, 948 aa, Cydia splendana
MHAATQSGDGTPYPNFNCVQCDNSFKTQRGLNIHISKKHRLCISQNDAGLNLGLSLLTTSLSDHPNSIPFHLHLSELKNNVPVIQRVPRGARITVAKHLSGLLTKCVENNQIDDWHNLFLFSFKTLHAKKDKTKIKNNCVSNTTPHISRPSGCSSSTFNRTKLIESKISDGDLKGAARLLFTNDVLSPDTPDTLSALRSKHPPAPSVPHSFAPPTADQACLQIEGKDVIDAIFSFKTGSAAGLDGISPQHLKDLIFHSVGDAGEQLVCSLTKLINFMFSGKINTNIVPILYGANLIALTKKDGGVRPIAVGSTLRRLASKIAVRHIRSKLQSLFEPIQLGFGTKGGCEAAVHALRTYLSLDDCEIVVKIDVKNAFNSVSRDTLLTEVKDKIPELNNYLFFCYSDSSKLMYKSHELSSEVGCQQGDPLGPAIFSLAINPIIKNLKSKFNVWYLDDGTLGGDVNTVLSDLSFIKSSFENIGLELNFSKCELFIQKSSCTLTNLQPKFDDLTPNIKSVDKYSLCLLGSPIFEESFPDYISNSITKFKSHTDRLLEISPHYALVILKFCLFVPKFTYVLRRCCPFWKHQNLLSPIDDLIKISLETILNIQLSEPSWSQASLPIRFGGLGIRKISSVASPAFLASTHSTSGLIGNILRALPTNCEIAGFENAKNAFKIARPGKQFPDNPNSQRSWDNVYCDLTYNTLLNNCTGPDRARLLAVGAREAGYWLHAHPSPNTGTFLDPASLRLATGLRLGVSVCTPHICSCGTDVDRLGHHGLSCQKSAGRFSRHASLNDIVRRSLATINVPALLEPTGIIRDDGKRPDGVSLVPWSLGRMLVWDATCVDTLAPSHLQRTTVKAGGAAESAEILKRNKYKSLGREYHFVPFGVETLGPWGPSAHKLFAEIAKRLVDVTGDRRAGGYLAQRISIAIQRGNSASILGTMPQGPILDLS

SEQ ID NO: 17708 - protein, 944 aa, Atethmia centrago
MHTATQSGDGTLNQNYICLHCDRSFQSKRGLNIHISKKHRLCISQNGPALNLDPVSLPVSDSPNSTPFHLYLSYLKNNVPVIKRVPRGTRISVANHLSGLIKKCVESNQIVDWHNLFLFSYTTLHVKKDEATISLTQKIKNNCLTKTSSPFDSPKRGTLSRIKLIEGKIANGDLKGAARLLFTNDVLSPDTPDTLSALHSQHPPAPVIPYFFDSPTADQDCLEIEGKDVIDAIISFKTGSAAGLDGISPQHLKDLTSYSVGDAGVQLICSITKLINFMFSGKINADIASLLFGANLIALTKKDGGVRPIAVGSTLRRLASKIAVRHIKSKLQSVFEPIQLGFGTKGGCEAAVHALRTYLSYDDCEIVVKIDVKNAFNSVNRDAMLTEVKNKIPELYQYLLTCYAEPSKLIYRSHELSSEVGCQQGDPLGPAIFSLAINPIIQNLKSKFNVWYLDDGTLGGDVDTVLSDLSDIKTNFENIGLELNFSKCELFIQKTSYGFDNFKSKLNFLAPNIKIVDRKSLCLLGSPIFEESFPDYITNTISKFQSHANCLLEISPHYALIILKFCLFVPKFTYVLRCSPFWKHPNLLSPIDDLVKTSLETILNIQLNEPSWLQASLPIRFGGLGIRKISSVASPAFLSSTHSTSRLIGNVLRALPTNYETAGLEDAKNAFKKKEFPDNLKSQRSWDDIYCDLTYKSILSRSSGPDRARLLAVGTREAGHWLHAHPSPYTGTFLDPTSLRLATGLRLGVTVCTPHTCPCGTDVDRLGHHGLCCQKSAGRFSRHATLNDIIRRSLASINVPALLEPTGIVRDDGKRPDGVSLVPWSLGRMLVWDATCVDTLAPSHLQRTTSKAGAAAENAENLKVIKYGGLGREYNFVPFGVETLGPWGPSAHKLFTEIAKRLVDVTGDRKAGGFLAQRISIAIQRGNAASILGTMPRGPFLSLT

SEQ ID NO: 17709 - protein, 957 aa, Atethmia centrago
MHTATQSGDGTLNQNYICLHCDRSFQSKRGLNIHISKKHRLCISQNGPALNLHPVSLPAPVSDSPNSTPFHLYLSYLKNNVSVIKRVPRGARISVANHLSGLIKKCVESNQIVDWHNLFLFSYTTLHVKKDEAPISLTQKIKNNCLTKTSSPFDSPKRGTLSRIKLIEGKIADGDLKGAARLLFTNDVLSPDTPDTLSALHSKHPPAPVIPYFFDSPTADQACLEIEGKDVIDAIISFKTGSAAGLDGISPQHLKDLTSYSVGDAGVQLICSITKLINFMFSGKINADIASLLFGANLIALTKKDGGVRPIAVGSTLRRLASKIAVRHIKSKLQSVFEPIQLGFGTKGGCEAAVHALRTYLSYDDCEIVVKNAFNSVNRDAMLTEVKNKIPELYQYLLTCYAEPSKLIYRSHELSSEVGCQQGDPLGPAIFSLAINPIIQNLKSKFNVWYLDDGTLGGDVDTVLSDLSDIKTNFENIGLELNFSKCELFIQKTSYGLDNLKSKLNFLAPNIKIVDRKSLCLLGSPIFEESFPDYITNTISKFQSHANCLLEISPHYALIILKFCLFVPKFTYVLRCSPFWKHPNLLSPIDDLVKTSLETILNIQLNEPSWLQASLPIRFGGLGIRKISSVASPAFLSSTHSTSRLVGNVLRALPTNYETAGLEDAKNAFQIACPGKEFPDNLKSQRSWDDIYCDLTYESILSRSSGPDRARLLAVGTREAGHWLHAHPSPYTGTFLDPTSLRLATGLRLGVTVCTPHTCPCGTDVDRLGHHGLCCQKSAGRFSRHATLNDIIRRSLASINVPALLEPTGIVRDDGKRPDGVSLVPWSLGRMLVWDATCVDTLAPSHLQRTISKAGAAAENAENLKVIKYGGLGREYNFVPFGVETLGPWGPSAHKLFAEIAKRLVDVTGDRYLGPQRWRVPRTIIIIIIIIIIIKSFIYKRDTFTINTLTIKVEHSC

SEQ ID NO: 17710 - protein, 950 aa, Atethmia centrago
MHTATQSGDGTLNQNYICLHCDRSFQSKRGLNIHISKKHRLCISQNGPALNLDPVSLPAPVSDSPNSTPFHLYLSYLKNNVPVIKRVPRGARISVANHLSGLIKKCVESNQIVDWHNLFLFSYTTLHVKKDEATISLTQKIKNNCLTKTSSPFDSPKRGTLSRIKLIEGKIADGDLKGAARLLFTNDVLSPDTPDTLSALHSKHPPAPVIPYFFDSPTADQDCLEIEGKDVIDAIISFKTGSAAGLDGISPQHLKDLTSYSVGDAGVQLICSITKLINFMFSGKISADIASLLFGANLIALTKKDGGVRPIAVGSTLRRLASKIAVRHIKSKLQSVFEPIQLGFGTKGGCEAAVHALRTYLSYDDCEIVVKIDVKNAFNSVNRDAMLTEVKNKIPELYQYLLTCYAEPSKLIYRSHELSSEVGCQQGDPLGPAIFSLAINPIIQNLKSKFNVWYLDDGTLGGDVDTVLSDLSDIKTNFENIGLELNFSKCELFIQKTSYGLDNLKSKLNFLAPNIKIVDRKSLCLLGSPIFEESFPDYITNTISKFQSHANCLLEISPHYALIILKFCLFVPKFTYVLRCSPFWKHPNLLSPIDDLVKTSLETILNIQLNEPSWLQASLPIRFGGLGIRKISSVASPAFLSSTHSTSRLIGNVLRALPTNYETAGLEDAKNAFQIACPGKEFPDNLKSQRSWDDIYCDLTYKSILSRSSGPDRARLLAVGTREAGHWLHAHPSPYTGTFLDPTSLRLATGLRLGVTVCTPHTCPCGTDVDRLGHHGLCCQKSAGRFSRHATLNDIIRRSLASINVPALLEPTGIVRDDGKRPDGVSLVPWSLGRMLVWDATCVDTLAPSHLQRTTSKAGAAAENAENLKVIKYGGLGREYNFVPFGVETLGPWGPSAHKLFAEIAKRLVDVTGDRKAGGFLAQRISIAIQRGNAASILGTMPRGPFLSLT

SEQ ID NO: 17711 - protein, 671 aa, Atethmia centrago
MFSGKINADIASLLFGANLIALTKKDGGVRPIAVGSTLRRLASKIAVRHIKSKLQSVFEPIQLGFGTKGGCEAAVHALRTYLSYDDCEIVVKIDVKNAFNSVNRDAMLTEVKNKIPELYQYLLTCYAEPSKLIYRSHELSSEVGCQQGDPLGPAIFSLAINPIIQNLKSKFNVWYLDDGTLGGDVDTVLSDLSDIKTNFENIGLELNFSKCELFIQKTSYGLDNLKSKLNFLAPNIKIVDRKSLCLLGSPIFEESFPDYITNTISKFQSHANCLLEISPHYALIILKFCLFVPKFTYVLRCSPFWKHPNLLSPIDDLVKTSLETILNIQLNEPSWLQASLPIRFGGLGIRKISSVASPAFLSSTHSTSRLIGNVLRALPTNYETAGLEDAKNAFQIACPGKEFPDNLKSQRSWDDIYCDLTYKSILSRSSGPDRARLLAVGTREAGHWLHAYPSPYTGTFLDPTSLRLATGLRLGVTVCTPHTCPCGTDVDRLGHHGLCCQKSAGRFSRHATLNDIIRRSLASINVPALLEPTGIDRDDGKRPDGVSLVPWSLGRMLVWDATCVDTLAPSHLQRTTSKAGAAAENAKNLKVIKYGGLGREYNFVPFGVETLGPWGPSAHKLFAEIAKRLVDVTGDRKAGGFLAQRISIAIQRGNAASILGKMPRGPFLSLT

SEQ ID NO: 17712 - protein, 671 aa, Atethmia centrago
MFSGKINADIASLLFGANLIALTKKDGGVRPIAVGSTLRRLASKIAVRHIKSKLQSVFEPIQLGFGTKGGCEAAVHALRTYLSYDDCEIVVKIDVKNAFNSVNRDAMLTEVKNKIPELYQYLLTCYAEPSKLIYRSHELSSEVGCQQGDPLGPAIFSLAINPIIQNLKSKFNVWYLDDGTLGGDVDTVLSDLSDIKTNFENIGLELNFSKCELFIQKTSYGLDNLKSKLNFLAPNIKIVDRKSLCLLGSPIFEESFPDYITNTISKFQSHANCLLEISPHYALIILKFCLFVPKFTYVLRCSPFWKHPNLLSPIDDLVKTSLETILNIQLNEPSWLQASLPIRFGGLGIRKISSVASPAFLSSTHSTSRLIGNVLRALPTNYETAGLEDAKNAFQIACPGKEFPDNLKSQRSWDDIYCDLTYKSILSRSSGPDRARLLAVGTREAGHWLHAHPSPYTGTFLDPTSLRLATGLRLGVTVCTPHTCPCGTDVDRLGHHGLCCQKSAGRFSRHATLNDIIRRSLASINVPALLEPTGIVRDDGKRPDGVSLVPWSLGRMLVWDATCVDTLAPSHLQRTTSKAGAAAENAENLKVIKYGGLGREYNFVPFGVETLGPWGPSAHKLFAEIAKRLVDVTGDRKAGGFLAQRISIAIQRGNAASILGTMPRGPFLSLT

SEQ ID NO: 17713 - protein, 950 aa, Atethmia centrago
MHTATQSGDGTLNQNYICLHCDRSFQSKRGLNIHISKKHRLCISQNGPALNLDPVSLPAPVSDSPNSTPFHLYLSYLKNYVPVIKRVPRGARISVANHLSGLIKKCVESNQIVDWHNLFLFSYTTLHVKKDEATISLTQKIKNNCLTKTSSPFDSPKRGTLSRIKLIEGKIADGDLKGAARLLFTNDVLSPDTPDTLSALHSKHPPAPVIPYFFDSPTADQACLEIEGKDVIDAIISFKTGSAAGLDGISPQHLKDLTSYSVGDAGVQLICSITKLINFMFSGKINADIASLLFGANLIALTKKDGGVRPIAVGSTLRRLASKIAVRHIKSKLQSVFEPIQLGFGTKGGCEAAVHALRTYLSYDDCEIVVKIDVKNAFNSVNRDAMLTEVKNKIPELYQYLLTCYAEPSKLIYRSHELSSEVGCQQGDPLGPAIFSLAINPIIQNLKSKFNVWYLDDGTLGGDVDTVLSDLSDIKTNFENIGLELNFSKCELFIQKTSYGLDNLKSKLNFLAPNIKIVDRKSLCLLGSPIFEESFPDYITNTISKFQSHANCLLEISPHYALIILKFCLFVPKFTYVLRCSPFWKHPNLLSPIDDLVKTSLETILNIQLNEPSWLQASLPIRFGGLGIRKISSVASPAFLSSTHSTSRLIGNVLRALPTNYETAGLEDAKNAFQIACPGKEFPDNLKSQRSWDDIYCDLTYKSILSRSSGPDRARLLAVGTREAGHWLHAHPSPYTGTFLDPTLLRLATGLRLGVTVCTPHTCPCGTNVDRLGHHGLCCQKSAGRFSRHATLNDIIRRSLASINVPALLEPTGIVRDDGKRPDGVSLVPWSLGRMLVWDAICVDTLAPSHLQRTTSKAGAAAENAENLKVIKYGGLGREYNFVPFGVETLGPWGPSAHKLFAEIAKRLVDVTGDRKAGGFLAQRISIAIQRGNAASILGTMPRGPFLSLT

SEQ ID NO: 17714 - protein, 950 aa, Atethmia centrago
MHTATQSGDGTLNQNYICLHCDRSFQSKRGLNIHISKKHRLCISQNGPALNLDPVSLPAPVSDSPNSTPFHLYLSYLKNNVPVIKRVPRGARISVANHLSGLIKKCVESNQIVDWHNLFLFSYTTLHVKKDEATISLTQKIKNNCLTKTSSPFDSPKRGKLSRIKLIEGKIADGDLKGAARLLFTNDVLSPDTPDTLSALHSKHPPAPVIPYFFDSPTADQACLEIEGKDVIDAIISFKTGSAAGLDGISPQHLKDLTSYSVGDAGVQLICSITKLINFMFSGKINADIASLLFGANLIALTKKDGGVRPIAVGSTLRRLASKIAVRHIKSKLQSVFEPIQLGFGTKGGCEAAVHALRTYLSYDDCEIVVKIDVKNAFNSVNRDAMLTEVKNKIPELYQYLLTCYAEPSKLIYRSHELSSEVGCQQGDPLGPAIFSLAINPIIQNLKSKFNVWYLDDGTLGGDVDTVLSDLSDIKTNFENIGLELNFSKCELFIQKTSYGLDNLKSKLNFLAPNIKIVDRKSLCLLGSPIFEESFPDYITNTISKFQSHANCLLEISPHYALIILKFCLFVPKFTYVLRCSPFWKHPNLLSPIDDLVKTSLETILNIQLNEPSWLQASLPIRFGGLGIRKISSVASPAFLSSTHSTSRLIGNVLRALPTNYETAGLEDAKNAFQIACPGKEFPDNLKSQRSWDDIYCDLTYKSILSRSSGPDRARLLAVGTREAGHWLHAHPSPYTGTFLDPTSLRLATGLRLGVTVCTPHTCPCGTDVDRLGHHGLCCQKSAGRFSRHATLNDIIRRSLASINVPALLEPTGIVRDDGKRPDGVSLVPWSLGRMLVWDATCVDTLAPSHLQRTTSKAGAAAENAENLKVIKYGGLGREYNFVPFGVETLGPWGPSAHKLFAEIAKRLVDVTGDRKAGGFLAQRISIAIQRGNAASILGTMPRGPFLSLT

SEQ ID NO: 17715 - protein, 950 aa, Atethmia centrago
MHTATQSGDGTLNQNYICLHCDRSFQSKRGLNIHISKKHRLCISQNGPALNLDPVSLPAPVSDSPNSTPFHLYLSYLKNNVPVIKRVPRGARISVANHLSGLIKKCVESNQIVDWHNLFLFSYTTLHVKKDEATISLTQKIKNNCLTKTSSPFDSPKRGTLSRIKLIEGKIADGDLKGAARLLFTNDVLSPDTPDTLSALHSKHPPAPVIPYFFDSPTADQACLEIEGKDVIDAIISFKTGSAAGLDGISPQHLKDLTSYSVGDAGVQLICSITKLINFMFSGKINADIASLLFGANLIALTKKDGGVRPIAVGSTLRRLASKIAVRHIKSKLQSVFEPIQLGFGTKGGCEAAVHALRTYLSYDDCEIVVKIDVKNAFNSVNRDAMLTEVKNKIPELYQYLLTCYAEPSKLIYRSHELSSEVGCQQGDPLGPAIFSLAINPIIQNLKSKFNVWYLDDGTLGGDVDTVLSDLSDIKTNFENIGLELNFSKCELFIQKTSYGLDNLKSKLNFLAPNIKIVDRKSLCLLGSPIFEESFPDYITNTISKFQSHANCLLEISPHYALIILKFCLFVPKFTYVLRCSPFWKHPNLLSPIDDLVKTSLETILNIQLNEPSWLQASLPIRFGGLGIRKISSVASPAFLSSTHSTSRLIGNVLRALPTNYETAGLEDAKNAFQIACPGKEFPDNLKSQRSWDDIYCDLTYKSILSRSSGPDRARLLAVGTREAGHWLHAHPSPYTGTFLDPTSLRLATGLRLGVTVCTPHTCPCGTDVDRLGHHGLCCQKSAGRFSRHATLNDIIRRSLASINVPALLEPTGIVRDDGKRPDGVSLVPWSLGRMLVWDATCVDTLAPSHLQRTTSKAGAAAENAENLKVIKYGGLGREYNFVPFGVETLGPWGPSAHKLFAEIAKRLVDVTGDRKAGGFLAQRISIAIQRGNAASILGTMPRGPFLSLT

SEQ ID NO: 17716 - protein, 950 aa, Atethmia centrago
MHTATQSGDGTLNQNYICLHCDRSFQSKRGLNIHISKKHRLCISQNGPALNLDPVSLPAPVSDSPNSTPFHLYLSYLKNNVPVIKRVPRGARISVANHLSGLIKKCVESNQIVDWHNLFLFSYTTLHVKKDEATISLTQKIKNNCLTKTSSPFDSPKRGTLSRIKLIEGKIADGDLKGAARLLFTNDVLSPDTPDTLSALHSKHPPAPVIPYFFDSPTADQACLEIEGKDVIDAIISFKTGSAAGLDGISPQHLKDLTSYSVGDAGVQLICSITKLINFMFSGKINADIASLLFGANLIALTKKDGGVRPIAVGSTLRRLASKIAVRHIKSKLQSVFEPIQLGFGTKGGCEAAVHALRTYLSYDDCEIVVKIDVKNAFNSVNRDAMLTEVKNKIPELYQYLLTCYAEPSKLIYRSHELSSEVGCQQGDPLGPAIFSLAINPIIQNLKSKFNVWYLDDGTLGGDVDTVLSDLSDIKTNFENIGLELNFSKCELFIQKTSYGLDNLKSKLNFLAPNIKIVDRKSLCLLGFPIFEESFPDYITNTISKFQSHANCLLEISPHYALIILKFCLFVPKFTYVLRCSPFWKHPNLLSPIDDLVKTSLETILNIQLNEPSWLQASLPIRFGGLGIRKISSVASPAFLSSTHSTSRLIGNVLRALPTNYETAGLEDAKNAFQIACPGKEFPDNLKSQRSWDDIYCDLTYKSILSRSSGPDRARLLAVGTREAGHWLHAHPSPYTGTFLDPTSLRLATGLRLGVTVCTPHTCPCGTDVDRLGHHGLCCQKSAGRFSRHATLNDIIRRSLASINVPALLEPTGIVRDDGKRPDGVSLVPWSLGRMLVWDATCVDTLAPSHLQRTTSKAGAAAENAENLKVIKYGGLGREYNFVPFGVETLGPWGPSAHKLFAEIAKRLVDVTGDRKAGGFLAQRISIAIQRGNAASILGTMPRGPFLSLT

SEQ ID NO: 17717 - protein, 671 aa, Atethmia centrago
MFSGKINADIASLLFGANLIALTKKDGGVRPIAVGSTLRRLASKIAVRHIKSKLQSVFEPIQLGFGTKGGCEAAVHALRTYLSYDDCEIIVKIDVKNAFNSVNRDAMLTEVKNKIPELYQYLLTCYAEPSKLIYRSHELSSEVGCQQGDPLGPAIFSLAINPIIQNLKSKFNVWYLDDGTLGGDVDTVLSDLSDIKTNFENIGLELNFSKCELFIQKTSYGLDNLKSKLNFLAPNIKIVDRKSLCLLGSPIFEESFPDYITNTISKFQSHANCLLEISPHYALIILKFCLFVPKFTYVLRCSPFWKHPNLLSPIDDLVKTSLETILNIQLIEPSWLQASLPIRFGGLGIRKISSVASPAFLSSTHSTSRLIGNVLRALPTNYETAGLEDAKNAFQIACPGKEFPDNLKSQRSWDDIYCDLTYKSILSRSSGPDRARLLAVGTREAGHWLHAHPSPYTGTFLDPTSLRLATGLRLGVTVCTPHTCPCGTDVDRLGHHGLCCQKSAGRFSRHATLNDIIRRSLASINVPALLEPTGIVRDDGKRPDGVSLVPWSLGRMLVWDATCVDTLAPSHLQRTTSKAGAAAENAENLKVIKYGGLGREYNFVPFGVETLGPWGPSAHKLFAEIAKRLVDVTGDRKAGGFLAQRISIAIQRGNAASILGTMPRGPFLSLT

SEQ ID NO: 17718 - protein, 950 aa, Atethmia centrago
MHTATQSGDGTLNQNYICLHCDRSFQSKRGLNIHISKKHRLCISQNGPALNLDPVSLPAPVSDSPNSTPFHLYLSYLKNNVPVIKRVPRGARISVANHLSGLIKKCVESNQIVDWHNLFLFSYTTLHVKKDEATISLTQKIKNNCLTKTSSPFDSPKRGTLSRIKLIEGKIADGDLKGAERLLFTNDVLSPDTPDTLSALHSKHPPAPVIPYFFDSPTADQACLEIEGKDVIDAIISFKTGSAAGLDGISPQHLKDLTSYSVGDAGVQLICSITKLINFMFSGKINADIASLLFGANLIALTKKDGGVRPIAVGSTLRRLASKIAVRHIKSKLQSVFEPIQLGFGTKGGCEAAVHALRTYLSYDDCEIVVKIDVKNAFNSVNRDAMLTEVKNKIPELYQYLLTCYAEPSKLIYRSHELSSEVGCQQGDPLGPAIFSLAINPIIQNLKSKFNVWYLDDGTLGGDVDTVLSDLSDIKTNFENIGLELNFSKCELFIQKTSYGLDNLKSKLNFLAPNIKIVDRKSLCLLGSPIFEESFPDYITNTISKFQSHANCLLEISPHYALIILKFCLFVPKFTYVLRCSPFWKHPNLLSPIDDLVKTSLETILNIQLNEPSWLQASLPIRFGGLGIRKISSVASPAFLSSTHSTSRLIGNVLRALPTNYETAGLEDAKNAFQIACPGKEFPDNLKSQRSWDDIYCDLTYKSILSRSSGPDRARLLAVGTREAGHWLHAHPSPYTGTFLDPTSLRLATGLRLGVTVCTPHTCPCGTDVDRLGHHGLCCQKSAGRFSRHATLNDIIRRSLASINVPALLEPTGIVRDDGKRPDGVSLVPWSLGRMLVWDATCVDTLAPSHLQRTTSKAGAAAENAENLKVIKYGGLGREYNFVPFGVETLGPWGPSAHKLFAEIAKRLVDVTGDRKAGGFLAQRISIAIQRGNAASILGTMPRGPFLSLT

SEQ ID NO: 17719 - protein, 950 aa, Atethmia centrago
MHTATQSGDGTLNQNYICLHCDRSFQSKRGLNIHISKKHRLCISQNGPALNLDPVSLPAPVSDSPNSTPFHLYLSYLKNNVPVIKRVPRGARISVANHLSGLIKKCVESNQIVDWHNLFLFSYTTLHVKKDEATISLTQKIKNNCLTKTSSPFDSPKRGTLSRIKLIEGKIADGDLKGAARLLFTNDVLSPDTPDTLSALHSKHPPAPVIPYFFDSPTADQACLEIEGKDVIDAIISFKTGSAAGLDGISPQHLKDLTSYSVGDAGVQLICSITKLINFMFSGKINADIASLLFGANLIALTKKDGGVTPIAVGSTLRRLASKIAVRHIKSKLQSVFEPIQLGFGTKGGCEAAVHALRTYLSYDDCEIVVKIDVKNAFNSVNRDAMLTEVKNKIPELYQYLLTCYAEPSKLIYRSHELSSEVGCQQGDPLGPAIFSLAINPIIQNLKSKFNVWYLDDGTLGGDVDTVLSDLSDIKTNFENIGLELNFSKCELFIQKTSYGLDNLKSKLNFLAPNIKIVDRKSLCLLGSPIFEESFPDYITNTISKFQSHANCLLEISPHYALIILKFCLFVPKFTYVLRCSPFWKHPNLLSPIDDLVKTSLETILNIQLNEPSWLQASLPIRFGGLGIRKISSVASPAFLSSTHSTSRLIGNVLRALPTNYETAGLEDAKNAFQIACPGKEFPDNLKSQRSWDDIYCDLTYKSILSRSSGPDRARLLAVGTREAGHWLHAHPSPYTGTFLDPTSLRLATGLRLGVTVCTPHTCPCGTDVDRLGHHGLCCQKSAGRFSRHATLNDIIRRSLASINVPALLEPTGIVRDDGKRPDGVSLVPWSLGRMLVWDATCVDTLAPSHLQRTTSKAGAAAENAENLKVIKYGGLGREYNFVPFGVETLGPWGPSAHKLFAEIAKRLVDVTGDRKAGGFLAQRISIAIQRGNAASILGTMPRGPFLSLT

SEQ ID NO: 17720 - protein, 950 aa, Atethmia centrago
MHTATQSGDGTLNQNYICLHCDRSFQSKRGLNIHISKKHRLCISQNGPALNLDPVSLPAPVSDSPNSTPFHLYLSYLKNNVPVIKRVPRGARISVANHLSGLIKKCVESNQIVDWHNLFLFSYTTLHVKKDEATISLTQKIKNNCLTKTSSPFDSPKRGTLSRIKLIEGKIADGDLKGAARLLFTNNVLSPDTPDTLSALHSKHPPAPVIPYFFDSPTADQACLEIEGKDVIDAIISFKTGSAAGLDGISPQHLKDLTSYSVGDAGVQLICSITKLINFMFSGKINADIASLLFGANLIALTKKDGGVRPIAVGSTLRRLASKIAVRHIKSKLQSVFEPIQLGFGTKGGCEAAVHALRTYLSYDDCEIVVKIDVKNAFNSVNRDAMLTEVKNKIPELYQYLLTCYAEPSKLIYRSHELSSEVGCQQGDPLGPAIFSLAINPIIQNLKSKFNVWYLDDGTLGGDVDTVLSDLSDIKTNFENIGLELNFSKCELFIQKNSYGLDNLKSKLNFLAPNIKIVDRKSLCLLGSPIFEESFPDYITNTISKFQSHANCLLEISPHYALIILKFCLFVPKFTYVLRCSPFWKHPNLLSPIDDLVKTSLETILNIQLNEPSWLQASLPIRFGGLGIRQISSVASPAFLSSTHSTSRLIGNVLRALPTNYETAGLEDAKNAFQIACPGKEFPDNLKSQRSWDDIYCDLTYKSILSRSSGPDRARLLAVGTREAGHWLHAHPSPYTGTFLDPTSLRLATGLRLGVTVCTPHTCPCGTDVDRLGHHGLCCQKSAGRFSRHATLNDIIRRSLASINVPALLEPTGIVRDDGKRPDGVSLVPWSLGRMLVWDATCVDTLAPSHLQRTTSKAGAAAENAENLKVIKYGGLGREYNFVPFGVETLGPWGPSAHKLFAEIAKRLVDVTGDRKAGGFLAQRISIAIQRGNAASILGTMPRGPFLSLT

SEQ ID NO: 17721 - protein, 954 aa, Atethmia centrago
MLNFIPILTQSGDGTLNQNYICLHCDRSFQSKRGLNIHISKKHRLCISQNGPALNLDPVSLPAPVSDSPNSTPFHLYLSYLKNNVPVIKRVPRGARISVANHLSGLIKKCVESNQIVDWHNLFLFSYTTLHVKKDEATISLTQKIKNNCLTKTSSPFDSPKRGTLSRIKLIEGKIADGDLKGAARLLFTNDVLSPDTPDTLSALHSKHPPAPVIPYFFDSPTADQACLEIEGKDVIDAIISFKTGSAAGLDGISPQHLKDLTSYSVGDAGVQLICSITKLINFMFSGKINADIASLLFGANLIALTKKDGGVRPIAVGSTLRRLASKIAVRHIKSKLQSVFEPIQLGFGTKGGCEAAVHALRTYLSYDDCEIVVKIDVKNAFNSVNRDAMLTEVKNKIPELYQYLLTCYAEPSKLIYRSHELSSEVGCQQGDPLGPAIFSLAINPIIQNLKSKFNVWYLDDGTLGGDVDTVLSDLSDIKTNFENIGLELNFSKCELFIQKTSYGLDNLKSKLNFLAPNIKIVDRKSLCLLGSPIFEESFPDYITNTISKFQSHANCLLEISPHYALIILKFCLFVPKFTYVLRCSPFWKHPNLLSPIDDLVKTSLETILNIQLNEPSWLQASLPIRFGGLGIRKISSVASPAFLSSTHSTSRLIGNVLRALPTNYETAGLEDAKNAFQIACPGKEFPDNLKSQRSWDDIYCDLTYKSILSRSSGPDRARLLAVGTREAGHWLHAHPSPYTGTFLDPTSLRLATGLRLGVTVCTPHTCPCGTDVDRLGHHGLCCQKSAGRFSRHATLNDIIRRSLASINVPALLEPTGIVRDDGKRPDGVSLVPWSLGRMLVWDATCVDTLAPSHLQRTTSKAGAAAENAENLKVIKYGGLGREYNFVPFGVETLGPWGPSAHKLFAEIAKRLVDVTGDRKAGGFLAQRISIAIQRGNAASILGTMPRGPFLSLT

SEQ ID NO: 17722 - protein, 950 aa, Atethmia centrago
MHTATQSGDGTLNQNYICLHCDRSFQSKRGLNIHISKKHRLCISQNGPALNLDPVSLPAPVSDSPNSTPFHLYLSYLKNNVPVIKRVPRGARISVANHLSGLIKKCVESNQIVDWHNLFLFSYTTLHVKKDEATISLTQKIKNNCLTKTSTPFDSPKRGTLSRIKLIEGKIADGDLKGAARLLFTNDVLSPDTPDTLSALHSKHPPAPVIPYFFDSPTADQACLEIEGKDVIDAIISFKTGSAAGLDGISPQHLKDLTSYSVGDAGVQLICSITKLINFMFSGKINADIASLLFGANLIALTKKDGGVRPIAVGSTLRRLASKIAVRHIKSKLQSVFEPIQLGFGTKGGCEAAVHALRTYLSYDDCEIVVKIDVKNAFNSVNRDAMLTEVKNKIPELYQYLLTCYAEPSKLIYRSHELSSEVGCQQGDPLGPAIFSLAINPIIQNLKSKFNVWYLDDGTLGGDVDTVLSDLSDIKTNFENIGLELNFSKCELFIQKTSYGLDNLKSKLNFLAPNIKIVDRKSLCLLGSPIFEESFPDYITNTISKFQSHANCLLEISPHYALIILKFCLFVPKFTYVLRCSPFWKHPNLLSPIDDLVKTSLETILNIQLNEPSWLQASLPIRFGGLGIRKISSVASPAFLSSTHSTSRLIGNVLRALPTNYETAGLEDAKNAFQIACPGKEFPDNLKSQRSWDDIFCDLTYKSILSRSSGPDRARLLAVGTRDAGHWLHAHPSPYTGTFLDPTSLRLATGLRLGVTVCTPHTCPCGTDVDRLGHHGLCCQKSAGRFSRHATLNDIIRRSLASINVPALLEPTGIVRDDGKRPDGVSLVPWSLGRMLVWDATCVDTLAPSHLQQTTSKAGAAAENAENLKVIKYGGLGKEYNFVPFGVETLGPWGPSAHKLFAEIAKRLVDVTGDRKAGGFLAQRISIAIQRGNAASILGTMPRGPFLSLT

SEQ ID NO: 17723 - protein, 903 aa, Atethmia centrago
MHTATQSGDGTLNQNYICLHCDRSFQSKRGLNIHISKKHRLCISQNGPALNLDPVSLPAPVSDSPNSTPFHLYLSYLKNNVSVIKRVPRGARISVANHLSGLIKKCVESNQIVDWHNLFLFSYTTLHVKKDEAPISLTQKIKNNCLTKTSSPFDSPKRGTLSRIKLIEGKIADGDLKGAARLLFTNDVLSPDTPDTLSALHSKHPPAPVIPYFFDSPTADQACLEIEGKDVIDAIISFKTGSAAGLDGISPQHLKDLTSYSVGDAGVQLICSITKLINFMFSGKINADIASLLFGANLIALTKKDGGVRPIAVGSTLRRLASKIAVRHIKSKLQSVFEPIQLGFGTKGGCEAAVHALRTYLSYDDCEIVVKNAFNSVNRDAMLTEVKNKIPELYQYLLTCYAEPSKLIYRSHELSSEVGCQQGDPLGPAIFSLAINPIIQNLKSKFNVWYLDDGTLGGDVDTVLSDLSDIKTNFENIGLELNFSKCELFIQKTSYGLDNLKSKLNFLAPNIKIVDRKSLCLLGSPIFEESFPDYITNTISKFQSHANCLLEISPHYALIILKFCLFVPKFTYVLRCSPFWKHPNLLSPIDDLVKTSLETILNIQLNEPSWLQASLPIRFGGLGIRKISSVASPAFLSSTHSTSRLVGNVLRALPTNYETAGLEDAKNAFQIACPGKEFPDNLKSQRSWDDIYCDLTYESILSRSSGPDRARLLAVGTREAGHWLHAHPSPYTGTFLDPTSLRLATGLRLGVTVCTPHTCPCGTDVDRLGHHGLCCQKSAGRFSRHATLNDIIRRSLASINVPALLEPTGIVRDDGKRPDGVSLVPWSLGRMLVWDATCVDTLAPSHLQRTISKAGAAAENAENLKVINMEALAESTTLCPLASRPSVRGVPVRISYLRKSRNV

SEQ ID NO: 17724 - protein, 670 aa, Atethmia centrago
MFSGKINADIASLLFGANLIALTKKAGGVRPIAAGSTLRRLASKIAVRHIKSKLQSVFEPIQLGLGTKAAEAAVHALRTYLSYDDCEIVVKIDVKNAFNSVKRDAMLTEVKNKIPELYQYLLTCYAEPSKLIYRSHELSSEVGCQQGDPLGPAIFSLAINPIIQHLKSKFNVWYLDDGTLGGDVDTVLSDLSDIKTNFENIGLELNFSKCELFIQKTSYGLDNLKSKLNFLAPNIKIVDRKSLCLLGSPIFEESFPDYITNSISKFQSHANCLLEISPHYALIILKFCLFVPKFTYVLRCSPFWKHPNLLSPIDDLVKTSLETILNIQLNEPSWLQASLPIRFSGLGIRKISSVASPAFLSSTYSTSRLIGNVLRGLPTNYETAGLEDAKNAFQIPCPGKEFPDNLKSQRSWDDIYCDLTYKSILSRSSGPDRARLLAVGIREAGHWLHAHPSPYTGTFLDPTSLRLATGLRLGVMVCTPHTCPCGTDVDRLGHHGLCCQKSAGRFSRHATLNDIIRRSLASINVPALLEPTGIVRDDGKRPDGVSLVPWSLGRMLVWDATCVDTLAPSHLQRTTSKAGAAAKNAENLKVIKYGGLGREYNFVPFGVETLGSWGPSAHKLFAEIAKRLVDVTGDRKAGGFIAQRISIAIQRGNAASILGTMPRGPFLSLT

SEQ ID NO: 17725 - protein, 993 aa, Atethmia centrago
MCRNTKRNNSSKLLLRSSITIILRLSYVNTSVFSIQVLFSGKWMHTATQSGDGTLNQNYICLHCDRSFQSKRGLNIHISKKHRLCISQNGPALNLDPVSLPAPVSDSPNSTPFHLYLSYLKNNVPVIKRVPRGARISVANHLSGLIKKCVESNQIVDWHNLFLFSYTTLHVKKDEATISLTQKIKNNCLTKTSSPFDSPKRGTLSRIKLIEGKIADGDLKGAARLLFTNDVLSPDTPDTLSALHSKHPPAPVIPYFFDSPTADQACLEIEGKDVIDAIISFKTGSAAGLDGISPQHLKDLTSYSVGDAGVQLICSITKLINFMFSGKINADIASLLFGANLIALTKKDGGVRPIAVGSTLRRLASKIAVRHIKSKLQSVFEPIQLGFGTKGGCEAAVHALRTYLSYDDCEIVVKIDVKNAFNSVNRDAMLTEVKNKIPELYQYLLTCYAEPSKLIYRSHELSSEVGCQQGDPLGPAIFSLAINPIIQNLKSKFNVWYLDDGTLGGDVDTVLSDLSDIKTNFENIGLELNFSKCELFIQKTSYGLDNLKSKLNFLAPNIKIVDRKLLCLLGSPIFEESFPDYITNTISKFQSHANCLLEISPHYALIILKFCLFVPKFTYVLRCSPFWKHPNLLSPIDDLVKTSLETILNIQLNEPSWLQASLPIRFGGLGIRKISSVASPAFLSSTHSTSRLIGNVLRALPTNYETAGLEDAKNAFQIACPGKEFPDNLKSQRSWDDIYCDLTYKSILSRSSGPDRARLLAVGTREAGHWLHAHPSPYTGTFLDPTSLRLATGLRLGVTVCTPHTCPCGTDVDRLGHHGLCCQKSAGRFSRHATLNDIIRRSLASINVPALLEPTGIVRDDGKRPDGVSLVPWSLGRMLVWDATCVDTLAPSHLQRTTSKAGAAAENAENLKVIKYGGLGREYNFVPFGVETLGPWGPSAHKLFAEIAKRLVDVTGDRKAGGFLAQRISIAIQRGNAASILGTMPRGPFLSLT

SEQ ID NO: 17726 - protein, 950 aa, Atethmia centrago
MHTATQSGDGTLNQNYICLHCDRSFQSKRGLNIHISKKHRLCISQNGPALNLDPVSLPAPVSDSPNSTPFHLYLSYLKNNVPVIKRVPRGARISVANHLSGLIKKCVESNQIVDWHNLFLFSYTTLHVKKDEATISLTQKIKNNCLTKTSSPFDSPKRGTLSRIKLIEGKIADGDLKGAARLLFTNDVLSPDTPDTLSALHSKHPPAPVIPYFFDSPTADQACLEIEGKDVIDAIISFKTGSAAGLDGISPQHLKDLTSYSVGDAGVQLICSITKLINFMFSGKINADIASLLFGANLIALTKKDGGVRPIAVGSTLRRLASKIAVRHIKSKLQSVFEPIQLGFGTKGGCEAAVHALRTYLSYDDCEIVVKIDVKNAFNSVNRDAMLTEVKNKIPELYQYLLTCYAEPSKLIYRSHELSSEVGCQQGDPLGPAIFSLAINPIIQNLKSKFNVWYLDDGTLGGDVDTVLSDLSDIKTNFENIGLELNFSKCELFIQKTSYGLDNLKSKLNFLAPNIKIVDRKSLCLLGSPIFEESFPDYITNTISKFQSHANCLLEISPHYALIILKFCLFVPKFTYVLRCSPFWKHPNLLSPIDDLVKTSLETILNIQLNEPSWLQASLPIRFGGLGIRKISSVASPAFLSSTHSTSRLIGNVLRALPTNYETAGLEDAKNAFQIACPGKEFPDNLKSQRSWDDIYCDLTYKSILSRSSGPDRARLLAVGTREAGHWLHAHPSPYTGTFLDPTSLRLATGLRLGVTVCTPHTCPCGTDVDRLGHHGLCCQKSAGRFSRHATLNDIIRRSLASINVPALLEPTGIVRDDGKRPDGVSLVPWSLGRMLVWDATCVDTLTPSHLQRTTSKAGAAAENAENLKVIKYGGLGREYNFVPFGVETLGPWGPSAHKLFAEIAKRLVDVTGDRKAGGFLAQRISIAIQRGNAASILGTMPRGPFLSLT

SEQ ID NO: 17727 - protein, 950 aa, Atethmia centrago
MHTATQSGDGTLNQNYICLHCDRSFQSKRGLNIHISKKHRLCISQNGPALNLDPVSLPAPVSDSPNSTPFHLYLSYLKNNVPVIKRVPRGARISVANHLSGLIKKCVESNQIVDWHNLFLFSYTTLHVKKDEATISLTQKIKNNCLTKTSSPFDSPKRGTLSRIKLIEGKIADGDLKGAARLLFTIDVLSPDTPDTLSALHSKHPPAPVIPYFFDSPTADQACLEIEGKDVIDAIISFKTGSAAGLDGISPQHLKDLTSYSVGDAGVQLICSITKLINFMFSGKINADIASLLFGANLIALTKKDGGVRPIAVGSTLRRLASKIAVRHIKSKLQSVFEPIQLGFGTKGGCEAAVHALRTYLSYDDCEIVVKIDVKNAFNSVNRDAMLTEVKNKIPELYQYLLTCYAEPSKLIYRSHELSSEVGCQQGDPLGPAIFSLAINPIIQNLKSKFNVWYLDDGTLGGDVDTVLSDLSDIKTNFENIGLELNFSKCELFIQKTSYGLDNLKSKLNFLAPNIKIVDRKSLCLLGSPIFEESFPDYITNTISKFQSHANCLLEISPHYALIILKFCLFVPKFTYVLRCSPFWKHPNLLSPIDDLVKTSLETILNIQLNEPSWLQASLPIRFGGLGIRKISSVASLAFLSSTHSTSRLIGNVLRALPTNYETAGLEDAKNAFQIACPGKEFPDNLKSQRSWDDIYCDLTYKSILSRSSGPDRARLLAVGTREAGHWLHAHPSPYTGTFLDPTSLRLATGLRLGVTVCTPHTCPCGTDVDRLGHHGLCCQKSAGRFSRHATLNDIIRRSLASINVPALLEPTGIVRDDGKRPDGVSLVPWSLGRMLVWDATCVDTLAPSHLQRTTSKAGAAAENAENLKVIKYGGLGREYNFVPFGVETLGPWGPSAHKLFAEIAKRLVDVTGDRKAGGFLAQRISIAIQRGNAASILGTMPRGPFLSLT

SEQ ID NO: 17728 - protein, 950 aa, Atethmia centrago
MHTATQSGDGTLNQNYICLHCDRSFQSKRGLNIHISKKHRLCISQNGPALNLDPVSLPAPVSDSPNSTPFHLYLSYLKNNVPVIKRVPRGARISVANHLSGLIKKCVESNQIVDWHNLFLFSYTTLHVKKDEATISLTQKIKNNCLTKTSSPFDSPKRGTLSRIKLIEGKIADGDLKGAARLLFTNDVLSPDTPDTLSALHSKHPPAPVIPYFFDSPTADQACLEIEGKDVIDAIISFKTGSAAGLDGISPQHLKDLTSYSVGDAGVQLICSITKLINFMFSGKINADIASLLFGANLIALTKKDGGVRPIAVGSTLRRLASKIAVRHIKSKLQSVFEPIQLGFGTKGGCEAAVHALRTYLSYDDCEIVVKIDVKNAFNSVNRDAMLTEVKNKIPELYQYLLTCYAEPSKLIYRSHELSSEVGCQQGDPLGPAIFSLAINPIIQNLKSKFNVWYLDDGTLGGDVDTVLSDLSDIKTNFENIGLELNFSKCELFIQKNSYGLDNLKSKLNFLAPNIKIVDRKSLCLLGSPIFEESFPDYITNTISKFQSHANCLLEISPHYALIILKFCLFVPKFTYVLRCSPFWKHPNLLSPIDDLVKTSLETILNIQLNEPSWLQASLPIRFGGLGIRKISSVASPAFLSSTHSTSRLIGNVLRALPTNYETAGLEDAKNAFQIACPGKEFPDNLKSQRSWDDIYCDLTYKSILSRSSGPDRARLLAVGTREAGHWLHAHPSPYTGTFLDPTSLRLATGLRLGVTVCTPHTCPCGTDVDRLGHHGLCCQKSAGRFSRHATLNDIIRRSLASINVPALLEPTGIVRDDGKRPDGVSLVPWSLGRMLVWDATCVDTLAPSHLQRTTSKAGAAAENAENLKVIKYGGLGREYNFVPFGVETLGPWGPSAHKLFAEIAKRLVDVTGDRKAGGFLAQRISIAIQRGNAASILGTMPRGPFLSLT

SEQ ID NO: 17729 - protein, 950 aa, Atethmia centrago
MHTATQSGDGTLNQNYICLHCDRSFQSKRGLNIHISKKHRLCISQNGPALNLDPVSLPAPVSDSPNSTPFHLYLSYLKNNVPVIKRVPRGARISVANHLSGLIKKCVESNQIVDWHNLFLFSYTTLHVKKDEATISLTQKIKNNCLTKTSSPFDSPKRGTLSRIKLIEGKIADGDLKGAARLLFTNDVLSPDTPDTLSALHSKHPPAPVIPYFFDSPTADQACLEIEGKDVIDAIISFKTGSAAGLDGISPQHLKDLTSYSVGDAGVQLICSITKLINFMFSGKINADIASLLFGANLIALTKKDGGVRPIAVGSTLRRLASKIAVRHIKSKLQSVFEPIQLGFGTKGGCEAAVHALRTYLSYDDCEIVVKIDVKNAFNSVNRDAMLTEVKNKIPELYQYLLTCYAEPSKLIYRSHELSSEVGCQQGDPLGPAIFSLAINPIIQNLKSKFNVWYLDDGTLGGDVDTVLSDLSDIKTNFENIGLELNFSKCELFIQKTSYGLDNLKSKLNFLAPNIKIVDRKSLCLLGSPIFEESFPDYITNTISKFQSHANCLLEISPHYALIILKFCLFVPKFTYVLRCSPFWKHPNLLSPIDDLVKTSLETILNIQLNEPSWLQASLPIRFGGLGIRKISSVASPAFLSSTHSTSRLIGNVLRALPTNYETAGLEDAKNAFQIACPGKEFPDNLKSQRSWDDIYCDLTYKSILSRSSGPDRARLLAVGTREAGHWLHAHPSPYTGTFLDPTSLRLATGLRLGVTVCTPHTCPCGTDVDRLGHHGLCCQKSAGRFSRHATLNDIIRRSLASFNVPALLEPTGIVRDDGKRPDGVSLVPWSLGRMLVWDATCVDTLAPSHLQRTTSKAGAAAENAENLKVIKYGGLGREYNFVPFGVETLGPWGPSAHKLFAEIAQRLVDVTGDRKAGGFLAQRISIAIQRGNAASILGTMPRGPFLSLT

SEQ ID NO: 17730 - protein, 950 aa, Atethmia centrago
MHTATQSGDGTLNQNYICLHCDRSFQSKRGLNIHISKKHRLCISQNGPALNLDPVSLPAPVSDSPNSTPFHLYLSYLKNNVPVIKRVPRGARISVANHLSGLIKKCVESNQIVDWHNLFLFSYTTLHVKKDEATISLTQKIKNNCLTKTSSPFDSPKRGTLSRIKLIEGKIADGDLKGAARLLFTNDVLSPDTPDTLSALHSKHPPAPVIPYFFDSPTADQACLEIEGKDVIDAIISFKTGSAAGLDGISPQHLKDLTSYSVGDAGVQLICSITKLINFMFSGKINADIASLLFGANLIALTKKDGGVRPIAVGSTLRRLASKIAVRHIKSKLQSVFEPIQLGFGTKGGCEAAVHALRTYLSYDDCEIVVKIDVKNAFNSVNRDAMLTEVKNKIPELYQYLLTCYAEPSKLIYRSHELSSEVGCQQGDPLGPAIFSLAINPIIQNLKSKFNVWYLDDGTLGGDVDTVLSDLSDIKTNFENIGLELNFSKCELFIQKNSYGLDNLKSKLNFLAPNIKIVDRKSLCLLGSPIFEESFPDYITNTISKFQSHANCLLEISPHYALIILKFCLFVPKFTYVLRCSPFWKHPNLLSPIDDLVKTSLETILNIQLNEPSWLQASLPIRFGGLGIRQISSVASPAFLSSTHSTSRLIGNVLRALPTNYETAGLEDAKNAFQIACPGKEFPDNLKSQRSWDDIYCDLTYKSILSRSSGPDRARLLAVGTREAGHWLHAHPSPYTGTFLDPTSLRLATGLRLGVTVCTPHTCPCGTDVDRLGHHGLCCQKSAGRFSRHATLNDIIRRSLASINVPALLEPTGIVRDDGKRPDGVSLVPWSLGRMLVWDATCVDTLAPSHLQRTTSKAGAAAENAENLKVIKYGGLGREYNFVPFGVETLGPWGPSAHKLFAEIAKRLVDVTGDRKAGGFLAQRISIAIQRGNAASILGTMPRGPFLSLT

SEQ ID NO: 17731 - protein, 950 aa, Atethmia centrago
MHTATQSGDGTLNQNYICLHCDRSFQSKRGLNIHISKKHRLCISQNGPALNLDPVSLPAPVSDSPNSTPFHLYLSYLKNNVPVIKRVPRGARISVANHLSGLIKKCVESNQIVDWHNLFLFSYTTLHVKKDEATISLTQKIKNNCLTKTSSPFDSPKRGTLSRIKLIEGKIADGDLKGAARLLFTNDVLSPDTPDTLSALHSKHPPAPVIPYFFDSPTADQACLEIEGKDVIDAIISFKTGSAAGLDGISPQHLKDLTSYSVGDAGVQLICSITKLINFMFSGKINADIASLLFGANLIALTKKDGGVRPIAVGSTLRRLASKIAVRHIKSKLQSVFEPIQLGFGTKGGCEAAVHALRTYLSYDDCEIVVKIDVKNAFNSVNRDAMLTEVKNKIPELYQYLLTCYAEPSKLIYRSHELSSEVGCQQGDPLGPAIFSLAINPIIQNLKSKFNVWYLDDGTLGGDVDTVLSDLSDIKTNFENIGLELNFSKCELFIQKTSYGLDNLKSKLNFLAPNIKIVDRKSLCLLGSPIFEESFPDYITNTISKFQSHANCLLEISPHYALIILKFCLFVPKFTYVLRCSPIWKHPNLLSPIDDLVKTSLETILNIQLNEPSWLQASLPIRFGGLGIRKISSVASPAFLSSTHSTSRLIGNVLRALPTNYETAGLEDAKNAFQIACPGKEFPDNLKSQRSWDDIYCDLTYKSILSRSSGPDRARLLAVGTREAGHWLHAHPSPYTGTFLDPTSLRLATGLRLGVTVCTPHTCPCGTDVDRLGHHGLCCQKSAGRFSRHATLNDIIRRSLASINVPALLEPTGIVRDDGKRPDGVSLVPWSLGRMLVWDATCVDTLAPSHLQRTTSKAGAAAENAENLKVIKYGGLGREYNFVPFGVETLGPWGPSAHKLFAEIAKRLVDVTGDRKAGGFLAQRISIAIQRGNAASILGTMPRGPFLSLT

SEQ ID NO: 17732 - protein, 950 aa, Atethmia centrago
MHTATQSGDGTLNQNYICLHCDRSFQSKRGLNIHISKKHRLCISQNGPALNLDPVSLPAPVSDSPNSTPFHLYLSYLKNNVPVIKRVPRGARISVANHLSGLIKKCVESNQIVDWHNLFLFSYTTLHVKKDEATISLTQKIKNNCLTKTSSPFDSPKRGTLSRIKLIEGKIADGDLKGAARLLFTNDVLSPDTPDTLSALHSKHPPAPVIPYFFDSPTADQACLEIEGKDVIDAIISFKTGSAAGLDGISPQHLKDLTSYSVGDAGVQLICSITKLINFMFSGKINADIASLLFGANLIALTKKDGGVRPIAVGSTLRRLASKIAVRHIKSKLQSVFEPIQLGFGTKGGCEAAVHALRIYLSYDDCEIVVKIDVKNAFNSVNRDAMLTEVKNKIPELYQYLLTCYAEPSKLIYRSHELSSEVGCQQGDPLGPAIFSLAINPIIQNLKSKFNVWYLDDGTLGGDVDTVLSDLSDIKTNFENIGLELNFSKCELFIQKTSYGLDNLKSKLNFLAPNIKIVDRKSLCLLGSPIFEESFPDYITNTISKFQSHANCLLEISPHYALIILKFCLFVPKFTYVLRCSPFWKHPNLLSPIDDLVKTSLETILNIQLNEPSWLQASLPIRFGGLGIRKISSVASPAFLSSTHSTSRLIGNVLRALPTNYETAGLEDAKNAFQIACPGKEFPDNLKSQRSWDDIYCDLTYKSILSRSSGPDRARLLAVGTREAGHWLHAHPSPYTGTFLDPTSLRLATGLRLGVTVCTPHTCPCGTDVDRLGHHGLCCQKSAGRFSRHATLNDIIRRSLASINVPALLEPTGIVRDDGKRPDGVSLVPWSLGRMLVWDATCVDTLAPSHLQRTTSKAGAAAENAENLKVIKYGGLGREYNFVPFGVETLGPWGPSAHKLFAEIAKRLVDVTGDRKAGGFLAQRISIAIQRGNAASILGTMPRGPFLSLT

SEQ ID NO: 17733 - protein, 950 aa, Atethmia centrago
MHTATQSGDGTLNQNYICLHCDRSFQSKRGLNIHISKKHRLCISQNGPALNLDPVSLPAPVSDSPNSTPFHLYLSYLKNNVPVIKRVPRGARISVANHLSGLIKKCVESNQIVDWHNLFLFSYTTLHVKKDEATISLTQKIKNNCLTKTTSPFDSPKRGTLSRIKLIEGKIADGDLKGAARLLFTNDVLSPDTPDTLSALHSKHPPAPVIPYFFDSPTADQACLEIEGKDVIHAIISFKTGSAAGLDGISPQHLKDLTSYSVGDAGVQLICSITKLINFMFSGKINADIASLLFGANLIALTKKDGGVRPIAVGSTLRRLASKIAVRHIKSKLQSVFEPIQLGFGTKGGCEAAVHALRTYLSYDDCEIVVKIDVKNAFNSVNRDAMLTEVKNKIPELYQYLLTCYAEPSKLIYRSHELSSEVGCQQGDPLGPAIFSLAINPIIQNLKSKFNVWYLDDGTLGGDVDTVLSDLSDIKTNFENIGLELNFSKCELFIQKTSYGLDNLKSKLNFLAPNIKIVDRKSLCLLGSPIFEESFPDYITNTISKFQSHANCLLEISPHYALIILKFCLFVPKFTYVLRCSPFWKHPNLLSPIDDLVKTSLETILNIQLNEPSWLQASLPIRFGGLGIRKISSVASPAFLSSTHSTSRLIGNVLRALPTNYETAGLDDAKNAFQIACPGKEFPDNLKSQRSWDDIYCDLTYKSILSRSSGPDRARLLAVGTREAGLWLHAHPSPYTGTFLDPTSLRLATGLRLGVTVCTPHTCPCGTDVDRLGHHGLCCQKSAGRFSRHATLNDIIRRSLASINVPALLEPTGIVRDDGKRPDGVSLVPWSLGRMLVWDATCVDTLAPSHLQRTTSKAGAAAENAENLKVIKYVGLGREYNFVPFGVETLGPWGPSAHKLFAEIAKRLVDVTGDRKAGGFLAQRISIAIQRGNAASILGTMPRGPFLSLT

SEQ ID NO: 17734 - protein, 950 aa, Atethmia centrago
MHTATQSGDGTLNQNYICLHCDRSFQSKRGLNIHISKKHRLCISQNGPALNLDPVSLPAPVSDSPNSTPFHLYLSYLKNNVPVIKRVPRGARISVANHLSGLIKKCVESNQIVDWHNLFLFSYTTLHVKKDEATISLTQKIKNNCLTKTTSPFDSPKRGTLSRIKLIEGKIADGDLKGAARLLFTNDVLSPDTPDTLSALHSKHPPAPVIPYFFDSPTADQACLEIEGKDVIDAIISFKTGSAAGLDGISPQHLKDLTSYSVGDAGVQLICSITKLINFMFSGKINADIASLLFGANLIALTKKDGGVRPIAVGSTLRRLASKIAVRHIKSKLQSVFEPIQLGFGTKGGCEAAVHALRTYLSYDDCEIVVKIDVKNAFNSVNRDAMLTEVKNKIPELYQYLLTCYAEPSKLIYRSHELSSEVGCQQGDPLGPAIFSLAINPIIQNLKSKFNVWYLDDGTLGGDVDTVLSDLSDIKTNFENIGLELNFSKCELFIQKTSYGLDNLKSKLNFLAPNIKIVDRKSLCLLGSPIFEESFPDYITNTISKFQSHANCLLEISPHYALIILKFCLFVPKFTYVLRCSPFWKHPNLLSPIDDLVKTSLETILNIQLNEPSWLQASLPIRFGGLGIRKISSVASPAFLSSTHSTSRLIGNVLRALPTNYETAGLDDAKNAFQIACPGKEFPDNLKSQRSWDDIYCDLTYKSILSRSSGPDRARLLAVGTREAGLWLHAHPSPYTGTFLDPTSLRLATGLRLGVTVCTPHTCPCGTDVDRLGHHGLCCQKSAGRFSRHATLNDIIRRSLASINVPALLEPTGIVRDDGKRPDGVSLVPWSLGRMLVWDATCVDTLAPSHLQRTTSKAGAAAENAENLKVIKYVGLGREYNFVPFGVETLGPWGPSAHKLFAEIAKRLVDVTGDRKAGGFLAQRISIAIQRGNAASILGTMPRGPFLSLT

SEQ ID NO: 17735 - protein, 950 aa, Atethmia centrago
MHTATQSGDGTLNQNYICLHCDRSFQSKRGLNIHISKKHRLCISQNGPALNLDPVSLPAPVSDSPNSTPFHLYLSYLKNNVPVIKRVPRGARISVANHLSGLIKKCVESNQIVDWHNLFLFSYTTLHVKKDEATISLTQKIKNNCLTKTSSPFDSPKRGTLSRIKLIEGKIADGDLKGAARLLFTNDVLSPDTPDTLSALHSKHPPAPVIPYFFDSPTADQACLEIEGKDVIDAIISFKTGSAAGLDGISPQHLKDLTSYSVGDAGVQLICSITKLINFMFSGKINADIASLLFGANLIALTKKDGGVRPIAVGSTLRRLASKIAVRHIKSKLQSVFEPIQLGFGTKGGCEAAVHALRTYLSYDDCEIVVKIDVKNAFNSVNRDAMLTEVKNKIPELYQYLLTCYAEPSKLIYRSHELSSEVGCQQGDPLGPAIFSLAINPIIQNLKSKFNVWYLDDGTLGGDVDTVLSDLSDIKTNFENIGLELNFSKCELFIQKTSYGLDNLKSKLNFLAPNIKIVDRKSLCLLGSPIFEESFPDYITNTISKFQSHANCLLEISPHYALIILKFCLFVPKFTYVLRCSPFWKHPNLLSPIDDLVKTSLETILNIQLNEPSWLQASLPIRFGGLGIRKISSVASPAFLSSTHSTSRLIGNVLRALPTNYETAGLEDAKNAFQIACPAKEFPDNLKSQRSWDDIYCDLTYKSILSRSSGPDRARLLAVGTREAGHWLHAHPSPYTGTFLDPTSLRLATGLRLGVTVCTPHTCPCGTDVDRLGHHGLCCQKSAGRFSRHATLNDIIRRSLASINVPALLEPTGIVRDDGKRPDGVSLVPWSLGRMLVWDATCVDTLAPSHLQRTTSKAGAAAENAENLKVIKYGGLGREYNFVPFGVETLGPWGPSAHKLFAEIAKRLVDVTGDRKAGGFLAQRISIAIQRGNAASILGTMPREPFLSLT

SEQ ID NO: 17736 - protein, 671 aa, Atethmia centrago
MFSGKINADIASLLFGANLIALTKKDGGVRPIAVGSTLRRLASKIAVRHIKSKLQSVFEPIQLGFGTKGGCEAAVHALRTYLSYDDCEIVVKIDVKNAFNSVNRDAMLTEVKNKIPELYQYLLTCYAEPSKLIYRSHELSSEVGCQQGDPLGPAIFSLAINPIIQNLKSKFNVWYLDDGTLGGDVDTVLSDLSDIKTNFENIGLELNFSKCELFIQKTSYGLDNLKSKLNFLAPNIKIVNRKSLCLLGSPIFEESFPDYITNTISKFQSHANCLLEISPHYALIILKFCLFVPKFTYVLRCSPFWKHPNLLSPIDDLVKTSLETILNIQLNEPSWLQASLPIRFGGLGIRKISSVASPAFLSSTHSTSRLIGNVLRALHTNYETAGLEDAKNAFQIACPGKEFPDNLKSQRSWDDIYCDLTYKSILSRSSGPDRARLLAVGTREAGHWLHAHPSPYTGTFLDPTSLRLATGLRLGVTVCTPHTCPCGTDVDRLGHHGLCCQKSAGRFSRHATLNDIIRRSLASINVPALLEPTGIVRDDGKRPDGVSLVPWSLGRMLVWDATFVDTLAPSHLQRTTSKAGAAAENAENLKVIKYGGLGREYNFVPFGVETLGPWGPSAHKLFAEIAKRLVDVTGDRKAGGFLAQRISIAIQRGNAASILGTMPRGPFLSLT

SEQ ID NO: 17737 - protein, 950 aa, Atethmia centrago
MHTATQSGDGTLNQNYICLHCDRSFQSKRGLNIHISKKHRLCISQNGPALNLDPVSLPAPVSDSPNSTPFHLYLSYLKNNVPVIKRVPRGARISVANHLSGLIKKCVESNQIVDWHNLFLFSYTTLHVKTDEATISLTQKIKNNCLTKTTSPFDSPKRGTLSRIKLIEGKIADGDLKGAARLLFTNDVLSPDTPDTLSALHSKHPPGPVIPYFFDSPTADQACLEIEGKDVIDAIISFKTGSAAGLDGISPQHLKDLTSYSVGDAGVQLICSITKLINFMFSGKINADIASLLFGANLIALTKKDGGVRPIAVGSTLRRLASKIAVRHIKSKLQSVFEPIQLGFGTKGGCEAAVHALRTYLSYDDCEIVVKIDVKNAFNSVNRDAMLTEVKNKIPELYQYLLTCYAEPSKLIYRSHELSSEVGCQQGDPLGPAIFSLAINPIIQNLKSKFNVWYLDDGTLGGDVDTVLSDLSDIKTNLENIGLELNFSKCELFIQKTSYGLDNLKSKLNFLAPNIKIVDRKSLCLLGSPIFEESFPDYITNTISKFQSHANCLLEISPHYALIILKFCLFVPKFTYVLRCSPFWKHPNLLSPIDDLVKTSLETILNIQLNKPSWLQASLPIRFGGLGIRKISSVASPAFLSSTHSTSRLIGNVLRALPTNYETAGLDDAKNAFQIACPGKEFPDNLKSQRSWDDIYCDLTYKSILSRSSGPDRARLLAVGTREAGLWLHAHPSPYTGTFLDPTSLRLATGLRLGVTVCTPYTCPCGTDVDRLGHHGLCCQKSAGRFSRHATLNDIIRRSLASINVPALLEPTGIVRDDGKRPDGVSLVPWSLGRMLVWDATCVDTLAPSHLQRTTSKAGAAAENAENLKVIKYVGLGREYNFVPFGVETLGPWGPSAHKLFAEIAKRLVDVTGDRKAGGFLAQRISIAIQRGNAASILGTMPRGPFLSLT

SEQ ID NO: 17738 - protein, 950 aa, Atethmia centrago
MHTATQSGDGTLNQNYICLHCDRSFQSKRGLNIHISKKHRLCISQNGPALNLDPVSLPAPVSDSPNSTPFPLYLSYLKNNVPVIKRVPRGARISVANHLSGLIKKCVESNQIVDWHNLFLFSYTTLHVKKDEATISLTQKIKNNCLTKTSSPFDSPKRGTLSRIKLIEGKIADGDLKGAARLLFTNDVLSPDTPDTLSALHSKHPPAPVIPYFFDSPTADQACLEIEGKDVIDAIISFKTGSAAGLDGISPQHLKDLTSYSVGDAGVQLICSITKLINFMFSGKINADIASLLFGANLIALTKKDGGVRPIAVGSTLRRLASKIAVRHIKSKLQSVFEPIQLGFGTKGGCEAAVHALRTYLSYDDCEIVVKIDVKNAFNSVNRDAMLTEVKNKIPELYQYLLTCYAEPSKLIYRSHELSSEVGCQQGDPLGPAIFSLAINPIIQNLKSKFNVWYLDDGTLGGDVDTVLSDLSDIKTNFENIGLELNFSKCELFIQKTSYGLDNLKSKLNFLAPNIKIVDRKSLCLLGSPIFEESFPDYITNTISKFQSHANCLLEISPHYALIILKFCLFVPKFTYVLRCSPFWKHPNLLSPIDDLVKTSLETILNIQLNEPSWLQASLPIRFGGLGIRKISSVASPAFLSSTHSTSRLIGNVLRALPTNYETAGLEDAKNAFQIACPGKEFPDNLKSQRSWDDIYCDLTYKSILSRSSGPDRARLLAVGTREAGHWLHAHPSPYTGTFLDPTSLRLATGLRLGVTVCTPHTCPCGTDVDRLGHHGLCCQKSAGRFSRHATLNDIIRRSLASINVPALLEPTGIVRDDGKRPDGVSLVPWSLGRMLVWDATCVDTLAPSHLQRTTSKAGAAAENAENLKVIKYGGLGREYNFVPFGVETLGPWGPSAHKLFAEIAKRLVDVTGDRKAGGFLAQRISIAIQRGNAASILGTMPRGPFLSLT

SEQ ID NO: 17739 - protein, 950 aa, Atethmia centrago
MHTATQSGDGTLNQNYICLHCDRSFQSKRGLNIHISKKHRLCISQNGPALNLDPVSLPAPVSDSPNSTPFHLYLSYLKNNVPVIKRVPRGARISVANHLSGLIKKCVESNQIVDWHNLFLFSYTTLHVKKDEATISLTQKIKNNCLTKTSSPFDSPKRGTLSRIKLIEGKIADGDLKGAARLLFTNDVLSPDTPDTLSALHSKHPPAPVIPYFFDSPTADQACLEIEGKDVIDAIISFKTGSAAGLDGISPQHLKDLTSYSVGDAGVQLICSITKLINFMFSGKINADIASLLFGANLIALTKKDGGVRPIAVGSTLRRLASKIAVRHIKSKLQSVFEPIQLGFGTKGGCEAAVHALRTYLSYDDCEIVVKIDVKNAFNSVNRDAMLTEVKNKLPELYQYLLTCYAEPSKLIYRSHELSSEVGCQQGDPLGPAIFSLAINPIIQNLKSKFNVWYLDDGTLGGDVDTVLSDLSDIKTNFENIGLELNFSKCELFIQKTSYGLDNLKSKLNFLAPNIKIVDRKSLCLLGSPIFEESFPDYITNTISKFQSHANCLLEISPHYALIILKFCLFVPKFTYVLRCSPFWKHPNLLSPIDDLVKTSLETILNIQLNEPSWLQASLPIRFGGLGIRKISSVASPAFLSSTHSTSRLIGNVLRALPTNYETAGLEDAKNAFQIACPGKEFPDNLKSQRSWDDIYCDLTYKSILSRSSGPDRARLLAVGTREAGHWLHAHPSPYTGTFLDPTSLRLATGLRLGVTVCTPHTCPCGTDVDRLGHHGLCCQKSAGRFSRHATLNDIIRRSLASINVPALLEPTGIVRDDGKRPDGVSLVPWSLGRMLVWDATCVDTLAPSHLQRTTSKAGAAAENAENLKVIKYGGLGREYNFVPFGVETLGPWGPSAHKLFAEIAKRLVDVTGDRKAGGFLAQRISIAIQRGNAASILGTMPRGPFLSLT

SEQ ID NO: 17740 - protein, 950 aa, Atethmia centrago
MHTATQSGDGTLNQNYICLHCDRSFQSKRGLNIHISKKHRLCISQNGPALNLDPVSLPAPVSDSPNSTPFHLYLSYLKNNVPVIKRVPRGARISVANHLSGLIKKCVESNQIVDWHNLFLFSYTTLHVKKDEATISLTQKIKNNCLTKTSSPFDSPKRGTLSRIKLIEGKIADGDLKGAARLLFTNDVLSPDTPDTLSALHSKHPPAPVIPYFFDSPTADQACLEIEGKDVIDAIISFKTGSAAGLDGISPQHLKDLTSYSVGDAGVQLICSITKLINFMFSGKINADIASLLFGANLIALTKKDGGVRPIAVGSTLRRLASKIAVRHIKSKLQSVFEPIQLGFGTKGGCEAAVHALRTYLSYDDCEIVVKIDVKNAFNSVNRDAMLTEVKNKIPELYQYLLTCYAEPSKLIYRSHELSSEVGCQQGDPLGPAIFSLAINPIIQNLKSKFNVWYLDDGTLGGDVDTVLSDLSDIKTNFENIGLELNFSKCELFIQKTSYGLDNLKSKLNFLAPNIKIVDRKSLCLLGSPIFEESFPDYITNTISKFQSHANCLLEISPHYALIILKFCLFVPKLTYVLRCSPFWKHPNLLSPIDDLVKTSLETILNIQLNEPSWLQASLPIRFGGLGIRKISSVASPAFLSSTHSTSRLIGNVLRALPTNYETAGLEDAKNAFQIACPGKEFPDNLKSQRSWDDIYCDLTYKSILSRSSGPDRARLLAVGTREAGHWLHAHPSPYTGTFLDPTSLRLATGLRLGVTVCTPHTCPCGTDVDRLGHHGLCCQKSAGRFSRHATLNDIIRRSLASINVPALLEPTGIVRDDGKRPDGVSLVPWSLGRMLVWDATCVDTLAPSHLQRTTSKAGAAAENAENLKVIKYGGLGREYNFVPFGVETLGPWGPSAHKLFAEIAKRLVDVTGDRKAGGFLAQRISIAIQRGNAASIFGTMPRGPFLSLT

SEQ ID NO: 17741 - protein, 950 aa, Atethmia centrago
MHTATQSGDGTLNQNYICLHCDRSFQSKRGLNIHISKKHRLCISQNGPALNLDPVSLPAPVSDSPNSTPFHLYLSYLKNNVPVIKRVPRGARISVANHLSGLIKKCVESNQIVDWHNLFLFSYTTLHVKKDEATISLTQKIKNNCLTKTSSPFDSPKRGTLSRIKLIEGKIADGDLKGAARLLFTNDVLSPDTPDTLSALHSKHPPAPVIPYFFDSPTADQACLEIEGKDVIDAIISFKTGSAAGLDGISPQHLKDLTSYSVGDAGVQLICSITKLINFIFSGKINADIASLLFGANLIALTKKDGGVRPIAVGSTLRRLASKIAVRHIKSKLQSVFEPIQLGFGTKGGCEAAVHALRTYLSYDDCEIVVKIDVKNAFNSVNRDAMLTEVKNKIPELYQYLLTCYAEPSKLIYRSHELSSEVGCQQGDPLGPAIFSLAINPIIQNLKSKFNVWYLDDGTLGGDVDTVLSDLSDIKTNFENIGLELNFSKCELFIQKTSYGLDNLKSKLNFLAPNIKIVDRKSLCLLGSPIFEESFPDYITNTISKFQSHANCLLEISPHYALIILKFCLFVPKFTYVLRCSPFWKHPNLLSPIDDLVKTSLETILNIQLNEPSWLQASLPIRFGGLGIRKISSVASPAFLSSTHSTSRLIGNVLRALPTNYETAGLEDAKNAFQIACPGKEFPDNLKSQRSWDDIYCDLTYKSILSRSSGPDRARLLAVGTREAGHWLHAHPSPYTGTFLDPTSLRLATGLRLGVTVCTPHTCPCGTDVDRLGHHGLCCQKSAGRFSRHATLNDIIRRSLASINVPALLEPTGIVRDDGKRPDGVSLVPWSMGRMLVWDATCVDTLAPSHLQRTTSKAGAAAENAENLKVIKYGGLGREYNFVPFGVETLGPWGPSAHKLFAEIAKRLVDVTGDRKAGGFLAQRISIAIQRGNAASILGTMPRGPFLSLT

SEQ ID NO: 17742 - protein, 949 aa, Atethmia centrago
MHTATQSGDGTLNQNYICLHCDRSFQSKRGLNIHISKKHRLCISQNGPALNLDPVSLPAPVSDSPNSTPFHLYLSYLKNNVPVIKRVPRGARISVANHLSGLIKKCVESNQIVDWHNLFLFSYTTLHVKKDEATISLTQKIKNNCLTKTSSPFDSPKRGTLSRIKLIEGKIADGDLKGAARLFTNDVLSPDTPDTLSALHSKHPPAPVIPYFFDSPTADQACLEIEGKDVIDAIISFKTGSAAGLDGISPQHLKDLTSYSVGDAGVQLICSITKLINFMFSGKINADIASLLFGANLIALTKKDGGVRPIAVGSTLRRLASKIAVRHIKSKLQSVFEPIQLGFGTKGGCEAAVHALRTYLSYDDCEIVVKIDVKNAFNSVNRDAMLTEVKNKIPELYQYLLTCYAEPSKLIYRSHELSSEVGCQQGDPLGPAIFSLAINPIIQNLKSKFNVWYLDDGTLGGDVDTVLSDLSDIKTNFENIGLELNFSKCELFIQKTSYGLDNLKSKLNFLAPNIKIVDRKSLCLLGSPIFEESFPDYITNTISKFQSHANCLLEISPHYALIILKFCLFVPKFTYVLRCSPFWKHPNLLSPIDDLVKTSLETILNIQLNEPSWLQASLPIRFGGLGIRKISSVASPAFLSSTHSTSRLIGNVLRALPTNYETAGLEDAKNAFQIACPGKEFPDNLKSQRSWDDIYCDLTYKSILSRSSGPDRARLLAVGTREAGHWLHAHPSPYTGTFLDPTSLRLATGLRLGVTVCTPHTCPCGTDVDRLGHHGLCCQKSAGRFSRHATLNDIIRRSLASINVPALLEPTGIVRDDGKRPDGVSLVPWSLGRMLVWDATCVDTLAPSHLQRTTSKAGAAAENAENLKVIKYGGLGREYNFVPFGVETLGPWGPSAHKLFAEIAKRLVDVTGDRKAGGFLAQRISIAIQRGNAASILGTMPRGPFLSLT

SEQ ID NO: 17743 - protein, 950 aa, Atethmia centrago
MHTATQSGDGTLNQNYICLHCDRSFQSKRGLNIHISKKHRLCISQNGPALNLDPVSLPAPVSDSPNSTPFHLYLSYLKNNVPVIKRVPRGARISVANHLSGLIKKCVESNQIVDWHNLFLFSYTTLHVKKDEATISLTQKIKNNCLTKTSSPFDSPKRGTLSRIKLIEGKIADGDLKGAARLLFTNDVLSPDTPDTLSALHSKHPPAPVIPYFFDSPTADQACLEIEGKDVIDAIISFKTSSAAGLDGISPQHLKDLTSYSVGDAGVQLICSITKLINFMFSGKINADIASLLFGANLIALTKKDGGVRPIAVGSTLRRLASKIAVRHIKSKLQSVFEPIQLGFGTKGGCEAAVHALRTYLSYDDCEIVVKIDVKNAFNSVNRDAMLTEVKNKIPELYQYLLTCYAEPSKLIYRSHELSSEVGCQQGDPLGPAIFSLAINPIIQNLKSKFNVWYLDDGTLGGDVDTVLSDLSDIKTNFENIGLELNFSKCELFIQKTSYGLDNLKSKLNFLAPNIKIVDRKLLCLLGSPIFEESFPDYITNTISKFQSHANCLLEISPHYALIILKFCLFVPKFTYVLRCSPFWKHPNLLSPIDDLVKTSLETILNIQLNEPSWLQASLPIRFGGLGIRKISSVASPAFLSSTHSTSRLIGNVLRALPTNYETAGLEDAKNAFQIACPGKEFPDNLKSQRSWDDIYCDLTYKSILSRSSGPDRARLLAVGTREAGHWLHAHPSPYTGTFLDPTSLRLATGLRLGVTVCTPHTCPCGTDVDRLGHHGLCCQKSAGRFSRHATLNDIIRRSLASINVPALLEPTGIVRDDGKRPDGVSLVPWSLGRMLVWDATCVDTLAPSHLQRTTSKAGAAAENAENLKVIKYGGLGREYNFVPFGVETLGPWGPSAHKLFAEIAKRLVDVTGDRKAGGFLAQRISIAIQRGNAASILGTMPRGPFLSLT

SEQ ID NO: 17744 - protein, 950 aa, Atethmia centrago
MHTATQSGDGTLNQNYICLHCDRSFQSKRGLNIHISKKHRLCISQNGPALNLDPVSLPAPVSDSPNSTPFHLYLSYLKNNVPVIKRVPRGARISVANHLSGLIKKCVESNQIVDWHNLFLFSYTTLHVKKDEATISLTQKIKNNCLTKTSSPFDSPKRGTLSRIKLIEGKIADGDLKGAARLLFTNDVLSPDTPDTLSALHSKHPPAPVIPYFFDSPTADQACLEIEGKDVIDAIISFKTGSAAGLDGISPQHLKDLTSYSVGDAGVQLICSITKLINFIFSGKINADIASLLFGANLIALTKKDGGVRPIAVGSTLRRLASKIAVRHIKSKLQSVFEPIQLGFGTKGGCEAAVHALRTYLSYDDCEIVVKIDVKNAFNSVNRDAMLTEVKNKIPELYQYLLTCYAEPSKLIYRSHELSSEVGCQQGDPLGPAIFSLAINPIIQNLKSKFNVWYLDDGTLGGDVDTVLSDLSDIKTNFENIGLELNFSKCELFIQKTSYGLDNLKSKLNFLAPNIKIVDRKSLCLLGSPIFEESFPDYITNTISKFQSHANCLLEISPHYALIILKFCLFVPKFTYVLRCSPFWKHPNLLSPIDDLVKTSLETILNIQLNEPSWLQASLPIRFGGLGIRKISSVASPAFLSSTHSTSRLIGNVLRALPTNYETAGLEDAKNAFQIACPGKEFPDNLKSQRSWDDIYCDLTYKSILSRSSGPDRARLLAVGTREAGHWLHAHPSPYTGTFLDPTSLRLATGLRLGVTVCTPHTCPCGTDVDRLGHHGLCCQKSAGRFSRHATLNDIIRRSLASINVPALLEPTGIVRDDGKRPDGVSLVPWSLGRMLVWDATCVDTLAPSHLQRTTSKAGAAAENAENLKVIKYGGLGREYNFVPFGVETLGPWGPSAHKLFAEIAKRLVDVTGDRKAGGFLAQRISIAIQRGNAASILGTMPRGPFLSLT
